United States Patent Application Publication US 2012/0070457 A1 - sequence listing, part 8

SEQ ID NO: 47986 - DNA, 273 bp, Neisseria meningitidis
gtgtttgctgttattttcttttcgacattgggctgtattttagcatggataagagatattcctaaaataaaatcaaaaaaaattttggcaagatccttatatattataggaataataaatgtaataatcagctatgtattaattaaaaatatattggtttctgtttcggatggaggtggaataaaatatgttgcaatatatttatcaaatctttttttttggacagtattgatgtatgttcttgtgaaaagattatctaaaaagccaagctga

SEQ ID NO: 47987 - DNA, 558 bp, Neisseria meningitidis; identical to SEQ ID NO: 45978

SEQ ID NO: 47988 - DNA, 300 bp, Neisseria meningitidis; identical to SEQ ID NO: 44211

SEQ ID NO: 47989 - DNA, 909 bp, Neisseria meningitidis; identical to SEQ ID NO: 44959

SEQ ID NO: 47990 - DNA, 1146 bp, Neisseria meningitidis
atgaatactcctccttttgtctgttggattttttgcaaggtcatcgacaatttcggcgacatcggcgtttcgtggcggctcgcccgtgttttgcaccgcgaactcggttggcaggtgcatttgtggacggacgatgtatccgccttacgtgcgctttgccctgatttgcccgatgttccctgcgttcatcaggatattcatgtccgcacttggcattccgatgcggcagatattgataccgcgcctgttcccgatgtcgtcatcgaaacttttgcctgcgacctgcccgaaaatgtgctgcacattatccgccgacacaagccgctttggctgaattgggaatatttgagcgcggaggaaagcaatgaaaggctgcatctgatgccttcgccgcaggagggtgttcaaaaatatttttggtttatgggtttcagcgaaaaaagcggcgggttgatacgcgaacgcgattactgcgaagccgtccgtttcgatagcgaagccctgcgtcagcggctgatgcttcccgaaaaaaacgcccccgaatggctgcttttcggctatcggagcgatgtttgggcaaagtggctggaaatgtggcgacaggcaggcagcccgatgacactgttgctggcggggacgcaaatcatcgacagcctcaaacaaagcggcgttattccgcaagatgccctgcaaaacgacggcgatgtttttcagacggcatccgtccgcctcgtcaaaatccctttcgtgccgcaacaggacttcgacaaactgctgcacctcgccgactgcgccgtgatacgcggcgaagacagtttcgtgcgcgcccagcttgccggcaaacccttcttttggcacatctacccgcaagacgagaatgtccatctcgacaaactccacgccttttgggataaggcacacggtttctacacgcccgaaaccgtgtcggcacaccgccgtctttcggacgacctcaacggcggaggggctttatccgccacgcaacgcctcgaatgttggcaaatcctgcaacaacatcaaaacggctggcggcaaggcgcggaggattggagccgttatcttttcgggcagccttccgcatccgaaaaactcgccgcctttgtttcaaagcatcaaaaaatacgc

SEQ ID NO: 47991 - DNA, 276 bp, Neisseria meningitidis
atgtcccgaaacctgcttgtccgctggcttgtcgtctgcctcatccctttggcgacacttgccgttttcgtcgccaatccgcccgaagacaaaccccagcatctgatcaacggcatcatccttgcctgcgaagcgacgtttttgttcaaattcgtccttttcgacaccatcaagcatcatttgaaacaagagtttgatttgaaacgtcaaaccatgttgctgtttattccgattgttttgctggttgtgtatttgttccactatttcggcgcgttt

SEQ ID NO: 47992 - DNA, 228 bp, Neisseria meningitidis; identical to SEQ ID NO: 44482

SEQ ID NO: 47993 - DNA, 1662 bp, Neisseria meningitidis
atgctgacctataccccgcccgatgcccgcccgcccgccaaaacccacgaaaagccgtggctgttgctgttgatggcgtttgcctggttgtggccgggtgtattttcacatgatttatggaatcctgccgaacctgccgtctataccgccgtcgaagcactggcaggcagccccacccccttggttgcccatctgttcgggcatgccgatttcggcataccacccgtgtatctttgggttgccgccgcgttcaaacatttgctgtcgccgtgggcagccgacccgtatgatgccgcacgctttgcaggcgtgtttttcgccgttgtcgggctgacttcctgcggctttgctggcttcaactttttgggcagacaccacgggcgcagcgtcgtcctgattctcatcggctgtatcgggctgattccgaccgtacactttctcaaccccgctgccgccgcctttgccgccgccggactggtgctgcacggttattctttggctcgccggcgcgtgattgccgcctcttttctgctcggtacgggctggacgctgatgtcgttggcagcagcttatccggcagcatttgccctgatgctgcccttgcccgtactgatgtttttccgtccgtggcaaagcaggcgtttgatgttgacggcagtcgcctcacttgcctttgccctgccgcttatgaccgtttacccgctgctcttggcaaaaacgcagcccgcgctgttcgcgcaatggctcgactatcacgttttcggtacgttcggcggcgtgcggcacgttcagacggcattcagtttgttttactatctgaaaaacctgctttggtttgcattgcccgcgctgccgctggcggtttggacggtttgccgcacgcgcctgttttcgaccgactgggggattttgggcgtcgtctggatgcttgccgttttggtgctgcttgccgtcaatccgcagcgttttcaggataacctcgtctggctgcttccgccgcttgccctgttcggcgcggcgcaactggacagcctgaggcgcggcgcggcggcgtttgtcaactggttcggcattatggcgttcggactgtttgccgtgttcatgtggacgggctttttcgccatgaattacggctggcccgccaagcttgccgaacgcgccgcctatttcagcccgtattatgttcctgatatcgatcccattccgatggcggttgccgtactgttcacacccttgtggctgtgggcgattacccggaaaaacatacgcggcaggcaggcggttaccaactgggcggcaggcgttaccctgacctgggctttgctgatgacgctgttcctgccgtggctggacgcggcgaaaagccacgcgccggtcgtccggagtatggaggcatcgctttccccggaattaaaacgggagctttcagacggcatcgagtgtatcgacataggcggcggcgacctgcacacgcggattgtttggacgcagtacggcacattgccgcaccgcgtcggcgatgtacaatgccgctaccgtatcgtccgcttgccccaaaatgcggatgcgtcgcaaggctggcagacggtttggcagggtgcgcgcccgcgcaacaaagacagtaagttcgcactgatacggaaaatcggggaaaatatataa

SEQ ID NO: 47994 - DNA, 822 bp, Neisseria meningitidis
gtgaaccgaactgccttctgctgcctttctttgaccgccgccctgattctgaccgcctgcagcagcggaggcggcggtgtcgccgccgacatcggcgcggggcttgccgatgcactaaccgcaccgctcgaccataaagacaaaagtttgcagtctttgacgctggatcagtccgtcaggaaaaacgagaaactgaagctggcggcacaaggtgcggaaaaaacttatggaaacggcgacagcctcaatacgggcaaattgaagaacgacaaggtcagccgcttcgactttatccgtcaaatcgaagtggacgggcagctcattaccttggagagcggagagttccaaatatacaaacaggaccactccgccgtcgttgccctacagattgaaaaaatcaacaaccccgacaaaatcgacagcctgataaaccaacgctccttccttgtcagcggtttgggtggagaacataccgccttcaaccaactgcccagcggcaaagccgagtatcacggcaaagcattcagctccgacgacccgaacggcaggctgcactactccattgattttaccaaaaaacagggttacggcagaatcgaacacctgaaaacgcccgagcagaatgtcgagcttgcctccgccgaactcaaagcagatgaaaaatcacacgccgtcattttgggcgacacgcgctacggcggcgaagaaaaaggcacttaccacctcgcccttttcggcgaccgcgcccaagaaatcgccggctcggcaaccgtgaagataagggaaaaggttcacgaaatcggcatcgccggcaaacagtag

SEQ ID NO: 47995 - DNA, 1041 bp, Neisseria meningitidis
atgaaagcaatggtttatcacggcgcaaacgacatccgttttgaagaaaaaccccgtccgcagattatcgatccgaccgatgcggtggtgaaaatcgtcaaaaccacgatttgcggtaccgatttgggtatttggaaaggcaaaaaaaccgaagtcgccgacggtcgtattctcggtcatgaaggcatcggtattgtagaagaagtcggcgaggctgtaaaaaacatcaaagtcggcgataaagtcattatttcatgcgtcagcaaatgctgtacttgcgacaactgcaaaatccaactttattcgcattgctgcaacggcggctggattttgggctacatgattgacggcacgcaggcagaatacgtccgcacgccttatgccgacaacagcctcgtgccgctgcccgacaacgtcaacgaagaagtcgccctgttgttgagcgacgctttgccgaccgcacacgaaatcggcgtgcaatacggcgatgtcaaacccggcgacaccgtattcatcgcaggtgccgctcctgtcggtatgtccgccttgttgaccgcccaactgtatagccccgccgccattatcgtgtgcgatatggacgaaaaccgtttgaaactggcgaaagagttgggcgcgacccataccatcagccccgcctcaggcgatgtctccaaacaagtttttgccattgtcggcgaagacggcgtagattgtgccatcgaagccgtcggtattcctgcgacttggaatatgtgccaagacatcgtgaaaccgggcggtcatatcgccgttgtcggcgtacacggccaatccgttgatttcaaactggaaaaactctggattaaaaacctcgccatcactaccggtttggtcaatgccaatactaccgaaatgctgatgaaggcaatttccagcagctcagtcgattacaccaaaatgatgacccaccatttcaaattcagcgaattggaaaaagcctacgacgtgttcaaacacgccgccgaaaaccaagcgatgaaagtggttttggaagcggattaa

SEQ ID NO: 47996 - DNA, 660 bp, Neisseria meningitidis
atgggcaggcatttcgggcgcaggcgttttttgacagttgccgccgttgcggcggcgggcgcggcggtttctttcctgccgaatccttttgccgccgatgatgaaaaacgcaataaagatgaaaaacgcaatgaaaatgtgttcttctggaaaggtgtcgcgctgggttccggtgcggagctgcgcctgttcggtgtggacgacagacaggcggcggatttggtcaacaaggttttggcggaagtggcgcgtttggaaaaaatgttcagcctttaccgtgaagacagcctgatcagccgcctgaacagggacggttatctgacttcgccgtcggcggattttttggaactgttgagcctgtgccgcgatattcacgcgctgacggacggcgcgttcgatccgacagtgcaggcgttgtggaaactgtatgccgattattttgccgcccgtcccgatgcggaaacgccgcctcctcaaaacagcgtgaaggaagccctgaaacgggtcggcttcggcaaagtctcgtttgacgaccgtgaaatccgttttgccgaaaagggtatgggtttgtccttgaacggcatcgcgcaagtctatagtggattaacaaaaaccagtacggcgttgcctcgccttagctcaaagagaacgattctctaa

SEQ ID NO: 47997 - DNA, 1143 bp, Neisseria meningitidis
atgcagaaatggcaaaccgagctttattccacaccgctttggctttgtctgacaccgaaaagcgcggtcaaagtcttgctgctgattacggcgatgattacgctggtgttaaccgaaatgcggctgaatgtgttgagtacctttatgtccaaagggctttacgactcgatgcaggatttgaatgcttcggcattttggatgtttgccgcaatgaacgcgggcgtggtgctgatacgggcgtttaacaatgtcgtcaacgacttcctcgatcaaggcttggcgattaaatggtcggagcagctcaatgaagtgctgacgacgcgctggcttgccgacaaaaattactaccgcctgcaaatgcgccgccacgcgccggacaacatcgaccaacgtatccaacaggacgcgcaggatttcatcgcttcgaccatcgaatttgtacgcggcatggtcaattcggtcgttacctctttggaatttgccgttgttttgtggggcttggctggcatcctgaccgtgttcggcttcgacattccgcgcggcattgtttggctcgtctttatttttgtgattttggcgacctttatcgcgatgtggataggcaaccccttgattcgttacaactatgaaaacgaaaaactcaacggcgactaccgttattccctcatccgcgtacgcgaccacgccgaaagcgtagcgttttacaacggcgaacaacacgaacacggccggctttccgaccgctttaaagccattatccgcaaccgttggcgcatcgcgcggcaaagcgtctgcttaagcggctttaacgatatgttcaccaacggcatcaaactcttccccattattttgcaagcgccgcgcctgtttgccggacaaatcaaaatcggcgacatccagcagaccgtccaagcctttgcgcgactgcaaaacgcgctatcttttttccggatgttctacaacaaattcaccgcctaccgcgcccgattggagcgtctgtacggctttttgctgagtaccgaagaacaacacagcgcgcggcaacccgagattagcgaagtttcagacggcattgcactggaatgtaaggcggcggcagcttttgcacgaattggcggcagcttttgcaccgccgaagcgtag

SEQ ID NO: 47998 - DNA, 612 bp, Neisseria meningitidis; identical to SEQ ID NO: 40039

SEQ ID NO: 47999 - DNA, 1083 bp, Neisseria meningitidis
atgaaaatcatcctgaccacttctatgtcgggcttgggcggcacggaaaccgccaccgtccgcctcgggcggctgctcaaacggcgcgggcacgacatcatccttgcttcttcggacgggccttttgtcggagaggcgcaagcatcgggcatccgttggcagccggttgatttttaccggggcgggcttgccggctacctcaaaagcacctttgcctacgcccggatgctgcgccgcgaacaacccgacatcatcgactgccaaatggcgcgcgttgttccagcctgcgcccttgccgccaaaatcgtttcgccgaaaaccaaaatcatctaccactcgcacggtttggacgcggcaacctaccccaaaatcgccaagctcttcgacaagctgggcgtgtacatcatcggcaactgtaaacacgagcgcgaaaaactcatccgccacggcttccccgccggccggattgcctacgcctacaacgcactccccccccccccccccccccccgaatttcatttccggaaaaccaaaaaagaatgcgccgtactcggcacactttcccgtttggacaccgtccgcgccgtgcatctgatgttggatattttgaagaaaatggttgaccgcggtatgcctgtacgcctcaacgttgcaggtatcggcgaagaaatggacaacctcaaagcccaagccaaacgtttgggcattgaagacaaagtcaccttcctcggcggcgtccgcgatttgaccggctacttcaaagaagtcgatattttggtgaacacgccgcattgcgtgggcgatcacggcgcaggtgtcggcaacaatattttggaagccggcctttacgacacgcctgtcgtgacctacaacatggcgggcatttccgaaatggtcattaccggccaaaccggctactgcattcctttcggcgacgacgaagcatttatcgaagccgtcgatacactcatcaagcatccagagttgcgcagccaaatgggcaaagccctgcacaaacatgtcgaaaccttatgctccgacgacgaaatctaccgcaccaccatggctgcgtacgaaatgtaa

SEQ ID NO: 48000 - DNA, 1266 bp, Neisseria meningitidis
atgcaacaaattaaatttattgacttattttccggaatgagtggcatcaggaaaggattcgaacaagcctgtcggaaacagtcggttgcttgcgaatgtgtttttacttcagaaatcaaaccggcagctttggaagtattgaagcaaaactaccctgatgaagtgccgtatggagacataacgaaaattgaaacaggggatattcccgattttgacattctgttggcaggcttcccttgtcaggctttttctttcgccggaaaaagattgggctttgaagatacacggggaacgcttttctttgatgtggcaaggattttaaaagcaaaaaaaccaaaaggttttattttggaaaatgtggaaggattggtgacacacgatagaaaagattcgacacaaaaagggcgcaccctgaccgttattttggaaaccttggaagcattgggctactatgtttcttggaaagttttaaatgcaaaagatttcggcattccccaaaacaggaagcgcatttatctgacaggcagtttgaaatccaaacccgacttatctttcgaaacaagcccaagtccgaaattaaaaaatattttggaatcgggactgcctactgaaagcagccctttcatcaagaaattgctaaaaaaatttcccccgtccgaactgtacggaaaatcagtaaaagacaaacggggagggaaaaacaatattcacagttgggatattgaattaaaaggcgcagtaaccgaagaagagaagcaattgttaaatatccttctaaaagaacggaggaaaaaatgggcttcagaaatcggcatagattggatggatgggatgcctttgacaaaagcgcaaatttcaactttctataaacaccccgatctccaaaatattttggacagcctgacagataaaggctatttggttttagagcatccgaaacaaaaaattggcgggcaaagaatcaaagatgaatccctgcccaaaggctacaatattgtttcaggtaaaaaatcttttgaaatcaataaaatattagatccaaacgatgttgcgccaaccttggttgcaatggatatggagcaccttttcgtcgttgacaacggcggtttgcgtacacttaccggaaaagaagggttgcgcttattcggctatccggacgattattcgtttgatattcccaaaaaagacagatgcgatttattgggtaataccgttgccgtccctgtgattaaggcggtatctgaaagacttctgcatactttataa

SEQ ID NO: 48001 - DNA, 1002 bp, Neisseria meningitidis
atgcacacaccacttacctatattgaccttttctcaggagcaggaggcctatccttgggttttgaacaagccggattccaacaattgctttctgttgaaatggagtctgattattgtcagacttaccgtaccaacttcccccatcatcaattactgcaaaaagatttaaccacactaaccgaacaagatttaatcaattgtcttaacggacaagcagttgatttgattattggaggaccaccttgtcaaggttttagtatggcaggaaagattggacggacatttacagatgacccacgcaaccatttatttaaagagtttgtccgaatagttaaaattgtccaaccatatttttttgttatggaaaatgtagcgcgactctatacacacaattcaggtaaaacacgtattgagattattcaagcatttcagaatatcggttattcggtggaatgtaagatactgagtgcagccgatttcggtgttcctcagatacgtagccgagtgatatttatcgggaggagggataaaggcaaaatttcctttcccgaacctttgcagatttcccatcagactgttggatcagcaataggacattttccaaaactggctgctggcgaaagcaatccacacgttgcaaatcatgaagctatgaatcattcggcacaaatgttagaaaaaatggcatttgttaaaaatggaggtaaccgtaacgatattcctgaaccattacgtccgaaaacaggtgatatccgtaaatacatccgttacaacagcaacaaaccagccgtttgtattacaggagatatgcgcaaagtttttcactatgaacagaatcgggcgttaaccgttcgtgaattagctgccttacaatctttccctgataattttattttttgcggcagcaaaattgcccagcagcagcaggttggtaacgccgtaccgcctttattggcaaaagctattgctgaaagtattttaaaaatgagtgaaaatgaataa

SEQ ID NO: 48002 - DNA, 3201 bp, Neisseria meningitidis
atgcgaacgaccccaaccttccctacaaaaactttcaaaccggctgccatggcgttagctgttgcaacaacactttctgcctgcttaggcggcggcggcggcacttctgcgcccgacttcaatgcaggcggcaccggtatcggcagcaacagcagagcaacaacagcgaaatcagcagcagtatcttacgccggtatcaagaacgaaatgtgcaaagacagaagcatgctctgtgccggtcgggatgacgttgcggttacagacagggatgccaaaatcaacccccccccgaatctgcataccggagactttacaaacccaaatgacgcatacaagaatttgatcaacctcaaacctgcaattgaagcaggctatacaggacgcggggtagaggtaggtatcgtcgatacaggcgaatccgtcggcagcatatcctttcccgaactgtatggcagaaaagaacacggctataacgaaaattacaaaaactatacggcgtatatgcggaaggaagcgcctgaagacggaggcggtaaagacattaaagcttctttcgacgatgaggccgttatagagactgaagcaaagccgacggatatccgccacgtaaaagaaatcggacacatcgatgtggtctcccatattattggcgggcgttccgtggacggcagacctgcaggcggtattgcgcccgatgcgacgctacacataatgaatacgcatgatggaaccaagaacgaaataatgtctgcagccatccgcaatgcatgggtcaagctgggcgaacgtggcgtgcgcatcgtcaataacagttttggaacaacatcgagggcaggcactgccgaccatttccaaatagccaattcggaggagcagtaccgccaagcgttgctcgcctattccggcggtgataaaacagacgagggtatccgcctgatgcaacagagcgattacggcaacttgtcctaccacatccgtaataaaaacatgcttttcattttttcggcaagcaatgacgcacaagctcagcccaacacactgaccctattgccattttatgaaaaagatgctcaaaaaggcattatcacagtcgcaggcgtagaccgcagtggagaaaagttcaatggctccaaccattgcggaattactgccatgtggtgcctatcggcaccctatgaagcaagcgtccgtttcacccgtacaaacccgattcaaattgccggaacatccttttccgcacccatcgtaaccggcacggcggctctgctgctgcagaaatacccgtggatgagcaacgacaacctgcgtaccacgctgctgacaacggctcaggacatcggtgcagtcggcgtggacagcaagttcggctggggactgctggatgcgggtaaggccatgaacggacccgcgtcctttccgttcggcgactttaccgccgatacgaaaggtacatccgatattgcctactccttccgtaacgacatttcaggcacgggcggcctgatcaaaaaaggcggcagccaactgcaactgcacggcaacaacacctatacgggcaaaaccattatcgaaggcggttcgctggtgttgtacggcaacaacaaatcggatatgcgcgtcgaaaccaaaggtgcgctgatttataacggggcggcatccggcggtagcctgaacagcgacggcattgtctatctggcagataccgaccgatccggcgcaaacgaaaccgtgcacatcaaaggcgatctgcagctgggcggcgaaggtacgctgtacacacgtttgggcaaactgctgaaagtggacggtacggcgatgaccggcggcaagctgtacatgtcggcacgcggcaaaggggcaggctatctcaaccgtaccggacaacgtgttcccttcctgagtgccgccaaaatcgggcgggattattctttcttcacaaacatcgaaaccgacggtggtctgctggcttccctcgacagcgtcgaaaaaacagcgggcagtgaaggcgacacgctgtcctattatgtccgtcgcggcaatgcggcacggactgcttcggcagcggcacattccgcgcccgccggtctgaaacacgccgtagaacagggcggcagcaatctggaaaacctgatggtcgaactggatgcctccgaatcatccgcaacacccgagacggttgaaactgcggccgccgaccgcacagatatgccgggcatccgcccctacggcgcaactttccgcgcagcggcagccgtacagcatgcgaatgccgccgacggtgtacgcatcttcaacagtctcgccgctaccgtctatgccgacagtaccgccgcccatgccgatatgcagggacgccggctgaaagccgtatcggacgggttggaccacaacgctacgggtctgcgcgtcatcgcgcaaacccaacaggacggtggaacgtgggaacagggcggtgttgaaggcaaaatgcgcggcagtacccaaaccgtcggcattgccgcgaaaaccggcgaaaatacgacagcagccgccacactgggcatgggacacagcacatggagcgaaaacagtgcaaatgcaaaaaccgacagcattagtctgtttgcaggcatacggcacgatgcgggcgatatcggctatctcaaaggcctgttctcctacggacgctacaaaaacagcatcagccgcagcaccggtgcggacgaacatgcggaaggcagcgtcaacggcacgctgatgcagctgggcgcactgggcggtgtcaacgttccgtttgccgcaacgggagatttgacggtcgaaggcggtctgcgctacgacctgctcaaacaggatgcattcgccgaaaaaggcagtgctttgggctggagcggcaacagcctcactgaaggcacactggtcggactcgcgggtctgaagctgtcgcaacccttgagcgataaagccgtcctgtttgcaacggcgggcgtggaacgcgacctgaacggacgcgactacacggtaacgggcggctttaccggcgcgactgcagcaaccggcaagacgggggcacgcaatatgccgcacacccgcctggttgccggtctgggcgcggatgtcgaattcggcaacggctggaacggcttggcacgttacagctacgccggttccaaacagtacggcaaccacagcggacgagtcggcgtaggctaccggttctga

SEQ ID NO: 48003 - DNA, 777 bp, Neisseria meningitidis
atgaatagacccaagcaacccttcttccgtcccgaagtcgccgttgcccgccaaaccagcctgacgggtaaagtgattctgacacgaccgttgtcattttccctatggacgacatttgcatcgatatctgcgttattgattatcctgtttttgatatttggtaactatacgcgaaagacaacagcggagggacaaattttacctgcatcaggcgtaatcagggtgtatgcaccggatacggggacaattacagcgaaattcgtggaagatggagaaaaggttaaggctggcgacaagctatttgcgctttcgacctcacgtttcggcgcaggaggtagcgtgcagcagcagttgaaaacggaggcagttttgaagaaaacgttggcagaacaggaactgggtcgtctgaagctgatacacgggaatgaaacgcgcagccttaaagcaactgtcgaacgtttggaaaaccagaaactccatatttcgcaacagatagacggtcagaaaaggcgcattagacttgcggaatcagtggcaaaaacggcactgggcagacaggaattgtcgggattgggcatggtatcctccgatttggcgaagagcaacgaacctgtttatctcgtgaaaataaaacccgacaaaccaaccatcactgcatacggtgaggaaaaaccgctgcaaatcggcatgacgttggaagcagacatcctgcacgagaaacggcggctgtacgaatgggtattggagctgatttatagtatgtcgggcaaactgtaa

SEQ ID NO: 48004 - DNA, 750 bp, Neisseria meningitidis; identical to SEQ ID NO: 45151

SEQ ID NO: 48005 - DNA, 1578 bp, Neisseria meningitidis
atgaataaatttttcaaacgcctgtttgacattattgcctccgcctcagggctaattatcctgtcgcctgtgtttttgattttggtgtacctcatccgcaaaaacttaggctcgcccgtgttcttcatccaagagcggccgggcaaggatggcaggccgtttaaaatgattaaattccgctccatgcgcgatgcaatcgataaagacggcaacccgctgccggacagcgaacgcctgactgatttcggcaaaaaattacgcgccaccagtttggacgaacttcctgaattatggaatgtcttaaaaggcgagatgagcctggtcggccctcgtccgcttttgatgggctacctgccgctttacaacgaatttcaaaaccgccgccacgaaatgaaaccgggcgtgaccggttgggcgcaagtcaatggccgcaacgccatttcatgggatgaaaaattcgcccacgatgtttggtacatcgacaacttcagcttttggctggatatcaaaattttgttcctgacggttaaaaaagtcttcgtcaaagaaggcatctcagccgaaggagaagccaccatgccttatttcacgggtaataaaactgatgaaaaaaataatatactgattctgtcggcaggtcgccgtgtcgaattggtgcaggacttccaaaccgaagccgcacgtttttcagacggcatcagcgtttttgccactgacctcaacccccgcatgtcttctgcctgccatgtttcggacggttcatttgaagtgccgccgattagtgccgattcatatatcgacagcattttcaatctggcggtacgcgaaaatatcggtttaatcatcccaaccatagacaccgaactgcaaaagctggcagacgagcgcgaacgctttgaagcggcaagtgtccacatcgtcgtttccgattcggacttcatcgcacaatgccgcgacaaacggaaaaccgccaccttgtttgcccgctacggcatacgctcacccgaaatttacgaccgcaagaagttggttttcccttgcttcgccaagccttatgacggcagccgcgccatcggtgcaaaacggattgacacacctgccgacctgacaccggaagtcttggcagacaccaaattaatgttctgtcagtttatcgacatcgaaaataaattttccgagtttaccgtcgatatgtattacgaccgtcaatgccgtctgaaatgcgccatcccgcgaaaacgcttggaagtgcgctccggcgaaatcagcaaaggcgttacctgcaaaaacagcctctaccaaacgctgctggaaaaaatgtcggtattgcagggcgcgcgcggctgtatcacggcgcagttcttctacaacgaagaaaccggcgaattctacggcgtggaaatcaacccccgcttcggcggtggcttcccgctgacgtatgccgcaggcggcaattatccgagccggttgatgcgcgaatacctcggcgacgaagaaatcccgttttcagacgactgggaaaacaacctcattatgttgcgctacgatgccaaggtcttggttcatgaaaacgattaa

SEQ ID NO: 48006 - DNA, 966 bp, Neisseria meningitidis
atgaatccggcaatgattgagcgtcttaaggcagtcgagaatcaggcggaagcaatgggacgcggcgcacgctctgcatatcttaagcagcaggcgcaggaattgggcatcagccttgccacgctataccgcaagctggaggcggtcagcatcaagccgacgcgcaaacggcgcagcgatgcgggcaagacggagcttaaaccggaagaagccaaattgatttcggcggttttggtggaggcgatgaggcgcaacggcaagcggttgatgtcggtgcggcaggcggtggaaatgctgcgcgccaacggaaaaatcgaggcggcgcggattgatggggaaaccggggaagtcatcccgtccgtccgcactgctttccgcccgctggcaagacatcgacctcaccgcccggttatggcacatccccgccgccgacatgaagaccaaacacccctttaccgtcccactgtcggactgggcggtagaaatactccgagagctgcacacacagaccggcgacaacatccaccttttcccaggcatccgcccacggcgcaaacccgccccccatccgaccacatcagcatcaaattcgcccacaacgccatccgacgactgggctatgacggcagcacccccggcaaatccaaacacacaatgcacggattccgccacctcttcaccaacatcagcctgaccgccggaaaagacaccctcacaacagacctcgccctcggccacatcagccgcgccgccctccaacgcgccggcttctcaagcctgcaccactacctgaccgccgacagctaccgcctccaagagcggcgcgaactcgccgaatggtacagccgccgccaccgccaagcatacgaagccgccgccaaaaccccgcaaaacaaaaaaccgcctgaaaaaaattcagacggcatcctgcccaaaacacttgcaataaaacctaaaaggtattaa

SEQ ID NO: 48007 - DNA, 1014 bp, Neisseria meningitidis
atgattttctccatcatcgtccctatttacaatgtggaaaaatacctccgctgctgcgtggattccgtgcttgccgaaaattttgccgattatgaaatgattttggtcgatgacggttcgccggacggctgcgggaagatttgcgacgaatatgcaggcaaatatccgcatataaaagtgattcatcaagaaaacggcgggctgtcggatgcccgcaacgccggtatccgggcggcaaaaggcgattacctaatctttttggacagcgacgactattgggccgacaccaatcgttcaaaaaagcgcgggggggggattctctttgatttacaacaacttgcagacaaaaaggttgatttgatcctgcatccctcgtccttcaattaccgcgacatccccaaaggggcggacttttcggataatgattttgtccgccattttgaaacgctggtggaggggcggtactatatcgccaacgcgtggacaaaaatcgtcaggcgggaaataatcatcaaaaacaatctgtttttcccaaaaggatacattcacgaggatttcccgtacagtttgcaattggcgcgttttatcaagacttttgccttttacgataaccctttttaccagtaccgcgttctcggcggctctatcagccacaacatcaaatacaaaaatttcagcgatgtgctgacgcatctcgaccggggtgtggattttttagtcgaaaacaaaaattcccccatctacggcggtttgcaaaaatttgtcttcgacaatatcggctatctgaggtctatattggtaaggctttatttttccaaaaacattatcctcatctaccggaaatatttttcatttaaagaaaaatgcagaaagatattcggcgcgaaggcaatccgtccggtttttatcgggaagaccgcattcatcataggattgccgatattgcgcctgctcgtaccgcctatgctgtacccggcaatcaaggccgtttatcagaaatttttttcggaataa

SEQ ID NO: 48008 - DNA, 1974 bp, Neisseria meningitidis
atgctgccaacccaacccaacccaacccaacccaacccaacccaacccaacccaacccaacccaacccaacccaacccaacccaagcccctatctaatcgacacagccggggtgaacaccgaggcaatctacacttcagacggcattaccgccaactctacccaactcgaacagctcaaaaaactgtttcccgcctgttttgacgcagacggaaatttccttatcgacagattacaagccgaaattgcgccacagaccgacatcggacgcgaattttacgaaatgaactggctgggcaaatcatatgctcgcctgcttcgcaacctgccgcccgaaaccctgataagtgaagacaagacgcacaacgccaaacccgaaaatgcaggcagccaaaacctactgattcgtggcgacaatctagaagtgttgaaacacttaaaaaacgcctacacaaacagcgtgaagatgatttacatcgacccgccctacaacaccggatcagacggctttgtctatcaggacgaccgcaaattcacaccagccgaacttgcctgcttagccaatattgacgaagacgaagccgcgcggattttagatttcaccgacaaaggctcaaactcgcacagtgcatggttgacctttatgtatccgcgcctgtatatcgcccgcgaactgttaaaggacgacggcgtgatttttatctcgattgacgataacgaagcggcgcagttgaagttgttgtgtgatgaagtgtttggggaagggaattttattaaagatttaattgttaatacatcagaaggtggtggtaatgcaaaatatgttgtaaatgggcatgaaactgttttagtttatgcgaaagatattactcattttgacaatctaaaaagaccaaaagatatacgcggcaaaaaaattgtaatcaatgatgaattatattggatacaggaagatgccgttcgcgaacagtttggcaaatatgggaacttgcattacgaagatattattgaaataaaaggaattgagtttaaaaacaaaattgataaagatattgaaaataatgaatatatcttaattccgaagtcttatgggaaaacaattattggaaaacttagaaaagtatccgatgatttttccaaatttcatagcatcttaaatattggaaatataagtaaaaatcttactaaagatggtattcgtgaattagaagagttgtttgaaactggaaaaggttattctccttttgaaacaccaaaaccattagatttattgaaaagattagttctttctgcaactttcaagggaaatcaaactgacctaatcctagacttcttcgcaggcagcggcacaaccgcccacgccgtgatgcagcttaacgccgaaggacaaaacggtaaccgccgctatatctgtgtacagcttcccgaaaaaaccgctgaaaaatccgaagcccgtaaagcaggctacccgaccatcttcgacatcaccaaagcccgcatagaaaaagccgccgccaaaatccgcgtcgaacatcccgattacacgggcgattcgggcttcaaaatctttcaaacggcagacaatttcaggcagcatccggacaaggatttttcgcccgaacaaccggatttgccgcttaacgatgaattaagcgaagaacagctgcaaacgcttctgaccacctggacgctgtatgacggggcggcactgaccacgccggttgagcctgtgcggttaggggcttacacggcgtatctgtgcgaaaaacggctgtatctgatgaatgccggttttacttctgccgatttgttggcgtttatccgcaagctggacgacgatgcggctttcaatcccaaccgcgtgattgtattcggcagcaatatggcaagcgccatgcagcacgaacttgaccaggcggttcgcggttatgccaataaaaaagagattgagttgaatgtggttatcagggtttga

SEQ ID NO: 48009 - DNA, 2298 bp, Neisseria meningitidis; identical to SEQ ID NO: 44265

SEQ ID NO: 48010 - DNA, 702 bp, Neisseria meningitidis; identical to SEQ ID NO: 44996

SEQ ID NO: 48011 - DNA, 2775 bp, Neisseria meningitidis; identical to SEQ ID NO: 38521

SEQ ID NO: 48012 - DNA, 477 bp, Neisseria meningitidis
atgccgatagaaatcgaacgccgttttttgattagaaacgacaactggcggcaatacgccgacgaaccgctgctcttgaaacaggcttatctttctgtcgagaaagaacgtaccgtccgtgtccgtattgtcggacaacaggcgtggctgacactgaaaggctatatttcagaactcagccgcagtgagtttgaatacgaaatcccgcttgccgatgcggaaaagatgatggaaacgatgtgtccgtttaagatggaaaaatggcgttatccggtcagatggggcggcagcctgtttgaaatcgatgtttttcttggcgataatgcgcctttggtcgtcgcggaaatcgagttgcccgacgagaatgccgattttgaccgtccggactggctgggacgggaaatcactgccgacggtatgtttaccaatgcctatttgagcaggcatccgttctcaagctggaaaaatgccgtctga

SEQ ID NO: 48013 - DNA, 1527 bp, Neisseria meningitidis
atggattatccaccgcttaagggtgcggcattggcgtgggttacgctgtctttggggcttgccgtatttatggaagttttagatacgactatcgccaatgtcgccgttcccgtcatcgccggcaacctcggtgcggcaaccacgcaggggacgtgggtcattacttcttttgctgtggcaaacgccgtttccgtgccgttaacgggctttttggcaaaacgtatcggcgaggtcaaattgtttaccgccgccgctgtcggtttcgtcatcacatcgtggctgtgcggtattgcccccaaccttcagtcgctggttgttttccgcatcttgcagggctttatcgccgggccgctgattcccctgtcgcaaagcctgttaatggcatcctatccgcccgcaaaacggacgctggcactggcattgtgggcaatgaccgtcgttgtcgcccctgttctcgggccgatactcggcggttggatttccggaaactggcattggggttggattttcttcattaatatccctatcggtatcatatcggcatggattacatggaaacatttgaaatatcgggaaacggaaaccgttaaaatgccgaccgactatgtcgggcttacattgatggtagtcggtatcggcgcgttacagatgatgctggacaggggtaaggaactcgactggttcgcctctggagaaatcattaccttgggcgtagtcgcactggtgtgtttgtcgtattttattgtttgggaattgggagaaaaatatccgattgtcgatttatcgctgtttaaagatcggaattttaccgtcggcgtaattgccacatcattgggttttatggtgtatatggggacgctgaccttgctgccgttagtgttgcagaccaacctgggctatacctccacgtgggcggggcttgccgccgcacccgtcggcatcctgcccgtcttcctgtctccgttaatcggcaggttcggcaataaaatcgatatgcgcctgctcgtaaccgccagcttcctgacctttgcctttactttctattggcgcaccgatttttatgccgacatggatatcggcaacgtcatctggccgcagttttggcagggggcaggcgttgccatgttcttcctgccgctgaccaccatcacactgtcgcacatgaagggcggacagattgccgccgcaggcagcctgtcgaatttcttgcgcgtgctgatgggcggtgtcggcgtatccgtcgtcagcaccctgtgggaacggcgcgaagcgttgcaccatacacgctttgccgaacacatcacgccctattccgcaacattgcacgaaacggccgctcatttgtcccagcacggcgtttccgacattcaaaccctaggcatcatcaacaataccattacccagcagggttttattatcggctcgaacgaaatctttatggcgggcagcttgttattcattatcatgatacccgtcatatggctggcaaaaccgccgttccacaacggcggcggcggtggacattga

SEQ ID NO: 48014 - DNA, 1644 bp, Neisseria meningitidis
atgaatgcttttacccgtgcatggtatgcgctcgaacgccattatcaggatacgcgtcatgtccttttgcgcgaccgctttgcctgcgaacccgaccgttttgagcgtatgcatgagcgtttggacgggatgttgttcgattacagcaaaaaccgtttgggcgaagatacgctgcaactgctctgccgtcttgcggagacggcggatttggaagggaaaatgcgtgctttgcggacgggtgcgaaagtcaacggcagcgaggggcgtgccgcgctgcatacggctttgcgcctgcccgacggtgcggatgccgtttatgtggacggcagggacgtgttgcccgaaatccgccgcgagttaaatcgtgcgttggagtttgcacacagtttggacgacggttcgtatcaggggataactgggaaacggattacggattttgtccacatcggcataggcggatccgacctcgggccggcaatgtgcgttcaggcactcgagccgttcagacggcatatcgccgtccattttgccgccaacgccgatcctgcctgcctggatgcggttttatgccgtctgaaccccgaaacgacagtgttttgcgttgccagcaagtccttcaaaacaccggaaaccctgctcaatgcacaggcagtcaaggcgtggtatcgcggtgcggggttctcggaatccgaaacggcgtgccatttttgcgcggtgtctgccgacactgcggcagctgcggctttcggtatcgcggcggaacgcgtgtttgcgatgtacgactgggtgggcggacgctattccgtctggtcgtccgtcggtttgcccgtgatggttgcggtcggcggggcgcgtttccgcgagttgttggcgggggcgcacgcgatggacagccattttttccacacgccgccgcgccgcaacattcccgttctgatggcactgattgccgtgtggtataacaatttccaacacgcggacgggcagaccgccgttccgtacagccacaacctgcgcctgctgccggtgtggctgaaccagctcgatatggagagtttgggcaaaagccgcgcttcagacggcagtcccgccgtgtgcaaaacgggcggcatcgtgttcggcggtgaaggggtcaactgccagcacgcctatttccaactgcttcatcaaggcacgcgcctgattccctgcgactttatcgtcccgatgacggcgcagggcgtggaggacggacgcagccgttttaccgttgccaacgcctttgcccaagcggaagccctgatgaagggcaaaaccttggacgaagcacgcgccgaattggcagatttgcccgaagcggaacgcgaacgcctcgcgccgcacaaagagttccccggcaaccgccccagtaacagcatcctgctcgaccgcctcacgccctacaatctgggtatgctgatggcggcttacgaacacaaaaccttcgtccaaggcacgatatggaacgtcaaccccttcgatcagtggggggtggaatacggcaaacagttggcaaaaaccatcatcggcgaactggaaggcggcacgtccgtacacgatgcctcgaccgaagggctgatggcgttttaccgcgaatgccgtctgaaaggcggcggcgcggcataa

SEQ ID NO: 48015 - DNA, 531 bp, Neisseria meningitidis
atgaaattcgtcagcgaccttttgtctgtcatcttgttttttgctacttataccgttaccaaaaatatgattgccgctacggcggttgccttggttgccggtgtggttcaggcggcttttctgtattggaaatataaaaagctggatacgatgcagtgggtcggactggtgctgattgtcgtattcggcggcgcaaccattgttttgggcgacagccgcttcattatgtggaagccgagcgttttgttttggctgggtgcgctgttcctgtggggcagccacctcgccggtaaaaacggcttgaaggcgagtatcggcagggagattcagcttccggatgccgtatgggcgaaattgacgtatatgtgggtcggtttcctgatttttatgggtatcgccaactggtttgtgtttacccggttcgagtcgcaatgggtcaactataaaatgttcggctcgactgcactgatgcttgttttctttattattcagggtatttatctgagtacctgtctgaaaaaggaggattga

SEQ ID NO: 48016 - DNA, 2379 bp, Neisseria meningitidis
atgaaaccattacaaatgctccctatcgccgcgctggtcggcagtattttcggcaatccggtctttgcggcagatgaagctgcaactgaaaccacacccgttaaggcagaggtaaaagcagtgcgcgttaaaggccagcgcaatgcgcctgcggctgtggaacgcgtcaaccttaaccgtatcaaacaagaaatgatacgcgacaacaaagacttggtgcgctattccaccgatgtcggcttgagcgacagcggccgccatcaaaaaggctttgctgttcgcggcgtggaaggcaaccgtgtcggcgtgagcatagacggcgtaaacctgcctgattccgaagaaaactcgctgtacgcccgttatggcaacttcaacagctcgcgtctgtctatcgaccccgaactcgtgcgcaacatcgacatcgtaaaaggggcggactctttcaataccggcagcggcgccttgggcggcggtgtgaattaccaaaccctgcaaggacgtgacttactgttgcctgaacggcagttcggcgtgatgatgaaaaacggttacagcacgcgtaaccgtgaatggacaaataccctcggtttcggcgtgagcaacgaccgcgtggatgccgctttgctgtattcgcaacggcgcggccatgaaactgaaagcgcaggcaagcgtggttatccggtagagggtgctggtagcggagcgaatatccgtggttctgcgcgcggtattcctgatccgtcccaacacaaataccacagcttcttgggtaagattgcttatcaaatcaacgacaaccaccgcatcggcgcatcgctcaacggtcagcaggggcataattacacggttgaagagtcttacaacctgcttgcttcttattggcgtgaagctgacgatgtcaacagacggcgtaacaccaacctcttttacgaatggacgccggaatccgaccggttgtctatggtaaaagcggatgtcgattatcaaaaaaccaaagtatctgcggtcaactacaaaggttcgttcccgatagaggattcttccaccttgacacgtaactacaatcaaaaggacttggatgaaatctacaaccgcagtatggatacccgcttcaaacgcattaccctgcgtttggacagccatccgttgcaactcgggggggggggacaccgcctgtcgtttaaaactttcgccagccgccgtgattttgaaaacctaaaccgcgacgattattacttcagcggccgtgttgttcgaaccaccagcagtatccagcatccggtgaaaaccaccaactacggtttctcactgtctgaccaaattcaatggaacgacgtgttcagtagccgcgcaggtatccgttacgatcataccaaaatgacgcctcaggaattgaatgccgagtgtcatgcttgtgacaaaacaccgcctgcagccaacacttataaaggctggagcggttttgtcggcttggcggcgcaactgaatcaggcttggcgtgtcggttacgacattacttccggctaccgtgtccccaatgcgtccgaagtgtatttcacttacaaccacggttcgggtaattggctgcccaatcccaacctgaaagccgagcgcagcaccacccacaccctctctctgcaaggccgcagcgaaaaaggtactttggatgccaacctgtatcaaagcaattaccgcaatttcctgtctgaagagcagaagctgaccaccagcggcgatgtcagctgtactcagatgaattactactacggtatgtgtagcaatccttattccgaaaaactggaatggcagatgcaaaatatcgacaaggccagaatccgcggtatcgagctgacgggccgtctgaatgtggacaaagtagcgtcttttgttcctgagggctggaaactgttcggctcgctgggttatgcgaaaagcaaactgtcgggcgacaacagcctgctgtccacccagccgttgaaagtgattgccggtatcgactatgaaagtccgagcgaaaaatggggcgtgttctcccgcctgacctatctgggcgcgaaaaaggtcaaagacgcgcaatacaccgtttatgaaaacaagggctggggtacgcctttgcagaaaaaggtaaaagattacccgtggctgaacaagtcggcttatgtgttcgatatgtacggcttctacaaaccggtgaaaaacctgactttgcgtgcaggcgtatataatgtgttcaaccgcaaatacaccacttgggattccctgcgcggcctgtatagctacagcaccaccaactcggtcgaccgcgatggcaaaggcttagaccgctaccgcgccccaagccgtaattacgccgtatcgctggaatggaagttttaa

SEQ ID NO: 48017 - DNA, 630 bp, Neisseria meningitidis; identical to SEQ ID NO: 46046

SEQ ID NO: 48018 - DNA, 1764 bp, Neisseria meningitidis; identical to SEQ ID NO: 45457

SEQ ID NO: 48019 - DNA, 1368 bp, Neisseria meningitidis
atgtcttccccttcaaataccaatcgtcaaacctgatccagccgattaacctatatcctgaccgttgccggcgcgactgtcggtttcggcgcgacgtggcgtttcccgtatttggtcggtgaaaacggtggtggcgcgtatgtgtttttattctgtatcgcgatgctggttatcggcattccgatgattttggtggaaaatgtcatcggacggcgcaaaggcgtgaacgcgctggatgcgttcggcggtccgatgaacggcaaacccattgctaaaatttggaaactggtcggctggatggggctgctcggcgcgttcggcatcatggcttattacatggcactcggcggctgggtaatcagctatatcgttaatattattggaggaaatttgaatatttccagccccatcgacggtgtggttacaaaaggcttctttgccgaacacataaacagcccttgggaaattgcgttttatacgctgctttttgtcgccgtgaaccaatggattttggtcaaaggcgttatcggcggcattgaaaaagcggcaaaatagctgatgccgctgctgtttttgttcctaatcgcgatggtcgtccgcaacgttacccttccgggcgcaatggaaggggttgctttctatctgaaacctgatttcagcaagattaccgccgaactgttcgtcttcgttttggggcaggtattttttgccctgagcctgggtttcggcgtgatgattaccttgtccagctatttggataaaaacgaaaatctagttcagacggcagttatcacggcaattaccaataccatcatcgccatacttgcgggctttatgattttcccgtcgctcttcagcttcggcgttgcccccgattccggcccgactttggtgttccaaagcttgccgattgtgttctcacatatgtgggcgggatctgtgttcgccgtgattttcttctcgctgctcctgattgccgcgttgacaacttcgctgaccatttatgaagtgttgattacgaccattcaggaaaaaaccaaaatccgccgtaccgccgcgattacgattgtattggctgccatcttcattttcggcaacatcccgtccattttgagctacggcccttggaaagatgtttccatatttggcaaaaatatttttgacgcttttgactacatcagcggcaacatcttgtttatgctgaccgcgctcggttccgcgctgtttgtcggttttgtgatgaaggacgaagcgaaggaagaattgctttataaaggcaaccatacgacggtcaatatttggtttgcctatgtgaaatacctcgtgccgttggtgattctgctgatttttatcagcaacctgttctaa

SEQ ID NO: 48020 - DNA, 513 bp, Neisseria meningitidis
atgggatcaaaattctttttcctgctgctgcgttttgccggttcggtgttgccgccgtcgcatatgcgcggcatcggcatcgtcggcagacgggtgcgcggttttctggcacggcggatttctccgcatatcggacgcggggtcaatatcgaacgcggggcgtatgtgttcccggatacggttttgggcgacggctcgggcatcggggcaaactgtgaaatctgccgtgggccggtggtcggcaaaaatgtgatgatggagccggaatgtctgttttattcaaataaccacaagtttgaccgcaaaaaacgctttgagggctacacggaaatccgtccgattacgttggaggacgatgtctggccggggcgcagggtgattgtaatggcgggcgtaaccgtcggacgcggttcggtcgtgggcgcaggcgcggtggttacaaaagacattccgccctactctttggcggcaggcaatccggcagtggtgaaaaagaatctgccggaaggttga

SEQ ID NO: 48021 - DNA, 1881 bp, Neisseria meningitidis
atgagccaagccttaccctaccgcccggacatcgacacattgcgcgccgccgccgtcttgtccgtcatcgtgttccatatcgaaaaaaattggctgccgggcgggtttctcggtgtcgatatatttttcgtgatttcaggctttttgatgacgatgattcttcaccgcgaaatgtcgggggggggggggaggttttccctgaaggcattttatatccgccgcatcaaacggattttgcccgcatttttcgccgtattggcggcaacgctgataggcggcttctttttattcaccaaagatgatttctttcttttgtggaaatccgcgctgaccgccttgggtttcgcctccaacctgtattttgcaagggggaaggattatttcgatcccgcgcaggaagaaaagcccttgctgcacatttggtctttgtcggtcgaagaacaattttactttgtctttccgatattgctgctgcttgtcgcccgcaaaagcccgcgcgtacagttcggcttcctcgccgcattgtgcgccttaagccttgccgcttcctttatgccttccgcgttcgataaatattacctgccccacctgcgcgcctgcgaaatgctggtcggatcgctgaccgccgtgtggatgcggtaccggcaacagcggaatctcgccgttggcagatgctgtgccgccgccggcgcattgttttccgcgtgcatactgtccgcctgcctgtttgcctattcgaaacaaaccgcctatttcccgggacccgccgctttgattccctgtctggctgttgccgcgctgatttatttcaatcattacgaacacccgcttaaaaaatttttccaatggaaaatcactgttgccgccggtttgatttcctattcgctttatctgtggcattggccgatattggcctttatgcgctatatcggcccggacaacctgccgccttattcaacagcggcagcaatcgtcctgatattgctgctttccctgatttcttatcactgcatcgaaaagccgtttaaaaaatggaaaggttcgttcgcacaatccgttttatggatttatgccttgcctatgctcattttgggggcgggctcgtttttcgcgatgaggctgccgtttatggcgcaatacgaccgcttggggctgacgcgttccaacacctcctgccacaacaataccggcaaacaatgcctgtggggggatacggaaaaacagccggagctgctggttttgggcgactcccacgccgaccattacaaaacattcttcgatgccgtgggcaaaaaagaaaaatggtccgccactatggtttccgccgacgcttgcgcctatgtggaaggctacgcgtcccgtgtgttccaaaactgggccgcctgccgcgccgtttaccgctatgccgaagaacacctgcccctgtattcaaaagtggttttggcgatgcgctggggcagccaaatgcccgaaaacagccgctcccttgcctacgatgccggttttttccaaaaattcgaccgtatgctgcacaaactctcatccgaaaaacaagccgtttacctgatggcggacaaccttgcctcgtcttacaacgtacaacgcgcctatatcttgtcttcacgcataccgggttaccgccaaaccctgcgcccggacgacgaaagcactctgaaagccaatgcacgcatcagggaattggcagccaaataccccaacgtctatattattgatgccgccgcctatatccccgcaaatttccaaatcggcggattgccggtttactcggacaaagaccacatcaacccttacggcggcacggaattggcgaagcgtttttccgaaaaacaacggtttctcgatacgcgccataaccattga

SEQ ID NO: 48022 - DNA, 1647 bp, Neisseria meningitidis; identical to SEQ ID NO: 39359

SEQ ID NO: 48023 - DNA, 278 bp, Neisseria meningitidis
atgattcacgaagaaatctgcgccatgcctatgggctatgaaaccttgatcggcgatatggcagcgcactgtcaggcggacaaaaacaacgcatcgtattggcgcgggccttatattgcgaaccgaaaatcctatttttagatgcagcgaccagccatttggatattgccaatgaaaaagcagtcaatgcaaacttgaatggcttgtctatcataaaaattatggcggcacacagaaaggaaacggtggaatcagcagataggaaaatgtctttagga

SEQ ID NO: 48024 - DNA, 186 bp, Neisseria meningitidis; identical to SEQ ID NO: 44958

SEQ ID NO: 48025 - DNA, 177 bp, Neisseria meningitidis; identical to SEQ ID NO: 42525

SEQ ID NO: 48026 - DNA, 1404 bp, Neisseria meningitidis
atgaacaatcccgacttaccctatcggcagaccttagaatgcctttctcaaaaacaatataactttaccgaagtccgccgactgctgacagaagcggccttggcaggtcatcccgccgccgcattcgagttggcaaaacacctgatggatgcggacagcccctaccaagaccgcgaacaaggtatggaaatgctccgcatcgccgccgaacaggggcatccctacgcgcgttacaatctggcatatatccaagaattggaaggcgcgccccctgaaaccctgatatcgctttacaggcctccggcagaagcaggagtgcccgaagcgcaagtccgcctgatgtacctgctgtacgcgtcccggcattttgaagaagcactcgaatgggcaaaaaccagcgcaaaaaacaacaacccccacggacaatatctgctcgcccaatactgccggtacggcacaccgccggattttgaaacggcgcacctgctctaccgaaaagcggcggcacaaggcttgccggaagcacattggcagctcgggctgcaataccgtttcgggcaagggacgaaagtcgacacggcacaggccgtcaatcatttgcgcgccgccgcgcaacaaggatacattcccgcctacaccccgcttgccgaactcatcctacctacggctcccgatgaagccgtttaccggttccaacaggcggcacaggaaaatgaccccgatgcccatgccgcactggccgacatctacctacaaggcaaatatcaggaaagaaaccacaaacttgccctgcatcatgccgaagcagccgcagcagaacgccatcccgaaggtttgcggatactgggcgacatctgccgctacggtttgggcatagcccccgatacggaaaaagcccggcattattaccggcaggcagccgaagccggcagcctttccgcctatcagaaactcatatccgacagcgcgttaaaccatcccgaccaatacggcggcatcaaagattccgccatcaggcggcaaagggcagaacagctttatcaaaaagcccaagccctgcattacggattacaatgtgcgcccgaatacgcagccgcgctcaaactctacacagaagccgcagaactcggacacagcaaagcccaaaccaatctgggcagtatgtactacttcggacagggcatagccgccgactacggcaaagcccgcaaatggtttgaacaagccgccgcgcaaaaagacagtatggcgttctacaacctcgcctgcatccattacagcggacacggtgtcgggccggacaaagaaaaagcctgccgctacctgcaagaagccataaacaacggatacgggcaaaaaagcgtcctgcaagaactgctgcaacaatggcaaaatgccgtctga

SEQ ID NO: 48027 - DNA, 1155 bp, Neisseria meningitidis
atgaaatttaccaagcaccccgtctgggcaatggcgttccgcccgttttattcgctggcggctctgtacggcgcattgtccgtattgctgtggggtttcggctacacgggaacgcacgagctgtccggtttctattggcacgcgcatgagatgatttggggttatgccggactggtcgtcgtcgccttcctgctgaccgccgtcgccacttggacggggcagccgcccacgcggggcggcgttctggtcggcttgactatcttttggctggctgcgcggattgccgcctttatcccgggttggggtgcgtcggcaagcggcatactcggtacgctgtttttctggtacggcgcggtgtgcatggctttgcccgttatccgttcacagaatcaacgcaactatgttgccgtgttcgcgctgttcgtcttgggcggcacgcatgcggcgttccacgtccagctgcacaacggcaacctaggcggactcttgagcggattacagtcgggcttggtgatggtgtcgggttttatcggtctgattggtacgcggattatttcgttttttacgtccaaacggttgaatgtgccgcagattcccagtccgaaatgggtggcgcaggcttcgctgtggctgcccatgctgaccgccatgctgatggcgcacggcgtgatgccttggctgtcggcggctttcgcgtttgcggcaggcgtgatctttaccgtgcaggtgtaccgctggtggtataaacccgtgttgaaagagccgatgctgtggattctgtttgccggctatctgtttaccggattggggctgattgcggtcggcgcgtcttatttcaaacccgctttcctcaatctgggtgtgcatctgatcggggtcggtggtatcggcgtgctgactttgggcatgatggcgcgtaccgcgctcggtcatacgggcaatccgatttatccgccgcccaaagccgttcccgttgcgttttggctgatgatggcggcaaccgccgtccgtatggttgccgtattttcttccggcactgcctacacgcacagcatacgcacctcttcggttttgtttgcactcgcgcttttggtgtatgcgtggaagtatattccttggctgattcgtccgcgttcggacggcaggcccggttga

SEQ ID NO: 48028 - DNA, 855 bp, Neisseria meningitidis; identical to SEQ ID NO: 38135

SEQ ID NO: 48029 - DNA, 783 bp, Neisseria meningitidis
atggaatcactgactgccataaataaatcgcgcattcggcaggctttccaaaaagcattaaacgattatgaccggcacgccttaatccaacaaaaaatgacgattaatttaatgacgcatttgcaagattatttgccggatatgccattggaaaacgtgttggaattgggctgcggctcaggaatgttgagtgccttgctgcaaaaacagatttcagcgaattattggttatttaatgatttgtgcgatgtgcagccccaactggctgaaaaactgccgcaatcctttgatttttattgcggcgatgcggaaaactttccttttcaacgacaatttgacttaatcgcaagcgcatctgccgtgcaatggtttcatcaacccgacgcttttatcgcccattgcaaaacaggcttgaaagcaaacggattattggcggttgcaacctttggcaaagacaatttaaaagaagtccgccaaattacaaatataggcttaaattacccgactttatcccaatggcagacttggttagccaaagattttgagcttttatggtgtgaggattttaaggtaatactagactttgatacgccgttagatgtactcaaacaccttaaatatacaggcgtaacagccacgaaccaaaaaaattggacaagaaaaaatctcaatgaatttattggcgattacttgtcggcgttcagtatgccgtcgggcaaagtgcacctgacttatcatccgttattttttatcgcgcgctactctgcggcgggcaggcaataa

SEQ ID NO: 48030 - DNA, 318 bp, Neisseria meningitidis; identical to SEQ ID NO: 39139

SEQ ID NO: 48031 - DNA, 414 bp, Neisseria meningitidis; identical to SEQ ID NO: 45183

SEQ ID NO: 48032 - DNA, 1422 bp, Neisseria meningitidis; identical to SEQ ID NO: 38131

SEQ ID NO: 48033 - DNA, 1101 bp, Neisseria meningitidis; identical to SEQ ID NO: 45109

SEQ ID NO: 48034 - DNA, 1503 bp, Neisseria meningitidis
atggcaaaagtactcatcgtacccgtatctgccggactggacgcctccgccgccgcacaagcctttgcaaaagcactggacgcacaaattttccaagccgttgacgcaaccgccgaaaccctgctcgcgcaaggcaaaagcgacgactggttcgacgcactggtcggcaaagttgccgcactcgatgccgccaacctcgtcatcgaaggcatcgcgcccgatgccgacaaaatctacctcgcaggcaaaaacgtcgaactggcattgtcccttgacgcggcagccgtcttcgccgtccgttccgacaacgccgatgccgacgaactggcaaatcggctgaaccttgccaaacagttcttcgccgccgcgccgggcgtattggaaggttttgtcgtggacggcgcggcagcctccgttgccgaagcggcagccgaaaaaaccggcctgaccttcttcggttcgagcgacgcgctgaaagacgtatccgtattggcaggccgcgaagcaaaacgcctgtcgccggcgcaattccgctacaacctgatcgacttcgcccgccaagccgacaaacgcatcgtcctgcctgagggcgcagaaccccgcaccgtccaagccgccgccatctgccacgaaaaaggcattgcccgctgcgtcctgcttgccaaacgcgaagaagtcgaagccgttgccaaagaacgcggcatcagcctgcccgactctttggaaatcatcgatcccgcctcattggtcgaacaatacgtcgagccaatgtgcgaactgcgcaaatccaaaggcctgacacccgaagacgcgcgcaagcaactgcaagacaccgtggtactcggtacgatgatgatggcgcaaaatgatgtggacggtttggtatccggtgcggttcacaccaccgccaacaccatccgccccgctttgcaactgattaaaaccgcaccgggcgcaagcctcgtgtccagcgtattctttatgctgctgcccaaccaagtcctcgtcttcggcgactgcgcggttaatccgaacccgaccgcgcaacagcttgccgacatcgccatccagtctgccgattccgcaaaagccttcggcatcgacccgaaagtggcgatgatttcctactccaccgtcaactccggcagcggccccgatgtcgataccgtcatcgaagcaaccaaacttgcccgggaaaaacgccccgacctcgccatcgacggcccgctgcaatatgatgcggcaaccgtgccgggcgtgggcaaatccaaagccccgggcagcccggtggcaggacaggcaaccgttttggtcttccccgacctgaacaccggcaactgcacctataaagccgtccaacgcagtgccaacgtcttaagcgtcggcccgctgctgcaaggcctgcgcaaaccggtcaacgacctgtcgcgcggcgcgctggtggaagacatcgtgttcaccatcgccctgactgccgttcaggcaaaacaaatggaaggctga

SEQ ID NO: 48035 - DNA, 534 bp, Neisseria meningitidis; identical to SEQ ID NO: 37691

SEQ ID NO: 48036 - DNA, 873 bp, Neisseria meningitidis
atgagctggttagataaaatcctgccacccaaaatcaaaaaccgcagcaaagacggttcttccaatgttcccgagggtctatggcacaaatgcccgtcttgttcggcaaccgtttattctaccgagttgcagcagaacaatcaggtttgtccgaaatgcaaccaccacaatccgttgtcggcacgacaacgcctgaacctgcttttggatgaggatggcagggaggaagttgccggaaatgtcaaaccgacagatcctttgaagtttaaagacggcaaaaaatatccggatcgtttgagtgcggcacgcaagctgaccggggaagatgatgctttggtggtgatgaaaggcaagatgaacggcctgcccgtcgtcgttgccgcgtttgaattccgctttatcggcggttcgatgggttcggttgtgggcgaacgtttcgtacaaggtatccgtcgggcggttgccgacaattgtccgttcgtctgtgtggcggcctccggcggtgcgcgtatgcaggagggtgtgaactcattgatgcagatgacgaaaaccagtgccgcgctgcatttgctgacggaaaaacgcctgccatttatatcggtgttgaccgatccgactatgggcggcgtatccgccagcttcgcatttttgggcgatgtcgtgcttgccgaaccgaacgcgctgatcggttttgccggtccgcgcgtgattgagcagacggtgcgcgaaacgctgccggaaggcttccaacgcgccgagttcctgctggaaaaaggcgcaatcgaccagattgtcgaccgccgcgatatgaagcggcgcatcagtgatttgattacgctgttgtgccgtcaggacaaagtttctgccgcctga

SEQ ID NO: 48037 - DNA, 360 bp, Neisseria meningitidis; identical to SEQ ID NO: 39792

SEQ ID NO: 48038 - DNA, 279 bp, Neisseria meningitidis
atgaaaaaatccctgtttgccgctgctttgttgtctttggtcctggcagcctgcggcggtgaaaaagccgctgaagctcccgctaccgaagcacctgccgccgaagctcccgctgctgaagctgccgctactgaagcacctgccgccgaagctcccactgctgaagctgccgctactgaagcacctgccgccgaagctcccgctgctgaagctgccgctaccgaagcacctgccgctgaagctcctgctgccgaagctcctgctgccgaagctgcaaaa

SEQ ID NO: 48039 - DNA, 1332 bp, Neisseria meningitidis
atgaacacaacatcccaatttaccagtaatttctggaatatatatattgcagttattgtcttactgagctttatcgctttggcttggctgctgctgtctcaaaatgttgtcaaacgtccgaagaagggcgaagaagtacaaactacgggtcatgagtgggacggcattgccgaatacgacaatccgctgccccgctggtggttttggctgtgtgttttgacgtggctgttcggtatcggttatttggttatgtatccgggtgtcggcgactacaaaggtctgctgaaatggaccagccataaccaatatgaaaaagaggtcaaaaaagccgatgagcaatacggcaaactgtatgccaagtttgcggatatgccgattgaaaaagtggcaaaagaccctcaagccaagcaaatcgcccaaaacctgtttaacacttattgtatccagtgccacggctctgatgctaaaggctctaaaggttttccgaatctgaccgatagcgattggttgtggggcggtgatcccgataaaatccacgagaccatcgaaaaaggccgtgttgcgactatgcctgcctggggtcctgctttgggcgaagaaggcgtgaaagacgttgcccattatgtgatgtccctttcaaaacccgaaggtcagtatgatgaggaacgtgccgcgcgcggacaagccttgttcagcggtccgcctgccaactgtttcacttgccacggcgataagggacaaggtatccaaggtttgggtccgaacctgactgatgacgtgtggttgtggggcggtacgcaaaaatccattatcgaaaccattaccaacggtcgcagcagccaaatgcccgcttggggacatttcttggataaagacaaactgcatattatgactgcttatgtatggggtctttccgataaagacggtaaagctccggtgaaaaaagccgagcctgcaccgactcccgcaccggcggcagaacccgcagcctctgctcctgcagaagcagcacaagccgcgtccgaagccaaacctgccgcagcagaacctaaagccgaggaaaaagctgcacctgctgccaaagcggacggcaaataggtttatgaaaccgtttgtgccgcctgccatggcaatgcgattccgggtattccccatgtaggcatcaaagccgattgggccgaccgcatcaaaaaaggcaaggacacgttgcacaaacacgcgatcgaaggtttcaatacgatgcccgcaaaaggcggtcgcggcgatttgagcgatgatgaggttaaagctgcggttgactatatggtcaaccagtcaggcggcaaattctaa

SEQ ID NO: 48040 - DNA, 1083 bp, Neisseria meningitidis; identical to SEQ ID NO: 45727

SEQ ID NO: 48041 - DNA, 318 bp, Neisseria meningitidis
gtggattggatgggcagtctgttcctgccgggtggcgcactgttgtttctgagcgtggtttcgaccactttacccgcacgtttgggaatgcctttgctgctggtttctcccgccggcgtgttggacggggcggcggaagccttggcgattgcggcgttcctgatgctggtcgcgcgtccgccggcagtgttcggcggtttgtggaaattcaattacagcctgcgtgaaaaggcgtatagccgaatcgaaatgcagtccgacaccgtgcttcaggcggggatttggcgtggtacatcctgcccgacggcaaggtcgata

SEQ ID NO: 48042 - DNA, 126 bp, Neisseria meningitidis
atgaacgaacaagatttagatttggacaacctcgacaacctgcttgacgatttcgacggcgttaccgtggaaggcggcgtcgattcggaaaacgacgacggctgtgaaggcggagcgtgcaaaatc

SEQ ID NO: 48043 - DNA, 291 bp, Neisseria meningitidis
ttgcacaaacaagtgcaacatattactacaaagctattttatttcaaaataactgatatatcttttttcatagattttaaatttcatatttttaatattttaggaattttattccaaagaaaaagaaacagattgataaaaacaatacccgccattcattcggacaaaaccgcacggaacatccgttttcccatttccacgacaatccggtacagaacaccccgctgccgattccgcctgcacatccggcaaaatttcatacgcaaggaaaatgttgaaaacaaaaagaac

SEQ ID NO: 48044 - DNA, 312 bp, Neisseria meningitidis; identical to SEQ ID NO: 39282

SEQ ID NO: 48045 - DNA, 282 bp, Neisseria meningitidis; identical to SEQ ID NO: 39155

SEQ ID NO: 48046 - DNA, 324 bp, Neisseria meningitidis
ttgatatggcggcaccccccccgacaaaaaaaaacaatccggaacgcatctgaccgttccggcttgttttcaggcgaatccgccgcatcagaacatactgcgcacgcccatattgacctgccaagtctggcgcatcgtgtgcatcgaagacctttgcgcctcaaaataaagctgccttccgttgtcggcattaccacgcaaaaaaatgaattgcttgatattccaatgttttttatatgtttttatattgtgatgcgatcagacaaacgcccccctgacatttgtttagacggcatcgtattgctaaatttctataagtatgta

SEQ ID NO: 48047 - DNA, 222 bp, Neisseria meningitidis
ttgcagaaattctatgtgattgattttctttctttaaagtctatttttttaaataaatttgcgttaaaatatagtggattaaatttaaatcaggacaaagcgacgaagccgcagacagtacggatagtacggcaaggcgaggcaacgccgtactggtttaaatttaatccactatacagaaaatttatccaatggattgaccgtgaagaaaataaggtcgtc

SEQ ID NO: 48048 - DNA, 156 bp, Neisseria meningitidis; identical to SEQ ID NO: 38050

SEQ ID NO: 48049 - DNA, 192 bp, Neisseria meningitidis
ttgaggcaggcatttcagacggcattccttaaatgcgtgtacctgtggtgttccaaaaggtcgtctgaaagtgcagcttctgcgaagctaaagcgcggtatcaacgaagttaaaatttgcctgaaccttaaaggcagcctgcaccccaatcccctctccccgtgggagagggctaggacgaggctggcaaac

SEQ ID NO: 48050 - DNA, 210 bp, Neisseria meningitidis
ttggaaatttgcggcatccgccgcaaacgtaaacccgtaatgtatttgaccgtggttttttttacttcggttcgccttcttaccagcaagcggcgtgccaaaacagggttcagctcggcattttacagaatatttttttatttgtctgtctggtatgggtatttttttatatcaacgcggcgcggcttgcggcgtaataatgcggcgggc

SEQ ID NO: 48051 - DNA, 207 bp, Neisseria meningitidis; identical to SEQ ID NO: 39624

SEQ ID NO: 48052 - DNA, 192 bp, Neisseria meningitidis
ttgctgcccacgcgttctgtttcaagtttattattgggtgaatatttggaatttgaagaaaacgatacaaagattactgcggaaatcggcagtgcatggcattttttgggcgcggcttgtcggatttcaataaatggaaagtattatgcgggtaatcggattgtttggtttgccaaaaaagccgaaagctag

SEQ ID NO: 48053 - DNA, 1524 bp, Neisseria meningitidis
atgtgttgttctcttagttttgcagaaccagcaagaatagatgatcgaataataaaatttaggccatctaaatcaaagttttttgaatctacaggatatagaaaaatcaataatgaattttctaaattcacagaagcggcaaatgtcgaacatatccccacgggcgcaaaagcccgaatcaacgcaaagataaccgccagcgtatcccgcgccgccgtcttgtcaggagtcggcaaacttgtccgccaaggcgcgaaattcagcacaagggcagtcccttatgtagggacagcccttttagcccacgacgtatacgaaactttcaaagaagacatacaggcacgaggctaccaatacgacaccgaaaccgacaaatttgtaaaaggctacgaatatagtaattgcctttggtacgaagacgaaagacgtattaatagaacctatggctgctacggcgttgacagttccattatgcgccttatgtccgattacagcagattccccgaagtcaaagaattgatggaaagccaaatggaaaggcttgcccgtccgtattgggaaaagttaaggaatcgtcctgatatgtattattttaaaaactacaattttaaacgttgttatttcggattgaacggcggagattgtttagttgctaaaggtgatgatggtagaacttttatcagtttctcacttcaaggaaattcaaaatacaaagaagaaatggatgccaaaaagctggaagagattttatcgttgaaagtcgatgccaatcccgacaaatacataaaggcaaccggatatcccggttattccgaaaaagtagaagtcgcacccggaacaaaagtgaatatgggacccgtcacggacaggaacgggaatcccgttcaggttgtcgcaacattcggcagggattcgcaaggcaacaccacagtggatgttcaagtaattccgcgtcccgacttaacccccggaagcgcggaagcgccgaacgcacagccgctgcccgaagtatcgcccgccgaaaaccccgcaaacaacccggcccccaatgagaaccccggcacgcgtcccaatcccgaacccgaccccgatttgaatcccgatgcaaatcccgatacggacggacagcccggcacaagacccgattcccccgccgttccggatcgcccaaacggtaggcatcgcaaagaaaggaaagaaggcgaagacggcggccttttgtgtaaattcttccccgacattctcgcttgcgacaggctgcccgagcccaatccggcagaagatttaaatctgccgtctgaaaccgtcaatgtagagtttcagaaatccggaatcttccaagattccgcacagtgtcccgcacctgtcactttcacagtgactgtgcttgattcaagcaggcagttcgcgttcagctttgagaacgcatgtaccatagccgaacggctaaggtacatgcttctcgcccttgcttgggcggttgccgcctttttttgtatccgcacagtatcccgtgaagtctag

SEQ ID NO: 48054 - DNA, 204 bp, Neisseria meningitidis
atgaatattattggtaaattgaaagaagctgcttcctattttcttacaaaattgattggagaaaatcctagtaatgagcaggtaaaccgcgcacttatacagatgccaaatgttcgtccgatacacacctatccacgcccaaatttaagaaactcaggcgtggcagccgcgaaacgcgcggcgcgcaaacgcaagaatcgtcgt

SEQ ID NO: 48055 - DNA, 204 bp, Neisseria meningitidis; identical to SEQ ID NO: 40089

SEQ ID NO: 48056 - DNA, 192 bp, Neisseria meningitidis
gtgaagcataagctctcgtcttggtggaaaaccatcaagctgacagcaaacttgatggcaggcgtgcccgattatgaaaactacgttgcacagcagcgcaaacataatcccaacgcccctgtgatgaccaagctgcagtttcaagactattgccgcaaacgccgctgcggcgcaaacggcggacgctgctgt

SEQ ID NO: 48057 - DNA, 444 bp, Neisseria meningitidis; identical to SEQ ID NO: 37707

SEQ ID NO: 48058 - DNA, 329 bp, Neisseria meningitidis
atgttggacgcaagcccaccgcaagagcggggtagccgccgcgaaacgcgcagccaaaaaaagcgtcacaaataaccgcctttttccgatggctgggcggcttggtctctaatccggccacagggaaaatcagccataccaaactttgggcaaacgtcgccgcagccgccatgacttggaagttcgtgcaggcggcggacgcgcccgaatggctttggtgggcatacggcgcgatggtcggcgggtatgcattaatcaaacgcggcatcgccgccgtaccgcagttggcggaagtcaaaaaatccgcaaatcaggaaggggggcggcaa

SEQ ID NO: 48059 - DNA, 123 bp, Neisseria meningitidis
atgagacctttgcaaaattccccaaaattcccaccaagacatttaggggattttggggaattttgcaaaggtctcggacagtattttgaacgcagtgcgcgtaaattcgtatggaaaccatga

SEQ ID NO: 48060 - DNA, 396 bp, Neisseria meningitidis; identical to SEQ ID NO: 40092

SEQ ID NO: 48061 - DNA, 195 bp, Neisseria meningitidis
atgccgtctgaaaaaatctattacggcgtattgattttcttatgtatcgcttctatgctgctgtcgccgtttttttatgcgggtgctttgaagcccaagaaggcggcattgcggaaggacgggcagtggaaactcatcttattgtccaataccgtggcggcggcggttttgttttggatgtggtggaaatggttt

SEQ ID NO: 48062 - DNA, 207 bp, Neisseria meningitidis; identical to SEQ ID NO: 38061

SEQ ID NO: 48063 - DNA, 186 bp, Neisseria meningitidis
gtgaaaaaaggcgtacattccgctacacagaattacagacgcagcggagcaatgccgtctgaaaggattttccggtcagtcttgcgattggtcggggtttcatcggaaacggtgaaacgaaagtttgccggcgtagagttgagctacgcgggcaaagccgcaggcgaaagcctgtattgtttgtga

SEQ ID NO: 48064 - DNA, 120 bp, Neisseria meningitidis; identical to SEQ ID NO: 38062

SEQ ID NO: 48065 - DNA, 348 bp, Neisseria meningitidis
gtggctttgcgcactcactttgtcatttccaatgttccaagtacacctaatctgctaagaggaagacagcttgaaggaaaacttattttagaagttcctgctcaggtcaatccaattccacaatctgtattaagggcggcacaagaagaaaatgttatcattagagatacaacaggaaggatttacaataggtggtggtttagtattaggtggttgtgcaggtgcacatcttgcaagaaaagaaccattgatactaacagggaaaacaggggcaggtgcgtcagcaattgcaaatgcaagcattggatatcaatggactgtcaatttgtcagagccaaaagaaggagc

SEQ ID NO: 48066 - DNA, 423 bp, Neisseria meningitidis
atgaatttggaacagttgggcaggcgggacgcgctgctttccggacttttgaaacaggcgggacagtggcggcggttggatgccgccgtgaaaaaactgctgcctgccaacctgcacccgcattttcagacggcctgcgtcgaagacggcaggctgattcttttggcggcaaacaatatggcggcatcgcgcttgaagatgattgccccgtcggtattgccgcagctggcagggcttgacgcttcgatacgctctgtttcggtcaggctggtcccgaaaccggaaaaaccgccgaaaaccaataccctgcatttgagtaaggctgcgctggagagtttcggttcggcggcggcaaagttggaaaaacggcatcccgaattggcggaggcattggcaaacttggttagaaggcatggcgcataa

SEQ ID NO: 48067 - DNA, 366 bp, Neisseria meningitidis; identical to SEQ ID NO: 37025

SEQ ID NO: 48068 - DNA, 351 bp, Neisseria meningitidis
atgtttaccacaaacgatttacgccatttcctagaaggtttggccatcctattctcaatcggctattggggcaccatgctgctgttgctttggtttctcgtccgctttgcctataaaaagcccaaacggaaccccggcaaaatcctttcaggcagcctgaccgccgccgctatcctgatgctgtttgtttggattattcccaaacaattcggcccgatcaaagaagaaatacaggcacaagaagagtgggacagaaaatacaaagaagccgaagccgtgtttaacgaacaatgcaaaacggcgggggaaagatttaccagacggcggacaatgtggaagggattatgctgt

SEQ ID NO: 48069 - DNA, 222 bp, Neisseria meningitidis
atgggcggcaaagtgcagcacaataaaggcaaaatacgcgacaatgctttaaaagccttagtgaaatccgatttgttccggcacaaggtggaacggaaaaggaaaggcaaaggcagctacaacaggcaggaagcgaaaaaatggcgggacggttttgatactgtcccgccgtttttatgccttaaacgtggaagctttcgccgcagccgcaggagtctttga

SEQ ID NO: 48070 - DNA, 213 bp, Neisseria meningitidis; identical to SEQ ID NO: 39705

SEQ ID NO: 48071 - DNA, 204 bp, Neisseria meningitidis; identical to SEQ ID NO: 38753

SEQ ID NO: 48072 - DNA, 204 bp, Neisseria meningitidis; identical to SEQ ID NO: 39691

SEQ ID NO: 48073 - DNA, 177 bp, Neisseria meningitidis
atgccgtctgaacgcacgttttgccgttcagacggcatttttatttccttttcctgcctgccgccctttgaaaatcccttacgcgccgccctgtttgaaacaaagcaaacgcccgccgcgaaccggacaatcttgatacgcagccaaagcaagtccggcggtaagttgttaaacata

SEQ ID NO: 48074 - DNA, 183 bp, Neisseria meningitidis; identical to SEQ ID NO: 46082

SEQ ID NO: 48075 - DNA, 399 bp, Neisseria meningitidis
ttgaatatgaaagagcggatagtgggtcaaagcggcgagttgttttgtttcgggcaaatgcccgtatggaaggcggaaaacctgccggaagttttgttgtcgggctattcgtccgaggaaggggaatgggtctgcctgaatgtgttgcagggcgatgtcgaagtccgcacgcaggacggggcggcggaggtttggtcggcagaaagcggcgattgcgtgtttgcgccgcagcaggtgttttcggtcaaactgaaaacggacgatgccgaaatccgtttgtcgctgtattgcgcggcggcagactattttcacaaaaaatacgggatgagtgccacgcattctgcggtcgcggcggcacgggataccgtaccggcgggcagggcgttggatatgggttga

SEQ ID NO: 48076 - DNA, 216 bp, Neisseria meningitidis
ttgcgtataggcaatgacctctttgtcaaacgtgtgcaacgtataccgggcaaactgcttgtaacgtctgaaaatccacgttacgcaccgtttgaaatagatttgagtaatacccaagacgacatcgccatcataggccgtgttgagtggtatggccggagtattccccacaggaaaacgtcgctctgttccgccacaacggcgaaatcctgttga

SEQ ID NO: 48077 - DNA, 552 bp, Neisseria meningitidis; identical to SEQ ID NO: 39879

SEQ ID NO: 48078 - DNA, 1233 bp, Neisseria meningitidis
atgccttctgcccattatcctgaaatgagcgaaaaactgatggcggttttgatggcgatgctggttacgctgatgccgttttccatcgatgcctacctgcccgcgattcccgaaatggcgcagtcgctgaacgcggatgtccaccgcatcgaacagagcctgagtttgtttatgttcggcacggcgttcggacaggtggtcggcggttcggtgtccgacatcaaagggcgcaaacccgtcgcgctgaccggactggccgtctactgccttgccgttgccgccatcgtatttgcttcgagtgccgaacagctcctcaacctgcgcgtcgtgcaggcattcggtgcgggcatgactgtggtcatcgtcggcgcaatggtgcgcgattattattccggacgcaaagccgcccagatgtttgcccttatcggcatcattttgatggttgtgccgctggtcgcacccatggtcggcgcattgttgcagggcttgggtggctggcaggcgatttttgtttttctggcggcgtattcgctggtgctgctcggtttggtacagtatttcctgcccaagcccgccgtcggcggcaaaatcggcagggacgtgttcgggctggtggcggggcggttcaagcgcgtattgaaaacccgtgccgcgatgggttatctgttttttcaggcattcagcttcggttcgatgttcgcctttctgaccgaatcttccttcgtgtaccagcagctctaccacgttacgccgcaccagtacgcttgggcgtttgcgctcaacatcatcacgatgatgtttttcaaccgtattaccgcgtggcggctcaaaaccggcgcgcatccgcaaagcatcctgctgtgggggattgtcgtccaatttgccgccaacctgtcccaactcgccgccgtgctgtttttcgggttgcccccgttttggctgctggttgcgtgcgtgatgttttccgtcggtacgcagggcttggtcggcgcgaacacgcaggcatgctttatgtcttatttcaaagaagagggcggcagcgcgaacgccgtgttgggcgtgttccagtccttaatcggcgcgggggtgggtatggcggcgaccttcttgcacgacggttcggcaaccgtgatggcggcaacgatgaccgcgtccacctcttgcggcattgcgcttctgtggctgtgttcgcaccgggcgtggaaggaaaacgaacagagcgaatacctttaa

SEQ ID NO: 48079 - DNA, 237 bp, Neisseria meningitidis
atggcatacacatcaacaataggaaaaaatatggatgaagcggtttttgccgattgggcgttgaaaatctgcctgaccggtttgattatttttttgggttttatcgtttggaatttgggcaaggagtccaaagcgggcaaattcggcatcgccattttgtttttggttttgggcttgggcgtgttcggttttgtatttaaagaactgctaatcaagtttttggtattgcccaaatag

SEQ ID NO: 48080 - DNA, 234 bp, Neisseria meningitidis
gtgcggacgtggttggttttttggttgcagcgtttgaaatacccgttgttgctttggattgcggatatgttgctgtaccggttgttgggcggcgcggaaatcgaatgcggccgttgccctgtgccgccgatgacggattggcagcattttttgccggcgatgggaacggtgtcggcttgggtggcggtgatttgggcatatctgattattgaaagtgaaaaaaacggaagatat

SEQ ID NO: 48081 - DNA, 150 bp, Neisseria meningitidis
atgtccgcgctgctgccggctgcctgccaacacgtttcggacaggcatggcaaattccgcttccaaattctgcattgccaaaggcggcagacgggaagtaaaaaaagacgaaagcggcggcggatatgccctgtgccatttgccggacag

SEQ ID NO: 48082 - DNA, 198 bp, Neisseria meningitidis
atgtccgttcaaaccgttacatataataagttttttatgaacacaaaccaacctgccgtttacgacccgttgacacgcgcgctgcactggctgaccgttgccggtttcatcggcattctgaccaccattgtcctgtggacgatttatagtggattaacaaaaatcaggacaaggcgacgaagccgcagacagtacaaa

SEQ ID NO: 48083 - DNA, 174 bp, Neisseria meningitidis
atgtgcgtggctattatggcatattttggcggctttgttcgcgctttgttcgatcttggcgtgtttgaacgcggcggcgtgaaaggaagggggaaatggttttcccgcgtttggcggcggtcggaggtgctgtgcctgatgtgcggcggcatattttcggtgaaattgatttta

SEQ ID NO: 48084 - DNA, 570 bp, Neisseria meningitidis
gtgaattataaaatatacgatggtgcaaagattattaaaaaagaaaatttatcaattggggattattctcaaattgatgattttgtattttttaattgtggagagaaaagtattttaggaagttttgttcatatatcatcatttaccagtattattggtggtggagaattttatatggatcatttttcaggattaagcgcagggtgtagaattattaccggtagcgatgattttatggggggggggggaaccaatccaacagtcccatctaaatatactaatgttaaaaaatctagtgttagaattggaaaacatgcaattttaggaacaaatgtaacagtattaccaggcgttactattggtgatggggttgctgttggagcaggggctatagtgagaaaaaatcttgagccgtggactatttatgtcggggtagattgtaaaccactgaagcgcagatcacaagataaaatattggagttagagaaacatcttgtagcagaatttaatctagatttatgtcctataatcccatccccgaacctgcccaaaccaaaggaaacgcgatga

SEQ ID NO: 48085 - DNA, 1131 bp, Neisseria meningitidis
atgaaaatcgtttttatcacaacagtcgcatccagcatttacggtttccgcgcccccgtcattaaaaaattaatcggcaaaaaccatcaggtgtatgcctttgtatcggagttttccgataatgaattggatattatcagggaaatgggggttacacccgttacctaccgttcaaaccgcagcgggctgaacccgttttccgatataaaatccaccttcctcatatttaaagaactcaaaaaaatatcgccggatttggttttcccttatttcgcaaaacccgtgattttcggcacttttgccgcaaaactggcaggcgtgcccagaatcgtcgggatgctggaaggtttgggattcgcatttaccccgcaaccggaaggcataccgttaaaaacaaaaatcataaaggggattttgattgccttgtaccgcattgccctgccgatgttggaaagcctgattgtattaaaccccgacgacaaagacgaactgacggacaaatacggcatcaaaataaaaaacatccatattttgggcggaatcggtctggatttgcggcaatatccttattccgaggcggatattcccgatgaaaaagaacccgtaaaattcctctttatcggcagatttctgaaagaaaaggggattgatgattttattcgggcggcggaacaggttaaggacaaataccccgatacggtttttaccgctttgggcgcaatcgacaaatcacgcgggggggggggcgatttggaacgccttgccgcccgcgatattatccgtttccccggttttgtgaacaatgtttccgaagtgataaaagaacatcatatattcgtattgccgtcttattatagggaaggcgttccccgaagcactcaggaggcaatggccgtcggcagggcagtgattacgacggatgtccccggatgcagggaaacggtcgccgacaaggtcaacggcttcctgatcgaaccttggaatccccgcatcttggccgaaaaaatgatttattttatcgaaaacagggaagccgtccgcctgatggggaatgcaagttatgcgattgccaaagataaattcgatgccgaaaaagtcgatttgaaattgctcgatattttgaaggcgtaa

SEQ ID NO: 48086 - DNA, 954 bp, Neisseria meningitidis
atgcatcaatattatgacgcagtaattttatcggttggaaatgggttgttaaaaaggttctttaagcagaatgcgcaattaaatattgcttcaaggccattgattattaccttgtttccaggtgtagtattcggtgatcaggcaagtattctatctcgtatgggggctgatattgttttatataataataagcatgattttagaattgcagagacatataaaaaacaatataaattaagttgtcaaaatatactttatggttatccaaattttcgccatgcttcgaaaggttgtcatggagagagaatttattttattgaccaagtcaaaattccatttaaaaaagaagaaagaatttacacattaaaaaaattgattgccttggctgaaaaataccctgagaaagaatttactattttgctaagggttgcagataaagatattactgtgcatcaggataaacattcgtatatagagctggcaaagcagtttcagttgccgagtaatttgacaatagagcgaaaaagtaccgcgcaagccttccaagaaatggggtattgtttatcttattcatctactatgctttttgaagctgaatgtaagggtatccctgttggtgttgttgcagacttaggcttttctaaatcctatgcaaatcagcattttttaggtagtggggttttaatttattttgatcaaatagatttcacttccccaaaaatagcaaatccgggctggcttgattgctatgctactaaaaaggtgattacaactgatgagtttaataagctattaaagcaggttgtgccattgcaacatgattaccaagaatatttatttgcagtgaacagtatagaatcaacccaaaccatttttttgcggaagtttaaaaagctcattagagatcccaagcaatttttttatgactctaaatggtttagaagaagaaatagt

SEQ ID NO: 48087 - DNA, 804 bp, Neisseria meningitidis
atggcagacatcctgccatccgacaagcggcggcaaccgccaaaaacgaaaggaaatccaatgaacataatcgaacaagaaatgaaacactccagtctgagaaaagtagatgccgaaatcgccaaaatcattgcagacgcgcacaaaatcaacgccgaatccgtaaaaatagcccaagagtcccgctggtatcccatgatagcggccaccgggctggttaccgccatcgccgccgtgttggcactgatattcaaatttgcctgaccacaagccccgcgaggggctttatccctacaaaatgaacagagccgcactattcaaccgctaccccgaatggattatcgggcaagacggcgcaagccgtttcattacccattgccgctatccccgcctgattgccaaaatccacaggcagacagacggcgaatgcccgggcgggcattaccgccattccgaaaacggcatcaccctttacgattttatttttttcgacggcaaaccggcagacgaagcccgatttgccgccgtccttaccgaaacctgccgcagggcagtcaaaaaaatatgcgaaacaaaataaaccgcaacgacatggaactcggctacacgccttacaaccttcgcacccttcgcaaccgctgcaaactgacacaggccgagttggcgcaaatcgtcggggtgaagcactacatacaggtaggccgctgggaagccgaacccgataccgaaacccgtcgggccgatatgccgctggaaaaatggcggcagttcctcgattggatagaaaaaacaaacgccgtctga

SEQ ID NO: 48088 - DNA, 837 bp, Neisseria meningitidis
ttggggaattttgcaaaggtctcaaattgtgaattctgggataaaattaattataatcgggctgcccaagccgccgagcagcgggcaaagcaggcgcaggaaacaccgaaagagccgccgaaacaggaagagcactttatcgccaagctgccgaacgacaagctaatgacgatatacaggctgtttcaaaaacaactggacgacatgcgcggcttggagcgcgatatagaacgcggagattggtacatcaatgcgcgataccgcatgaacgaaaaccgaaacaaaataagggcgctggaagacgacaacaaacggctgcatcacgactattgggcagtccaagaccaaggcgaaaaccgctttttcggcatgggtaaaatcggcgcaaaactggttaaggaaaacgagaagcagcaacacatcaacgaacggcatggagcgaacgtgcgagaaatccggcggctgaaaacagaaaacgaaaaactggaagggcagtatagcgacaagttggccgccgacgtggtcaaagtacgcgacaggtttaacgaagaactggacaatgtccgcagggaaatcggcaaacggccgatggaagaattcaggaacgtatttttgcaggcagcccaagaagcacagacgacaatagggcagaaggcggttcaaatcgaactggaaaaattccccctgaacggcagcccttcggccaagcgaatcgcgttttatttcggcgcgcagcggataagggaagtagagcagaaggagcgggaagaccagcgcaaagagcaggagcggcaggcgcggcgtatggagcgggacgacggccacggcatcggcatg

SEQ ID NO: 48089 - DNA, 141 bp, Neisseria meningitidis
ttggaagacgtattatggtacaaagtcagcaaatgcatcgaaaatatttacttctcgcatacaacgcagatacaattgcagcaattcaggaagcaaaaatggagcgaaaaattgtatcacttctctgtcttcattattaca

SEQ ID NO: 48090 - DNA, 912 bp, Neisseria meningitidis
atggaaaaagcagaacatttgaacagcagccggttcgtcaatctggtcaaaagcggcggcggcagctatgtggagggcagctaccgtttcgatactttgtccaacggcatttccatccacggcggcacagtaacggcacggtgtgatttttgcagcagccgcctcgccgaaccttatgtgtcgttcgtgctcttgctggaaggcagtttggacttcggcatcaaccgctgccgcttccaaatcgatgcggacggcggcaagattgtcctaattgctgtcggggaagaagtcctgttcagccgctatctttatcgcggcggcaaaacggtcaaaatgacaattaaaggtatggaacaatggctgctgcgtccggaatacgcgcgtttcgcacccctgctttaccgcgaaccggtcaggatataggatttgcccccgaacctgcgcggcttggcggcatcctgcctgaaagccgtcccaaaggggcatttgggcaaaacattacgccgcgaggcagacgtgttgcggctgctgtcggacttgtgggacacggtttcagacggcatcgggccggcggcggggcaaacggcggaagcagacgctatgccgtctgaagacttcagccgcaccctaaatgccgcgtttgccgacgggcaagtcaaccggctgacagacgcgctgaacatcagtgaaaggacgctgcaacgccgtatgcgcgaccatttcggtattaccgcaagcgagtggctgcaccacaaacaaatgcagcacgcgctctacctgttgcaaaacgggggcaaaagcataggcgaaaccgcatatttatgcggctaccgccacgtttccagctttactcaggcattcaggcaatatttcggcagcacgccggcggaaaccaaaaaagaaaaccgataa

SEQ ID NO: 48091 - DNA, 780 bp, Neisseria meningitidis
cagcccccaaaaaaccttctcttctcttctcttctcttctcttctcttctcttctcttccgcagcgcaggcggcaagtgaagacagcgggcacggcccgtattatgtgcaggcggatttagcttatgccgccgaacgtattacccacgattatccgaaagcaaccggtgcaaacaacacaagcacagtaagcgattatttcagaaacatccgtgcgcattccatccacccccgggtgtcggtcggctacgatttcggcggctggaggatagcggcagattatgccagttacagaaaatggaaagaaagtaattcttctactaaaaaagttactgaagatatagcagacaactacaaagaaaccaaaacagaacatcaaggaaacggcagcttccacgccgcttcttctctcggcttatccgccatttacgatttcaaactcaacgataaattcaaaccctatatcggcgcgcgcgtcgcctacggacacgttaaacatcaggttcattcagtggaaacaaaaaccacgactgttacctctaaaccgacggcaacctctccacagggaggccctattatacaaactgatcccagcaaacctccctatcacgaaagccacagcatcagcagcttgggtcttggtgtcatcgccggtgtcggtttcgacatcacgcccaagctgaccttggacaccggataccgctaccacaactggggacgcttggaaaacacccgcttcaaaacccacgaagtctcattgggcatgcgctaccgcttctga

SEQ ID NO: 48092 - DNA, 402 bp, Neisseria meningitidis; identical to SEQ ID NO: 42069

SEQ ID NO: 48093 - DNA, 552 bp, Neisseria meningitidis
atggaattcctatctcttcacccttggtggtctttttttattatattaactattatccttagctatattggattctgtgcacatctccacattcaaaatagggcagttttcttttatagctatcgggatgtaactattattttcttgacacctgtcatcctcatcgctctaagttatttaattaaaaataaagaaatcctgtcagcttgtatcttatgtataactcttattgcattttcatgggcatggattataatctatcgacctaatactaaaaggttttttctttccttattgatagtatggggaaaattgttattaagtactattgtttgggcaattctcgccatatcacttggcttagctgtaataacagggaacagcaagcgtaaaaaatatgaacgacgtgaccgtcatgctgaacgtaatgaaaaagcttttataggtgcgctattagtaggtttcgaattatcaagaaatttattgaatttatgttgcctacacaaggatttttccaccccatctaaaaacattgaagtcaatcgctcttaa

SEQ ID NO: 48094 - DNA, 1770 bp, Neisseria meningitidis
atgaataccaaactgacaaaaatcatttccggtctctttgtcgcaaccgccgcctttcagacagcatcggcaggaaacattacagacatcaaagtttcctccctgcccaacaaacagaaaatcgtcaaagtcagctttgacaaagagattgtcaacccgaccggcttcgtaacctcctcaccggcccgcatcgccttggactttgaacaaaccggcatttccatggatcaacaggtactcgaatatgccgatcctctgttgagcaaaatcagtgccgcacaaaacagcagccgtgcgcgtctggttctgaatctgaacaaaccgggccaatacaataccgaagtacgcgggaacaaagtttggatattcattaacgaatcggacgataccgtgtccgcccccgcacgccccgccgtaaaagccgcgcctgccgcaccggcaaaacaacaggctgccgcaccgtctaccaagtccgcagtatccgtatccacaggccggaaaatctcccttgacttccaagatgtcgaaatccgcaccatcctgcagattttggcaaaagaatccgggatgaacattgttgccagcgactccgtcaacggcaaaatgaccctctccctcaaagacgtaccttgggatcaggctttggatttggttatgcaggcacgcaacctcgatatgcgccaacaagggaacatcgtcaacatcgcgccccgcgacgagctgcttgccaaagacaaagccttcttacaggcggaaaaagacattgccgatctgggcgcgctgtattcacaaaacttccaattgaaatacaaaaatgtggaagaattccgcagcatcctgcgtttggacaatgccgacacaaccggaaaccgcaatacgcttgtcagcggcaggggcagcgtgctgatcgatcccgccaccaataccctgattgttaccgatacccgcagcgtcatcgaaaaattccgcaaactgattgacgaattggacgtacccgcgcaacaagtgatgattgaggcgcgtatcgtcgaagcggcagacggcttctcgcgcgatttgggcgttaaattcggcgcgacaggcaagaaaaagctgaaaaatgatacaagcgcattcggctggggggtaaactccggcttcggcggcgacgataaatggggggccgaaaccaaaatcaacctgccgattaccgctgccgcaaacagcatttcgctggtgcgcgcgatttcctccggtgccttgaatttggaattgtccgcatccgaatcgctttcaaaaaccaaaacgcttgccaatccgcgcgtgctgacccaaaaccgcaaagaggccaaaatcgaatccggttacgaaattcctttcaccgtaacctcaatcgcgaacggcggcagcagcacgaacacggaactcaaaaaagccgtcttggggctgaccgttacgccgaacatcacgcccgacggccaaatcattatgaccgtcaaaatcaacaaggactcgcctgcgcaatgtgcctccggtaatcagacgatcctgtgtatttcgaccaaaaacctgaatacgcaggctatggttgaaaacggcggcacattgattgtcggcggtatttatgaagaagacaacggcaatacgctgaccaaagtccccctgttgggcgacatccccgttatcggcaacctctttaaaacacgcgggaaaaaaaccgaccgccgcgaactgctgattttcattaccccgaggattatgggtacggccggcaacagcctgcgctattga

SEQ ID NO: 48095 - DNA, 1173 bp, Neisseria meningitidis
atggatttaagtatcgtagttcccatttataatgtcgaaagttatttggaagcgtgtttaagttccatagaacctatattaagtaatgaaaatgtcgaacttctccttgtgaatgacgggtcaaaagacggaagtgaagatatatgttataaatatatagataaaacaacaaacaacaaacaacaaacaacaaacaacaaacaacaaacaacaaacaacaaacaacaaacaacaaacaacaaacaacaaacaacaaacaacaaacaacaaacaacaaacaacaaacaacaaacaacaaacaacaaacaacaaacaacaaacaacaaacaacaaacaacaaacaacaaacaacaaacaacaaacaacaaacaccggacaccaaatatcaaatatatatatcaggataaccaaggattgtcagaggcgagaaataccggaataaaaaattcaaacggaaaatatatagtctttattgattcggatgattttattaattgtcaggtcttgctggattttcttagtaaagatgatattgatatgccggatgtggtttttttaaatgcggttaaatatgataagggaagtgtttcatattttggcgaagattatcagcctgaaaaaatactcaatcaatccaaagtcgaagttttgaaaggattatgccgatttagaaaatttccgggttcggcgtggaataagattataaaaagagaattgatcatcaaagaaaaactattttttgaaaaggggatttattctgaagatatcgaatggtcaatgaggttatttaatgcggcaacaacttttttttatttggacggttgttattactattatcggcagggaagaaaagattctattacgggaactgtttcggaaaaaagtataaagtcattattatatattttggagaaaaatgcggaaatggaatttaatagggatatatcaagttatctttattcctttctttcctacgaatatctcgttttgctttttatcatgacgagtaaaaatatagagtgtgatgctgatataaaaagaagggcgtatcatttaaggtttatgctgttaaagtccaataaattgatatataagctgatattcccgataatcacattattcggggtcgatattacaggcaggattttaaaagtaatcagagggaatgtttaa

SEQ ID NO: 48096 - DNA, 1158 bp, Neisseria meningitidis
atgaaacgccaagccttagctgcaatgattgcttccttattcgcattagccgcctgcggcggcgaacctgccgcgcaagcccctgccgcttccgcagaagccgcaagttccgccgcacaaaccgccgccgaaacgccgacaggcgaactgcccgttatcgatgcagttaccacccacgctcctgaagtacctcccgcaatcgaccgcgactatcctgccaaagtccgcgtaaaaatggaaactgtcgaaaacatgaccatggaagacggtgtggaataccgctactggacatttgacggcgacgttccgggtcgcatgatccgcgtacgcgaaggcgatacggttgaagtggaattttccaacaacccgtcttctaccgttccccataacgtcgacttccacgccgcaaccggtcagggcggcggtgcagccgcaacctttaccgccccgggccgcacttccacattcagcttcaaagccctgcaaccgggtctgtacatctaccactgcgccgtcgcgccggtcggtatgcacatcgccaacggtatgtacggtctgattttggtcgagcctaaagaaggtctgccgaaagtggataaagagttctacatcgtccaaggcgacttctacaccaaaggcaaaaaaggcgcgcaaggcctgcaaccgttcgatatggacaaagccgttgccgaacagcctgaatacgtcgtattcaacggtcatgtaggttctatcgccggcgataacgcgctgaaagccaaagcaggcgaaaccgtgcgtatgtacgtcggtaacggcggtccgaacctagtgtcttccttccacgtcatcggcgaaatcttcgacaaagtttatgtggaaggcggcaagctgattaacgaaaacgtacaaagcaccatcgttcctgccggcggttccgccatcgtcgaattcaaagtcgacatcccgggcagctacactttggtcgaccactccatcttccgcgcattcaacaaaggcgcgttgggccaattgaaagtagagggtgcggaaaaccctgaaatcatgactcaaaaattgagtgataccgcttacgccggtaacggtgcagctcctgctgcttccgctcccgcagcttctgccccggcagcctctgcatccgaaaaaagcgtttattaa

SEQ ID NO: 48097 - DNA, 192 bp, Neisseria meningitidis
atgccgtctgaaaaccgcagcgcggggtttgtggtgcattatgccgtattgcaggacaaggcacagggcagggcggcggggtgcatcgtagcaactgtatttttgcccgacggggtgaaaaatacagttgctacacccactgataatgaaaaaagagagcaatgccgtctgaaccgcgtgttgcggcgagca

SEQ ID NO: 48098 - DNA, 489 bp, Neisseria meningitidis
atgaaataccgtcgtttttaccgcaatggcggcacttacttttttacggttgtaaccaataaacggcagaagattttgaccgatgatgcggtgcgtttggctttacggcaggcggtaatggcggtgcgcgaacggtatccgtttgaaattttggcatgggtgttgatgcccgaccatctgcataccatatggcggctgccggacaatgattctgcttattcggaacgctggcggcaaatcaagcggcacagccaatatttaatcggcggcaatctcaggctttggcaaaaacgcttttgggaatatactatccgcgatgaggccgattttgcctggcattttgattatctgcatttcaatccggtcaaacatggctatgtaggacaaatttccgattggcggttttctacgtttcaccgttatgtcaaacagggtatttatccgcataattggggtggcggcaatgcggacttttctattggatacgat

SEQ ID NO: 48099 - DNA, 423 bp, Neisseria meningitidis
atgtctgaaccgattattacccctgccgccgtttatatttttggcggcgtggtcggcgcaggttatctgttggggatgcctgtcgatgcagtcgtgctgggcgcagtggcttcggcggcggtaacgatgataagcgagccgaaaagccgctggatggtagtggcctatatcgttatcggcgggcttttgggtggcgcttttgccccaccgctgacgcatttcttaatcggcgaagtagttggcagccatccgtcgctgggtgagcagcgcatacagtttgcacatgcctttgcccccgtcgttgtcggcttgttgtggcaggtattgttgagatttgcccgcgctgtctggccatcgttcgaaaagcatgcagacgatattgtggagtggctgctgaatcttctgccgtggagaccgaaaaaa

SEQ ID NO: 48100 - DNA, 273 bp, Neisseria meningitidis; identical to SEQ ID NO: 42079

SEQ ID NO: 48101 - DNA, 791 bp, Neisseria meningitidis
atgaatccagcccccaaaaaccttctcttctcttctcttctcttctcttctcttccgcagcgcaggcggcaagtgaagacggcagccgcagcccgtattatgtgcaggcggatttagcctatgccgccgaacgcattacccacgattatccgaaagcaaccggtgcaaacaacacaagcacagtaagcgattatttcagaaacatccgtgcgcattccatccacccccgagtgtcagtcggctacgatttcggcgactggagaatagcggcagattatgccagttatagaaaatggaacaacaataaatattccgtcaacacaaaagagttgcaaagaaacaatagcagtggcatctggcaagaactgaagacggaaaatcaggaaaacggtacattccacgccgtctcatcgctcggcttatccgccatttacgatttcaaactcaacgataaattcgataaattcaaaccctatatcggcgcgcgcgtcgcctacggacacgttaaacatcaggttcattcggtgagaaaagaaaccaagactactttcagtaaaccaggggttggcgttacagagccaggcaagatcgtagaaggtccgacccccaaacctccctatcacgaaagcaacagtatcagcagcttgggtcttggtgtcatcgccggtgtcggtttcgacatcacacccaagctgaccctggacaccggataccgctaccacaactggggacgcttgaaaaacacccgcttcaaaacccacgaagtctcattgggcatgcgctaccgcttc

SEQ ID NO: 48102 - DNA, 612 bp, Neisseria meningitidis
atgaactttacccgactgctcaaccaagtcttaagcacggttcaaaaaagcaacacattctccgacagcccgctcaattcattcggcggaggcgcgctggttgccggtgtcgcctccatgctgctgaacggtaaaaaccgcaaaaccatcaccaaaatcggttcgaccgccgctttgggctacctcgcctaccggggctatcagatgtggcagcaaaacaaagggcgggcaaccgtaacacaaagcgatttccaacctgccggagaaaccgaagaaacatacagccgcaccgtattgcgcaccatgatagccaccgccgcttcagacggcatgatagacgaagccgaacgccggactatcgaacaggaaagcggcacagaccccgaaactgctgcatggctcgccgccgaataccgcctgcccgcaagcatcgaagacatcgccgccgccgtcggcaacgatgaggcgttggcggcggaggcctatctggcggcaagactggtatgtgccgatttgtcgcggaaagaaaccgtcttcctcgcccgcctgtcgcaggctttggaactggatgacaatctggtggaaaacttggaaaggcaattggggttttga

SEQ ID NO: 48103 - DNA, 2043 bp, Neisseria meningitidis
atgaaactcgaagcaagcaagcaagcaagcaagcaagagaagtttaaaaaatcatttattataagtctatttttttctattctttatacctctccgcttttggctgttgattacgtttacgacaattctaaattaacaaatgagcaaattgatcgcttaaaaaaacttagagataaaagcagcgaatactggaaacaagaaacttatcttctaaaaccgacgaatggtagctctcagaactctctcaaagttcccgcactatactctaaaacacaccaattcaaaaacatcaacaactcaaaaaagatttctttttatgacaaggaatacactgaagattaccttgttggcttcgcccgaggtttcggggttgaaaaaagaaatggggaagaagaaaaaacactccagcaatattttaaggactgtgtaaatactgggaattccaataatgataagtgtgaacaaccatccttcgaaaactctggcccaagattaataaagagcgatattttcgccttagctccacaaataaaaaatagccatatcaacagcgaaattttatctgtaggtaattatatcgaatggcttcgcccaacacttaataagcttcctagttggcaagagcatctctattctggtttagatccattccactatattgaggttacagacaactcacacgttatcggacaaacaattagtttggatgaattccgcttagaaaattctctctgggaaccccgttgggattctgatgttggggaattaaaaacaacgaatgcagacatccgttttaatactaaaagtgaaagtttactcgtaaaagaagattatgctggcggagctcgttttcgttttgcttacgatctaaaagataaagtctctgaaacaccagttttaacttttgaaaaaaatataactggcacttccgacatcatcttcgaaaatccaatagacgatttaaaaagtctcgacgggcatcaaattatcaaagtaaatggcacagcagataaacacgcattccgtctttctggcaaacaccaaaagggaatttatacgctttctttacaacaacgcccagaaggcttttttaccaaagtgcaagaacgcgatgatatttcgatttatgcacaacaggctcaagccgccaataccttattcgccttgcgtttgaacgacaaaaacagcgatatttttgaccgcactttaccacgcaaaggcttgtggttgcgtgtgattgacggacattccaaccaatgggtgcaaggcaaaacagcacctgtagaaggctatcgtaaaggtgtgcaactcggtggcgaagtattcacatggcaaaacgaaagtaatcaactttccgttggcttaatgagcggacaagcagaacaacgcagcactttccgcaatccagatacagacaatcttacaacgggaaatgtgaaaggctttggggcgggcatttatgccacttggcatcagcttcaggacaaacagacaggtgcgtatgcggatagctgggtacaatatcaacgcttccgccaccgcattaacactgaagatgctacagaacgttttacttcaaaaggtattaccgcctcaattgaagcgggttacaatgctttattggcagaacacttcactaaaaagggcaacagccttcgtgtttacctacaaccacaggcacaattgacttatttgggggtaaacggaaaattcagcgatagcgaaaatgcccacgtgaatttacttggctcccgccaattacaaactcgggttggcgttcaagctaaagctcaattttcactctataaaaatatcgctattgaacctttcgccgctgtgaacgcgctttaccacaacaaacctttcggtgtggaaatagacggagagcgtcgagtgataaacaataagacggcaattgagagccaattaggtgtagcagtgaaaatcaaatctcacttaactttacaagcctcattcaaccgccaaacaagcaaatatcatcaggctaaacaaggtgcgttgaatttgcagtggacgttttaa

SEQ ID NO: 48104 - DNA, 2124 bp, Neisseria meningitidis
atgacactgaaagcaagcaagcaagcaagcaagcaagcaagcaagcaagcaagcaagcaagcaagcaagcaagcaagcagtcgggttaatctattaacattatctgttttatcgctgttttgcacgccatatgtttgaggttcggatgcgtacgatcccgtcaaagaagccgagattaaaaacaaatttattttagaagcggcggaagacagaaattcccacgtttggcgcggcccgtgcagcatatcttttgattgcttcggtatgttcagagctcagcttggttcaaatactcgttctaccaaaatcggcgacgatgccgatttttcattttcagacaagccgaaacccggcacttcccattatttttccagcggtaaaaccgatcaaaattcatccgaatatgggtatgacgaaatcaatatctaaggtaaaaactacaatagcggcatactcgccgtcgataatatgcccgttgttaagaaatatattacagatacttacggggataatttaaaggatgcggttaagaagcaattacaggatttatacaaaacaagacccgaagcttgggaagaaaataaaaaacggactgaggaggcgtatatagaacagcttggaccaaaatttagtatactcaaacagaaaaaccccgatttaattaataaattggtagaagattccgtactcactcctcatagtaatacatcacagactagtctcaacaacatcttcaataaaaaattacacgtcaaaatcgaaaacaaatcccacgtcgccggacaggtgttggaactgaccaagatgacgctgaaagattccctttgggaaccgcgccgccattccgacatccatacgctggaaacttccgataatgcccgcatccgcctaaacacgaaagatgaaaaactgaccgtccataaagcgtatcagggcggcgcggatttcctgttcggctacgacgtgcgggagtcggacgaacccgccctgacctttgaacaaaacgtcagcggaaaatccaatgtggttttggaacgccggccggaaaatctgaaaacgctcgacgggcgcaaactgattgcggcggaaaaggcagaccctaattcgtttgcgtttaaacaaaattaccggcagggactgtacgaattattgctcaagcaatgcgaaggcggattttgcttgggcgtgcagcgtttggctatccctgaggcggaagcggttttatatgcccaacaggcttatgcggcaaatactttgtttgggttgcgtgccgccgacaggggcggcgacgtgtatgccgccgatccgtcccgtcaaaaattgtggctgcgcttcatcggcggtcggtcgcatcaaaatatacggggcggcgcggctgcggacgggcggcgcaaaggcgtgcaaatcggcggcgaggtgtttgtacggcaaaatgaaggcagccggctggcaatcggcgtgatgggcggcagggccggccagcacgcatcagtcaacggcaaaggcggtgcggcaggcagttatttgcatggttatggcgggggtgtttatgctgcgtggcatcagttgcgcgataaacaaacgggtgcgtatttggacggctggttgcaataccaacgtttcaaacaccgcatcaatgatgaaaaccgtgtggaacgctacaaaaccaaaggttggacggcttctgtcgaaggcggctacaacgcgcttgtggcggaaggcgttgtcggaaaaggcaataatgtgcggttttacctgcaaccgcaggctcagtttacctacttgggcgtaaacggcggctttaccgacagcgaggggacggcggtcggactgctcggcagcggtcagtggcaaagccgcgccggtattcgggcaaaaacccgttttgctttgcgtaacggtgtcaatcttcagcctttcgccgcttttaatgttttgcacaggtcaaaatctttcggcgtggaaatggacggcgaaaaacagacgctggcaggcaggacggcgctcgaagggcggttcggcattgaagccggttggaaaggccatatgtccgcacgcatcggatacggcaaaaggacggacggcgacaaagaagccgcattgtcgctcaaatggctgttttga

SEQ ID NO: 48105 - DNA, 1155 bp, Neisseria meningitidis
atgagcatccatctcgacttcggcattagtcctaaaacgttccgacagactaatctgtatcaaaagcccaagctctttaaaggagcggttcggaatctcgaagccgcatcttggaaagatatcaacgagatataccaacgagcagacccaaccgcaccgctgttttatctgcgtaaaaaaggtgcaattgttcctaaagaagaatacgtcgaaagtttcgacgctttgggcaaaactcgctaccgttttattaaatccgttatctacgaacatatgaagaatggtgcgtcgttagtctataaccatattaacaacgagccgttttcagatcatatttcccgtcaagtcgcccgccttgccggcgcacatactattgttagtgggtatcttgcttttggcagcgacgaatcttataaaaaccattgggacacccgcgatgtgtatgccatccagcttttcggcaagaaacgttggcaacttactgcccctgatttccctatgccattgtatatgcaacagactaaagatactgatatttccattcctgaacatatcgatatggatattatccttgaagcaggtgatgtcctctacatcccgcgcggttggtggcacagacctatcccgctcggctgtgaaaccttccacctcgctgtcggtacctttccgcccaacggctataattacctcgagtggctaatgaagaaattccccaccatagaaagtctgcgccacagtttctcagactgggagcaagataggacgcgtatcaacgatactgccgcacaaattgctgccatgattgccgaccccgtcaattatgaagccttcagtgaagactttctcggcaaagaacgtaccgataccgcttttcatctcgaacagttcgcgaatcccaacgctactccgctttcagacgacgtcaggttgagattaaatgccaataatttggatacgttggaaaagggatatttgattgggaatgggatgaagataagcgtagatgagttggggaaaaaagttttagaacacatcggtaagaatgaaccgttattgttgaaaaatctactggttaacttcaatcagggaaaatatgaagaagttaggaagttgatttatcagttgatagagttagattttctggaaattttgtga

SEQ ID NO: 48106 - DNA, 273 bp, Neisseria meningitidis; identical to SEQ ID NO: 36489

SEQ ID NO: 48107 - DNA, 1806 bp, Neisseria meningitidis; identical to SEQ ID NO: 38691

SEQ ID NO: 48108 - DNA, 918 bp, Neisseria meningitidis; identical to SEQ ID NO: 37376

SEQ ID NO: 48109 - DNA, 1428 bp, Neisseria meningitidis; identical to SEQ ID NO: 47321

SEQ ID NO: 48110 - DNA, 1638 bp, Neisseria meningitidis; identical to SEQ ID NO: 45007

SEQ ID NO: 48111 - DNA, 1116 bp, Neisseria meningitidis; identical to SEQ ID NO: 39202

SEQ ID NO: 48112 - DNA, 786 bp, Neisseria meningitidis; identical to SEQ ID NO: 39210

SEQ ID NO: 48113 - DNA, 177 bp, Neisseria meningitidis; identical to SEQ ID NO: 37349

SEQ ID NO: 48114 - DNA, 1443 bp, Neisseria meningitidis; identical to SEQ ID NO: 38639

SEQ ID NO: 48115 - DNA, 2289 bp, Neisseria meningitidis
ttgacactctatgccgtagaagagctcaactacgacaaactagacagtcataagaaacgcaaatttctcggcattacttatgataaggtacatgatacctctacccaacagatgcaaactgccttaccaagccgtgtagtggctgaatcagctaatctgcaatcaggttgggataccaagttacaaggtacgcagtttgaaaccacgctgggcggcgcggtcatccgtgcaggcgtaggcgaccaggcacgggccgatgccaagattatcctcgaagggatcaaaagcagcatccacacagaaaccgtaagcagcagcaaatccgccctctggcaaaaacaggcaggacgcggcagcaacatcgaaaccctgcaactgccaagtttcaccggccccgttgcgcccgtactctctgctcccggcggctacatcgtcgacattccgaaaggcaatctgaaaaccgaaatcgaaaaactcgccaagcagcccgagtatgcctatctgaaacagctccaagtagcgaaaaacatcaactggaatcaggtgcagcttgcttacgacagatgggactacaaacaggagggcttaaccgaagcaggtgcggcgattatcgcactggccgttaccgtggtcacctcaggcgcaggaaccggagccgtattgggattaaacggtgcggccgccgccgcaaccgatgcagcattcgcctctttggccagccaggcttccgtatcgttcatcaacaacaaaggcgatgtcggcaaaaccctgaaagagctgggcagaagcagcacggtgaaaaatctggtggttgccgccgctaccgcaggcgtagccgacaaaatcggcgcttcggcactgaacaatgtcagcgataagcagtggatcaacaacctgaccgtcaacctagccaatgcgggcagtgccgcactgattaataccgccatcaacggcggcagcctcaaagacaacttgggcgatgccgcactgggtgcgatagtcagtaccgtacacggagaagtagcgagcaaaatcaaatttaatctcagcgaagactacattacccacaagattgcccatgccatagcgggctgtgcggcagcggcggcgaataagggtaagtgtcaggatggtgcgatcggtgcggctgtgggcgagatagtcggggaggctttgacaaacggcaaaaatcctgccactttgacagctaaagaacgcgaacagattttggcatacagcaaactggttgccggtacggtaagcggtgtggtcggcggcgatgtaaatgcggcggcgaatgcggctgaggtagcggtgaaaaataatcagcttagcgacaaagagggtagagaatttgataacgaaatgactgcatgcgccaaacagaataatcctcaactgtgcagaaaaaatactgtaaaaaagtatcaaaatgttgctgataaaagacttgctgcttcgattgcaatatgtacggatatatcccgtagtactgaatgtagaacaatcagaaaacaacatttgatcgatagtagaagccttcattcatcttgggaagcaggtctaattggtaaagatgatgaatggtataaattattcagcaaatcttacacccaagcagatttggctttacagtcttatcatttgaatactgctgctaaatcttggcttcaatcgggcaatacaaagcctttatccgaatggatgtccgaccaaggttatacacttatttcaggagttaatcctagattcattccaataccaagagggtttgtaaaacaaaatacacctattactaatgtcaaatacccggaaggcatcagtttcgatacaaacctaaaaagacatctggcaaatgctgatggttttagtcaaaaacagggcattaaaggagcccataaccgcaccaattttatggcagaactaaattcacgaggaggacgcgtaaaatctgaaacccaaactgatattgaaggcattacccgaattaaatatgagattcctacactagacaggacaggtaaacctgatggtggatttaaggaaatttcaagtataaaaactgtttataatcctaaaaaattttctgatgataaaatacttcaaatggctcaaaatgctgcttcacaaggatattcaaaagcctctaaaattgctcaaaatgaaagaactaaatcaatatcggaaagaaaaaatgtcattcaattctcagaaacctttgacggaatcaaatttagatcatattttgatgtaaatacaggaagaattacaaacattcacccagaataa

SEQ ID NO: 48116 - DNA, 474 bp, Neisseria meningitidis; identical to SEQ ID NO: 36318

SEQ ID NO: 48117 - DNA, 540 bp, Neisseria meningitidis; identical to SEQ ID NO: 44661

SEQ ID NO: 48118 - DNA, 1911 bp, Neisseria meningitidis; identical to SEQ ID NO: 39822

SEQ ID NO: 48119 - DNA, 846 bp, Neisseria meningitidis; identical to SEQ ID NO: 47889

SEQ ID NO: 48120 - DNA, 576 bp, Neisseria meningitidis; identical to SEQ ID NO: 38182

SEQ ID NO: 48121 - DNA, 273 bp, Neisseria meningitidis
gtgaacaattcagtcatcaccgtcatcggcaaagaccgcgtcggcatcgtgtacgatgtttccaaaattttggcggaaaaccgaatcaacatccttaatatcagccaacagctgatggacgatttttttaccatgattatcttggtggatacctcgaaatgccccaaatctcggcaggatgttttggatttgtttgcggaagagagcaaaaaactcgcgcttgatatccgtatgcaaaacgaagaaattttccaagccatgcaccgtatttaa

SEQ ID NO: 48122 - DNA, 531 bp, Neisseria meningitidis; identical to SEQ ID NO: 38478

SEQ ID NO: 48123 - DNA, 495 bp, Neisseria meningitidis; identical to SEQ ID NO: 45300

SEQ ID NO: 48124 - DNA, 738 bp, Neisseria meningitidis
atgattattttggacaaggtttccaagcattaccaaacgcgcgacaagacccgttttgccgctgtcgagccgaccagcctcgaaatccgcgacggcgaaattttcgggctgatgggctattccggcgcgggcaaatccaccctgttgcgactgattaacctgttggaacgtcccgacacgggcaaggtcaacgtctgtggacaagagctgaccgcgcttgatgccgccgcattgcgtcaggctcggcagaatatcggcatggtgtttcagcagttcaacctgttgaacaaccgcaccgtcgccggcaacgtcgccttcccattggaaatcgccggatggccgtctgaaaaaatcaaagcgcgcgttgccgaatgtctcgaaatcgtcggactgaccgaacgcgccggtcactatcccgcccagctttccggcggacaaaaacagcgcgtcggcatcgcccgcgcgctcgcatccaagccgcaagtcatcctcgccgacgaacccacttccgccctcgaccccgccaccacgcgcagcgtcttggaatgtttggaagacatcaacaaacgcttcaacgtaaccatcgtcatcgtaacccacgaaatgagcgtcatcagacgactgtgcgaccgagccgccctgttggataagggaaaagtcgtcgaaatcgtcgaagtacgcggcaaccaaatccacgcccgatccgacatcgggcgcgaactcatcagagaggactga

SEQ ID NO: 48125 - DNA, 825 bp, Neisseria meningitidis; identical to SEQ ID NO: 39707

SEQ ID NO: 48126 - DNA, 261 bp, Neisseria meningitidis; identical to SEQ ID NO: 39662

SEQ ID NO: 48127 - DNA, 1545 bp, Neisseria meningitidis; identical to SEQ ID NO: 39615

SEQ ID NO: 48128 - DNA, 1671 bp, Neisseria meningitidis; identical to SEQ ID NO: 38983

SEQ ID NO: 48129 - DNA, 780 bp, Neisseria meningitidis; identical to SEQ ID NO: 38884

SEQ ID NO: 48130 - DNA, 1002 bp, Neisseria meningitidis
atgcagtttccttaccgcaatgttccggcttcgcgtatgcgccgtatgcgcagggacgatttttcacgccgcctgatgcgcgaacacacgctgaccgccgatgatttgatttatccggtgttcgtattggaggggtcggcgcgcgaggaggatgtgccttctatgccgggtgtgaagcgtcaaagtttggacaggctgctgtttacggcggaagaggcggtaaagctcggtattccgatgttggcactgttccccgtggttacggcaaacaaaaccgagcgtgcgcaggaggcgtacaatcccgaaggactcgtgccgtcaactgtccgcgccttgcgcgagaggtttcccgaactgggcattatgacggatgtcgcgctcgatccttatacggttcacggtcaggacgggctgacggacgaaaacggttatgtgatgaacgatgaaaccgtagaggttttggtcaagcaggctttgtgccacgctgaagcgggcgcacaggtggttgccccttccgatatgatggacgggcgtatcggtgcgattcgcgaggcgttggaggatgccgggcatatccacacgcggattatggcgtattccgccaaatatgcttcggcgttttacggaccgttccgcgatgcggtgggcagttcgggcaatttgggcaaggcggacaagaaaacctaccagatggatccggcaaataccgatgaggcgttgcacgaagtggcgttggacattcaggaaggtgcggatatggtgatggttaagcccggtttgccgtatttggacgttgtccgccgcgtgaaggacgagttcggtgtgccgacttatgcctatcaggtttcgggcgaatatgcgatgctacaggcggcggttgccaacggatggctggatggcgataaagtggttttggaaagcctgctggcattcaaacgtgcgggtgcggacgggattttgacctattacgctattgaggcggcaaagatgttgaagcgttga

SEQ ID NO: 48131 - DNA, 423 bp, Neisseria meningitidis; identical to SEQ ID NO: 38910

SEQ ID NO: 48132 - DNA, 852 bp, Neisseria meningitidis
atggcacgacacgtttggcaggcaggacggtttgaaatcggtttggacaagccgaaaatcatgggcatcgtgaatctcacgcccgattctttttccgacggcggcgcgtattcgcaaaacgcccgaacagctttggcgcacgccgaacggcttttgaaagagggtgcggacattctcgacatcggcggcgaatcgacgcggccgggtgcggattatgtttcgtccgaagaagaatgggcgcgggttgagcctgtattggcagaagtggcggggtggggcgttcccgtcagtttggacacgcgccgcacggtgattatggaaaaagcgttggcactcggtggcatcgatattattaacgatgtggcggcgttgaccgacgaaggtgcggtcgaattgctggcgcgccagacggacacgggcatttgcctgatgcacatgcggggtttgcctgaaaacatgcagattaatccgaaatatcaggatgttgtcggtgaagtggcgcggtatttgaaagcgcgggcggcggaatgcatcgcggcaggcatcgcaccgcaacgcatcacgctcgatccgggtttcggcttcggcaaaaccctgcaacacaatatcgcgctgatgaggcatttgcccgaattgatggcggaaacaggctttccgctgctgatcggcgtatcgcgcaaacgcatggtaggcgagctgactggcgaggcagacgcggcggcgcgcgtacacggcagcgtggcggcggctgtggcggctgtggcgcgcggcgcgcaaattgtgcgggtgcatgacgtgaaggcgacggcggacgcgttgaaggtgtgggaagcgttgggcatcaatctgtaa

SEQ ID NO: 48133 - DNA, 987 bp, Neisseria meningitidis; identical to SEQ ID NO: 44315

SEQ ID NO: 48134 - DNA, 1311 bp, Neisseria meningitidis; identical to SEQ ID NO: 39593

SEQ ID NO: 48135 - DNA, 2298 bp, Neisseria meningitidis
atgcttgcacccgaattggaacagattttgcagcagctttaccgcgaggcgcgtaaggctcattatgaatttatcagcctcgagcatctgcttttggtactcatcgaagaagatgcctccgtgccgaacgtcttaaaactatgcggcgcggatttgaaagtggtgtccgaacagctcgccgccagcgttgccgaaaacacccccctgattcccgaacaccttttagacacggtcgaaacacggcccacgctcggcttccaacgcgtgatgcaacgggcgatggtgcatacccaatcggcaggcaaagccgcagtcgaaccgttggacgttttggtcgcgctgatgagcgaaaccgacagccacaccgtctatttcctcaagctgcaatcggttacgcgttttgaagttttgcgctgtattgcccacggctctcccgatgaagatgaagatgaagacgatggcaactattcttcagacggcatggacgacgataatggaaaccgcaccaaaccgggcaaaaaccctttatcggcgtacaccgtcaacctcaacaccgaagtcaaagccggccgtatcgaccctttgattggtcgcaaacacgaaatggaacggctggtgcaaatcctatgccgccgccgcaaaaacaatccgcttttggtcggcgaagcaggcgtgggcaaaaccgcgctggcggaaggtttggcacatcaaatcgtcaacggcggcattccagacgcgcttaaagatgccgaagtgtacgcgctggatatgggctcgctgttggcgggcacgaaataccgtggcgactttgaagcgcgggtcaaatccgtcttgaaacagctcgaaaaaatcccgcacgccattttgtttatcgacgaaatccacaccatcatcggcgcaggcagcaccagcggcggcaccatggacgcgtccaacctgctcaaacccgcgctggcaaaaggttcgctgcgctgcatcggcgcaaccacctacgacgaataccgcaccattttcgacaaagactatgccttaagccgccgcttccaaaaaatcgacgtggtcgaacccaccgtttccgaaaccgttcaaatcctgcgcggcttgaaaccgatgtttgaagccttccaccaagtccgctacactcaaggcgcactcgaagccgccgccgaactctccgcacgctacatcaacgagcgtttcctgcccgacaaagccatcgacgtaatggatgaagcaggcgcggcgcaacggattctgcccaaatccaaacagaaaaaagtcatcggcaaagcacaaatcgaaaccgtcatcgccaaagtttcgcggattcccgaaaaaaccgtgtcgcacgacgacaaacaagtgctgcaattcctcggtcgcgatttgaaaaacatggtttacggtcaagaaaacgccatcgacgcgctggttgccgccgtcaaaatgtcgcgttccggccttgccctgcccgacaaaccgataggcagcttcctcttctccggcccgaccggcgtgggcaaaaccgaagccgccaaacagcttgcctactcgctgggcgtaccgctgcaacgctttgatatgtccgaatacatggaacgccatgccgtatcgcgcctcatcggcgcgccaccgggctacgtcggctttgaacaaggcggccttttgaccgaagccgtcaacaaacagccgcattgcgtattgctcttggacgaaatcgaaaaagcccaccccgacattttcaacgtcctcctgcaagtcatggacgcaggcaaactgaccgacaacaacggcaagagtgccgatttccgcaacgtcatcctgattatgaccaccaacgcaggcgcggaaagcctcagccgccccagcctcggctttaccgccaagcgcgaacgcggcgacgaaatgcaggcaatcaacaagctcttcacgcccgagttccgcaaccgcttggacgcgattatcccgtttgcacccttgtccgaacccatcatcgtcaaagtcgtggacaaattcctgctccagctcgaacaccagctcctcgacaaaaaagtcgaagccgaattcacgtcggcattgcacaaatatctggcggaaaaaggtttcgacccgcaaatgggcgcgcgcccgatgcaccgcctgattcaggaaaaaatccgcaaaccgctcgccgacgaactcctgttcggcaaactatccgacggcggcttcgtgcggatagactgggatgcggtaaaagaagaagccgtgttgaagtttaagaaaagcaaggtcaaaataaaaaccgcctccgcgtaa

SEQ ID NO: 48136 - DNA, 1251 bp, Neisseria meningitidis; identical to SEQ ID NO: 44589

SEQ ID NO: 48137 - DNA, 1407 bp, Neisseria meningitidis; identical to SEQ ID NO: 45018

SEQ ID NO: 48138 - DNA, 936 bp, Neisseria meningitidis
atgagtgtattgattattgtcgaacacgacaacaaacagttgaatcctaccactttgcatgctgttaccgctgccgctaagctgggtaaaatcgatttattggttgctggaagcggtgcatctgctgtggtagagttcgcaaaacaagtggcgggtgtggaaaaagttttggttgcagatgctgcccattatgccgaaggtttggctgaagagttggctccgctggttgttaaattggcagcggattactgctatgttgcagcaacggcaactacattcggtaaaaaccttttgcctcgcgtagcagccttattagacgtaccgcaaatttctgatttgaccgaaattgtggataacacgacttttgtgcgccccatttatgcgggtaatgcatttgaaaccgtgcaagctgattcagaaaaattggtgctgaccttccgtgcgacggtttttgacgcagtggcggcgcaaggtggtaatgctgaggtaattaatgttgaagcaacccctgcccaaaacctgagtcgttttgttaaccgtcagctttcccattccgatcgtcctgaactgactcaggcaaaagtgattgtttccggtggtcgtgcgttgggtagtgcggaaaaattcaatgaagtgctgacaccgttggcggatgttttaggtgcggcaatcggtgcatcccgtgcggcggttgatgccgaatatgcgccaaacgatgctcaagtcggacaaaccggtaaagtagttgcgccgcaactctattttgcaatcggtatttcaggtgcgattcaacacgttgccggtatgcaagacagtaaggtgattgttgcaatcaataaagatgctgatgcgccgattttcaatgtagccgattacggattggttggcgatttatttgaaatcgttccacaattaacagaagtattgaaaaattaa

SEQ ID NO: 48139 - DNA, 354 bp, Neisseria meningitidis; identical to SEQ ID NO: 39616

SEQ ID NO: 48140 - DNA, 726 bp, Neisseria meningitidis; identical to SEQ ID NO: 38250

SEQ ID NO: 48141 - DNA, 732 bp, Neisseria meningitidis; identical to SEQ ID NO: 39140

SEQ ID NO: 48142 - DNA, 417 bp, Neisseria meningitidis
atggcaaagctgacagaacaagatattttgaattggaatgggccggaagacgattatatgaatgacgaccatttggctttttttcgtgaattgctggttaaaatgcaagatgaactcatagagaatgcatctgttacgacagggcacctccaagaacacgaatcagcccccgatcctgccgaccgtgccacacaggaagaagagtacgcattggaactccgtacccgcgatcgggaacgaaaacttctcagtaaaatacaggcgaccatccgcaatattgatgaaggggattatggattctgtgccgatacgggagagcctatcggtctgaagcggctgctggcacgcccgacagccactttatctgttgagtcccaagaacgccgagagaggatgaaaaaacagtttgccgactga

SEQ ID NO: 48143 - DNA, 2235 bp, Neisseria meningitidis
atgtgtaaaccgaattatggcggcattgtcttgttgcccttacttttggcatcttgcatcggcggcaatttcggcgtgcagcctgttgtcgaatcaacgccgaccgcgtaccccgtcactttcaagtctaaggacgttcccacttcgccccctgccaaaccttctatagaaaccacgccggtcaatcaacctgccgtcggtgcggcaatgcggctgccaaggcggaatatcgcagcttttgataaaaatggtaatgaaattcccgatagtaagcaggcagaggagtatctgccgctcaaagaggaggatatcctgtttttagacggtacgccgaaagaacaggctgacaaacttaaaaaggaaatcaacggacggtatcctaatgtaacaatctacacgtccgatttaaaagatgctgtgtataaatatgaacatgtccgggccggatatgtttatactagatttggaacagatgaaatcgaacagaactcaggtggtaagcaggttacccaccgcttaggttatgatggttttgtatattattctggagaacgtccttcccaatctttaccgagcgcgggaacggtgaaatattccggaaactggcaatatatgaccgatgtcaaacgtcatcgagcaggtaaggcggttggcattgacaatttgggttatatcacattttatggtaacgatgttggtgcaacttcttatgcggctaaggatgtcgacgaaagggaaaaacatcctgctaaatatacggttgatttcgataagaaaactttgacaggtcaattaattaaaaatcagtatgtgcaaaagaaaaccgatgaaaagaaaccactgaccatttacaacattactgcaaaattggacggcaaccgctttaccggcagtgccaaggtcaatcctgatttagcgaaaaaccctgccggtaatgagcgtttgtttttccatgccgatgccgatcagcggcttgagggcggttttttcggcgataacggagaagagcttgccggacggtttatcagcaacgacaacagcgtattcggcgtattcgcaggcaaaaaaacagagacagcaaacgcagcagatacaaaacctgccctgccgtctggaaaacacaccaaaatcttggattctctaaaaatttccgttgacgaggcgactgatggccatgcccgtaagtttgccatttcctctatgcccgattttggtcatcccgacaaacttcttgtcgaagggcgtgaaattcctttggtaaacaaagaacaaatcatcaagcttgccgacggcaggaaaatgaccgtcagtgcttgttgcgattttctgacctatgtgaaactcggacggataaaaaccgaacgccccgccgtcaaaccgaaggcgcaggatgaagagggggacgaagaggatgcaggcgttgataacggcgaagacgaagaagaaatcgccgaagaaagcgaagacgaagtttccgaagatgaaggcgaagaagccgaagtttccgaagatgaaagcgaagaagacgaagaaatcgtcgaagaagaaaccgaagaagaagctgaacccgaagaagccgaagaaaccgaagaagaatcgccggcagaaagcggcagcggttcaaacgccatcctgcctgccccggaagcccctggcagggacatcgaccttttcctgaaaggtatccgcacggcggaagccgacattccgcaaaccggaaaagcacgctataccggcacttgggaagcgcgtatcggcgaacccattcaatgggacaatcaggcggataaagaagcggcaaaagcagtatttaccgttgatttcgacaagaaatcgatttccggaacgctgacggagcaaaacggtgtagaacctgctttccatattgaaaaaggcaagattgagggcaacggtttctacgcgacagcgcgcactcgggataacggtatcgacctttccgggcagggttcgaccaaaccgcagatcttccaagctaatgatcttcgtgtagaaggaggattttacggcccgaaggcggaggaattgggcggtactattttcaataaggatgggaaatctcttggtataactgaaggtactgaaaataaagttgaagctgaagttgaagttgaagttgaagctgatgttggcaaacagttagaacctgatgaagttaaacacaaattcggcgtggtattcggtgcgaagaaagatatgcaggaggtggaaaaatga

SEQ ID NO: 48144 - DNA, 756 bp, Neisseria meningitidis; identical to SEQ ID NO: 39689

SEQ ID NO: 48145 - DNA, 1497 bp, Neisseria meningitidis; identical to SEQ ID NO: 38911

SEQ ID NO: 48146 - DNA, 471 bp, Neisseria meningitidis; identical to SEQ ID NO: 39412

SEQ ID NO: 48147 - DNA, 330 bp, Neisseria meningitidis; identical to SEQ ID NO: 38654

SEQ ID NO: 48148 - DNA, 1407 bp, Neisseria meningitidis
atgaaactgttccaacgcatcttcgccacattttgcgcggttatcgtctgtgcaatctttgtggcgagtttttctttctggctggtgcagaacacccttgccgaaaaccagttcaaccaacgccgcaccatcgaaaccactttgatgggcagcatcatttccgcattccgggcacgcggggacgcgggtgcgcgcgaaatcctgacggaatggaaagacagccccgtctcatcgggcgtgtacgttatacagggcgacgagaaaaaagatatcctgaaccggtatatcgacagctataccatcgaacgcgcccggcttttcgccgccggacacccgcattccaacctcgtccatatcgaatacgaccgcttcggcgaagaatacctgttcttcaccaaagactgggacaaactccaagcccgccgcctgcccagccccctgttgatccccggcctgccgctcgccccgatttggcacgaactcatcatattgtccttcatcatcatcgtcggactgctgatggcatatatcctcgccggcaacattgccaaacccatcagaatcttaggcaacggcatggacagggtggcaaacggagaacttgaaacccgtatctcccaacaggtcgacgaccgcgacgacgaattgtcccatcttgccatccaattcgacaaaatggtggaaaaactcgaaaaactcgttgccaaagaacgccacctgctccatcacgtctcccatgaaatgcgttctccccttgcgcgcatgcaggcaattgtcggactgattcaggcgcagccccaaaaacaggagcaatatctcaaacggctggaaggcgaactgacccgcatggatacgctggccggggaactgttaaccctgtcccgtctcgaaacttccaatatggctttggaaaaagaaagcctgaaactcctgcccttcctgggcaacctggtagaagacaatcaaagcattgcccagaaaaacggacaaacggttaccctgtctgccgacggaaaaatccccgaaaatacaaccatccttgccaacgaaagctacctgtaccgcgccttcgacaacgtcatccgcaacgccgtcaactacagtcccgaaggcagcaccatcctgatcaacatcggacaagaccacaaacactggataatcgacgttaccgacaacggccccggcgtggacgaaatgcagctcccgcacatcttcaccgctttctaccgtgcagactccagtgccaacaaacccggaacaggactggggcttgcattgacccaacatattattgaacagcactgcggcaaaatcatcgccgaaaacatcaaaccgaacgggctgcggatgcgcttcatcctacccaagaaaaaaaccggttccaaaacagaaaaaagtgcgaactga

SEQ ID NO: 48149 - DNA, 570 bp, Neisseria meningitidis
ttgtactgtctgcggcttcgtcgccttgtcctgatttttgttaatccactatatctgcatcagtttcatgaaacgcaagtcggaagcgtcaaacaactgattgcccattttgaccggctgattgacgaattggacaaacaaatcgacgaccacacccacacgcattttgacggcaaagcccaagtggcggagcaaatcaaaggcatcggttcgataacgacggctacgctgatggcgatgctgcccgaattggggcggctgtcgcacaaacggatagcgagtttggccggcattgccccgcacccgagggagagcgaggaaaccaaattcaaaagccgctgctttggcggaaggtctgcggtgcgtaaggcactgtatatggctaccgtggcagcgacacgttttgaaccgcttattcgggatttctaccaacgcctgctgtccgagggtaagccgtataaggttgccgttacggcatgtatgcgcaaactgctgacgatatcgaatgcccggatgcgtgattattttgccgaaaacgataccgccgaaaacggtatccggacggcttga

SEQ ID NO: 48150 - DNA, 477 bp, Neisseria meningitidis; identical to SEQ ID NO: 39143

SEQ ID NO: 48151 - DNA, 165 bp, Neisseria meningitidis; identical to SEQ ID NO: 38812

SEQ ID NO: 48152 - DNA, 687 bp, Neisseria meningitidis
atgacggtgttgcaagaacgttatcgggaggtgtccgaccgtattggaaaattggttctgcaggcgggaaggaagccgcattccgtcagcctgattgccgtcggtaagactttcccttcagacggcatccgcgaagtttacgccgccggacagcgtgatttcggcgagaactatattcaggagtggtacggcaaaacggaagagttggcggatttgaccgacatcgtgtggcacgtcatcggcgatgtgcagtccaacaaaaccaagtttgtcgccgaacgcgcgcattgggtgcataccgtatgccgtctaaagaccgctgtccggctgagcgggcaacgtccttcctcaatgccgcctttgcaggtgtgtattgaggtgaacattgcgggcgaggcggtgaagcacggtgtcgcgcccgaagaagcagtcgcgcttgctgtggaagtggcgaagctgccgaatatcgtcgtacgcggactgatgtgtgttgccaaagccaacagcagtgaaacggagttgaaggtgcaatttcaaacgatgcggaaactgcttgccgacctcaatacggctggcgttaaggctgacgtgctgtctatggggatgtcggacgatatgcctgccgccattgagtgcggtgcgacacacgtccgtatcggcagcgcgattttcgggaaaaggggctga

SEQ ID NO: 48153 - DNA, 405 bp, Neisseria meningitidis; identical to SEQ ID NO: 38321

SEQ ID NO: 48154 - DNA, 1653 bp, Neisseria meningitidis; identical to SEQ ID NO: 39693

SEQ ID NO: 48155 - DNA, 726 bp, Neisseria meningitidis; identical to SEQ ID NO: 39096

SEQ ID NO: 48156 - DNA, 237 bp, Neisseria meningitidis; identical to SEQ ID NO: 39540

SEQ ID NO: 48157 - DNA, 4170 bp, Neisseria meningitidis; identical to SEQ ID NO: 39534

SEQ ID NO: 48158 - DNA, 582 bp, Neisseria meningitidis; identical to SEQ ID NO: 45592

SEQ ID NO: 48159 - DNA, 1005 bp, Neisseria meningitidis; identical to SEQ ID NO: 39664

SEQ ID NO: 48160 - DNA, 2790 bp, Neisseria meningitidis
atgaccgattacagtaaaaccgtaaacctgctcgagagcccgtttccgatgcgcggcaaccttgccaagcgcgagcctgcatggctgaaaagctggtacgagcaaaaacgctaccaaaaactgcgcgaaatcgccaaaggccgtccgaaattcatcctgcacgacggccctccgtatgccaacggcgacatccacatcggtcatgccgtcaataaaatcctcaaagacatcattatccgcagcaaaacccaagccggttttgacgcgccttatgtgccgggttgggactgtcacggtttgcctatcgaagtaatggtggaaaaactgcacggcaaagacatgcccaaagcgcgcttccgcgaattgtgccgcgaatacgccgccgaacaagttgcccgccagaaaaaagactttatccgtctgggcgtgttgggcgattgggaccatccttacctgaccatggatttcaaaacagaagccgataccgtgcgtatgctcggcgaaatctacaaatcgggctatctctaccggggcgcgaaaccggttcaattctgcttggactgcggttcttcattggccgaagcggaagtggaatacaaagacaaagtatcgcctgcgattgacgttgcctatccgtttaaagacaccgccgcgcttgccgccgcattcggtttggcaggtatcgaaggcaaagcgtttgccgttatttggacaaccacgccttggacgctgccggcgagccaagccgtgtctgccggtgcggacgtggtgtatcaattaatcgatacgcctacaggcaaattggtgctggcgaaagatttggcggaagatgcgctcaaacgttacggcttttcagacggcatcgccatccttgccgaaaccaccggcgacaagctggaaaacctgcacatgaaccatccgttcctcgaacgcgatattcccatgcttaacggcgaacacgttaccaccgatgccggtaccggcttggtgcatactgcgcccgcgcacggtttggaagactacgccgtctgcaacaaatacggcatcgagctttacaatcctgtcaacgccgaaggcaaatacatcggcgaaacgccgcgtgtcgccggtatgcgcgtttgggaggcgaaccccgtcatcctgcaatggttggaagaaaccagcaaccttttggcaagcagtaaaatcgaacacagctacgcccactgctggcggcacaaaacgccgctgatttaccgcgcgacaggtcaatggtttgtcggtatggacaaagccggtgccgacggcaaaaccctgcgcgacaaagccatcaaggccgtggacgacaccgaattcttcccgtcttggggtcgcgcgcgtttggaagccatgattgaaggtcgtcctgactgggtggtttcacgccaacgctattggggcacgccgatgactttctttgttcacaaagaaacgggcgagctgcatccgaactctgccgaacttttggaaaaagttgccctgaaaatcgaagaaaaaggcatcgaagcgtggttctccctcgataagagcgaactcttgagcgcggaagattgcgaaaattacgataaactttctgacacaatggacgtatggttcgactccggctcgacccattattccgttgtgaaacaacgcgaagaattggaatggccggctgatttgtatctcgaaggcagcgaccaacaccgcggctggtttcaatcgtccatgctgaccggctgcgcctcatcaatgggtcgcgcgccgtataaacagctgctgacccatggtttcgttgtcgacggcgaaggcaaaaaaatgtcgaaatccatcggcaacgtcgttgcaccgcaagaggtttataacgaattcggcgcagacatcctgcgcctgtgggcggcatctaccgattacagcggcgaattggcgatttccaaagaaatcctcaaacgcgtaaccgaaagctaccgccgtatccgcaataccttgagctttttgtttgccaacttgagcgactttaatccgattgaagatgccgtgcaacaggcggatatggtggaaatcgaccgctacgccgtggtattggcacgtcagctgcaagagcgtctggcaggcgattactatccgcgttatgccttccactttgccgtaaaagacattgtttctttctgctcggaagacttgggtgcgttctacctcgacatcctgaaagaccgcctctacaccaccaaagccgacagccatgcacgccgcagcgcacaaactgccctgtatcacatcacacgcagtttggttctcttgattgcaccgattttgtgcttcaccggcgaagaagcgtgggacatcatcggcggcggcgaagaagacagcgtcctcttccacacctggcacgagttcccgaccatcaacgaaaaagccgaagccgaattggtgaaaaaatggacggcagtccgcaaagtgcgcgaagccgtaaccgccgccatcgagcctttgcgcgccgacaaaaccatcggttcgtccttgcaagccgaagccgaaatcaccgcgccggaagaaatggccggctacctgaacgccttgggcgaagaattgcgctttgccatgctggtgtctaaagcagaagtgaaagtaggtgatgaacttgccgttgccgccaaagccggcagcggcgaaaaatgcgaacgctgctggcactacacacgcgatgtgggcgcggttgcaggctatgaaaccgtctgcaaacgctgtgcagagaatgtcggcggagaaggcgaaacgcgccattacgcctga

SEQ ID NO: 48161 - DNA, 216 bp, Neisseria meningitidis; identical to SEQ ID NO: 38426

SEQ ID NO: 48162 - DNA, 1197 bp, Neisseria meningitidis; identical to SEQ ID NO: 39188

SEQ ID NO: 48163 - DNA, 864 bp, Neisseria meningitidis; identical to SEQ ID NO: 39371

SEQ ID NO: 48164 - DNA, 966 bp, Neisseria meningitidis; identical to SEQ ID NO: 38346

SEQ ID NO: 48165 - DNA, 1563 bp, Neisseria meningitidis; identical to SEQ ID NO: 39009

SEQ ID NO: 48166 - DNA, 288 bp, Neisseria meningitidis; identical to SEQ ID NO: 42693

SEQ ID NO: 48167 - DNA, 729 bp, Neisseria meningitidis; identical to SEQ ID NO: 39174

SEQ ID NO: 48168 - DNA, 279 bp, Neisseria meningitidis; identical to SEQ ID NO: 39585

SEQ ID NO: 48169 - DNA, 864 bp, Neisseria meningitidis
atgaataacgctttcgcattacccgccatccaaagcggcaacggcagcctcgaacaatacatccacaccgtcaacagcatcccgatgctgtcccaggaagaagaaacccgcctcgccgaacgccggataaagggcgacctcaacgccgccaaacaactcatcctgtcccacctgcgcgtcgtcgtttccatcgcgcgcggctatgacggctacgggctgaatcaggcagacctgattcaggaaggcaatatcggactgatgaaggcggtcaaacgctacgagcccggtagaggcgcgcgtctgttttcatttgccgtacactggattaaagccgaaatccacgagtttattttgagaaactggcgtttggttcgcgttgccaccaccaaaccgcaacgcaagctgtttttcaatttacgcagtatgcgtaaaaacctcaacgccctgtctcccaaagaggcacaagacatcgccgacgatttgggtgtcaaactttccgaagttctggaaatggaacagcgcatgacgggacacgacatcgccatcatggcagacaacagcgacgacgaggacagtttcgcccccatcgactggcttgccgaccacgattccgaaccaagccgacaactatcgaaacaggcgcattacgccctgcaaacagaaggtttacaaaacgctttggcgcaactggatgacaggagccgccgtattgtggaaagccgctggcttcaagacgacggcgggctgacgctgcaccagcttgccgccgaatacggcgtctctgccgaacgcatccgccaaatcgaagcaaaagccatgcagaaactgcgtggtttcctgaccgaagaagccgaagcggtttga

SEQ ID NO: 48170 - DNA, 1137 bp, Neisseria meningitidis; identical to SEQ ID NO: 38656

SEQ ID NO: 48171 - DNA, 1977 bp, Neisseria meningitidis
atgaacgaattttcgcttgcccctattgtgattgttttgctggtgtcggtcattacggtgatcctgtgccgcaagttcaacattccctccatgctgggctacctgctggtgggctttttggcggggcccggtatgctcagcctgattccgaaaagccatgcgacggattatttgggcgaaatcgggattgtgttcctgatgttcagcatcggtttggagttctcgctgcccaagttgagggcgatgaggcggctggtgtttgggctgggcggtttgcaggtcggcgttacgatgctgtcggtaatgggcatactgatgctgacgggcgtcccgttcaattgggcgtttgccgtgtcgggcgcgttggcgatgtcgtccacggcgattgtaagccggattttgtcggaaaagacggaattggggcagccgcacggtcagatggcgatgggcgtgctgctgatgcaggacatcgccgtcgtgccgctgatgattctgattcccgcgctggcgggcggaggggacggaaatatttgggcggccttgggtttggcgtttgcaaaaatgctgctgacgctggggctgctgtttttcgtcggcagcaaaattatgtcgcgatggttcaggatggtggcaaaacgcaaatcgtccgaactctttatgatcaatgtgctgctggtaaccttgggtgtggcttatctgactgagctggaaggtttgtctatggcgttgggcgcattcgttgccggcatgctgctttcggaaacggaataccgtttccaagtcgaagacgacatccgcccgttccgcgatattttgctcggctttttctttatcacggtcggcatgaagctggacattcaggcattgatcggcggctggcggcaggtattgatgctgttggcaatgctgctggtgttgaaggcactggttgtgtttgccattgccttcaaaatgaaacattcggtcggcgacagcctcaaaacggctttgtatctcgcgcaaggcggcgagttcggcttcgtgatgctggccattgccgggcagcttgatatggtttcgccagaatgggaacaggcggcgacggcggcggttctgctgtcgatgattatcgcgcccttcctcttgggcggcagcgatgcgctggtcgggcgtttggtcaagtcaagctgggacatgaagtcgctcgatctgcacagtatgctggtagaaaccatgagcaagtccgaccatgtgctgattgtcggcttcggcaggggcgggcagacggtcggacgcgtccttgcccaagaggatattccgtatttcgcgctcgatttggacatcgcgcgggtgcaggttgccagaagtgcgggcgaaccggtgtcgttcggcgatgcgaaacgcagggaagtattggaagccgccggtctgggacgggcgaaaatggtggtggttacgctcaacaatatgcacgaaacgcaacacgttttagacaatgtgctgtccatgtatcccaatatgcccgtatatgtgcgcgccaccaacgacgattatgtgaaaacgtttaccgatataggtgcggaagaagccgtgtcggacaccaaagaaaccggactcgtgctggcaggctatgcgatgttaggcaacggcgcgtcgtatcggcacgtctatcagacgatggcaaatatccgccacagccgttatgccgcgttggagggactgtttgtcggtagtgatgatgaggcaggattcggcgaaaacggcgaaaccgtccgtcacgcctttcctttggctgcagaagcatacgccgtcggcaaaacagtcggcacgcttccgatggcggcttacggcatcaaactcttgttcgtccgccgccgcaccggccggattgaaaacccggatgcctcgtttacattgaaaggcggtgacgtgttggtggtcgcaggcaaaaaagaagaaattatctcttttgaaaactggagtttgcagggaatataa

SEQ ID NO: 48172 - DNA, 717 bp, Neisseria meningitidis; identical to SEQ ID NO: 39220

SEQ ID NO: 48173 - DNA, 207 bp, Neisseria meningitidis; identical to SEQ ID NO: 39405

SEQ ID NO: 48174 - DNA, 1446 bp, Neisseria meningitidis; identical to SEQ ID NO: 38178

SEQ ID NO: 48175 - DNA, 441 bp, Neisseria meningitidis; identical to SEQ ID NO: 38543

SEQ ID NO: 48176 - DNA, 2301 bp, Neisseria meningitidis; identical to SEQ ID NO: 39630

SEQ ID NO: 48177 - DNA, 363 bp, Neisseria meningitidis; identical to SEQ ID NO: 39305

SEQ ID NO: 48178 - DNA, 702 bp, Neisseria meningitidis; identical to SEQ ID NO: 39279

SEQ ID NO: 48179 - DNA, 1227 bp, Neisseria meningitidis
atgacctttttacaacgtttgcaaggtttggcagacaataaaatctgtgcgtttgcatggttcgtcgtccgccgctttgatgaagaacgcgtaccgcaggcggcggcaagcatgacgtttacgacactgctggcactcgtccccgtgctgaccgtgatggtggcggtcgcttcgattttccccgtgttcgaccgctggtcggattcgttcgtctccttcgtcaaccaaaccattgtgccgcagggcgcggacatggtgttcgactatatcaatgcgttccgcgagcaggcgaaccggctgacggcaatcggcagcgtgatgctggtcgttacctcgctgatgctgattcggacgatagacaatacgttcaaccgcatctggcgggtcaattcccagcgtccgtggatgatgcagtttctcgtctattgggctttactgacgttcgggccgctgtctttgggcgtgggcatttcctttatggtcggctcggtacaggatgccgcgcttgcctcaggtgcgccgcagtggtcgggcgcgttgcgaacggcggcgacgctgaccttcatgacgcttttgctgtgggggctgtaccgcttcgtgccaaaccgcttcgttcccgcgcggcaggcgtttgtcggggctttggcaacagcgttttgtctggaaaccgcgcgctccctcttcacttggtatatgggcaatttcgacggctaccgctcgatttacggcgcgtttgccgccgtgccgttttttctgttgtggctgaacctgttgtggacgctggtcttgggcggcgcggtgctgacttcttcactctcctactggcagggagaagcgttccgcaggggcttcgactcgcgcggacggtttgacgacgtgttgaaaatcctgctgcttctggatgcggcgcaaaaagaaggcaaagccttgcctgttcaggagttcagacggcatatcaatatgggctacgacgagttgggcgagcttttggaaaagctggcgcggcacggctacatctattccggcagacagggttgggtgttgaaaacgggggcggattcgattgagttgaacgaactcttcaagctcttcgtttaccgtccgttgcctgtggaaagggatcatgtgaaccaagctgtcgatgcagtaatgatgccgtgtttgcagactttgaacatgacgctggcagagtttgacgctcaggcgaaaaaacagcagcaatcttga

SEQ ID NO: 48180 - DNA, 1386 bp, Neisseria meningitidis; identical to SEQ ID NO: 39654

SEQ ID NO: 48181 - DNA, 672 bp, Neisseria meningitidis; identical to SEQ ID NO: 38125

SEQ ID NO: 48182 - DNA, 174 bp, Neisseria meningitidis; identical to SEQ ID NO: 38579

SEQ ID NO: 48183 - DNA, 516 bp, Neisseria meningitidis; identical to SEQ ID NO: 39413

SEQ ID NO: 48184 - DNA, 1116 bp, Neisseria meningitidis; identical to SEQ ID NO: 39575

SEQ ID NO: 48185 - DNA, 1284 bp, Neisseria meningitidis; identical to SEQ ID NO: 38643

SEQ ID NO: 48186 - DNA, 1059 bp, Neisseria meningitidis; identical to SEQ ID NO: 38883

SEQ ID NO: 48187 - DNA, 402 bp, Neisseria meningitidis; identical to SEQ ID NO: 36186

SEQ ID NO: 48188 - DNA, 195 bp, Neisseria meningitidis; identical to SEQ ID NO: 44174

SEQ ID NO: 48189 - DNA, 618 bp, Neisseria meningitidis; identical to SEQ ID NO: 38819

SEQ ID NO: 48190 - DNA, 1308 bp, Neisseria meningitidis; identical to SEQ ID NO: 40815

SEQ ID NO: 48191 - DNA, 1863 bp, Neisseria meningitidis; identical to SEQ ID NO: 45278

SEQ ID NO: 48192 - DNA, 1509 bp, Neisseria meningitidis; identical to SEQ ID NO: 38620

SEQ ID NO: 48193 - DNA, 654 bp, Neisseria meningitidis; identical to SEQ ID NO: 44597

SEQ ID NO: 48194 - DNA, 1788 bp, Neisseria meningitidis; identical to SEQ ID NO: 39490

SEQ ID NO: 48195 - DNA, 345 bp, Neisseria meningitidis; identical to SEQ ID NO: 38355

SEQ ID NO: 48196 - DNA, 120 bp, Neisseria meningitidis
atgagtgataagccaattttattgagccctgcggtgaaaaaagaggctttggcacgggcggtaaaggaaatccgcgcgaaatatggcgataaggcgattgtgaaaggatgtgtgaaatga

SEQ ID NO: 48197 - DNA, 174 bp, Neisseria meningitidis
atgtcattaaaaaactcaattgttacaaaccgttttaatattgaacacatattaaaattgataaatgatatattggaaatatgtaattcaacgtctgaagataagtctatatcaaatttggcaaaatattttgactgggaatttgacgattataatctaaatatccaagactaa

SEQ ID NO: 48198 - DNA, 594 bp, Neisseria meningitidis; identical to SEQ ID NO: 38213

SEQ ID NO: 48199 - DNA, 192 bp, Neisseria meningitidis; identical to SEQ ID NO: 37158

SEQ ID NO: 48200 - DNA, 375 bp, Neisseria meningitidis; identical to SEQ ID NO: 45132

SEQ ID NO: 48201 - DNA, 276 bp, Neisseria meningitidis; identical to SEQ ID NO: 45473

SEQ ID NO: 48202 - DNA, 1056 bp, Neisseria meningitidis; identical to SEQ ID NO: 39292

SEQ ID NO: 48203 - DNA, 1647 bp, Neisseria meningitidis; identical to SEQ ID NO: 39142

SEQ ID NO: 48204 - DNA, 369 bp, Neisseria meningitidis; identical to SEQ ID NO: 38525

SEQ ID NO: 48205 - DNA, 957 bp, Neisseria meningitidis; identical to SEQ ID NO: 39269

SEQ ID NO: 48206 - DNA, 612 bp, Neisseria meningitidis; identical to SEQ ID NO: 38293

SEQ ID NO: 48207 - DNA, 291 bp, Neisseria meningitidis; identical to SEQ ID NO: 38495

SEQ ID NO: 48208 - DNA, 762 bp, Neisseria meningitidis; identical to SEQ ID NO: 39256

SEQ ID NO: 48209 - DNA, 123 bp, Neisseria meningitidis; identical to SEQ ID NO: 38734

SEQ ID NO: 48210 - DNA, 183 bp, Neisseria meningitidis; identical to SEQ ID NO: 38993

SEQ ID NO: 48211 - DNA, 606 bp, Neisseria meningitidis; identical to SEQ ID NO: 38583

SEQ ID NO: 48212 - DNA, 912 bp, Neisseria meningitidis; identical to SEQ ID NO: 37999

SEQ ID NO: 48213 - DNA, 1005 bp, Neisseria meningitidis; identical to SEQ ID NO: 38175

SEQ ID NO: 48214 - DNA, 312 bp, Neisseria meningitidis; identical to SEQ ID NO: 39211

SEQ ID NO: 48215 - DNA, 186 bp, Neisseria meningitidis; identical to SEQ ID NO: 44958

SEQ ID NO: 48216 - DNA, 1371 bp, Neisseria meningitidis; identical to SEQ ID NO: 45342

SEQ ID NO: 48217 - DNA, 276 bp, Neisseria meningitidis; identical to SEQ ID NO: 45703

SEQ ID NO: 48218 - DNA, 564 bp, Neisseria meningitidis; identical to SEQ ID NO: 38408

SEQ ID NO: 48219 - DNA, 402 bp, Neisseria meningitidis; identical to SEQ ID NO: 42182

SEQ ID NO: 48220 - DNA, 1020 bp, Neisseria meningitidis; identical to SEQ ID NO: 38775

SEQ ID NO: 48221 - DNA, 621 bp, Neisseria meningitidis
atggctgtacgttccaaatcctcaaaagcgtggctgcacgaacacgtcaacgaccactacgtccatatggcgcaaaaagacggctaccgcgcccgtgccgcatacaaacttttggaaatcaacgaaaaagacaaattaatcaaacccggcacggtacttgccgacttgggcagcgcaccgggaagctggtcgcaggttgccgccaagctgacgggtacttccggagcagttttcgccttggacatcctgcctatggaagccatagggggcgtctccttcattcagggcgacttccgcgagaacgacgtactggcacaattcgaaaccttgttggacaaccgcccgctcgaccttgtaatttgcgatatggcgcccaatatgtcgggaaacgccgtaagtgatcaggcacgcagcttttatctgtgcgaactggctttagacttcgcctcgcaacacctgaaaaccggcggcagctttttggtcaaagtctttcagggtgcaggctatcaggaatacatggcagccatgcgcgaaattttcggcacggtgcagacgcgcaaacccgaagcctcgcgcaatcgctccagtgagatttatttattgggcaaaaataaacgctga

SEQ ID NO: 48222 - DNA, 2157 bp, Neisseria meningitidis; identical to SEQ ID NO: 38302

SEQ ID NO: 48223 - DNA, 270 bp, Neisseria meningitidis
ttgaacaccaaagaaattttggaactgaaagcgcgcgcgcaccatctccatcctgttgtgatggtcggtcagcagggtctgacggacgcggtcatcaaggaaaccgatgcggcattgacggcgcatgagctgattaaagtgcgcgtattcggcgacgaccgtgccgaacgtatcgaaatctgcactgccttatgtgaggcggttgacgcgcaacctgttcagcatatcgggaaacttttggtattgtggcgtaagaatatcgaaggctga

SEQ ID NO: 48224 - DNA, 540 bp, Neisseria meningitidis; identical to SEQ ID NO: 38423

SEQ ID NO: 48225 - DNA, 2751 bp, Neisseria meningitidis; identical to SEQ ID NO: 39324

SEQ ID NO: 48226 - DNA, 168 bp, Neisseria meningitidis; identical to SEQ ID NO: 37435

SEQ ID NO: 48227 - DNA, 2181 bp, Neisseria meningitidis
atgaacgccccgtttttccgcctcagcctgctctcgcttaccctggcggcaggttttgcccatgcggcaggttttgcccatgcggcagaaaataatgccaatgtcgcattggataccgttaccgtaaaaggcgaccgccaaggcagcaaaatccgtaccaacatcgttacgcttcaacaaaaagacgaaagcaccgcaaccgatatgcgcgaactcttaaaagaagagccctccatcgatttcggcggcggcaacggcacgtcccaattcctgacgctgcgcggcatgggtcagaactctgtcgacatcaaggtggacaacgcctattccgacagccaaatcctttaccaccaaggcagatttattgtcgatcccgctttggttaaagtcgtttccgtacaaaaaggcgcgggttccgcctctgccggtatcggcgcgaccaacggcgcgattatcgccaaaaccgtcgatgcccaagacctgctcaaaggcttggataaaaactggggcgtgcgcctcaacagcggctttgccagcaacgaaggcgtaagctacggcgcaagcgtattcggaaaagagggcaacttcgacggtttgttctcttacaaccgcaacgatgaaaaagattacgaagccggcaaaggtttccgcaatgacaacggcggcaaaaccgtaccgtacagcgcgctggacaaacgcagctacctcgccaaaatcggaacaagcttcggcgacgacgaccaccgcatcgtattgagccatatgaaagaccaacaccgaggcatccgcactgtgcgtgaagagtttgccgtcagcgaaaaaaattcacggataactattaaacgccaagcccctgcttaccgcgaaaccactcaatccaacaccaacttggcgtacaccggcaaagatttgggctttgtcgaaaaactggatgccaacgcctatgtgttggaaaagaaacgctattccgccgatgacaaagataacggctacgcaggcaatgtaaaaggccctaaccatacccgaatcaccactcgaggtatgaatttcaacttcgacagccgccttgccgaacaaaccctgttgaaatacggtatcaactaccgccatcaggaaatcaaaccgcaagcgtttttgaactcgcaattttctatcccaaaaacagaaaaaaaagacggtaaagatgttgctaaatcatcggaacaacaaaccaaagaccgcaaagacgaaaccattgtccattcctacaaactttccaacccgaccaaaaccgataccggcgcgtatatcgaagccattcacgagattgacggttttaccctgaccggcgggctgcgttacgaccgcttcaaggtgaaaacccatgacggcaaaaccgtttcaagcagcaaccttaacccgagtttcggcgtgatttggcagccgcacgaacactggagcttcagcgcgagccacaactacgccagccgtagcccgcgcctgtatgacgcgctgcaaacccacggcaaacgcggcatcatctcgattgccgacggcaccaaagccgaacgcgcgcgcaataccgaaatcggcttcaactacaacgacggcacgtttgccgccaacggcagctacttctggcagaccatcaaagacgcgcttgccaatccgcaaaaccgccacgactctgtcgccgtccgtgaagccgtcaacgccggctacatcaaaaaccacggttacgaattgggcgcgtcctaccgcaccggcggcttgactgccaaagtcggcgtaagccacagcaaaccgcgcttttacgatacccatcctaaaaaactgttgagcgcgaatcctgagtttggcgcacaagtcggccgcacttggacagcctcccttgcctaccgcttccaaaatccgaatctggaaatcggctggcgcggacgctatgttcaaaaagccgtgggttcgatattggtggcaggtcaaaaagaccgcagcggcaaattggaaaacgttgtacgccaaggtttcggtgtgaacgatgtcttcgccaactggaaaccgctgggcaaagacacgctcaatgttaatctttcggttaacaacgtgttcaacacgttctactatccgcacagccaacgctggaccaataccctgccgggcgtgggccgcgatgtacgcttgggcgtgaactacaagttctaa

SEQ ID NO: 48228 - DNA, 756 bp, Neisseria meningitidis; identical to SEQ ID NO: 39656

SEQ ID NO: 48229 - DNA, 288 bp, Neisseria meningitidis; identical to SEQ ID NO: 36767

SEQ ID NO: 48230 - DNA, 759 bp, Neisseria meningitidis; identical to SEQ ID NO: 39346

SEQ ID NO: 48231 - DNA, 483 bp, Neisseria meningitidis; identical to SEQ ID NO: 38977

SEQ ID NO: 48232 - DNA, 3615 bp, Neisseria meningitidis
atgtctgcacccatccaagcatttgacccgctgaccgtccccatttccggcaccaacctgattgaggcctctgccggcaccggcaaaacctacggcattgccgccctgtttacgcgcctgatcgtattggaacaaaaaaacgtcgaacgcgtattggtcgtaaccttcaccaaagccgccaccgccgagttgaaaacacgcctgcgcgcacgtttggacgatgtgttgcaggttttagaaagtaaagaaattgccaaacttggagacgacacgctttcagacggcatcgccgcctattgtgcggaacaccacaaaggcgacaccttcctgcccgcactcttaaaacaggctttgcaaaaagagggccggacgcgtctgattgtccgcctcaaggccgccatcgggcaattcgacaacgccgccatctataccatccacggcttctgccaacgtatcctgcgcgactacgccttcttgtgccaagcaccgttcgatgtcgaactgaccgaagaagacggcgaccgcctgcttatcccggcgcaagatttttggcgggaacgcgtcagcaatgatccggtgcttgccgcattggcgtttaaacgcaaagctgtgccgcaaaccgtccttgcccaaatccgcgcctacctgtcccgcccgtacctgaatttccgccgtccgcaggcggatttgaaacaggcgcagcgcaacgccgaaacctcatggcaaaccgtctgccgcctgctgcccgagctggaagccggcttttggcgcatccatcccgacctcaacggcaacagttaccgcaaaaacagcttcggcaacctttttaaagaactggcacaaaaatccgccgccggacaactgccctttctggacaaagacacgcacgacagactcttgaaacttgcgtccgacaaactcgaagccggactgaaaaaaggcaaaacgcccgatgcggcagtatttgccgaattgcagaaactggcagacttcgggtacgatttgaacgcactcgaagaagcggaagaagcaacaataatccggctgcaactggatttaatcggatacctcaaccgcagccttgccgagatgaaaaaatcgcgccgcgaacgcggtttcgacgacctgctgctcgatgtccacaccgcgctgaccgacaatccgcacgccgaaaccctcgcccgcgccgttgccgaaaactgggaaaccgcgctaatcgacgagttccaagacaccgacccgctgcaatacgaaattttccaaaaaatcttcatcgcccaaaaccgcccgctgtttctggtcggcgatcccaaacaggcgatttacagctttcgcggtgcggacatttacgcctaccttcaggcggcggaagatgcgcggcaccgctacacgctcgccaccaactaccgcagccacgccgcgcttatcggcagcataggcgcgctgttccgcctcaaagaacgcccgttcgttttggaaaacatcggctattcggaagtcggtgcggcgcgtgccgaaagcaggttgtcccccgaacgtcctgccgtacaggttcgttggctgcacgaaaacgacaatgaaaaagccaacaaagacgttttgcgccgccgtgccgccgactattgcgccgacgaaatcgcccacgcgctcaacgaagccgccggaggccgtctgaatttcaaaggctgcccgttgcagtcgggcgatattgccgtgctggtacgcacgcacaacgaggcggtgatggtttccgccgccctgaaaaaacgacaggtgcaaagcgtcctgctttcacgcgaatccgtgttcgcctcgcccgaagccgccgccctgtccgcactcatcggcttctggctcgaaccgcgccgcgccggaacgctgcgctttgtcctgacaagcggcatattcggttatgacgcgcagcaattgcacgacttcaaccaaaacgaaagcgagattttgcattgggcggaatctgcccgaaccgcgctcgacaactggaatcaatacggcattttcgccgccatgcagcaattttcccaaacacacggcatcgaaacgcgcctcttaagccggaacaacgggcgcagcctgaccaattatttccaactgctcgaactgcttgccgccgaagacgcccaaaaccgcaaccccgccgctttgcacaagtggctgggcgaccaaatcagccttgccgaaaacaacagcaacgacaaccgcgccatccgtctggaaagcgacgaagatttggtcaaaatcgttaccatgcacgcctcgaaaggtttgcagtatccgctggtgtactgcccgtttgcgtgggacgcgcaagataccgggccgtccgactggcaaatcctccaccaaagcgccaaccgaaccgaactgttggcaaaggcgcaactgtcggaagacgaacagaagcaatacgccgacgaagaaatggcggaacgcctgcgcctgctttatgtcgcgctgacgcgtgccgaggaacagctcaacatctacgccgcctattcttccgataccgccgacaaccccctcgcctacctgattgaaggcttgccgcaagacagccgtgaaaccgtccgccgtgcctatgcgtgtgaaaaagacggcataacgatgctcaaacgcaactggcagcgcgtgacggacaacgccccggccgacacggatttcgccttcacagaagatgcgccgccccctgccgcctatcgcggcaacgccggtcaaaccgccgaatttgccgcaaacagcattcccgaacgcagattccgatttgtccgccacaccagctttaccgctttaagccgccatacccaaacgcccgacggcggcgaagaagatgcctgcccgtccttggatgccgccgaaacctcggtagcggcgatgccgtctgaaacgccgacggcttcagacggcatatcgatacacgattttccgaaaggcacgcaggcggggctgtgcctgcacgaaattcttgaagatttcaaattcggacaagcagccgccggacaggaaaccctcattgccgacaagctgaagaaatacgggtttgaagaaatgtggctgcccgccgttgccgaaatggcggaagcctgccgtaaaacgccgctgacgggggcatactgcctgtccgacattccgcccgagtgccgctgtcccgaaatgggctttaccctccataccgaagacttcggcctcaaacggctgcgcgactggtttgcccgcgacgacatcaggctgcccgaagtctgccgtgccgccgccgaaacgctcgacttccacaccgtcaacggctttttaaacggctttatcgatatggtctgccaagaccccgacggcaatatctgcatcatcgactacaaatcaaaccatctcggcgcggacgcatccgcctacacgcaacaggcgatggacgaagccgtcacgcaccaccactattaccttcaggcgctgatttacgccgttgccgccgcacgctacttcaaactgcgcggacaaccgcccgccgccgtttccgtccgctacctgtttttgcgcggcacagacggcaaaggcggcggcgtttggcgttgggacatagatgccgccgctttggaacagataaaataa

SEQ ID NO: 48233 - DNA, 1419 bp, Neisseria meningitidis
atgtccattaaaaacgccgtaaaattgattgaagaaagcgaagcccgctttgtcgatttgcgctttaccgataccaaaggcaagcagcaccactttaccgtgcctgcgcgcatcgtgttggaagaccccgaagagtggtttgaaaacggtcaggcgtttgacggttcgtctatcggcggctggaaaggcattcaggcttccgatatgcagttgcgtcccgatgcgtctacagccttcgtcgatcctttttatgatgatgttaccgtcgtcattacctgcgacgttatcgatcccgccgacggtcagggttacgaccgcgacccgcgctccatcgcacgccgcgccgaggcctatttgaaatcttccggcatcggcgacacggcatacttcggccccgagcctgaattcttcgtcttcgacggcgtagaatttgaaaccgacatgcacaaaacccgttacgaaatcacttccgaaagcggcgcatgggcaagcggcctgcacatggacggtcaaaacaccggccaccgccctgccgtcaaaggcggttacgcgcccgttgctccgattgacgcgggacaagacctgcgctccgcgatggtaaacattttggaagaactcggcatcgaagtcgaagtccaccacagtgaagtcggtaccggcagccaaatggaaatcggcacgcgtttcgccaccttggtcaaacgcgccgaccaaacccaagacatgaaatatgtgattcaaaacgttgcccacaacttcggcaaaacagccacctttatgcccaaaccgattatgggcgacaacggcagcggtatgcacgttcaccaatccatttggaaagacggtcaaaacctgttcgcaggcgacggctatgccggcttgagcgacaccgcgctctactacatcggcggcatcatcaaacacgccaaagccttgaacgcgattaccaatccgtccaccaactcctacaaacgcctcgtgccgcactttgaagcgccgaccaaactggcatactccgccaaaaaccgttccgcttccatccgcattccgtccgtgaacagcagcaaggcgcgccgcatcgaagcgcgtttccccgatccgaccgccaacccgtatttggcatttgccgccctgttgatggcgggtttggacggcattcaaaacaaaatccatccgggcgaccctgccgataaaaacctgtacgatctgccgccggaagaagatgcattggtgccgaccgtttgcgcttctttggaagaagcactggccgccctcaaagccgaccacgaattcctcctgcgcggcggcgtgttcagcaaagactggatcgacagctacatcgctttcaaagaagaagacgtacgccgcatccgcatggcgccgcacccgctggaatttgaaatgtattacagcctgtaa

SEQ ID NO: 48234 - DNA, 696 bp, Neisseria meningitidis; identical to SEQ ID NO: 38547

SEQ ID NO: 48235 - DNA, 1524 bp, Neisseria meningitidis; identical to SEQ ID NO: 38744

SEQ ID NO: 48236 - DNA, 273 bp, Neisseria meningitidis; identical to SEQ ID NO: 38717

SEQ ID NO: 48237 - DNA, 783 bp, Neisseria meningitidis
ttgcagaaagtcgtgcgccatatcgcgcaaaccgaaattatgccgcgttttttgaatacgccgtctcaccgcaaggaagacggttcgatgttgagcgaggcggacattgccgcgcagacggcttttgccgccgcgttgccgcttctgatcgattgcccgatgttgggcgaggaaatgtcgcggcaggagcagtcggctttgtgggcggaatattcgggagaaaaggggctgtggattgtcgatccgatagacgggacgaacaattttgtcaacgggctgccgcattttgccgtgtcggtggcgtttgtccgcaacgggcgcgccgaattgggcgtaatctacaacccggtcagcggcgaatgtttttacgccgaacgcgggcagggggcgtttttaaacgggacgcgcctgcccctgcgcctcgtggataaaaaactcaatgaggcaatcgcgggcgtggaaatcaaatatctgcgttcgggcaaactttccagccgcatgagtacgctcgcacctttcggtacggtgcggagtatgggcagcagcacgctggactggtgttatctggcgtgcgggcgttatgatgtttatgtccacggcgggcagaagctgtgggactatgctgcgggtgcgttgattttcgaggaggcgggcggcaggctgacgactttggaaggcgacgggttttggagtggtgaacacgtgttcaaacgctcggtcgttgccgcgctcgaaccgaagctgtttgaacgctgggtcgggtggatacgggaaaaccaatag

SEQ ID NO: 48238 - DNA, 435 bp, Neisseria meningitidis; identical to SEQ ID NO: 40706

SEQ ID NO: 48239 - DNA, 408 bp, Neisseria meningitidis; identical to SEQ ID NO: 42367

SEQ ID NO: 48240 - DNA, 285 bp, Neisseria meningitidis; identical to SEQ ID NO: 38289

SEQ ID NO: 48241 - DNA, 2298 bp, Neisseria meningitidis; identical to SEQ ID NO: 39011

SEQ ID NO: 48242 - DNA, 708 bp, Neisseria meningitidis
ttggtcaaaacggcagacggctacaaagccattgcccgtatccgaaccggcgaccgcgtcttcgccaaggacgaggcaagcggaaaaacgggatacaaacccgttaccgcccgatacggcaatccgtatcaagaaaccgtttacattgaaatttcagacggcatcggcaacaacccaaccctgatttccaataaaatccacccgttttacagtcaaggaaaatggatacaggcaggtcgtctgaaaaaaggcgacaccctgctttccgaaagcggcgcaaaacagacggttcaaaacattaccttcaaacagcagccgctcaaagcctacaatctgaccgtcgccgattggcatacctacttcgtcaagggcagtcaggcggaaacggaaggggtttgggttcataatgattgtccgtatgataaaggcaaccaacgatataaagacgcttcttatcatggcaaaaatgataattctgtgaaaagtagagcaccaacaaacggacaagcagctcttgataattccgttcaagttaaatcaacttctcctcgaagagttggggttgataaagccaataatgaaatcgttgtattagacaaaactcaaacttttaataacggttttgcggaatatcacgggcatgtcagaagttggcaagatttgcataccgatcagaaaaatgctttaaaaaaagcaggattggattag

SEQ ID NO: 48243 - DNA, 621 bp, Neisseria meningitidis
atgaaaccgcaattcatcactttggacggcatagacggtgccggcaaatccaccaaccttgccgtcatcaaggcatggtttgaacggagggggctgcccgtgctgttcacgcgcgaaccgggcggaacgccggtcggtgaggccttgcgcgaaatcctgctcaaccctgaaaccaaagccggtttgcgtgcggaaacactgatgatgttcgccgccagaatgcagcatattgaagacgtgatattgcctgcactttcagacggcatccatgtcgtgtccgaccgttttaccgacgcaaccttcgcctatcagggcggcgggcgggggatgccgtctgaagacattgaaattttggaacattgggtgcagggcggtttgcgccccgatttgaccctgctgttggatgtgccgctggaagtgtcgatggcgcgtatcggacagtcgcgcgagaaagaccggttcgagcaggaacaggcagatttcttcatgcgtgtgcgcagcgtttatctgaaccgtgccgccgcctgtcccgaacggtacgccattatcgacagtaaccgcagcttggatgaagtcagaaacaacatagaaaaagtgttggacggacatttcggctgttaa

SEQ ID NO: 48244 - DNA, 225 bp, Neisseria meningitidis; identical to SEQ ID NO: 38642

SEQ ID NO: 48245 - DNA, 468 bp, Neisseria meningitidis; identical to SEQ ID NO: 38296

SEQ ID NO: 48246 - DNA, 396 bp, Neisseria meningitidis
atgccgtctgatgtcggaatgcggcttcagacagcattcaaacggaagttgaacatgaaaaaaatattgtattttctgatgtttgttttttctacaagcgtatgggccggggatgcggaagacaatctgctcagcatccaatccggctatcgtgccttactgcaaaaacaaaacaatctggacggaaaaatcatcgggatgcagtcggatttggaagatgcgcgccggcgtttgcagacggctcaagcagacatcgcccgtttggaagcggaaattcctgcagcaatggcgcaaaaagcccggcaggctgaagagctgaggcaaatcggagtgcgtttggactatgcttggaatgcggtttacggcgcagggggaacgaaagcgtcggggaattga

SEQ ID NO: 48247 - DNA, 837 bp, Neisseria meningitidis; identical to SEQ ID NO: 44358

SEQ ID NO: 48248 - DNA, 777 bp, Neisseria meningitidis; identical to SEQ ID NO: 39075

SEQ ID NO: 48249 - DNA, 435 bp, Neisseria meningitidis; identical to SEQ ID NO: 38266

SEQ ID NO: 48250 - DNA, 537 bp, Neisseria meningitidis; identical to SEQ ID NO: 37832

SEQ ID NO: 48251 - DNA, 1296 bp, Neisseria meningitidis
atgagcgtcatccaagacctgcaatcgcgcggcctaatcgcgcaaacgaccgacatcgaagccttagacgctttgttgaacgaacaaaaaatcgccctttactgcggtttcgatccgaccgccgacagcctgcacatcggacacctgttgcccgtattggcattgcgccgcttccaacaggcggggcatacgccgattgctttggtgggcggcgcgaccggtatgatcggcgaccccagcttcaaagccgccgaacgcagcttgaattccgccgaaactgttgccggctgggtggaaagtatccgcaaccaattaacccctttcttgagctttgaaggcggaaatgccgccattatggcgaacaatgccgactggttcggcagcatgaactgccttgacttcctgcgcgacatcggcaagcatttctccgtcaacgccatgctgaacaaagaatccgtcaaacagcgcatcgaccgcgacggcgcaggcatttccttcaccgagttcgcctactccctgctgcaaggctacgactttgccgagttgaacaaacgccacggcgcggttttggaaatcggcggctccgaccaatggggcaacatcaccgccggtatcgacctgacccgccgcctgaatcaaaaacaagtgttcggcctgaccctgcctttggtaaccaaatcagacggcaccaaattcggcaaaaccgaaggcggcgcggtatggctgaacgcgaaaaaaacctcgccctatcagttctaccaattctggctgaaagttgccgatgccgatgtgtataaattcctgaaatactttaccttcctgtccatcgaagaaatcgacgctatcgaagcgaaagataaagccagcggcagcaagcccgaagcgcaacgcatcctcgccgaagaaatgacccgcctgattcacggcgaagaagcccttgccgccgcgcagcgcatttccgaaagcctgtttgccgaagaccaaagcagcctgaccgaaagcgacttcgagcagctcgccctcgacggcctgcctgcatttgaagtttcagacggcatcaatgtcgtcgaagccttggtcaaaaccggtttggcatcctccaataaagaagcgcgcggctttgtgaacagcaaagcggttttgctcaacggcaaacctgccgaagccaacaaccccaaccacgccgccgaacgccccgacgatgcctgcctgctgaacggcgaacacaaacgtttcggcaaatacaccatccttcggcgcggcaaacgcaaccacgcgcttttggtttggaaataa

SEQ ID NO: 48252 - DNA, 876 bp, Neisseria meningitidis
atggcagtaggaaaagagattctcaccaaaatccgcagtgttcagaatacccaaaagatcactaaagcgatgcagatggtgtcaacctctaaaatgcggaagactcaggaacggatgcgtttggcgcgtccgtatgccgaaaaagtgcgtatggtgatgagccatcttgcgcaaaccaataccgatcatggtattccgttactggaatctcatcgggaaatcagacgtgtcggttttattttgattacgtctgataagggtttgtgtggcagtttgaacgccaacgtgctgaaaaagtttttggcacaagttcaagagtatcggaatcaaggtattgaagaggaaatcgtatgccttggcagtaaaggtctgatggcgtgtcagagcattggtctgaatgtgattgccagtgccgtaaatttgggcgataccccaaaaatggaaatgctgctcggacctttgacagaactcttccaacggtatgagaaacatgaaattgacagaatccatctggtgtattcgggttttgtcaataccatgcgtcaagaaccgagaatggaagtattgctgcctatcggtgagaacgtgattggcgattcagctcccaaatcaccgttcagctgggaataccgctacgaaccgactgcacttgcagtgttggaatatctggttcgccgctatttagagtctgtggtttatcaggcgttgagcgacaatatggcatccgaacaggcagcccgcatggttgccatgaaagctgcaacagacaatgcaggcaatgccatcaaagagttgcgtttggtatataacaaatcgcgtcaagctgcgattaccacggaattgtcagaaattgtagcaggtgcggcggctgtctga

SEQ ID NO: 48253 - DNA, 264 bp, Neisseria meningitidis; identical to SEQ ID NO: 37542

SEQ ID NO: 48254 - DNA, 1647 bp, Neisseria meningitidis; identical to SEQ ID NO: 39359

SEQ ID NO: 48255 - DNA, 1008 bp, Neisseria meningitidis
atgagcaccttcttccagcaaaccgcccaagccatgattgccaaacacatcgaccgtttcccgctattgaagttggaccaggtgattgattggcagccgatcgaacagtacctgaatcgtcaaaaaacccgttaccttagagaccaccgcggtcgtcccgcctgtcccctgttgtccatgttcaaagccgtcctgctcggacaatggcacagcctctccgatcccgaactcgaacacagcctcatcacccgcatcgatttcaacctgttttgccgtttcgacgaactgatcatccccgattacagtaccttatgccgctaccgcaactggctggcgcaagacgacaccctgtccgaattactcaaactgattaactgccaactgaccgaaaaaggcttaaaagtagagaaagcatccgccgccgtcattgacgccaccattattcagaccgccggcagcacacagcgtcaggccatagaagttgacgaagaaggacaaatcagcggccaaaccacaccgagtaaggacagcgatgcccgttggataaagaaaaacggcctctacaaactcggttacaaacaacatacccgtaccgatgcggaaggctatatcgagaaactgcacattacccccgccaatgcccatgagtgcaaacacctgtcgccgttgttggaagggttacccgaaggtacgaccgtctatgccgacaaaggctatgacagtgcggaaaaccggcaacatctggaagaacatcagttgcaggacggcattatgcgcaaagcctgccgcaaccgtccgctgtcggaagcgcaaaccaaacgcaaccgatatttatcgaagacccgttatgtggtcgaacaaagctttggtacgctgcaccgtaaattccgctatgcccgggcagcctatttcggactgattaaagtgagtgcgcaaagccacctgaaggcgatgtgtttgaacctgttgaaagccgccaacaggctaagtgcgcccgctgccgcctaa

SEQ ID NO: 48256 - DNA, 2829 bp, Neisseria meningitidis
atgatggacgaaaaactcaatttctcttacctgttcggttcaaacgcaccttacattgaggaattgtacgaggcttttttggaaaaccccgatgcggttgatgaaaaatggaagcagtatttcaccgatttgagcaaacagccggggacggttgctgtcgatgtcgcacacacaccgattcgcgaatcatttgttactttggcgaaaaagaaaattgcatctgccgttgcgggcggtgcggatgaggcaatgctgaaaaagcaagtcagcgttttacggctgatttccgcctatcgtatccaaggcgtgggtgcagcccaacttgatccgctcaaacgtatccccccgcgcgatattgaagccctcgatccgaaattccacggtctgtcagatgccgatatggcgcttcaattcaatatgggcgagggcgattttgccaatcgcggcaaactgcctttgtcccaaatcatcagcaacctcaaacaaacctactgcggccacatcgcattggaatatatctatattcccaataccgaagagcgccgctgggtacgcaattattttgaaagcgtattgtccacaccgcattacaatgccgatcaaaaacgccgtatcttgaaagagatgactgctgccgagactttggaacgttatctgcataccaaatatgtcggtcagaaacgtttcggtgtcgaaggcggcgaaagcgcgattgccggtttgaactacctgattcaaaacgccggtaaagacggcgtggaagaagtcatcatcggtatggcgcaccgtggccgtctgaatgttttggtgaacattttgggtaaaaaacccggagatttgttcgctgagtttgaaggccgtgccgaaatcaaattgcctagcggcgacgtgaaataccacatgggcttcagctccgacatcgccactccacatggtccgatgcacgtttctttggcgttcaacccgtcacacttggaaatcgttaacccggtagtcgaaggttctgcacgcgccaagcagaaacgtttgggcgaaaacggccgcgataaagtcttgcccgtattgattcacggcgactccgcatttatcggtttgggtgtcaaccaagcgacattcaatctgtctaaaacgcgcggttataccaccggcggtacggttcatatcgtcatcaacaatcaaatcggctttaccacttccgatatccgcgatacccgttcaaccgtacactgtaccgatatcgcaaaaatggtttccgctccggttatccatgtgaacggcgatgatcctgagcgtgtttgctttgccatccaagccgctttggattaccgcaaaaaattccataaagacatcgtgatcgacgttgtctgctaccgtaaatggggccacaacgagggcgacgatccgaccttgacccaaccgatgatgtacaaaaaagtatcgcaacacccgggtgcgcgtgctttgtacaccgagcaactgattgccgaaggcgtggtaacccaagccgaggctgacggttacatccaagcctaccgtgatgctttggataaaggcgaacacgtcgagcaaacaacgttgagcaacttccaacgcacacaaattgactggagcaaataccaaggtaaagattggcgcgaacacatcgaaaccggtttgcctgccgcggatattgagcgtcttaccgagaaatttaccgccgtaccggaaggctttgccctgcatccgactgcaaaacgtgtgattgaagcgcgtaaagccatggcatccggcaaacaagccatcgactggggtatggccgaaaccttggcatacgcaagccttgtaaccaaaggtcatggcgtgcgtatctccggtgaggactccgggcgcggtacattctcacaccgtcatgcagtattgcacgatcaaaaacgtgaaaaatgggatgacggtacttatgttcctctgcgccatatgggcgaaggtatgggcgagttcttggttatcgactccattttgaacgaagaagccgtgatggcgttcgagtacggctttgcctgctccgcgcctgacaagctgaccatttgggaagctcaatttggtgacttcgccaacggcgcgcaagtgactattgaccaattcctgtcttcaggcgaaaccaaatggggtcgtttgtgcggtctgaccaccatccttccgcacggctacgacggtcaaggtcccgagcactcttctgcacgcgtagaacgttggttgcaactgtgttctgagaacaatatgcaagtcatcatgccgtctgaagcgtcgcaaatgttccacctcttgcaacgtcaagtcttaggttcataccgcaaaccgctagtgattttcatgtccaaacgcctgttgcgattcaaaggggcaatgagcccgctggaaaacttcaccgaaggttcgactttccgtccggttatcggcgataccgccgaacgcgcaagcaacgacagcgtgaaacgcgtggcattgtgtgccggtcaggtttactatgacttggaagccggtcgagccgaacgtaaactggaagatgatgtcgctattgtccgcgttgagcagctgtatccgttcccatacgacgaggttaaagccgaactggcgaaatatccgaacgcaaaatctgtggtttgggcacaagaagagccgaaaaaccaaggcgcgttctaccaaatccgccaccgcatcgaagacgttatcagcgaagagcaaaaactgtcttatgccggtcgtccaagcagcgcatcgcctgcagtgggctactcaagcaaacacattgctcaattgaaacaattggttgaagacgctttggcattgtaa

SEQ ID NO: 48257 - DNA, 690 bp, Neisseria meningitidis; identical to SEQ ID NO: 38413

SEQ ID NO: 48258 - DNA, 291 bp, Neisseria meningitidis; identical to SEQ ID NO: 38283

SEQ ID NO: 48259 - DNA, 303 bp, Neisseria meningitidis; identical to SEQ ID NO: 37853

SEQ ID NO: 48260 - DNA, 159 bp, Neisseria meningitidis; identical to SEQ ID NO: 40149

SEQ ID NO: 48261 - DNA, 753 bp, Neisseria meningitidis; identical to SEQ ID NO: 38392

SEQ ID NO: 48262 - DNA, 2388 bp, Neisseria meningitidis
atgcaactgctggcagccgaaggcattcaccaacaccaattgaatgttcagaaaagtacccgtttcatcggcatcaaagtgggtaaaagcaattacagcaaaaacgagctgaacgaaaccaaactgcccgtacgcgttatcgcccaaacagccaaaacccgttccggctgggataccgtactcgaaggcaccgaattcaaaaccaccctttccggagccgacatacaggcaggggtgggtgaaaaagcccgagccgatgcgaaaattatcctaaaaggcattgtgaaccgtatccagtcggaagaaaaattagaaaccaactcaaccgtatggcagaaacaggccggacgcggcagcactatcgaaacgctaaaactgcccagcttcgaaagccctactccgcccaaattgtccgcacccggcggctatatcgtcgacattccgaaaggcaatctgaaaaccgaaatcgaaaagctgtccaaacagcccgagtatgcctatctgaaacagctccaagtagcgaaaaacatcaactggaatcaggtgcagcttgcttacgacagatgggactacaaacaggagggcttaaccgaagcaggtgcggcgattatcgcactggccgttaccgtggtcacctcaggcgcaggaaccggagccgtattgggattaaacggtgcggccgccgccgcaaccgatgcagcattcgcctctttggccagccaggcttccgtatcgttcatcaacaacaaaggcgatgtcggcaaaaccctgaaagagctgggcagaagcagcacggtgaaaaatctggtggttgccgccgctaccgcaggcgtagccgacaaaatcggcgcttcggcactgaacaatgtcagcgataagcagtggatcaacaacctgaccgtcaacctagccaatgcgggcagtgccgcactgattaataccgccatcaacggcggcagcctcaaagacaacttgggcgatgccgcactgggtgcgatagtcagtaccgtacacggagaagtagcgagcaaaatcaaatttaatctcagcgaagactacattacccacaagattgcccatgccatagcgggctgtgcggcagcggcggcgaataagggtaagtgtcaggatggtgcgatcggtgcggctgtgggcgagatagtcggggaggctttgacaaacggcaaaaatcctgccactttgacagctaaagaacgcgaacagattttggcatacagcaaactggttgccggtacggtaagcggtgtggtcggcggcgatgtgaatacagcggcgaatgcggctaaagtcgcgattgaaaataacctattatctcaagaagagtatgctcttagagaaaaattgatcaaaaaagccaaagggaaaggcctattatctttagattggggcagcctgaccgaacaagaggcaaggcagtttatctatttgattgagaaagatcgatattctaatcaattgcttgaccgatatcaaaaaaatccaagtagtttaaataatcaagaaaaaaatattcttgcatattttattaaccaaacctctggaggtaacacagcttgggcagcttcgatactgaaaacgccccagtcaatgggtaatctcactattccttccaaagatattaataacaccttatcgaaagcctatcaaacattgagtcgttatgattcttttgattacaaatcagctgttgccgcacaacctgcactttacttattaaacggaccgcttggcttcagtgtcaaagcagctactgtggcagcaggaggatataacattggacagggagcgaaagcaatctctaatggagaatatctgcatggtacagttcaggttgttaatggcacattgatggttgcaggatctgtatctgcacaggctgcaatatcggccaagcctgcacctgttacccgttatctgagcaatgacagtgctcctgctttaagacaagctttaactgctgaaagccagagaatccgcatgaaactgccggaagagtatcgacaaatagggaatcttgcgatagcaaaaattgatgttaaaggattaccgcaaaggatggaagcatttagttctttccaaaaaggggaacatggatttatttcgttacctgaaacaaaaatttttaaacctatatctgttgataaatatcataatattgcctctcctcctagaggaacattaagaaatatagatggagaatataaattacttgaaactatagcacagcaactcggaaataatcgtaatgtatcaggtagaattgatctatttacagaattaaaggcctgtcaatcttgcagcaatgttattttagagtttagaaatcgctatccaaatattcaattaaatatttttacaggaaaatag

SEQ ID NO: 48263 - DNA, 1083 bp, Neisseria meningitidis; identical to SEQ ID NO: 38655

SEQ ID NO: 48264 - DNA, 192 bp, Neisseria meningitidis; identical to SEQ ID NO: 42043

SEQ ID NO: 48265 - DNA, 480 bp, Neisseria meningitidis; identical to SEQ ID NO: 45212

SEQ ID NO: 48266 - DNA, 1848 bp, Neisseria meningitidis
atgcacgacacccgtaccatgatgatcaaaccgaccgccctgctcctgccggctttatttttctttccgcacgcatacgcgcctgccgccgacctttccgaaaacaaggcggcgggtttcgcattgttcaaaaacaaaagccccgacaccgaatcagttaaattaaaacccaaattccccgtccgcatcgacacgcaggatagtgaaatcaaagatatggtcgaagaacacctgccgctcatcacgcagcagcaggaagaagtattggacaaggaacagacgggcttcctcgccgaagaagcaccggacaacgttaaaaccatgctccgcagcaaaggctatttcagcagcaaagtcagcctgacggaaaaagacggagcttatacggtacacatcacaccgggcccgcgcaccaaaatcgccaacgtcggtgtcgccatcctcggcgacatcctttcagacggcaacctcgccgaatactaccgcaacgcgctggaaaactggcagcagccggtaggcagcgatttcgatcaggacagttgggaaaacagcaaaacttccgtcctcggcgcggtaacgcgcaaaggctacccgcttgccaagctcggcaacacccgggcggccgtcaaccccgataccgccaccgtcgatttgaacgtcgtcgtggacagcggccgccccatcgccttcggcgactttgaaatcaccggcacacagcgttaccccgaacaaatcgtctccggcctggcgcgcttccaaccgggcacgccctacgacctcgacctgctgctcgacttccaacaggcgctcgaacaaaacgggcattattccggcgcgtccgtacaagccgacttcgaccgcctccaaggcgaccgcgtccccgtcaaagtcagcgtaaccgaggtcaaacgccacaaactcgaaaccggcatccgcctcgattcggaatacggtttgggcggcaaaatcgcctacgactattacaacctcttcaacaaaggctatatcggttcggtcgtctgggatatggacaaatacgaaaccacgcttgccgccggcatcagccagccgcgcaactatcggggcaactactggacaagcaacgtctcctacaaccgttcgaccacccaaaacctcgaaaaacgcgccttctccggcggcatctggtatgtgcgcgaccgcgcgggcatcgatgccaggctgggggcggagtttctcgcagaaggccggaaaatccccggctcggatgtcgatttgggcaacagccacgccacgatgctgaccgcctcttggaaacgccagctgctcaacaacgtgctgcaccccgaaaacggccattacctcgacggcaaaatcggtacgactttgggcacattcctgtcctccaccgcgctgatccgcacctctgcccgcgcaggttatttcttcacgcccgaaaacaagaaactcggcacgttcatcatacgcggacaagcgggttacacccttgcccgcgacaatgccgatgtcccctcggggctgatgttccgcagcggtggcgcgtcttccgtgcgcggttacgaactcgacagcatcgggcttgccggcccgaacggatcggtcctgcccgaacgcgccctcttggtgggcagcctggaataccaactgccgtttacgcgcaccctttccggcgcggtgttccacgatatgggcgacgccgccgccaatttcaaacgtatggagctgaaacacggttcgggactgggcgtgcgctggttcagcccgctcgcgccgttttccttcgacatcgcctacgggcacagcgacaagaaaatccgctggcacatcagcttgggaacgcgcttctaa

SEQ ID NO: 48267 - DNA, 354 bp, Neisseria meningitidis
atgtctgaaatcaaaattttccacaatccgcgttgcagcaaatcgcgtgccgccttgtccctattggaagaacgcggcattgctgccgaagtggtcaaatatttggatacgccgcccgacttgtccgaattgaaggatattttcaacaaattgggcttggagtcggcgcgcgggatgatgcgtgtgaaagatgatttgtacaaggaattgggtttggacaaccccgatttggacaataacgcactgctgcgtgccatcgccgatcatcccgccctgttggagcgtccgattgttttggcaaacggtaaggcggctgtcggcaggccgttggaaaatatcgaagcggtattgtga

SEQ ID NO: 48268 - DNA, 1776 bp, Neisseria meningitidis; identical to SEQ ID NO: 39929

SEQ ID NO: 48269 - DNA, 771 bp, Neisseria meningitidis
atgaccacgaccgaacacgacaacgacgacgaactcctgctgcggtacagccgccacatcctcttggacgaaatcggcatcgaagggcagcagaaactttccgccgcgcatattttggtcgtcggctgcggcggtttgggtgccgccgccctgccctaccttgccgcttccggcatcggcacgctgaccatagccgattccgacacggtcgagctgcacaacctgcaacgccaagtcgcatttgacgagggcgatgtcggcaaactcaaaaccgaagccttggcagaccgcctgaaacgcatcaaccataccgtcaacgtccgcgccgtcaacgaaaaactcgacggctgccgcctgaccggtttggttcaagccgccgacatcgttttagactgctgcgacaactacgccacgcggcaagccgtcaaccgtgcctgcgtacaaacgaaaacaccgctggtttcaggggcggcggtacgctttgaagggcaacttgccgtgtaccgtcccgacttgcccgactcgccgtgttacgcctgcctgtttgacggcggatcggcttcagacggcatctgttccctcttcggcgtattctcgccgctggtcggcatcatcggcagtacccaagcggcggaggctctgaaaatcctgctggatgcgggcgaaccgtcgcacggcaggctggcggtttaccgtgccttggaagggggctggcaatatttcgacctgccgcgcaaccccgaatgcccggtttgcggcgcggaacggtaa

SEQ ID NO: 48270 - DNA, 2664 bp, Neisseria meningitidis; identical to SEQ ID NO: 36267

SEQ ID NO: 48271 - DNA, 459 bp, Neisseria meningitidis; identical to SEQ ID NO: 45469

SEQ ID NO: 48272 - DNA, 1410 bp, Neisseria meningitidis; identical to SEQ ID NO: 38534

SEQ ID NO: 48273 - DNA, 207 bp, Neisseria meningitidis; identical to SEQ ID NO: 38607

SEQ ID NO: 48274 - DNA, 1185 bp, Neisseria meningitidis; identical to SEQ ID NO: 38307

SEQ ID NO: 48275 - DNA, 774 bp, Neisseria meningitidis; identical to SEQ ID NO: 39194

SEQ ID NO: 48276 - DNA, 198 bp, Neisseria meningitidis; identical to SEQ ID NO: 39472

SEQ ID NO: 48277 - DNA, 1419 bp, Neisseria meningitidis
atgaatattcacaccctgctctccaaacaatggacgctgccgccattcctgccgaaacggctgctgctgtccctgctgatactgcttgcccccaatgcggtgttttgggttttggcactgctgaccgccaccgcccgcccgattgtcaatttggactatcttcccgccgcgctgctgatcgccctgccttggcgtttcgtcaaaattgccggcgtattggcgttttggctggcggttttgtttgacgggctgatgatggtgatccaactcttcccttttatggatctcatcggcgccatcaacctcgtccccttcatcctgaccgcccccgccccttatcagataatgaccgggctgttgctgctgtatatgctggcgatgccgtttgtgttgcagaaagccgccgccaaaaccgacttccggcacattgccgtctgcgccgccgttgtggcggcagccggctatttcaccggccatttgagttactacgaccggggtcggatggccaatatcttcggcgcaaacaacttctactacgccaaaagtcaggcgatgctctacaccgtcagccagaatgccgactttattaccgccggcctggtcgatcccgtcttcctccccttgggcaatcaacagcgtgccgccacgcatctgaacgagccgaaatctcaaaaaatcctctttatcgtcgccgaatcttgggggctgccggccaatcccgaacttcaaaacgccacttttgccaaactgctggcgcaaaaagaccgtttttcggtttgggaaagcggcagttttccctttatcggcgcgacggtcgaaggcgaaatgcgcgaactgtgcgcctacggcggtttgcgcgggttcgcactgcgccgcgcgcccgacgaaaaatttgcccgctgcctccccaaccgtttgaaacaagaaggttacgccacctttgcgatgcacggcgcgggcagttcgctttacgaccgcttcagctggtatccgagggcgggctttcaagaaatcaaaaccgccgaaaacctgatcggtaaaaaaacctgcgccattttcggcggcgtgtgcgacagcgagctgttcggcgaagtgtcggcatttttcaaaaaacacgacaagggactgttttactggatgacgctgaccagccacgccgactatcccgaatccgacattttcaaccacaggctcaaatgcaccgaatacggcctgcccgccgaaaccgacctctgccgcaacttcagcctgcacacccaattcttcgaccaactggcggatttgatccaacgccccgaaatgaaaggcacggaagtcatcatcgtcggcgaccatccgccgcccgtcggtaacctcaatgaaaccttccgctacctcaaacaggggcacgtcgcctggctgcacttcaaaatcaaataa

SEQ ID NO: 48278 - DNA, 417 bp, Neisseria meningitidis; identical to SEQ ID NO: 39610

SEQ ID NO: 48279 - DNA, 339 bp, Neisseria meningitidis; identical to SEQ ID NO: 37943

SEQ ID NO: 48280 - DNA, 1557 bp, Neisseria meningitidis; identical to SEQ ID NO: 44681

SEQ ID NO: 48281 - DNA, 324 bp, Neisseria meningitidis; identical to SEQ ID NO: 37053

SEQ ID NO: 48282 - DNA, 330 bp, Neisseria meningitidis
atgtcattacccccatgcccgcaatgtgcctccgaatacacctatgaagacggcggacaatacatctgccccgaatgcgcccacgaatggaatgaaaccgaatccgccgccgaccttgcggctcaagtgcgcgatgccaacggcgcggcactgcaaaacggcgataccgtcatcctcatcaaagacctcaaggtaaaaggcagctcgatggtgatcaaacaaggtacgaaagtcaaaggcatacgcctgcaggaaggcgatcacaacatcagctgcaaaatcgacggcagcgcgatgaatttaaaatccgaattcgtcaaaaaagcctga

SEQ ID NO: 48283 - DNA, 378 bp, Neisseria meningitidis; identical to SEQ ID NO: 37228

SEQ ID NO: 48284 - DNA, 213 bp, Neisseria meningitidis; identical to SEQ ID NO: 38488

SEQ ID NO: 48285 - DNA, 660 bp, Neisseria meningitidis
ttgtgtgcgtcctgtttgaatgttaacaaaatcgttataatcgcaacattctaccgcaatcctgaaaggccgtctgaaatgaggaacgaggaaaaacgcgccctgcgccgcgaattgcgcgggcggcgttcgcaaatggggcgggacgtgcgggcggcggcaacggtaaaaatcaaccacctgctcaaacgttatattaaaaaagggcggaaaatcggcgtgtattggccgatgggcaaggaattgcgtttggacggctttgtccgcgcggcgcaaaaacgcggtgcggaactctacctgccttatatcgaaccgcgttcgcggcggatgtggtttacgccgtatcctgaaagcggaatggaacgggagcgcatacggggcagggcgaagttgaacgtgccgcagtttgcagggcgcaaaatccgcgtgcacggtttgtcggtattgctcgtcccgcttgtcggcatagaccgcgaaggctaccgcttggggcaggcaggcggctattacgatgcgacgcttgcagcgatgaaataccgtttgcaggcaaaaaccgtgggcgtgggctttgcctgccaactggtcggcacgctgccgcgcgaggcgcacgacctgccgctggacggttttgtgtcggaggcggggatattgtgtttttag

SEQ ID NO: 48286 - DNA, 1779 bp, Neisseria meningitidis; identical to SEQ ID NO: 39265

SEQ ID NO: 48287 - DNA, 1116 bp, Neisseria meningitidis; identical to SEQ ID NO: 39732

SEQ ID NO: 48288 - DNA, 1794 bp, Neisseria meningitidis; identical to SEQ ID NO: 38317

SEQ ID NO: 48289 - DNA, 2145 bp, Neisseria meningitidis
atgaacaatccattggtgaatcaggctgctatggtgctgcctgtgtttttgttgagtgcttgtttgggcggaggcggcagtttcgatcttgattctgtcgataccgaagccccgcgtcccgcgccaaagtatcaagatgtttcttccgaaaaaccgcaagcccaaaaagaccaaggcggatacggttttgcaatgcgcttcaagcggcggaattggtatccgcaggcaaatcctaaagaagatgagaaaaaactttctgaaaatgattgggaggcgacaggattgccaggcaatcccaaaaacttacctaagcgacagaaatcggttattgaaaaagtagaaacaggcagcgacagcaatatttattcttccccctatctcacgcaatcaaaccatccaaacggcaacactggcaacggtacaaacctgccaaaaaacgaagtaacagattataaagatttcaaatatgtttattccggctggttttataaacatgctaaacgaaattttgatattacaaataaaattgtacgacaaggcgacgacggttatatcttctatcacggcaaagaaccttcccgacaacttcccgtttctgaaaaaattacctataaaggtgtgtggcattttgtaaccgatacgaaaaatggacaaaaattttatgacattatccagccttcaaaaaaacaaggcgacaggtatagcggattttctggcgatgatgatgaacaatattctaataaaaacgacatgctgaaaggtgatcaagagggttatggttttacctcaaatttagaagtggatttcaataataaaaaattgacgggtaaattgatacgcaataatagagttacaggcgctactaacgataaatacaccacgcaatattatagccttgaggctcaagtaacaggcaaccgtttcaacggcacggcaacggcaactgacaaacctgaacaagacggaaccaaacaacatccctttgtttccgactcgtcttctttgagcggcggctttttcggcccgcagggtgaggaattgggtttccgctttttgagcaacgataaaaaagttgccgttgtcggcagcgcgaaaaccaaagacaaacccgcaaatggcaatactgcggaggcttcaggcggcacagatgcggcagcatcgggcggtacggcaggcacgccgtctgaaagcactaagctgaccacggttttggatgcggttgagctgaaatctggcggtaaggaagtcaaaaatctcgacaacttcagcaacgccgcccaactggttgtcgacggcattatgattccgctcctgcccgagacttccgaaagcgggagcaatcaggcagataaaggtaaaaacggcgaaacagaatttacccgcaaatttgaccacacgccgaaaagtgataaaaaagacgcccaagcaggtacgcagacgaatggggcgcaaaccgcttcaaatacggcaggtgataccaatggcaaaacaaaaacctatgaagttgaagtctgctgttccaacctcaattatctgaaatacggaatgttgacgcgtaaaaacagcaagtccgcgatgcaggcaggcgaaaacggtagtcaagctgacgctaaaacggaacaagttgaacaaagtatgttcctccaaggcgagcgcaccgatgaaaaagagattccaagcgagcaaaacatcgtttatcgggggtcttggtacgggcatattgccaacggcacaagcacaagctggagcggcaatgcttcagataaagagggaggcaacagggcggactttaccgtgaattttggcgagaaaaaaattaacggaacgttaaccgctgaaaacaggcagcaggcaacctttaccattgagggaatgattcagggcaacggtttttccggtacggcaaaaactgctgactcaggctttgatctcgatcaaagcaataccaccggcacgcctaaggcatatatcacaaacgccaaggtgcagggcggtttttacgggcctaaagccgaagagttgggcggatggtttgcctatccgggcgacaagcaggcgcagccgcccgcttcggggtcgggcgcatcagccgccaacagcgcgaccgtggtattcggtgcgaaacgccaacagcttgtgcaataa

SEQ ID NO: 48290 - DNA, 363 bp, Neisseria meningitidis; identical to SEQ ID NO: 38839

SEQ ID NO: 48291 - DNA, 861 bp, Neisseria meningitidis; identical to SEQ ID NO: 40563

SEQ ID NO: 48292 - DNA, 2376 bp, Neisseria meningitidis
atgaataaaaatattaaatctttaaatttacgggaaaaagacccgtttttaagtcgtgaaaaacagcgttatgaacatcctttgcccagtcgggaatggataatcgaattgttggagcgcaaaggtgtgccttcaaaaatcgaatcgcttgcgcgcgagctgtcgattacggaagacgagtatgtctttttcgaacgccgtctgaaggcgatggcgcgggacggtcaggttttaatcaaccgccggggcgcggtttgcgcggcggacaaattggatttggtcaaatgccgtgtcgaggcgcacaaagacggtttcggttttgccgtgccgctcacgcccgccaaagacggtgattttgttttgtatgaacgccagatgcgcggcattatgcacggcgatattgtcactgttcgtcctgccggcatggaccgtaggggccgccgcgaagggacagttctggatattgtcgaacgctcgcaaagcaaagtggtcggccgtttctatatggataggggcgtggcgattttggagccggaagacaagcgtctgaaccaaagcatcgtattggaaccggacggcgtggcgcgtttcaaacctgaatccggtcaggtcatcgtcggcgaaattgaggtttatcctgagcaaaaccggccggcagtggcaaaaatcatcgaagttttgggcgattatgccgacagcggcatggagattgaaattgccgtgcgcaagcatcatttgccgcaccaattcagtgaagcgtgtgccaaagccgtgaaaaaaattcccgaccatgtacgcaaaagcgatttgaaaggccgcgtcgatttgcgcgacctgcctttggtaacgattgacggcgaaacggctcgagattttgacgatgcggtgtttgccgaaaaaatcggacgcaattaccgtctggtcgtggcgattgccgatgtcagccattatgtccgccccgatgacgctatcgacacggacgctcaggaacgcagcaccagtgtttacttcccgcgccgcgtgattcccatgttgccggaaaacctgtccaacggcatctgctcgctcaatcctaatgtcgagcgtttgtgtatggtgtgcgatatggttatcacttacgcgggcaatattaaagaataccgcttctaccccgccgtgatgcgctctcatgcccgcctgacctacaaccaagtttggaaatggctttcaggcggcatcgggcatccgttcaaagcccaaatcgacacgctttacaaactcttcaaaatccttcagaaaaagcgtttcgaacgcggggcggtggagtttgacagcatcgaaacccaaatgcttttcgacgacaacggtaaaattgaaaaaatcgtccccgttgtccgcaacgatgcccacaagctgattgaagaatgtatgttggcggcaaacgtttgcgcagcggattttctgttgaaaaacaagcataccgcattgttccgcaaccatttggggcccacgcccgaaaaactcgccgccttgcgcgagcagttcggtctgttggggcttcaacttggcggcggcgacaacccgtcgccgaaagactatgccgcgcttgccggacagttcaaaggcaggccggatgccgaattgctgcaagtcatgatgttgcgctccatgcaacaggcggtttacgaaccgcattgcgacggacactttggtcttgcctacgaagcatacgcccacttcacctcgcccatccgccgctatcccgacctgaccgtacaccgcgccatcaaagccgtgttgaatcagcaaacctacacgccaaaaaaaagctggcaggctttgggcgtgcatacctcgttctgtgagcgccgtgccgacgacgccagccgcgacgtggaaaactggctgaaaacctactatatgcgtgacaaagtcggcgaaatatttgaaggcaaaatttccggggtggcaaattttggaatatttgtcactttggacgatatccatatcgacggtctggtgcatatcagcgatttgggcgaagactatttcaacttccgccccgaaatcatggcaatcgaaggtgaacgcagtggcatccgtttcaatatgggcgacagggttgccattaaagtggcccgtgccgatttggatgatggaaaaatcgattttgtcctgattgccgaggggagcggcagagggcggaaagttaaatcatccgcgtctgccaaaccggcagggacggcggggaaagggaagccgaaaaccgccgccgggaaaaaaacagcccgaggcggcaaagtaaggggaaggggcgcgtctgccgccgcagaatcggggaaaaaggcaaagaaaccggttccgattaaggtaaaaaaacggaaaggcaaatcataa

SEQ ID NO: 48293 - DNA, 822 bp, Neisseria meningitidis; identical to SEQ ID NO: 38591

SEQ ID NO: 48294 - DNA, 231 bp, Neisseria meningitidis; identical to SEQ ID NO: 37019

SEQ ID NO: 48295 - DNA, 438 bp, Neisseria meningitidis; identical to SEQ ID NO: 39406

SEQ ID NO: 48296 - DNA, 729 bp, Neisseria meningitidis; identical to SEQ ID NO: 44541

SEQ ID NO: 48297 - DNA, 600 bp, Neisseria meningitidis; identical to SEQ ID NO: 39827

SEQ ID NO: 48298 - DNA, 828 bp, Neisseria meningitidis; identical to SEQ ID NO: 38675

SEQ ID NO: 48299 - DNA, 567 bp, Neisseria meningitidis; identical to SEQ ID NO: 44795

SEQ ID NO: 48300 - DNA, 381 bp, Neisseria meningitidis; identical to SEQ ID NO: 39320

SEQ ID NO: 48301 - DNA, 2310 bp, Neisseria meningitidis; identical to SEQ ID NO: 45075

SEQ ID NO: 48302 - DNA, 408 bp, Neisseria meningitidis; identical to SEQ ID NO: 38369

SEQ ID NO: 48303 - DNA, 972 bp, Neisseria meningitidis; identical to SEQ ID NO: 39558

SEQ ID NO: 48304 - DNA, 423 bp, Neisseria meningitidis; identical to SEQ ID NO: 38404

SEQ ID NO: 48305 - DNA, 828 bp, Neisseria meningitidis
atgatgttgaaaaaattcgtactcggcggtattgccgcattggttttggcggcctgcggcggttcggaaggcggcagcggagcatcttccgcgcctgcacaatcggcagtttccggttctttaatcgagcgcatcaacaataaaggcacggttaccgtcggcacggaaggcacttacgcaccgtttacctaccacgacaaggacggcaaactgaccggttacgatgtggaagtaacccgcgccgtggcggaaaaactgggcgtgaaagtcgagtttaaagaaacgcaatgggattcgatgatggcgggtttgaaggcggggcgtttcgacgtggtggcaaaccaagtcggtctgaccagccccgaacgccaagcgacattcgacaaatccgatccttacagctggagcggtgccgtattggttgcccgtaacgacagcaacatcaaatctatcgacgacatcaaaggcgtgaaaaccgcacaatccctgaccagcaactacggcgaaaaagccaaagctgcaggcgcagatttggtggcagtggacggtttggcgcaatcgctgaccctgattgaacaaaaacgtgccgatgcaaccctgaacgacgaattggcggttttggactatctgaagaaaaacccgaatgcgggcgtgaaaatcgtttggtccgcacctgccgatgaaaaagtcggttccggcctgattgtcaacaagggcaatgacgaagccgtggcgaaattcagtacggcaatcaacgagctgaaagccgacggtacgctgaaaaaactgggcgaacaattcttcggaaaagacatcagtgttcaataa

SEQ ID NO: 48306 - DNA, 1185 bp, Neisseria meningitidis; identical to SEQ ID NO: 39766

SEQ ID NO: 48307 - DNA, 597 bp, Neisseria meningitidis
atgaagataacacactgcaaattaaagaaaaaagtacagaaagaactgctccatttttttgtactggaagttaccgcccgttctgccgccgatattttgggtatccatcccaattcggcagcactgttctaccgtaaaatccgcacggttatcaaccatcatttggtcttggctgccgatgaggtttttgaggatcctgtcgagccggacgaaagcgatttcggcggacggcgtaaaggcagacgtggtcgcggtgcggcaggaaaagtggttgttttcggcattctgaaacgcaacggacgggtctataccgttgtcgtaaacaatgccaagtctgaaacgttactccctgtcatcaaaaagaaaatcatgccggacagtattgtttataccgatagtctgagcagctgcgacaagttggacgtgagcagttttatccattaccgcatcaaccattccaaggaatttgcagaccgtcaaaaccacattaacggcattgagaacttttggaatcaggcaaaacgcgtcttgcgaaaatatagtggattggcacgaacgtttccccgaattggaagcgcaactgggtgcgccgattga

SEQ ID NO: 48308 - DNA, 228 bp, Neisseria meningitidis; identical to SEQ ID NO: 44482

SEQ ID NO: 48309 - DNA, 951 bp, Neisseria meningitidis
ttgctgaatgaggcggtggatgcgcttgccgtgcgcgaagacggtgtctatgtggacggtacgttcggcaggggagggcattcccggctgattttgtcgcgtttgggcgatgcggggcggttgattgttttcgacaaagaccctcaggcgattgctgtggcagaagagctggcgcgttcggacaagcgggtcggtgtcgtgcatggcggttttgcttcgtttcaggcggcattggacggtttgggtatcggcaaggtggacggtgcgctgtttgatttggggatttcgtctccgcaaatcgatgacggcagccgcggtttcagctttcgtttcgatgcccctttggatatgcgtatggatacgacgcgcggtatgtctgccgcagagtggatagcggttgcgtcggaacaggatttgcacgaggtaatcaagaattatggtgaagagcggtttagccgccagattgcgcgcgccattgttgcgcaacgggcggaaagtccaatcgatacaacccgcaagctggcgcagatcgtggcacaaaacgtccgtactcgcgagcgggggcaggatcctgcgacgcgcaccttccaggcggtccgcatctttattaaccgcgagcttgaagaagtaggggcagtattgccgcaggtcatgtgtcgtctgaaagagggcggacgtttggcggtcattgctttccattcgttggaagaccgcattgtgaagcagtttgtcaaaaaatattcgcaacacgcgcccctgccgcgttgggcggcggtcagggaagcggatttgcccgagctgcccctgaaaatcgtgggcagggcattaaagccgggtgaggcggaaattgccgccaatccgagggcgagaagtgcggttttgcgtgtggcggagcggactgccggttcgataccggaacaatcacagagaaaaacgtctgaatggcaatga

SEQ ID NO: 48310 - DNA, 645 bp, Neisseria meningitidis; identical to SEQ ID NO: 39035

SEQ ID NO: 48311 - DNA, 1809 bp, Neisseria meningitidis; identical to SEQ ID NO: 39112

SEQ ID NO: 48312 - DNA, 1050 bp, Neisseria meningitidis; identical to SEQ ID NO: 38313

SEQ ID NO: 48313 - DNA, 1311 bp, Neisseria meningitidis; identical to SEQ ID NO: 44274

SEQ ID NO: 48314 - DNA, 2178 bp, Neisseria meningitidis
atgcaacaaaaaatccgtttccaaatcgaaggcatgacctgtcaggcatgtgcttcgcgcattgaaaaagtgttgaacaaaaaagactttgtcaaatcagcgggagtgaacttcgccagcgaggaggcgcaggttacgtttgacgacagcaaaacttccgctgccgacattgccaaaatcattgagaaaaccggttacggcgcgaaggaaaagacggaagatacattgccgcaacccgaagcagaacaccatatcggctggaggttgtggcttttgctggccatcaatatcccgttccttatcggtatggtagggatgatgctaaaagggctgaattggacacggcatgattggatgttgtcgcccttgttgcagtttgcattggcgagtgtggtgcaactttggctggcggtgccattttacaaaagcgcgtgggcgagcattaagggcggactggcgaatatggacgtgctggttaccatcggcacggtctcgatttacctgtattccgtctatatgctgtttttcagcccgcacgcggcgtacggtatggcgcatgtgtattttgaagtgggcgtgatggtgattggttttgtgtcactgggcaaatttttggaacaccgcaccaaaaaatccagcctgaacagcttgggcttgctactgaaactcacgccgactcaagtcaatgtacaacgcaatggcgaatggaaacagcttcccatcgaccaagtgcaaatcggcgaccttatccgcgccaaccacggcgaacgcattgccgccgacggcatcatagaaagcggcagcggctgggcggatgagagccatcttaccggtgaatccaatcccgaagagaaaaaagcaggcagcaaagtgttggcgggcgcgctgatgactgaaggcagcgtggtgtaccgcgccacacagctcggcagccaaacattgctcggcgacatgatgaacgcgctctctgaagcacaaggcagtaaagcaccgattgcgcgtgtggcagacaaggcagcggcggtgttcgtgccaactgtcgtgggcatcgcgcttttgacttttatcgccacttggctggtgaaaggcgattggacggttgcgctgatgcacgccgtcgccgttttggtgattgcctgcccgtgtgcgctcggtctggctacacccgccgcgattatggtcggcatgggtaaagcagtgaaacacggcatttggtttaaagacgcagcggcaatggaagaagccgcccacgtcgatgccgtcgtgttggataaaaccggcacgctgaccgaaggcaagccgcaggttgccgccgtttattgcgttcccgacagcggctttgacgaagatgctttgtaccgcatcgccgccaccgtcgaacaaaacgccgcccatccgctcgcccgtgccatcgtctccgccgcccaagcgcgcggcttggggattcccgccgcacaaaacgcgcaaaccgttgtcggcgcaggcattgccgccgaagtaaaaggcgcgggtttggtaaaagcaggcaaagccgaatttgccgaactgaccttgccgaagttttcagacggcgtttggaaaatcgccagtgtggttgccgtatctgtaaacggcaaacctatcggcgcattcgcactcgccgacgcgttgaaagccgataccgccgaagccataggccgtctgaaaaaacacaatatcgatgtttacatcatgagcggcgacaaccaaggcacggtcgaatacgtcgcccaacaactgggtatcgctcacgccttcggcaatatgagtccgcgcgacaaagccgccgaagtgcagaaactcaaagccgccggcaaaaccgtggcgatggtcggcgacggcatcaacgacgcgcccgcgctcgccgccgcaaacgtcagcttcgccatgaaaggcggtgcggacgttgccgaacacaccgcgtccgccacgctgatgcagcattcggttaatcagctcgccgatgccctgctggtgtcgcaagccactttgaaaaacatcaagcaaaacctgtttttcgccttcttctacaatatcttgggcattccgctcgccgcgcttggctttttaaatcccgtcatcgcaggcgcggccatggcggcaagctcggtttccgtgttgagcaatgccttgcgcctgaaacgggtaaaaatcgattga

SEQ ID NO: 48315 - DNA, 1227 bp, Neisseria meningitidis; identical to SEQ ID NO: 42287

SEQ ID NO: 48316 - DNA, 1464 bp, Neisseria meningitidis; identical to SEQ ID NO: 38299

SEQ ID NO: 48317 - DNA, 441 bp, Neisseria meningitidis; identical to SEQ ID NO: 38836

SEQ ID NO: 48318 - DNA, 780 bp, Neisseria meningitidis; identical to SEQ ID NO: 39113

SEQ ID NO: 48319 - DNA, 642 bp, Neisseria meningitidis; identical to SEQ ID NO: 38347

SEQ ID NO: 48320 - DNA, 324 bp, Neisseria meningitidis; identical to SEQ ID NO: 38148

SEQ ID NO: 48321 - DNA, 132 bp, Neisseria meningitidis; identical to SEQ ID NO: 39343

SEQ ID NO: 48322 - DNA, 2082 bp, Neisseria meningitidis
atgaaatcactcaaaaccttcctcatttggggcatagtggtactggtcggcttagcatcctttaccactctggctctcagccgaggcgaacaggtcagcgcggtatggatggttaccgccgccatatccgtttactgcatcgcctaccgtttttacagcctctacatcgccaaccgcgtaatgcggctcgatcctaaccgcctgactccggcagaacgccacaacgacggcttggactacgttccgacgcacaagggcgtattgttcggacaccactttgccgcgattgccggcgcgggccccttggtcggcccggttttggcggcgcaaatgggttacctgcccggtactttgtggattatcttcggcgtggtgtttgccggcgcggtacaggatatgatggtcttgttcgtctctatgcgccgcgacggtaagtctttgggcgatattgtgaaacaggaactcggcactgtccccggcgtgattgcatccatcggtattttgatgattatggtcatcattatggcggtgttggcattgatcgttgtgaaagcattggttcacagcccttggggtacgtttaccatcgccgccactatgccgattgccctgtttatgggtatttacacgcgctatatccgtccgggcaaaatcggcgagatttccatcgtcggctttattttgctgatgctggcggtaatttacggcgaagatgtggcgaaaagttccatcggacattggttcgaccttgacggcatccagctcacttgggcgattatgatttacggctttgtcgcctccgtattgcccgtatggttgctgctcactccgcgcgactatctctctaccttcctgaaaatcggtacgattgcggccttggctttgggtatcgtcatcgtcaatcccgctttgcaaatgcctgcggttacccactttatcgacggttcgggtccggtattctcaggcgcattgttcccgttcttgttcattaccatcgcctgcggtgcggtttcgggcttccacgcgctgatttcctccggcaccacgccgaaaatgctggaaaacgaaacccacgtccgtatgattggttacggcggtatgttgatggaaagtttcgtagccattatggcgcttgccgccgccgcatcgcttgatcccggcgtgtacttcgccatgaacagccctgccgccctgatcggtacggatgccaacaccgccgccgaagtgattaccaccaagctgcaattccctgtcgatgcggcaaccctgttgcataccgctaaggaagtgggcgaaaacaccatcctttcccgtgcaggcggtgcgccaaccctcgcagtcggtatggcgcacattatgagccgcctgattccgggcgaggcgatgatggcgttctggtatcacttcgccctattgtttgaagccttgttcatcctgaccgccgtcgatgccggtacgcgcgtcgcacgttttatgattcaagacttgggcagcatcttctacaaacctttcggcaacaccgactccatccccgccaacctgattgcgaccttcttcgccgtggcattgtggggctacttcctctacaccggcgtaaccgacccgctgggcggcatcaactcgctctggcctttgttcggcatcgccaaccaaatgctggcaggcgtggccttgattatgtgcgccgtggtgctgattaagatgaaacgcgaccgttatgtttgggtggtactcgttcccgccgtcggcgtactgttcgtaacctgctacgccggcctgcaaaaactgttccacagcgacccgcgcatcagcttccttgcccacgccggcaaatacagcgacgcattggctaaaaacgaagtccttgcgcctgccaaagacatcggcgaaatggcgcaaatcatcttcaacgacaagattaatgccggtctgaccatcctcttcttgtcggttgtcgtgattgtcgccgcgtacggtttgcgtaccgccctcaaagcacgcaaagtcggctggccgaccgccaaagaaatcccggcggtgtaccgcgacagcaaacagccggaggcacaaagtgaagcataa

SEQ ID NO: 48323 - DNA, 747 bp, Neisseria meningitidis; identical to SEQ ID NO: 44728

SEQ ID NO: 48324 - DNA, 1500 bp, Neisseria meningitidis
gtgttcaaaaaataccaatacctcgctttggcagcactgtgtgccgcctcgctggcaggctgcgacaaagccggcagctttttcggtgcggacaaaaaagaagcatctttcgtagaacgcatcgaacacaccaaagacgacggcagcgtcagtatgctgctgcccgactttgtccaactggttcaaagcgaaggcccggcagtcgtcaatattcaggcagcccccgccccgcgcacccaaaacggcagcggcaatgccgaaaccgattccgacccgcttgccgacagcgacccgttctacgaatttttcaaacgcctcgtcccgaacatgcccgaaatcccccaagaagaagcagatgacggcggattgaacttcggttcgggcttcatcatcagcaaagacggctatattctgaccaatacgcacgtcgttaccggcatgggcagtatcaaagtcctgctcaacgacaagcgcgaatataccgccaaactcatcggttcggatgtccaatccgatgtcgcccttctgaaaatcgacgcaacggaagagctgcccgtcgtcaaaatcggcaatcccaaagatttgaaaccgggcgaatgggtcgccgccatcggcgcgcccttcggcttcgacaacagcgtgaccgccggcatcgtgtccgccaaaggcagaagcctgcccaacgaaagctacacacccttcatccaaaccgacgttgccatcaatccgggcaactccggcggcccgctgttcaacttaaaaggacaggtcgtcggcatcaactcgcaaatatacagccgcagcggcggattcatgggcatttccttcgccatcccgattgacgttgccatgaatgtcgccgaacagctgaaaaacaccggcaaagtccaacgcggacaactgggcgtgattattcaagaagtatcctacggtttggcacaatcgttcggtttggacaaagccggcggcgcactgattgccaaaatcctgcccggcagccccgcagaacgtgccggcctgcaggcgggcgacatcgtcctcagcctcgacggcggagaaatacgttcttccggcgaccttcccgttatggtcggcgccattacgccgggaaaagaagtcagcctcggcgtatggcgcaaaggcgaagaaatcacaatcaaagtcaagctgggcaacgccgccgagcatatcggcgcatcatccaaaacagatgaagccccctacaccgaacagcaatccggtacgttctcggtcgaatccgcaggcattacccttcagacacataccgacagcagcggcggacacctcgtcgtcgtacgggtttccgacgcggcagaacgcgcaggcttgaggcgcggcgacgaaattcttgccgtcgggcaagtccccgtcaatgacgaagccggtttccgcaaagctatggacaaggcaggcaaaaacgtccccctgctgatcatgcgccgtggcaacacgctgtttatcgcattaaacctgcaataa

SEQ ID NO: 48325 - DNA, 1158 bp, Neisseria meningitidis
atgcgaaaaaaacttaccgccctcgtattgtccgcactgccgcttgcggccgttgccgatgtcagcctgtacggcgaaatcaaagccggcgtggaaggcaggaacatccagctgcagttgaccgaaccgctcccaaatattcaacctcaggttactaagcgcaaaagccgcatcaggacgaaaatcagcgatttcggctcgtttatcggctttaaggggagtgaggatttgggcgaagggctgaaggctgtttggcagcttgagcaagacgtatccgttgccggcggcggcgcgtcccagtggggcaacagggaatcctttatcggcttggcaggcgaattcggcacgctgcgcgccggtcgcgttgcgaatcagtttgacgatgccagccaagccattgatccttgggacagcaacaatgatgtggcttcgcaattgggtattttcaaacgccacgacgatatgtcggtttccgtacgctacgattcccccgaattttccggttttagcggcagcgtccaattcgttccggcccaaaacagcaagtccgcctatacgccggctcattttgttcagaataagcaaaatcagccgcctactctcgttccggctgttgtcggcaagccggggtcggatgtgtattatgccggtctgaattacaaaaatggcggttttgccgggaactatgcctttaaatacgcgaaacacgccaatgtgggccgtgatgcttttgagttgttcttgctcggcagcgggagtgatgaagccaaaggtaccgatcccttgaaaaaccatcaggtacaccgcctgacgggcggctatgaggaaggcggcttgaatctcgccttggcggctcagttggatttgtctgaaaatgccgacaaaaccaaaaacagtacgaccgaaattgccgccactgcttcctaccgcttcggtaatgcagttccacgcatcagctatgcccatggtttcgactttatcgaacgcggtaaaaaaggcgaaaataccagctacgatcaaatcatcgccggcgttgattatgatttttccaaacgcacttccgccatcgtgtctggcgcttggctgaaacgcaataccggcatcggcaactacactcaaattaatgccgcctccgtcggtttgcgccacaaattctaa

SEQ ID NO: 48326 - DNA, 693 bp, Neisseria meningitidis; identical to SEQ ID NO: 39567

SEQ ID NO: 48327 - DNA, 198 bp, Neisseria meningitidis; identical to SEQ ID NO: 38532

SEQ ID NO: 48328 - DNA, 1131 bp, Neisseria meningitidis
atgaaaatcgtttttatcacaacagtcgcatccagcatttacggtttccgcgcccccgtcattaaaaaattaatcggcaaaaaccatcaggtgtatgcctttgtatcggagttttccgacaatgaattggatattatcagggaaatgggggttacacccgttacctaccgttcaaaccgcagcgggctgaacccgttttccgatataaaatccaccttcctcatctttaaagaactcaaaaaaatatcgccggatttggttttcccttatttcgcaaaacccgtgattttcggcacttttgccgcaaaactggcaggcgtgcccagaatcgtcgggatgctggaaggtttgggattcgcatttaccccgcagctggaaggcataccgttaaaaacaaaaatcataaaggggattttgattgccttgtaccgcattgccctgccgatgttggaaagcctgattgtattaaaccccgacgacaaagacgatctgctgcatcaatacggcatcaaaataaaaaacatccatattttgggcggaatcggtctggatttgcggcaatatccttattccgaggcggatattcccgatgaaaaagaacccgtaaaatttctctttatcggcagattgttgaaagaaaaagggattgatgagtttattcgggcggcggaacaggttaaggacaaataccccgatacggtttttaccgctttgggcgcaatcgacaaatcacgcggggggggggggggcgatttggaacgccttatcgcccgcgatattatccgtttccccggttttgtgaacaatgtttccgaagtgataaaggcgcatcatatattcgtattgccgtcttatagggaaggcgttccccgaagcactcaggaggcaatggccgtcggcagggcggtgattacgacggatgtccccggatgcagggaaacggtcgccgacaaggtcaacggcttcctgatcgaaccttggaatccccgcatcttggccgaaaaaatgatttattttatcgaaaacagggaagccgttcgcctgatggggaatgcaagttatgcgattgccaaagataaattcgatgccgaaaaagtcgatttaaaattactcgatattttgaaggcgtaa

SEQ ID NO: 48329 - DNA, 213 bp, Neisseria meningitidis
atggaaacccttatcctcgacatcggcggcatgagctgcggcggctgcgtcaaaagcgttacccggatattggaaggcgtaaaaggcgtggcaagcgtcgaagtcagtcttgaaaacaaaagtgcgaccgtcggatacgaccccgcgcaaaccgatgcaggggcgttgattgaagccgttgaagacggcggctatgatgccgcgttgaaataa

SEQ ID NO: 48330 - DNA, 1356 bp, Neisseria meningitidis; identical to SEQ ID NO: 38388

SEQ ID NO: 48331 - DNA, 201 bp, Neisseria meningitidis; identical to SEQ ID NO: 37363

SEQ ID NO: 48332 - DNA, 1101 bp, Neisseria meningitidis
atggcaggcaacactttcggacaactcttcaccgtgaccacgttcggcgaaagccacggcgcaggtttgggctgcatcatcgacggctgcccgcccggcttggaattaagcgaagcggatatccaatttgacctcgaccgacgcaaacccggcaccagccgccacgttacccaacgccgcgaaaccgaccaagtagaaatcctctccggcgtattcaaaggcaaaaccaccggcacgcccatcgccctcttaatccgcaataccgaccagcgcagcaaagactacggcaacatcgcccaaagtttccgccccggccatgccgactatacctattggcacaaatacggcacgcgcgactaccggggcggcggcaggagttccgcccgcgaaaccgccgcccgcgttgctgccggagccgttgccaaaaaatggttgaaagaaaaattcggcacggaaatcaccgcctacgtgacccaagtcggcgaaaaagaaatccggtttgaaggctgcgaacacatttcccaaaatcctttttttgccgccaaccatagccaaattgccgagctggaaaactatatggacagcgtgcgcaaatccttggattccgtcggcgcgaagctgcatatcgaagccgccaacgtccctgtcggcttgggcgaacctgtttttgaccgcctcgatgccgaaatcgcctacgcgatgatgggcatcaacgccgtcaaaggcgtggaaatcggcgcaggttttggcagcgttgtccaacgcggcagcgaacacggcgacgaactgaccccgcaaggcttcctgtccaaccactcaggcggcatcctcggcggcatcagcaccggacaagacatccacgtcaatatcgccatcaaacccaccagctccatcgccaccccgcgccgcagtatcgacatcaacggcaaccccatcgaactcgccacgcacggcaggcacgacccctgcgtcggcttgcgcgccgcgccgattgcagaagctatgctggcattggttttaatcgaccacgccctgcgccatcgcgcgcaaaatgcggatgttcaggttaatacgcccgacattaccctttcaaacaaataa

SEQ ID NO: 48333 - DNA, 1236 bp, Neisseria meningitidis; identical to SEQ ID NO: 39525

SEQ ID NO: 48334 - DNA, 681 bp, Neisseria meningitidis; identical to SEQ ID NO: 38127

SEQ ID NO: 48335 - DNA, 441 bp, Neisseria meningitidis; identical to SEQ ID NO: 39177

SEQ ID NO: 48336 - DNA, 672 bp, Neisseria meningitidis; identical to SEQ ID NO: 39667

SEQ ID NO: 48337 - DNA, 1746 bp, Neisseria meningitidis; identical to SEQ ID NO: 39150

SEQ ID NO: 48338 - DNA, 1176 bp, Neisseria meningitidis; identical to SEQ ID NO: 38718

SEQ ID NO: 48339 - DNA, 771 bp, Neisseria meningitidis; identical to SEQ ID NO: 45200

SEQ ID NO: 48340 - DNA, 294 bp, Neisseria meningitidis
atgacagctaaaggacaaatgttgcaagatcccttcctgaacgccctgcgtaaagagcatgttccggtttcgatttacttagttaacggtatcaaattacaaggtcaggttgagtctttcgatcaatacgttgttctcctgagaaacacttccgtcacccaaatggtttacaaacacgccatttccaccatcgtaccggcacgctccgtcaacctacaacatgaaaacagaccccaagccgcaccggcttcgaccctcgtccaagtggaaaccgtccagcagcctgccgaataa

SEQ ID NO: 48341 - DNA, 486 bp, Neisseria meningitidis; identical to SEQ ID NO: 41484

SEQ ID NO: 48342 - DNA, 1386 bp, Neisseria meningitidis; identical to SEQ ID NO: 38195

SEQ ID NO: 48343 - DNA, 363 bp, Neisseria meningitidis; identical to SEQ ID NO: 38914

SEQ ID NO: 48344 - DNA, 729 bp, Neisseria meningitidis; identical to SEQ ID NO: 39334

SEQ ID NO: 48345 - DNA, 2016 bp, Neisseria meningitidis; identical to SEQ ID NO: 39431

SEQ ID NO: 48346 - DNA, 1473 bp, Neisseria meningitidis
atgaaccagacaagccgcgatctgacccgcatcagccacaacaccaaaatcgtcgccacccttgggccgggcagcaacaacgtagaactgttggaagatatgatccgcgtcggcggcctgaacgtcgtccgcttcaacttcagccacggcacgcccgaattccatcaggaaaacgcccgcatcgtgcgcgaggcggcaaaacgcaccggacaggaaatcgccatcattgccgacctgcagggcccgaaaatccgcgtgggcaaaatcgccggcggcggcatcgaattgaacaaaggcgaaacgctggtactggatgccgcgctcgaaggcgaaggcacgcgcgaggcggtcggtttggactaccgcgacctgcccgacgacgttaccgcaggcgacgtattgtggctggacgacggcctgctgaccctgaccgtggaatccgtcgaaggcagcaggattatcacaagggtggaaaacagccacgtcctgaaaagcaacaagggcatcaacaaacgcggcggcggtctatctgcaggcgcgttgaccgaaaaagacttccgcgacctgaaaaccgcgattgccatcggttgcgactacctcgccatcagctttgtgaaatccgccgaagatttgcatatcgcgcgcgccaaagtcgaagaagaaatgaagggcagcactgccgtgcgccccggtttggtttccaaaatcgaacgcgtagaagcgattgaaaaccttgatgaaatcatcctcgccggcgacggcattatggttgcgcgcggcgacttggcggtcgaagtcggacacgccgccgtccccgccctgcaaaaacggatgatccgccgcgcccgcgagttgcgccgcttcagcattacggcgacgcaaatgatggaatcgatgattaccaaccccgtaccgacccgcgccgaagtgagcgacgtggccaatgcggtattggacggtaccgatgcggtaatgtgttccgctgaaaccgcggtgggtgcgtatccgtttgaaacggtcagccaaatggcggttatttgtgcggcggccgaaaaagagcaggactccctcaacggcgttgccgaacaggcggagtatcccgaagcggtcagcaccaatctagcggttgccggcggagcggtcagcgtggcgcgcgcggttcacgccaaagcgattgtcgccctgaccgaaagcggttcgaccgcctttgaaatcagccgccacaacatcaccctgccgattttcgcgctgaccccgagcgtttccgcccaacgccgtatggcgatgtaccgcggcgtgcgtccgatgattttggcgaccagtaccgaccacgatactgcgctgaatgaagtggaagctgtgttggtcgaacaccaaattctgtgttccggcgaccaatacatcattaccagcggctcgaaaatgcgtgaatccggttcgaccaatacgctggaagtgctgcgcgtcaaataa

SEQ ID NO: 48347 - DNA, 456 bp, Neisseria meningitidis; identical to SEQ ID NO: 39491

SEQ ID NO: 48348 - DNA, 1143 bp, Neisseria meningitidis; identical to SEQ ID NO: 39162

SEQ ID NO: 48349 - DNA, 540 bp, Neisseria meningitidis; identical to SEQ ID NO: 44661

SEQ ID NO: 48350 - DNA, 387 bp, Neisseria meningitidis; identical to SEQ ID NO: 39754

SEQ ID NO: 48351 - DNA, 810 bp, Neisseria meningitidis; identical to SEQ ID NO: 37887

SEQ ID NO: 48352 - DNA, 879 bp, Neisseria meningitidis; identical to SEQ ID NO: 44706

SEQ ID NO: 48353 - DNA, 996 bp, Neisseria meningitidis
atgttgagaaaattgttgaaatggtctgccgtttttttgaccgtatcggcagccgttttcgccgcgctgcttttcgtccctaaagacaacggcagggcatacaggattaaaattgccaaaaaccagggtatttcgtcggtcggcaggaaacttgccgaagaccgcatcgtgttcagcaggcatgttttgacggcggcggcctacgttttgggtgtgcacaacaggctgcatacggggacgtacagactgccttcggaagtgtctgcttgggatatcttgcagaaaatgcgcggcggcaggccggattccgttaccgtgcagattatcgaaggttcgcgtttttcgcatatgaggaaagtcatcgacgcaacgcccgacatcgaacacgacaccaaaggctggagcaatgaaaaactgatggcggaagttgcccctgatgccttcagcggcaatcctgaagggcagtttttccccgacagctacgaaatcgatgcgggcggcagcgatttacggatttaccaaatcgcctacaaggcgatgcaacgccgactgaatgaggcatgggaaagcaggcaggacgggctgccttataaaaacccttatgaaatgctgattatggcgagcctgatcgaaaaggaaacagggcatgaagccgaccgcgaccatgtcgcttccgtcttcgtcaaccgcctgaaaatcggtatgcgcctgcaaaccgacccgtccgtgatttacggcatgggtgcggcatacaagggcaaaatccgtaaagccgacctgcgccgcgacacgccgtacaacacctacacgcgcggcggtctgccgccaaccccgatcgcgctgcccggcaaggcggcactcgatgccgccgcccatccgtccggtgaaaaatacctgtatttcgtgtccaaaatggacggtacgggcttgagccagttcagccatgatttgaccgaacacaacgccgccgttcgcaaatatattttgaaaaaataa

SEQ ID NO: 48354 - DNA, 114 bp, Neisseria meningitidis
ttgccgtactatttgtactgtctgcggcttcgtcgccttgtcctgatttttgttaatccactatattattttgtcccgcctgaatttttcgtaaaactcgggcagaatacctga

SEQ ID NO: 48355 - DNA, 792 bp, Neisseria meningitidis
atgaatgtttattttctcggcggcggcaatatggcggctgccgttgcgggcggattggtcaaacaaggcggttaccgcatccatattgccaaccggggtgcggaaaagcgcgaacgtttgcaaaaagagttgggggtcgaaacttctgaaaccttgccggagcttcattccgacgatgttttaatccttgccgtcaagccgcaggatatggaagccgcgtgcaaaaatatccgcaccaacggcgcattggtgctttctgtcgcagccggattgccggtcgatacgctcagccgttacattgggggaacacgccgcattgtccgggttatgccgaatacacccggaaaaatcgggctgggcgtatccggtatgtttgccgaagcggaagtatcggaaacagaccgcaggattgccgatcgaatcatgaaatcagtcggtttgaccatttggttggaagatgaagcgcaaatgcacggcattaccggcatcagcggcagcgggccggcttatgtgttttatctgctggacgcattgcaaaatgccgctatccgacaagggtttgatatggcagaagcacgcgcgctcagtctggcaacatttaaaggagcggttgcccttgccgagcagactggtgaagatttcgagaagcttcaaaaaaatgtaacgtcaaaaggcgggacaactcacgaagccgtggaagccttcagacggcatcgtgtcgccgaagccataaatgaaggcgtttgtgcctgtgtgcgccgttcgcaggaaatggaacggcaatatcaataa

SEQ ID NO: 48356 - DNA, 594 bp, Neisseria meningitidis
ttgtacggcagccaccgtttgctatgcactcaaacagatggggataacgcgcaaaaaaagaccaccacttacaaagaacaagacccggccaaagtaacgcattatttgacacagccggccgaattttccgactaccaacgtgtttatttggatgaaacaggatttgaccgctacctgttccgtccctatgcccgcagcctgaaagggcaaatagtgaaagcgcagataagtggaaaaagataccaacgcttatctttggtgtccgcacaagtcggcaaccggctgattgctccgatggtttatcaaaatacgatgaccggagtcttttttgaagcgtggtttcagcaatgcctactgcccgcattgactcaaaaatcggtgattattttagataatgcgcgatttcaccgtatgggtgtcttacgggaaatggcggaaaaattgggacataaggtattgcctcttgcaccttattcacctgagctcaacccgattgagaaagtgtgggcgaatattaagcggtatctgcgaaccgttttgtctgattacgcccgatttgacgatgcactactgtcctattttgattttaattga

SEQ ID NO: 48357 - DNA, 225 bp, Neisseria meningitidis; identical to SEQ ID NO: 38459

SEQ ID NO: 48358 - DNA, 606 bp, Neisseria meningitidis; identical to SEQ ID NO: 38451

SEQ ID NO: 48359 - DNA, 1386 bp, Neisseria meningitidis
atggacggctggacacagacgctgtccgcgcaaaccctgttgggcatttcggcggcggcaatcatcctcattctgattttaatcgtcaaattccgcatccacgcgctgctgacactggtcatcgtcagcctgctgacggctttggcaaccggtttgcccacaggcagcattgtcaacgacatactggtcaaaaacttcggcggcacgctcggcggcgtggcgcttctggtcggcctgggcgcgatgctcggacgtttggtcgaaacatccggcggcgcacagtcgctggcggacgcgctgatccggatgttcggcgaaaaacgcgcaccgttcgcgctgggcgttgcctcgctgattttcggcttcccgattttcttcgatgccggactaatcgtcatgctgcccatcgtgttcgccaccgcacggcgcatgaaacaggaagtactgcccttcgcgcttgcctccatcggcgcattttccgtcatgcacgtcttcctgccgccccatccgggcccgattgccgcttccgaattttacggcgcgaacatcggccaagttttgattttgggtctgccgaccgccttcatcacatggtatttcagcggctatatgctcggcaaagtgttggggcgcaccatccatgttcccgttcccgaactgctcagcggcggcacgcaagacaacgacctgccgaaagagcctgccaaagcaggaacggtcgtcgccatcatgctgattcccatgctgctgattttcctgaataccggcgtatcggccctcatcagcgaaaaactcgtaagtgcggacgaaacctgggttcagacggcaaaaataatcggttcgacaccgatcgcccttctgatttccgtattggtcgcactgtttgtcttgggacgcaaacgcggcgaaagcggcagcgcgttggaaaaaaccgtggacggcgcactcgcccccgtctgttccgtgattctgattaccggcgcgggcggtatgttcggcggcgttttgcgcgcttccggcatcggcaaggcactcgccgacagcatggcggatttgggcattcccgtccttttgggctgtttccttgtcgccttggcactgcgtatcgcgcaaggttcggcaaccgtcgccctgaccaccgccgccgcgctgatggctcctgccgttgccgccgccggctttaccgactggcagctcgcctgtatcgtattggcaacggcggcaggttcggtcggttgcagccacttcaacgactccggcttctggctggtcggccgcctcttggacatggacgtaccgaccacgctgaaaacctggacggtcaaccaaaccctcatcgcactcatcggctttgccttgtccgcactgctgttcgccatcgtctga

SEQ ID NO: 48360 - DNA, 585 bp, Neisseria meningitidis; identical to SEQ ID NO: 38976

SEQ ID NO: 48361 - DNA, 639 bp, Neisseria meningitidis; identical to SEQ ID NO: 47228

SEQ ID NO: 48362 - DNA, 1410 bp, Neisseria meningitidis; identical to SEQ ID NO: 38867

SEQ ID NO: 48363 - DNA, 345 bp, Neisseria meningitidis; identical to SEQ ID NO: 46056

SEQ ID NO: 48364 - DNA, 597 bp, Neisseria meningitidis; identical to SEQ ID NO: 38176

SEQ ID NO: 48365 - DNA, 1362 bp, Neisseria meningitidis; identical to SEQ ID NO: 38348

SEQ ID NO: 48366 - DNA, 1035 bp, Neisseria meningitidis
ttggaagacgaagattttattcgcgccgcgtccatgctcgccgaagaagttttcggtttcggtatctacaaagaatccaaaggctcgggcggtcgtttctatgagcgctgttggttgatgggttcggaagacgtcctatacggtcgcgtccattttggcggacaaaacaataccatccttttcgaactgaccggcaccggttgcggcgtcgcaaaagaaggctgggaatcacgacttttcgcattcctgactaatgcaatccgcccaaaaatcacacgcgttgacatcgcaaaagactttttcaacggcgaatacagcccgaaccaagcccgtgaagaccgaaataaaggtatgtttacctgtcatcacgtcaaaccaaaaggcgaatgtttggggtcagattgggaagaagacgatgaagccaaaatgaccaaaggcaagacctatggtatcggctcccgtgaatcgtccaaatatgtccgcgtctatgaaaaaggcaagcagttgggcgataaaacaagcacatggacgcgctttgaaattgaattcaaagcaaaagacatcgttatccctttcgaagttttgcagaatccgggcgaatatttcggcggcgcatatccgatttgcgaacgattcgcccaaaaggcaacgcgcatacacgcggttaaggaagataaggtcatttcagccgaccgctaccttgaatgggtaaaaaaacagttcggacgtgcggcaaacggtctgaaattcatttttcccgaattggacaaagccaaactgtttgaactgattgagccgagtcatcacaagctgcccaagtctttggctcccgaagcctacgactgcgcctttttgaaagctcaagccattcatgaacagcccgcattcaaaccgtacaaagacccttactatatgtacgaatattacgagaatcttgaaaaacagcttgaacagcaaaaacacgtcaacaatgaagaaagctataacaacttcatttacgacaaattcgcaagactaccgatttcatgggcttaa

SEQ ID NO: 48367 - DNA, 1284 bp, Neisseria meningitidis
atgaaccgtaacgaaattttattcgaccgcgccaaagccatcatccccggcggcgtgaattcccccgtccgcgcattcggcagcgtcggcggcgtgccgcgcttcatcaaaaaagccgaaggcgcgtatgtttgggacgaaaacggcacgcgctacaccgactatgtcggttcgtgggggcccgcgattgtcggacacgcgcaccccgaagtcatcgaagccatgcgcgaagctgccttgggcggtttgtcgttcggcgcgcctaccgaaggcgaaatcgtcattgccgaagaaatcgccaaaatcatgccgtccgtcgaacggctgcgccttgtcagctccggtaccgaagccaccatgaccgccatccgtctggcacgcggctttaccggccgtgacaaaatcatcaaatttgaaggctgctaccacggccattccgacagcctgttggtgaaagcaggcagcggtctgctcacctgcggtaatccctcttccgccggtgtgcctgccgactttaccaaacacactttagtcctcgaatacaacaacatcgcccaactcgaagaagcctttgctcaaagcggcaatgacattgcctgtgtgattttggagccttttgtcggcaatatgaatctggttaggccgtctgaagccttcgtcaaagccctgcgcgaattgaccgaaaaacacggcgcagtgttgatttacgacgaagtgatgaccggtttccgcgtcgcgctcggcggcgcacaatcgctgcacggcatcacgcccgacctgaccacgatgggcaaagtcatcggcggcggtatgccacttgccgcgttcggcggacgcaaagacattatggaatgtatttccccgctgggcggcgtgtatcaggcaggcaccttgtcgggcaacccgattgccgtcgccgccggtttgaaaacgctggaaatcatccgccgcgaagggttttatgaaaacctgacggcgcgtaccgaacagttggttcaaggttttcagacggcagcggatgcggcgggcatcgagttcaccgccgacagcgtgggcgggatgttcggcctgtattttgccagccatacgccgcgaaactatgccgatatggcgcgttccaatattgacgctttcaaacgcttcttccacggtatgctcgaccgcggcattgccttcggcccgtccgcttatgaagcaggtttcgtttctgccgcgcatacgcccgagctgattgacgaaacggttgcggttgcggttgaagtgttcaaggcgatggctgcatga

SEQ ID NO: 48368 - DNA, 1041 bp, Neisseria meningitidis; identical to SEQ ID NO: 39824

SEQ ID NO: 48369 - DNA, 432 bp, Neisseria meningitidis; identical to SEQ ID NO: 40005

SEQ ID NO: 48370 - DNA, 708 bp, Neisseria meningitidis; identical to SEQ ID NO: 39076

SEQ ID NO: 48371 - DNA, 1113 bp, Neisseria meningitidis; identical to SEQ ID NO: 38167

SEQ ID NO: 48372 - DNA, 282 bp, Neisseria meningitidis; identical to SEQ ID NO: 39486

SEQ ID NO: 48373 - DNA, 876 bp, Neisseria meningitidis; identical to SEQ ID NO: 44545

SEQ ID NO: 48374 - DNA, 1341 bp, Neisseria meningitidis; identical to SEQ ID NO: 39396

SEQ ID NO: 48375 - DNA, 654 bp, Neisseria meningitidis
atgaagataacgcactgcaaattaaagaaaaaagtacagaaagaactgctccgtttttttgtgctggaagttaccgcccgttctgccgccgatattttgggtatccatcccaattcggcagcactgttctaccgtaaaatccgcacggttatcaaccatcatttggccttggctgccgatgaggtttttgagggccctgtcgagccggacgaaagcgatttcggcggacggcgtaaaggcagacgtggtcgcggtgcggcaggaaaagtggttgtcttcggcattctgaaacgcaacggacgggtctataccgttgtggtggataatgccaagtctgaaacgttactccctgtcatcaaaaagaaaatcatgccggacagcattgtttataccaatagtctgagcagctgcgacaagttggacgtgagcggttttatccattaccgcatcaaccattccaaggagtttgcagaccgtcaaaaccacattaacggcattgagaacttttggaatcaggcaaaacgcgtcttgcgaaaatacaatggaatcgatcgcaaatctttcccgctgttcttgaaagaatgcgaatttcgatttaacttcggcacaccgtctcaacagcttaaaatcctgcgggattggtgtgggatttag

SEQ ID NO: 48376 - DNA, 495 bp, Neisseria meningitidis; identical to SEQ ID NO: 38755

SEQ ID NO: 48377 - DNA, 2526 bp, Neisseria meningitidis
atgaatccaaactcaaaacataacactaactttaccaatcttcttaaaccgtctgatagtgatataaaacaatttgccgcacaacacatctgccgcctcaccgacctcctcaaccgctacgcctacgaatactacaccctcgacgcgcccagcgtacccgatgccgaatacgacaaattgttccgcgaactcgaagcgttggagttaaaccatcccgagctcaaactgcccgacagcccgacccagcgcgtcggcggcgagcctttggcgggatttgccgaagtacgccacgaagtgccgatgctgtcgctgaccaacgctttttccccgcaagatgaaaacggcgtgttcgaccatgccgaaatgtacgccttcgaccaacgcgtgcgcgacggcttggacggcggcaatcccgaatacgttatcgaacccaaattcgacggcctcgccatcagcctgctctaccgcgacggcgtattggtgcaggcggcaacgcgcggcgacggcacgacgggcgaagacgttacccaaaacatcaaaaccgtatccaacatccccttgcggctgcacggcgaaaatacgcccgaactcatcgaagtacgcggcgaagtactgatgcaaaaagccgattttgccgccctcaataaaagacaagccgaaaacgggcaaaaaccctttgccaatccgcgcaacgccgccgccggcagcctacgccaactcgattcgcgcatcactgcgcaacgcaaactgcactttttcccctactccgtcgcccgccggcaaggcggtttcgtcgcggaagaacacatccaagaactcgcctatttccaagcactcggcttcagtctgcccaatggcaatttcggctgtttcaaaaatatcgacgaagtattggcgttttacgaacacatgcagcaaaaacgccccgaactgccctacgaaatcgacggcatggtggttaaagtcaacagcctggcgcaacagcgcgaactcggcttcatctcccgcgcgccgcgctgggcgattgcccacaagttccctgccgaagaagccctgaccgtcgtcgaagcgattgacgtgcaaatcggcaggacgggcgcggtaacgccggttgcccgattacaacccgtattcgtcggcggcgtaaccgttaccaacgccaccctgcacaatcaggacgaagtttcccgaaaagacgtgcgcgtcggcgataccgtcgtcgtgcgccgcgccggagacgtgattcccgaagtcgtgcgtgtgatttttgaacgccgcccgatgcaggaaaccgccgttgctgtttcagacggcatcgggcatcggcaggacgatttgtttgccgaagcaccggctgcaaaccaaacccaatccgttccgctctacaagccctaccgcctgccgacccattgccccatctgccgcagcgaaatcgaacgcgaagaaggcgaagccgtcgcccgatgcagcggcggtatgctttgtcaggcacaacgcgcgcaaggcttaatccacttcgcctcgcgcaaagccatggacatcgacggcttgggtgaaaaacaaatcgaacagcttgtcgcccaagacctcgtccgccacttcgccgacctctaccgcctcgatattccgaccctgcaaaaaatgaaggaaacggcggacaaaaccgttgccgaatcggatcaaatgccgtctgaaggcagttcggtcggtgcgtcgggcaaacataaaaaacaaccgaccaagtgggcggaaaacatcctcgcaggcatagaatccggcaaaacgcccgaactcgcgcgcttcctgttcgcgctcggcatccgccacgtcggcgaacgcaccgccaaaacgctggcacaggcattcggcacattggaacgcgtccgccgcgcccccgaacccgtcctcgcctgcctgcccgacatcggtacggtagtggcgcgttccattgcccacttcttcgcccaagccgaacagcaggcgatgatagacgagctgctcgccgcaggcgttgccccgcaagcccaagccgtcagcctgcctgccgcacaatatgccgaaccgcaacgctggattgcccgcctgcccggtttcaaaattagcgaaaacaaagcccaagccttatgggaactcgccggcaaaagtatagagggtctgcaaaccgacaaatccctccccgccgactggcaagcatggcgcagcgaaccacaaaacgccgccctactcgaaaacctgaaaaccttcttcgcgcaaatgccgtctgaagacgaggcggcgcaaggttcagacggcatcaataaagccgtagcgggcaaaaccttcgtgttaactggcacactgcccaccctcaaacgcgaccaagcccaatccctaatcgaagccgcaggcggcaaagtttccggcagcgtgtccaaaaaaaccgattacgtcgtcgccggagaagccgcgggcagcaagctggaaaaagccaatgccttgggcgtttccgtcctcagcgaagccgaactgcttaccctgctcggctga

SEQ ID NO: 48378 - DNA, 327 bp, Neisseria meningitidis; identical to SEQ ID NO: 46799

SEQ ID NO: 48379 - DNA, 849 bp, Neisseria meningitidis; identical to SEQ ID NO: 45581

SEQ ID NO: 48380 - DNA, 909 bp, Neisseria meningitidis; identical to SEQ ID NO: 39386

SEQ ID NO: 48381 - DNA, 897 bp, Neisseria meningitidis; identical to SEQ ID NO: 38290

SEQ ID NO: 48382 - DNA, 1296 bp, Neisseria meningitidis; identical to SEQ ID NO: 39105

SEQ ID NO: 48383 - DNA, 291 bp, Neisseria meningitidis; identical to SEQ ID NO: 36866

SEQ ID NO: 48384 - DNA, 603 bp, Neisseria meningitidis; identical to SEQ ID NO: 39390

SEQ ID NO: 48385 - DNA, 825 bp, Neisseria meningitidis; identical to SEQ ID NO: 39236

SEQ ID NO: 48386 - DNA, 1185 bp, Neisseria meningitidis
atgagtttacacagcgacatcctcgtcgtcggcgcaggtccggcgggtttaagttttgcagccgaacttgccggcagcggtttgaaagttaccctgatcgaacgcagcccactgactgttctgcaaaatcctccatatgacggacgcgaaatcgccctgacccatttttcccgcgaaatcatgcagcgtttgggcatgtgggacaacattcccgaaaacgaaatctaccctttgcgcgatgccaaagtgctgaacggacgttccgactaccagctccactttccccaaccgactgaagcgcgcggcgagcctgccgactgcctgggttatttgatttccaaccacaatatccgacgcgccgcctacgaagtcgtatcccaactcgacaacattaccattctgaccgatacggccgttaaagaagtcaaaacatctgataatgaagcgcaagtctttttggaaaatggagacattctgaccgcgcgcctccttttggcagcagacagccgtttctcacaaacccgccgacaactcggtatttcttcagatatgcacgactacagccgaaccatgttcgtctgccgcatgaaacatactctttccaaccaacataccgcttacgaatgcttccattacgggcgcaccatcgcactgctgccgctggaagaacacctgaccaataccgtcattaccgtcgataccgataaaatcaacagcgttcaaaacctttcgcccgaagaattggcggcaagcgtaaaagaacagctcaagggcaggctcggcgatatggaattggtcagcagcatccaccattacccccttgtcggtatgattgccaaacgtttctacggcaaacgcagcgcgctgattggcgatgcggcggtcggtatgcaccctgtaacggcacacggcttcaacttgggtctttccagcgcagatattctggcaaaactgatactcgaagccgaacaacgcggtcaggacatcggcgcatcttccttgttggaaaaatacagcaacaaacatatgctgcacgcccatccgctttatcacggaaccaatatgatgctgaaactgtttaccaacgaaaccgcgccggcaaaactgctgcgcggtttggtattgcgtgccggcaacaacttcccgccgctgaaaaagctgattaccaaacaactgaccggttga

SEQ ID NO: 48387 - DNA, 1476 bp, Neisseria meningitidis; identical to SEQ ID NO: 39164

SEQ ID NO: 48388 - DNA, 519 bp, Neisseria meningitidis; identical to SEQ ID NO: 37482

SEQ ID NO: 48389 - DNA, 501 bp, Neisseria meningitidis; identical to SEQ ID NO: 40139

SEQ ID NO: 48390 - DNA, 1170 bp, Neisseria meningitidis; identical to SEQ ID NO: 39478

SEQ ID NO: 48391 - DNA, 507 bp, Neisseria meningitidis; identical to SEQ ID NO: 38809

SEQ ID NO: 48392 - DNA, 783 bp, Neisseria meningitidis; identical to SEQ ID NO: 39833

SEQ ID NO: 48393 - DNA, 486 bp, Neisseria meningitidis; identical to SEQ ID NO: 40302

SEQ ID NO: 48394 - DNA, 1041 bp, Neisseria meningitidis
atgcaggcagttgttgtgaataaaaatgtagcgggcgatgtggaaatagtcgaacgcgaggttcgcccgttggaatacggcgaggcgttggtcgaagtcgaatattgcggcgtgtgccacaccgacctgcacgttgcggcaggcgactacggcgaaaaaccgggccgcgtgctgggacacgagggcatcggtttggttaaagaagttgccgacggtgtgaaaaatctgaaagtcggcgaccgcgtcagcatcgcctggctgttccaaagctgcggttcttgcgaatactgcaataccggccgcgaaaccttgtgccgctctgtattgaacgcaggttatactgccgacggcggtatggcgacctactgcatcgtgagtgccgattacgcggtcaaagtccctgaaggtttggatcctgcgcaagcttccagcattacttgtgccggcgtgaccacttataaagccattaaagtttccggcgttcgtccgggacagtggattgccatctacggcgcgggcggtttgggcaacttgggggtccaatacgcgaaaaaagtattcggcgcgcacgttgtcgccatcgacatcaacgacgacaaactggcgtttgccaaagaaaccggcgcggatttggttgtcaacgccgccaaagaagacgctgccaaagtgattcaggaaaaaaccggcggcgcacacgctgcggtcgtaaccgccgtatctgctgccgcattcaactctgccgtgaattgcgtccgcgcaggcggacgtgtggttgccatcgggctgccgccggaatcgatggatttgtccatcccgcgtttggttttggacggcatcgaagtggtcggctctttggtcggcacgcgcaaagatttggaagaagccttccaattcggcgcggaaggtttggttgtgccgaaagtccaactgcgtgctttggatgaagcacccgccattttccaagaaatgcgcgaaggcaaaatcaccggccgtatggtaatcgatatgaaaaaagaatgcggctgcggccatcaccactga

SEQ ID NO: 48395 - DNA, 1497 bp, Neisseria meningitidis
gtgaaaccgctgcgcagactgacaaacctccttgccgcctgcgccgtagcggccgccgccttcggacagcccgccctcgcggcggacttggcgcaagacccgttcattaccgataacgcccaacggcagcactacgaacccggcggcaaataccacctcttcggcgacccgcgcggcagcgtttccgaccgcaccggtcaaatcaacgtcatccaagactatacccaccagatgggcaacctgctcatccaacaggcaaacatcaacggcacaatcggctaccacacccgcttttccggacacggacacgaagaacacgcccccttcgacaaccacgccgccgacagcgcaagcaaagaacaaggcaacgttgacgaaggctttaccgtgtaccggctcaactgggaaggacacgagcaccatcccgccgatgcctacgacggcccgaagggcggcaattaccccaaacctacgggcgcacgcgacgaatacacctatcacgtcaacggcacagcacgcagcatcaaactcaatccgaccgacacccgcagcatccggcaacgcatatccgacaattacagcaacctcggcagcaatttctccgaccgcgccgatgaagccaacagaaaaatgttcgagcacaatgccaagctcgaccgctggggcaacagcatggagtttatcaacggcgtcgccgccggagcactcaacccctttatcagcgcgggcgaagccttgggcataggcgacatactgtacggaacgcgctatgccatagacaaagccgcaatgcgcaacatcgcccccttacccgccgagggcaaattcgccgccatcggcggcttgggcagcgtggcgggctttgaaaagaatacgcgcgaagccgttgaccggtggatacaggaaaaccccaatgccgccgaaaccgtcgaagccctggtcaacgtcctgccgtttgccaaagtcaaaaacctgacaaaggcggcaaaaccggggaaggctgcggttagcggggatttttctgctgcatacaatacaagaacaactagaaaagttactacagaaacagaggggttaaatagaatcagacagaaccagaaaaatagtaatatacatgagaaaaattatggaagagataatcctaatcatattaatgttttatctggaaattctatacaacatatactgtatggagatgaagcaggaggtgggcatctttttcctggcaaacctggtaagacaacattcccccaacattggtcagccagtaaaataactcatgaaattagtgatatcgttacatccccaaaaacgcaatggtatgcacagactggaacaggcggcaaatatattgctaaaggaagaccagctaggtgggtatcatatgaaacgagagatggaattcgtatcagaacagtttatgaacctgcaacaggaaaagtggtaactgcattccccgatagaacctctaatcccaaatataaccctgtaaaataa

SEQ ID NO: 48396 - DNA, 1125 bp, Neisseria meningitidis
atgcagaatacttcctttgataatgaatccgattatagcgacgattcagactttgcgtcagcttccgaaactgaaaaccgtatcggtctgaccgttccgctcgagcttgccggcgggcggttggatgcggtgttggcgaaacttctgcccgactattcgcgcagccgcctgacattatggattaaagagggcgcggttattgtaaacgataaaccttcgcaacccaaagacaaaatgataggcggtgagcaaatccgtgtaaccgtccgtccgagtgaggaaaatctggcgtttgttccagagcctatggctttggatattgtttacgaagacgataccgtcattgtcgtcaacaaaccggccggactggtggtgcatccggcggcaggcaactggagggggacgctgctcaacggcctgttggcgcactgtcccgaattgagccaagtaccgcgtgcaggcatcgtacaccgtttggacaaagaaaccagcgggctgatggtggttgccaaaaccctgccggcgcaaaattccctcgtgaggcagcttcaagagcgcacggtcaaacgcatctaccgcgccgtcgccaacggcatcgtccccttcgacggtaaaatcgaaacccaaatcggacgcgatccgcacaaccgcctgaaaatggcagtcgtcaaattcggcggcaaaccagccgttacccacgtcaaagtgttggaacgctatcttccccacagctatatcgaatgctcgctcgaaacgggcaggacgcaccaaatccgcgtccatatgcgcgaggccaaccatccgcttgccggcgatcccgtgtacggcaacccgcgccatccgtgcagcgacccggtgaaagaagccgttaaaagtttgggcgcgcgtcaggcattgcacgcctaccgcttgagtttcacccatccggaaagcggcgaaaccgtttcgtttgaggcaccgattccggacgacatatatcatttgttgtccgtcctccgtcttgaagccggtttggattcgtctttgagcaatgaagaggaatggcaggacaaattcggcgcggacgacgatgacgattggaacgaagacgactacgatgtcgaagtggtttatgtgagggagtga

SEQ ID NO: 48397 - DNA, 123 bp, Neisseria meningitidis; identical to SEQ ID NO: 38480

SEQ ID NO: 48398 - DNA, 1020 bp, Neisseria meningitidis
atgaaaaaaattctcgttaccggcggcaccggttttatcggctcgcataccgttgtttctttgctgaaaagcggccatcaagtcgtgattttggataacctatgcaattccagcatcaatatcctgccacgcttgaaaacgattaccggccaagagattccgttttatcaaggcgatatccgcgatcgtgagattttgcgccgtatttttgcggaaaaccgcattgattcggtgattcattttgccggcttgaaagcggtgggtgaaagtgtggccgagccgatgaaatattatgataataatgtttccggcagcttggtgttggcggaagaaatggcgcgtgcgggcgtgtttagcattgtgttcagttcttcggcgacggtttatggcgatccgggcaaagtgccttataccgaggatatgccactgggcgataccaccagcccttacggcacatcgaaatcaatggttgagcgcattctcactgatattcaaaaagccgatccgcgttggagcgtgattttgttgcgctatttcaacccgattggggcgcacgaaagtggtttgattggcgagcagccaaacggcatcccgaataatttgttgccttatatctgccaagtggcggcaggcaaactgccgcaattggcggtatttggcgatgactaccctacccccgacggcacggggatgcgtgactatattcatgtgatggatttggcagaagggcatatcgcggcaatgaaggcaaaaagtaatgtagcaggcacgcatttgctgaacttaggctccggccgcgcttcttcggtgttggaaatcatccgtgcctttgaagccgcatccggcttaaatattccctatcaaatccaaccccgacgcgccggagacttggcgtgttcctttgccgacccgtcccataccaaacaagagacaggttgggaaaccaaacgcagccttgcgcaaatgatggaggattcgtggcgttgggtcagccgcaaccccaacggatatggggattaa

SEQ ID NO: 48399 - DNA, 291 bp, Neisseria meningitidis; identical to SEQ ID NO: 38495

SEQ ID NO: 48400 - DNA, 1389 bp, Neisseria meningitidis
atgaatgcagtcgtagttgccgtaatcgttatgctggtgctgtcgctgtcgcgcgtgcacgtggtattgagcctgacggtcggcgcgtttgtcggcggcgcggtggcgggtatgccgctgcaaaacattgccgatgcggcgggacaggtcagtcaggcggggattatccccgtgttcgacaaaggtttggaaggcggcgcgaagattgcgctttcttatgcgatgctcggtgcgtttgcgatggcgattacccattccggcctgccgcagcagcttgccggcgcggtcgtccgcaaactgaaccggggcggtatgcccgacagcgtgcgttcgggcgagggcgcggtcaaatggctgctgctttccatcatccttgtgatgggcatgatgagtcagaacatcatccccatccacattgcctttatcccgatgattgttccgccgctgcttttggtgttcaaccgcctgaaaatcgaccgccgcctgattgcgtgcgtcatcactttcgggctggttacgacttatatgttcctgccttacggcttcggcgcgatttttttgaacgaaatcctgttgggcaacatccattccgccgcgccgcagcttgatgtgaaaaacattaacgtgatggcggcaatggcgattcccgcgttgggaatgctggccggactcctgctggcgtttgtccattaccgcaaaccgcgcctgtaccaaagcaacaatgccgatacggcgggcaacgccgatgcggcaaaccgtccgcagccgtccgcctaccgcagcctggccgccgccgccgccattgccgtatgttttgccatccagttgatgtatgaagactcgctggtgttgggcgcgatgctcggtttcgccgtatttatgatgttgggggtcatcaaccgcgacaaggcaaacgacgtattcggcgaaggtatcaagatgatggcgatggtcggcttcattatgattgccgcgcagggttttgccgccgtgatgaatgcgaccgggcatatccagccgctggtggaaagcagtatggcgatattcggcaacagcaaaggtatggcggcattggcgatgctggtggtggggcttttggtaacgatgggcatcggttcgtccttttccactttgccgattattgccgcgatttatgtgcctttgtgtgtcggtttgggtttttcgccgcttgccaccgtcgccattgtcggcacggcgggggcgttgggcgatgccggttcgcctgcgtccgattccacgctgggcccgacgatggggctgaacgccgacgggcagcacgaccacatccgcgattccgttatcccgaccttcatccactacaatatcccgctgctgattgccggctggattgccgcgatggtgctgtaa

SEQ ID NO: 48401 - DNA, 249 bp, Neisseria meningitidis; identical to SEQ ID NO: 38516

SEQ ID NO: 48402 - DNA, 993 bp, Neisseria meningitidis; identical to SEQ ID NO: 39671

SEQ ID NO: 48403 - DNA, 1011 bp, Neisseria meningitidis; identical to SEQ ID NO: 45544

SEQ ID NO: 48404 - DNA, 378 bp, Neisseria meningitidis; identical to SEQ ID NO: 36770

SEQ ID NO: 48405 - DNA, 1077 bp, Neisseria meningitidis; identical to SEQ ID NO: 39262

SEQ ID NO: 48406 - DNA, 1914 bp, Neisseria meningitidis; identical to SEQ ID NO: 38340

SEQ ID NO: 48407 - DNA, 1065 bp, Neisseria meningitidis; identical to SEQ ID NO: 39304

SEQ ID NO: 48408 - DNA, 1338 bp, Neisseria meningitidis; identical to SEQ ID NO: 38368

SEQ ID NO: 48409 - DNA, 1635 bp, Neisseria meningitidis; identical to SEQ ID NO: 38936

SEQ ID NO: 48410 - DNA, 975 bp, Neisseria meningitidis
atgacagaatatcccggcatcgggtcgccgttgttttacggcgttttttttgcggcagtgctggtcatgattgccttggatatgttttcgctgaagaaaaacggcagccataaagtcggcatcaaagaagccttggcatggagcggcttgtgggttgccgtatcctgcctgttcgcgggctggctgtatttcgaactcgccggcaatcccggctacggcgcggcagtcgcaaaagaaaaagtattggaattctttaccggctacattttggaaaaatcgttggcagtcgataatattttcgtgttcctgatgatattcggctacttcaaagtcgcaccgcagtttcagcaccgcgtgctgctgtacggcgtattgggcgcattggtattgcgcaccgtcatgattttcgtcggcgcggcactggttcggcagttcgagtggattctgtatctgttcggcgcgttcctgctctataccggcatacacatgatgaagcccgaaggcgatgaggaaggggatttggcaaacagcaggctgctgaatgccgtcaagaaagtcgttccggtcggcacggaatttcacggcgagaaattttttaccgtcgaaaacggcaaaaaaatcgccacgccgctgtttttggtgctggtcatgattgaattgagcgatgtcgtgtttgccgtggacagcatccccgccgtctttgccgttaccaccgatccgtttatcgtgctgacctccaatattttcgccattttgggtttgcgggcgatgtatttcctgctgtcggatgtggcggaacgctttatcttcctgaaatacggcttggcattcgtgttgagttttatcggtgtgaaaatgctggtaatgcattgggtgcatatcccgatttccgtttcgctgtcggtcgtgttcggcgcgttgggtgcatcgatactgacctcgttaatttatacgaaaaaacagcctgataaataa

SEQ ID NO: 48411 - DNA, 888 bp, Neisseria meningitidis
atgcagaaatccaaattatcttggttcttgaaactgatgttggcactgtcgctggcgtttctgtatatcccgctggttgttttggtcatctattcgtttaacgaatccaagctggtaaccgtttggggcggcttttcgaccaagtggtacggcgcattgctggaaaacgacaccatcttggaagccgcttggctgtcgctgcggattgccgttgtgtcttcgcttgccgccgtcgttttgggcacgctggcgggctatgcgatggcgcgtatcaaacgttttcgcggcagcacgctgtttgccggtatgatttccgcgcctatggtgatgcccgacgtgattaccggcctgtctatgctgctgctgattattcaggtgcagatatttttgcagggcagcgaatggttacaacatctctacttcgatcgtggctttttcactattttcttaggacatacgacgctgtgcatggcatacattaccgttgttatccgttcgcgtctggttgagcttgaccaatcgctcgaagaagccgcaatggatttgggcgcgcgtccgctgaaaatcttttttgtcatcactttgcctttgattgcccctgccatcgcttcaggctttctgctcggcattaccctgtctttggatgatttggtgattacctcattcctctccggccccggttcatccacattgccgcaggtgattttctccaaaatcaagttgggtctcgatccgcagatgaacgttttggcaaccatcctaatcggcatcatcggaacattggtcatcatcgtcaattattggatgatgaggcaggcaaccaagcgtgaccgagaagcggcagaagcctaccgccaagaaaaattggctgccgagaaagcaaattaa

SEQ ID NO: 48412 - DNA, 720 bp, Neisseria meningitidis; identical to SEQ ID NO: 44115

SEQ ID NO: 48413 - DNA, 1080 bp, Neisseria meningitidis
atgaacatacaaaacatccgcaccctcctcgacaccgtcgccgttccgaatacggcacgcacgctcggcggcgaaaaggccgtccgttcggtcgaacagcgttcagacggcatccatatcgccctgcatttcggcttccccgtcgcgcacattgcctcagaaacagccgaccgcatacaggaaatcctgatgccgctgacaggcgacacacacatccatctgtccatggacaccgaaatcggcacacacaaagtccagcccggcgttaccaccatcaaaggcgtgaaaaacatcatcgccgtcgcatcgggaaaaggcggcgtgggcaaatcgacgacgacagccaaccttgccgccgcaatggcgcggatgggcgcgcgcgtcggcgtactcgatgccgacctttacggcccgagccaaccgaccatgttgggtgtggacgaccgcaaacccgatcagaaaaaccaaaaactcattcccgtcgaatcttcagacggcatacaggtcatgtctatcggctttctcgtcgataccggccaagccgtcgtctggcgcggcccgatggtcagtcaggcattgcagcagctgatgttccaaagcgagtgggacgaagtggactatcttttcatcgacctgccccccggtaccggcgacatccagctcacgctgtcccagcgcatccccgtaaccggttccgtcatcgtaaccacgccgcaggacatcgccctgatagacgcgcgcaaggctgtggatatgttccgcaaggtcaacattcccattttaggcgtattggaaaacatgtccgtccacatctgcaccaactgcggacacagcgaagccctgttcggcacggacggcggcaaagatttagccgcacgcctcaacgtccccctgctcggacagcttcccctaagcctgcccgtgcgcgaagccatggacggcggcacaccggcgcaactgttcgacgaacaccccgccatcgcccgaatctacaccgatgccgcattccaaatcgccctgggcattgccgacaaaggcaaagacttcagcagccggttccctaaaattgtcgtcgaataa

SEQ ID NO: 48414 - DNA, 1275 bp, Neisseria meningitidis; identical to SEQ ID NO: 39268

SEQ ID NO: 48415 - DNA, 627 bp, Neisseria meningitidis; identical to SEQ ID NO: 38981

SEQ ID NO: 48416 - DNA, 555 bp, Neisseria meningitidis
atgaaaaaaatcatcgcctccgcgcttatcgcaacattcgcactcgccgcctgccaagacgacacgcaggcgcggttcgaacagcagcagaaacagattgaagccctgcaacagcagctcgcacagcaggcagacgatacggtttaccaactgactcccgaagcagtcaaagacaccattcctgccgaagcacaggcaaacggcaacaacgggcaacccgttaccggtaaagacgggcagcagtatatttacgaccaatcgacaggaagctggctgctgcaaagcctggtcggcgcggcggcaggcgcgtttatcggcaacgcgctggcaaacaaattcacacgggcaggcaaccaagacagtcccgtcgcccggcgcgcgcgtgcagcctaccatcagtccgcacgccccaatgcgcgcaccagcagggatttgaacacgcgcagcctccgtgcaaaacaacaggcggcgcaggcgcagcgttaccgcccgacaacgcgcccgcccgccaattaccgccgccccgctatgcgcggtttcggcaggaggcggtaa

SEQ ID NO: 48417 - DNA, 855 bp, Neisseria meningitidis
atgccgcccatccctgccccatccgcaccatccgagcacactgtcgcatgggtattcggccaacccgttaccgatttgccgcaggatttgtttatcccacccgacgcgctgaaagtcgtattgggcagttttcaaggccctttggatctactgctgtatctgatccgcaagcagaacatcgatgttctcgatattccgatggtgaagattaccgagcagtatctgcactacatcgcccaaatagaagcctatcagtttgatttggcggcggaatatcttttgatggcagcaatgctgattgaaatcaaatcgcgcctgctgctgccgcgtaccgaagccgtcgaagacgaagaagccgacccgcgtgccgagttggtgcgccgcctgttggcttatgaacagatgaagctggcggcacaagggttggatgcgcttcctcgtgcgggccgggatttcgcatgggcgtacctacctctggaaattgccgtcgaagccaagctgcccgaagtctatattaccgacttgacgcaagcgtggctgggtattttgtctcgggcaaaacatacgcgcagccacgaagttatcaaagaaaccatctccgtgcgcgcgcaaatgacggcaatcctgcgccgtttgaacggacacgggatatgcaggtttcacgacctgttcaatcccgaacagggcgcggcttacgtggtcgtcaacttcatctcactgttggagcttgccaaagaaggattggtcagaatcgtgcaggaagtcggtttcggagaaatccgaatcagcctcaatcatgagggggcgcattcagacggcatttccggcacacggggcgggcgcgatgtgttctaa

SEQ ID NO: 48418 - DNA, 540 bp, Neisseria meningitidis; identical to SEQ ID NO: 44661

SEQ ID NO: 48419 - DNA, 1005 bp, Neisseria meningitidis; identical to SEQ ID NO: 38281

SEQ ID NO: 48420 - DNA, 870 bp, Neisseria meningitidis; identical to SEQ ID NO: 39154

SEQ ID NO: 48421 - DNA, 720 bp, Neisseria meningitidis; identical to SEQ ID NO: 39443

SEQ ID NO: 48422 - DNA, 720 bp, Neisseria meningitidis; identical to SEQ ID NO: 47489

SEQ ID NO: 48423 - DNA, 1416 bp, Neisseria meningitidis
ttgagcaggctacaaaaagccgcgcaacagatactgattgtgcgtggctacctcacttcccaagctattatccaaccacagaatatggattcgggaattctgaaattacgggtatcagcaggcgaaataggggatatccgctatgaagaaaaacgggatgggaagtctgccgagggcagtattagtgcattcaataacaaatttcccttatataggaacaaaattctcaatcttcgcgatgtagagcagggcttggaaaacctgcgtcgtttgccgagtgttaaaacagatattcagattataccgtccgaagaagaaggcaaaagcgatttacagatcaaatggcagcagaataaacccatacggttcagtatcggtatagatgatgcgggcggcaaaacgaccggcaaatatcaaggaaatgtcgctttatcgttcgataaccctttgggcttaagcgatttgttttatgtttcatatggacgcggtttggcgcacaaaacggacttgactgatgccaccggtacggaaactgaaagcggatccagaagttacagcgtgcattattcggtgcccgtaaaaaaatggctgttttcttttaatcacaatggacatcgttaccacgaagcaaccgaaggctattccgtcaattacgattacaacggcaaacaatatcagagcagcctggccgccgagcgcatgctttggcgtaacaggtttcataaaacttcagtcggaatgaaattatggacacgccaaacctataaatacatcgacgatgccgaaatcgaagtgcaacgccgccgctctgcaggctgggaagccgaattgcgccaccgtgcttacctcaaccgttggcagcttgacggcaagttgtcttacaaacgcgggaccggcatgcgccaaagtatgcccgcacctgaagaaaacggcggcggtactattccaggcacatcccgtatgaaaatcataaccgccggattggatgcagcggccccgtttatgttgggcaaacagcagtttttctacgcaaccgccattcaagctcaatggaacaaaacgcctttggttgcccaagacaagttgtctatcggcagccgctacaccgttcgcggatttgatggggagcagagtcttttcggagagcgaggtttctactggcagaatactttaacttggtattttcatccgaaccatcagttctatctcggtgcggactatggccgcgtatctggcgaaagtgcacaatatgtatcgggcaagcagctgatgggtgcagtggtcggcttcagaggagggcataaagtaggcggtatgtttgcttatgatctgtttgccggcaagccgcttcataaacccaaaggctttcagacgaccaacaccgtttacggcttcaacttgaattacagtttctaa

SEQ ID NO: 48424 - DNA, 942 bp, Neisseria meningitidis; identical to SEQ ID NO: 38350

SEQ ID NO: 48425 - DNA, 1272 bp, Neisseria meningitidis; identical to SEQ ID NO: 39676

SEQ ID NO: 48426 - DNA, 660 bp, Neisseria meningitidis; identical to SEQ ID NO: 44247

SEQ ID NO: 48427 - DNA, 483 bp, Neisseria meningitidis; identical to SEQ ID NO: 36693

SEQ ID NO: 48428 - DNA, 717 bp, Neisseria meningitidis; identical to SEQ ID NO: 39172

SEQ ID NO: 48429 - DNA, 627 bp, Neisseria meningitidis; identical to SEQ ID NO: 39831

SEQ ID NO: 48430 - DNA, 729 bp, Neisseria meningitidis
atgcttttgggtgtcaacatcgaccacatcgccaccgtccgcaacgcgcgcggcacgacttatcccagccccgtggaggcggcactggttgccgaaacgcacggtgccgacctgattaccatgcacctgcgcgaagaccgccgccacatcaaagacgcggacgtgtttgccgtcaaaaacgccatccgcacgcgcctgaaccttgaaatggcgttgacggaagaaatgctcgaaaacgcgcttaaagtgatgccggaagacgtgtgcatcgtgcctgaaaaacggcaggaaatcacgaccgaaggcggtttggacgtattggcgcaacaggaaaaaatcgccgaattcaccaaaatcctgaccgacgcgggcatccgagtctctctctttatcgatgccgacgacaggcaaatccaagccgcctatgatgtcggcgcgcccgttgtcgagctgcacaccggcgcatatgccgatgcacgcagtcacgccgaacaactcaagcaattcgagcgtctgcaaaacggcgcgcattttgccggcgatttgggcttggtcgtcaacgccggacacggactgaccatacacaacgttacccccatcgcccaaatcctcgccatccgcgaactgaacatcgggcattcgctgattgcccaagccctcttcctcggactgcccgaagccgtgcgccagatgaaggaggcgatgttcagggcaaggctgctgccgtaa

SEQ ID NO: 48431 - DNA, 246 bp, Neisseria meningitidis; identical to SEQ ID NO: 38257

SEQ ID NO: 48432 - DNA, 810 bp, Neisseria meningitidis; identical to SEQ ID NO: 39750

SEQ ID NO: 48433 - DNA, 315 bp, Neisseria meningitidis; identical to SEQ ID NO: 43522

SEQ ID NO: 48434 - DNA, 558 bp, Neisseria meningitidis
atgatcaacgatattcaaaaaacagccgaaggcaaaatgcagcgttcggtcgaagtactgaaagaaaatctggcgaaagtgcgtaccggccgcgcgcataccggcctgctcgaccaagtggaagtcgaatactggggcagcatggtccccgtcagccaagttgccaacgtaacgcttctggatgcgcgcaccatcggcgtgaaaccgtttgaaagcaatatggctgccaaagtcgagaaagccatccgcgattcaaacttgggattgaacccggcagctgtcggcgacctgatccgcgtgccgatgcccatgctgaccgaggaacgccgcaaagacctgattaaagtcgtacgcggcgaagcggaagaaggccgcgtctccatccgcaacgtgcgccgcgatgccaacgaccacatcaaaaaactcctcaaagacaaagaaatttccgaagacgaggcacgtcgcggcgaagaagcggttcaaaaactgaccgacaaatacattaccgaagccgacaaactcctgactgccaaagaagaagatttgatggcaatttaa

SEQ ID NO: 48435 - DNA, 1110 bp, Neisseria meningitidis
ttggaagcgcaactgggtgcgccgattgaggattacgcgccgccgaaacattggacgcgcaagcagctcagaagtatggggcgtgtgtcgtatttgtgcgtcgatgcggcggagcaggctttgacggatgccggtttgctcggggacgaaagcattaccgacggacggatgggcgttgcctgcggctcttccagcggcagcaccaaagacatcggcgatgtgggcgaattgttgctgaccggcacgtcgcgcaacttcagtgccaacacctatgtgcgtatgatgccgcacaccaccgccgccaatatcggcatctttttcgggctgaaaggacgcatcatcccgacatcgagcgcgtgttcgtccggcagccaaggcataggttatgcctacgaagccatcaaatacggtctgaccgatatgatgctggcgggcggaggcgaagaatttttctcgtccgaagtgtatgttttcgactcgctttatgccgccagccgccgcaacggcgaaccggaaaaaaccccgcgcccatacgacgcgaaccgcgacgggctggtcatcggcgaaggcgcggggattttcgtgctggaagaattggaacacgccaaacggcgcggtgcgataatttacgccgaactcgtcggctacggagccaacagcgatgcctaccatatttccacgccccgccccgacgcgcaaggcgcaatccttgcctttcagacggcattgcaacacgcaggtcttgcgcccgaagacatcggctggattaatctgcacggcaccgggacgcaccacaacgacaatatggaaagccgtgccgttgcagcggttttcggcaacaatacgccctgcacgtccaccaagccgcaaaccggacacacgctgggcgcggcgggcgcaatcgaagccgcgttcgcgtggggcattgccgaccggcaaagcaatcccgaagggaaacttccgccccggctttgggacgggcagaacgaccccgacctgcccgccatcaacctgaccggcagcggcagccgctgggaaaccgaaaaacacattgccgccagctcgtcgtttgccttcggaggaagcaactgcgtcttaatcatcggatga

SEQ ID NO: 48436 - DNA, 1719 bp, Neisseria meningitidis; identical to SEQ ID NO: 39020

SEQ ID NO: 48437 - DNA, 621 bp, Neisseria meningitidis
atgacaaagttatacgcagaaatcgccaagatggagacgcaggacgacggcacggtcaaggtttggggctacgcttcaagcgaggagatcgattcggacggcgaagtcatcgcggcggcagctatgaaggcggcgattcccgattatatgaagtttggcgcggggcgcgagatgcacggctcaaacgctgcgggaacggcaattgaaatcaacgttgaagacgacggcataacctttttcggtgctcatatcatcgaccccgttgccgtggcgaaagtcaaaacaggcgtttacaaaggcttttccatcggcggcagcgttaccgcccgcgatgatttgaacaagtcgcaaatcacgggcttgaagctgacggaaatcagccttgtcgagcgccctgccaatcccgatgcggtgtttacctgctttaaggcggacaaaagtgcggaagcggtaaacaacgatacagaacataatactgcatattttagccatttcccttccaaacaaaaaagcaccgacggcggccgatgccccttcctttacaggttcccctattttttagctgcgggcagagccggttttgccgggccttttggtgcgggcgcgccgacagaagcctga

SEQ ID NO: 48438 - DNA, 342 bp, Neisseria meningitidis; identical to SEQ ID NO: 37907

SEQ ID NO: 48439 - DNA, 459 bp, Neisseria meningitidis; identical to SEQ ID NO: 40140

SEQ ID NO: 48440 - DNA, 540 bp, Neisseria meningitidis; identical to SEQ ID NO: 44661

SEQ ID NO: 48441 - DNA, 1188 bp, Neisseria meningitidis; identical to SEQ ID NO: 39794

SEQ ID NO: 48442 - DNA, 1266 bp, Neisseria meningitidis
atgttcagcttcttccgtcgcaagaaaaaacaggaaacgccggctcccgaggaggctcaagttcaggaaactgcagcaaaagcagaatccgaagttactcaaatagttgaaaatattaaagaagaagtcgaatctttaacggaaagcgtcaaagggcaggtcgaatcggctgttgaaaccgtcagcggtgcggttgaacaagtaaaggaagccgttgccgagatgctgtctgaagcagaggaagcggcggaaaaagcagcggaacaagtcgaagcggcaaaagaagccattgccgaaaccgtcggcgaggctgtcgggcaagttcaagaagccgttgcaacaactgaagaacacaagctcggttgggcggcgcgtttgaaacaaggtttgaccaaatcgcgcgacaaaatggcgaaatcgctggcgggcgtgttcggcggcggacaaatcgacgaagatttgtacgaagagctggaaaccgtgctgattaccagcgacatgggcatggaagccaccgaatacctgatgaaagacgtgcgcgaccgcgtcagcctcaaagggctgaaagacggcaacgaattgcgcggcgcgttgaaagaagccttgtacgacctgattaagcctctggaaaaaccattggttttgcccgaaaccaaagagccgtttgtcatcatgcttgccggcatcaacggcgcgggcaaaaccacgtctatcggcaaactcgccaaatatttccaagcgcagggcaaatctgtgctgcttgccgccggcgatactttccgcgccgccgcccgtgagcagcttcaagcttggggcgaacgcaacaacgtaaccgtgatttcgcaaaccacgggcgattccgccgccgtgtgcttcgatgccgtccaagccgccaaagcgcgcggcatcgacattgtgctggccgacaccgccggccgcctgcccacgcagcttcatttgatggaagaaatcaaaaaagtgaaacgtgtgctgcaaaaagccatgcccgacgcgccgcacgaaatcatcgtcgtgcttgatgccaacatcgggcaaaacgccgtcaaccaagtcaaagcctttgacgacgcattagggctgaccggtttaatcgtgaccaaactcgacggcacggcaaaaggcggcatcctcgccgcgcttgcttccgaccgccccgtccccgtccgctacatcggcgtgggcgaaagcatagacgacctgcgcccgtttgacgcgcgcgcgtttgtggacgcactgctggattga

SEQ ID NO: 48443 - DNA, 771 bp, Neisseria meningitidis; identical to SEQ ID NO: 39489

SEQ ID NO: 48444 - DNA, 1977 bp, Neisseria meningitidis
atgtcccgaattgccgccctgcccgaccatcttgtcaaccaaatcgctgccggcgaagtagtcgaacgccctgccaacgccttgaaagaaattgttgaaaacagtatcgatgcaggcgcaacggcgattgatgtcgagctggcgggcggcggcatccgcctgattcgcgtcagcgacaacggcggcggtatccaccccgacgacatcgagcttgcgctccaccgacacgctaccagcaaaatcaaaaccttaaacgatttggaacacgttgccagcatgggctttcgcggcgaaggcttggcaagcatcgcctccgtcagccgcctgaccctgaccagccgtcaagaagacagttcgcacgcaacccaagtcaaagccgaagacggcaaactcagcagccccaccgccgccgcccaccccgtcggcaccaccatcgaagccgccgaactcttcttcaatacccctgcgcggcgcaagttcctcaagtctgaagccaccgaatacgcccactgcgccactatgctcgaacgcctcgcgctggcgcatccgcacattgccttctcgctcaaacgcgacggcaaacaagtgttcaaactccctgcacaaagcctgcatgaacggattgccgccattgtcggcgatgattttcagacggcatcattggaaattgacagcgacaacggcgcattgcggctctatggcgcgattgccaaaccgactttcgccaaaggtaaaaccgacaaacaatactgcttcgtcaaccatcgttttgtccgcgacaaagtcatgctccatgccgtcaagcaggcataccgcgacgtattgcacaacgcactgacgcctgctttcgtcctctttctcgacctgccgcccgaagccgtggatgtcaacgtccacccgaccaaaaccgaaatccgcttccgcgacagtcagcaggtgcaccaacttgtgttccacacgctcaacaaagcccttgccgacacacgcgccgacctgaccgaaagcgtcagcaacgcaggcgaagtgttgcatgacattaccggcgttacgcctgcaccaatgccgtctgaaaacaacagcgaaaatctgtttgatcgcgcatccaactacccgacaggcaacaaatcagatacacacaatgcctttggttcatcaggcaaaaccgcgcccatgccctatcagtccgcatatgcgccgcaacaacgcagcctgtccctgcgcgaaagccgcgcggcaatgaatacttacgccgaactttacaaaaaaaccgacgacatcgaccttgagttaagccgattcgagcaggcacgtttcggcaatatgccgtctgaaacgcctgctccccaaacagatacgccgctttcagacggcatcccgtccccatccgaactgccgccgctcggtttcgccattgcccaattacttggcatctacattcttgcccaagccgaagacagcctgttgctcatcgatatgcacgccgccgccgaacgcgtcaactacgaaaaaatgaaacgccaacgtcaggaaaacggcaacctgcaaagccaacgcctgcttattcccgtaacctttgccgcgtcccacgaagaatgcgccgcccttgccgaccacgccgaagcactggcaggcttcgggctggaactgtccgatatgggcggcaacaccctcgccgtccgcgccgcacccgcaatgttgggcaaatccgatgtcgtctccctcgcccgcgacgtattaaacgaattcgcccaagtcggcagcagccaaaccatcgaggaacacgaaaaccacatcctcgccaccatgtcctgccacggctcgatccgcgccggccgccggctcaccctgcccgaaatgaacgcccttctgcgcgatatggaaaatacgccgcgcagcaaccagtgcaaccacggcaggccgacttgggtcaaactgactttgaaagaattggacgcactgttcttgcgcggacagtaa

SEQ ID NO: 48445 - DNA, 1131 bp, Neisseria meningitidis; identical to SEQ ID NO: 44874

SEQ ID NO: 48446 - DNA, 243 bp, Neisseria meningitidis; identical to SEQ ID NO: 39374

SEQ ID NO: 48447 - DNA, 423 bp, Neisseria meningitidis; identical to SEQ ID NO: 44835

SEQ ID NO: 48448 - DNA, 549 bp, Neisseria meningitidis; identical to SEQ ID NO: 39055

SEQ ID NO: 48449 - DNA, 1194 bp, Neisseria meningitidis; identical to SEQ ID NO: 39147

SEQ ID NO: 48450 - DNA, 579 bp, Neisseria meningitidis
atgagcgaacagacacagcagcaaaacagtgaagaagcggttgaaaatgtggaggcggtggaaaccgtcgagacagtaggaaatgcggacggtgtgcaggaacaggctgccgcagagccggcttatgaggatttgcaggcgcggattgccgagctggaagcgcaattgaaagacgagcagctgcgcgctttggcaaacgagcaaaacctgcgccgccgccaccagcaggaaattgcggatacgcacaagttcgccggacagaagtttgccgtggaaatgctgccggtcaaggattatctggaaatggcgcttttggatcagagcggcaatttcgatgcgctgaaaatgggcgtgcagatgactttgaacgagttgcagaaagcatttgatgctacgcaaatcaaggaaatcaatcctaaagcgggcgataagctcgatccgaatatccatcaggcgatgcaggcggtggcaagcgaacaggaacccaataccgtggtgggcgtgatgaagaagggttatacgctgtccgaccgcgtgttgcgcccggctatggttacggtggcacagaaggaagcctga

SEQ ID NO: 48451 - DNA, 504 bp, Neisseria meningitidis; identical to SEQ ID NO: 39039

SEQ ID NO: 48452 - DNA, 312 bp, Neisseria meningitidis; identical to SEQ ID NO: 39282

SEQ ID NO: 48453 - DNA, 891 bp, Neisseria meningitidis; identical to SEQ ID NO: 39016

SEQ ID NO: 48454 - DNA, 4860 bp, Neisseria meningitidis
ttggacggtgacggtatagaaaccgttgccaccaaaggctttgcaggtgcattgttcgaccaccgcaatcaaggcatccgcaccgccaccggttgggtttctgccgatgacggtctgcttgtgcgcgatttgaacggcaacggcatcatcgacaacggtgcggaactcttcggcgacaacaccaaactggcagacggttcttttgccaaacacggctacgcggctttggccgaattggattcaaacggcgacaacatcatcaacgcggcagacgccgcattccaatccctgcgtgtatggcaggatctcaatcaggacggcatttcccaagctaatgaattgcgtacccttgaagaattgggtatccaatctttggatctcgcctataaagatgtaaataaaaatctcggtaacggtaacactttggctcagcaaggcagctataccaaaacagacggtacaaccgcaaaaatgggggatttacttttagcagccgacaatctgcacagccgcttcaaagacaaagtggaactcactgccgaacaggcaaaagccgccaatcttgcgggcattggtcgtctgcgcgatttgcgcgaagctgccgcattgtccggcgatttggccaatatgctgaaagcttattctgccgccgaaactaaagaagcacagttggcattgttagataatttgattcacaaatgggcggaaaccgattcgaactggggcaaaaaatcgccaatgcgactttcaaccgattggacgcaaacggctaatgaaggtattgcactgacaccatcccaagtagcacaactaaaaaagaacgctttagtttccctttctgataaagctaaagcagctattgacgccgcccgcgaccgcattgccgtgcttgatgcctacacggggcaggattccagcacgctctattacatgagcgaggaagatgcgcttaatatcgtcaaagtaaccaacgatacatacgaccatctcgccaaaaacatctaccaaaacctgttgttccaaacccgtttgcagccatatttgaatcaaatcagtttcaaaatggaaaatgatacgttcactttggattttagtggtcttgttcaagcatttaaccatgtcaaagaaactaatccgcaaaaagcttttgtggatttggccgagatgcttgcatatggcgaacttcgtttttggtatgaaggccgaagactaatggccgattatgtggaggaggcaaaaaaagcaggtaaatttgaagattaccagaaagtgttgggtcaggagaccgttgcattattagctaaaacatcgggtacgcaagcagatgatatcctgcaaaatgtaggctttggtcataataaaaatgtttctttatatggtaatgacggcaacgacactctgatcggcggtgccggtaatgattacttggagggcggcagcggttcggatacttatgtcttcggcaaaggcttcggtcaggatacggtctataattacgactacgctaccggacgcaaagacatcatccgctttaccgacggtattacagccgatatgctgacttttacccgagagggcaaccatcttcttatcaaggcaaaagacggcagtggacaagtgactgttcagtcctatttccagaacgatggctcaggtgcttaccgtatcgatgagattcatttcgataacggcaaagtactggatgttgccactgtcaaaaaactggtacagcaatccaccgacggttcggacagattgtatgcctaccaatccggaaataccttaaatggcggattgggcgatgactatctgtacggtgccgacggggatgacctgctgaatggtgatgcaggcaacgacagtatctacagtggcaatggcaatgatacgctcgatggaggagaaggcaacgacgccctgtacggctataatggtaacgatgtactgaatggtgccgaaggcaatgatcatttgaacggcgaagacggtaacgacactctgatcggcggtgccggtaatgattacttggagggcggcagcggttcggatacttatgtcttcggcaaaggcttcggtcaggatacggtctataattacgactacgctaccggacgcaaagacatcatccgctttaccgacggtattacagccgatatgctgacttttacccgagagggcaaccatcttcttatcaaggcaaaagacggcagtggacaagtgactgttcagtcctatttccagaacgatggctcaggtgcttaccgtatcgatgagattcatttcgataacggcaaagtactggatgttgccactgtcaaaaaactggtacagcaatccaccgacggttcggacagattgtatgcctaccaatccggaaataccttaaatggcggattgggcgatgactatctgtacggtgccgacggggatgacctgctgaatggtgatgcaggcaacgacagtatctacagtggcaatggcaatgatacgctcgatggaggagaaggcaacgacgccctgtacggctataatggtaacgatgtactgaatggtggcgaaggcaatgatcatttgaacggcgaagacggtaacgacactctgatcggcggtgccggtaatgattacttggagggcggcagcggttcggatacttatgtcttcggcaaaggcttcggtcaggatacggtctataattacgactacgctaccggacgcaaagacatcatccgctttaccgacggtattacagccgatatgctgacttttacccgagagggcaaccatcttcttatcaaggcaaaagacggcagtggacaagtgactgttcagtcctatttccagaacgatggctcaggtgcttaccgtatcgatgagattcatttcgataacggcaaagtactggatgttgccactgtcaaaaaactggtacagcaatccaccgacggttcggacagattgtatgcctaccaatccggaaataccttaaatggcggattgggcgatgactatctgtacggtgccgacggggatgacctgctgaatggtgatgcaggcaacgacagtatctacagtggcaatggcaatgatacgctcaatggaggagaaggcaacgacgccctgtacggctataatggtaacgatgtactgaatggtggcgaaggcaatgatcatttgaacggcgaagacggtaacgacactctgatcggcggtgcaggcaatgattacttggagggcggcagcggttcggatacttatgtcttcggcaaaggcttcggtcaggatacggtctataattacgactacgctaccggacgcaaagacatcatccgctttaccgacggtattacagccgatatgctgacttttacccgagagggcaaccatcttcttatcaaggcaaaagacggcagtggacaagtgactgttcagtcctatttccagaacgatggctcaggtgcttaccgtatcgatgagattcatttcgataacggcaaagtactggatgttgccactgtcaaaaaactggtacagcaatccaccgacggttcggacagattgtatgcctaccaatccggaaataccttaaatggcggattgggcgatgactatctgtacggtgccgacggggatgacctgctgaatggtgatgcaggcaacgacagtatctacagtggcaatggcaatgatacgctcgatggaggagaaggcaacgacgccctgtacggctataatggtaacgatgtactgaatggtgccgaaggcaatgatcatttgaacggcgaagacggtaacgacactctaatcggcggtgcaggcaatgattacttggagggcggcagcggttcggatacttatgtcttcggcaaaggcttcggtcaggatacggtctataattacgactacgctaccggacgcaaagacatcatccgctttaccgacggtattacagccgatatgctgacttttacccgagagggcaaccatcttcttatcaaggcaaaagacggcagtggacaagtgactgttcagtcctatttccagaacgatggctcaggtgcttaccgtatcgatgagattcatttcgataacggcaaagtactggatgttgccactgtcaaaaaactggtacagcaatccaccgacggttcggacagattgtatgcctaccaatccggaagtaccttaaatggcggattgggcgatgactatctgtacggtgccgacggggatgacctgctgaatggtgatgcaggcaacgacagtatctacagtggcaatggcaatgatacgctcgatggaggagaaggcaacgacgccctgtacggctataatggtaacgatgtactgaatggtggcgaaggcaatgatcatttgaacggcgaagacggtaacgacactctgatcggcggtgccggtaatgattacttggagggcggcagcggttcggatacttatgtcttcggcaaaggcttcggtcaggatacggtctataattaccatgtggataaaaactctgacactatgcactttaaaggatttaaagcagcagatgttcattttatccgttccggaagtgatttggtgcttagcgcttctgaacaagacaacgtacgtatttccggattcttctatggtgaaaaccatcgtgtagatacatttgtctttgatgatgcagctatcagtaatccagattttgccaagtatattaatgctggcaataatttggtacagtctatgtctgtgttcggttctaaatactgctgcgacaggaggaaatgtggatgccaatatacaatccgtacagcagccgttattggtaacgccatctgcataaggagcctaatcacattcatggcttaa

SEQ ID NO: 48455 - DNA, 267 bp, Neisseria meningitidis; identical to SEQ ID NO: 39031

SEQ ID NO: 48456 - DNA, 3216 bp, Neisseria meningitidis; identical to SEQ ID NO: 38641

SEQ ID NO: 48457 - DNA, 408 bp, Neisseria meningitidis; identical to SEQ ID NO: 39722

SEQ ID NO: 48458 - DNA, 222 bp, Neisseria meningitidis; identical to SEQ ID NO: 48069

SEQ ID NO: 48459 - DNA, 756 bp, Neisseria meningitidis; identical to SEQ ID NO: 39133

SEQ ID NO: 48460 - DNA, 3012 bp, Neisseria meningitidis; identical to SEQ ID NO: 38110

SEQ ID NO: 48461 - DNA, 915 bp, Neisseria meningitidis; identical to SEQ ID NO: 39898

SEQ ID NO: 48462 - DNA, 483 bp, Neisseria meningitidis; identical to SEQ ID NO: 36360

SEQ ID NO: 48463 - DNA, 1374 bp, Neisseria meningitidis
atgagtaatccattttcctctttaggtttgggtacggaactcgtttccgcactgaccgcgcaaggttacgaaaacccgacgcccatccaagccgccgccattcccaaagcactcgccggtcatgatttgctagccgccgcgcaaaccggcacaggcaaaaccgccgcctttatgctgcccagtctggaacgcctcaaacgttacgccaccgccagcacctcgcccgcgatgcaccccgtgcgtatgctcgtccttacccccacgcgcgaacttgccgaccaaatcgaccaaaacgtgcagtcctacatcaaaaacctgccgcttcgccacaccgtcttgttcggcggtatgaatatggacaaacagaccgccgatttgcgtgccggctgcgaaatcgtcgtcgccaccgtcggacggctgctcgaccacgtcaaacaaaaaaacatcagtttgaacaaagtcgaaatcgtcgttctggacgaagcagaccgcatgttggatatggggtttatcgacgacatccgcaaaatcatgcagatgctgcccaaacaacgccaaaccctgctcttttccgctaccttctccgcaccgatacgcaaactggcgcaagacttcatgaacgcgcccgaaaccgtcgaagtcgccgcgcaaaacaccaccaacgccaacgtcgaacaacacatcatcgccgtcgataccattcagaagcgcaacctgctcgaacggctgattgtcgatttgcatatgaaccaggtcatcgtgttctgcaaaaccaaacaaagcgtcgaccgcgtaacgcgcgaactggtgcgccgcaacctgtccgcacaggcgatacacggcgaccgttcccaacaaagccggctcgaaacactcaacgccttcaaagacggcagcctgcgcgtcctcgtcgccaccgacatcgccgcgcgcgggctggacattgccgaactgcccttcgtcatcaattacgaaatgcccgcccagcccgaagactacgtccaccgcatcgggcgcacggggcgcgcgggcgcggacggcgtggcgatttccctgatggacgaatccgaacagaaaatgtttgaatccattaaagagctgaccggcaacaagctgctcattgagcgcatcgagggcttcgagccgcaatggtgggaacagggcggcgcaaaaccggaaaaacccgaaatgcgcgaaccgagacaacgcaaccgctacgaatccgccaaagcgcaacgcgaaaaaaacacccggccggaaaccacggcaaacgatgcgggcgcggcttgcggaaaaattgccggacgcagccgccgaagccgccgggaacaccggacctgcgccctgctccaaccgcgttacggcgtaaaatag

SEQ ID NO: 48464 - DNA, 540 bp, Neisseria meningitidis; identical to SEQ ID NO: 44661

SEQ ID NO: 48465 - DNA, 351 bp, Neisseria meningitidis; identical to SEQ ID NO: 39765

SEQ ID NO: 48466 - DNA, 1458 bp, Neisseria meningitidis
atgcacaaaatcctgcccatcgcccacgtcctctcccgactgggtatgctgttttcctttatcctgctgatacccgccgccctctcctacgccttttcggacggcgcgtacaccgccttcgccaccaccgcgaccgttaccctttccggctcgtacatcgtccggctcgccaccctccggttcaggcgcgaactgcgcccgcgcgacggcttcaccctcgtcctgatgttgtggctggcgtttgccgctatggctgcgatgccgatgtacctgtatttcccgaatatgggctttaccgacgcattttttgaatcgatgtcgggactgaccaccaccggcgcgaccgtcatcccccacgtcgacgggctcgccccctccgtcaacttttggcggcatatgctcaactggctgggcgggatgggcatcatcgtccttgccgtcgccatcctgcctatgctcggcgtaggcggcacgcaattattcaaagccgaaatccccggcattgacaaagaaagcaaaatgtcgccgcgcatttcccaagtggcgaaaaaactctggttcggctacaccctgatcaccatcctcgcggcagcctgcctgcattttgccgggatgggctggttcgatgccgtctgtcacgcgatggcgaccctctcgctgggcgggttttccacccacgatgccagcatagcttattacaactcccccctcatcgaagcggtcatcatcgttttcaccattgtcggcggcatcaattttgccaaccatttcgccgccctcaacagccgcagcctcaaaacctattggaaagacgaagaatgccggacgatgctgctgctgctctccggcagcatccttgccgccgccctgtacctgtggcacaccggctattacgccggttttaccgaatccctgcgctacaccgccttcaacttcgtctccatcggactggcaaacgggctggccaacaccgacttcgcacaatggccgctcctgatttccctgtggatgtttttcctcgccaacatcctcgccaactccggctcgaccggcggcggcatcaaaaccatacgcgccctcgtcctgttcaaattcagcctgcgcgaaatgatggtgctgctgcaccccaaagccgtccgcaccgtcaaaatcagcggcaaggccatacccgaccgcctcgcgctgaccgttatgtccttcatcttcatctactttatgaccgtcgtcctcttcagcttcctgctgatggcgagcggtatggaatttaccaccgccttcaccgccgtcatcgcctgcatcaccaacgccggccccggcctgggcgaagtcgggcccgccggcaattacgccggtttggacgtgatgcagaaatggatctgcgttaccgccatgctcttgggcaggctggaaatcttcaccgtcttcatcctcttcacccccgcctactggaagaaataa

SEQ ID NO: 48467 - DNA, 2424 bp, Neisseria meningitidis
ttggcaacccttcctttgcgggatgtcgtcgtttacccgcatatggttctgccgctgtttgtcggcaggccgaaatccatcgccgcactggaaaacgccattacccgcgaggagccggttttcctgttggcgcaaaccgatgcggcggtagaagaaccggttgccgccgacctgtatcagaccggtacggtcgcacaagtcctgcaagtgttgaaactgcccgacggcacggtaaaagtattggtcgaagggctgtatcgcggacgtgttctgaccattgaagacacgggcggtctgttcgtttcccatatagaggcggtcgtggaagaagacacgggcggcaataccgacctcgaagccgtgcgccgcaccctgttggcgcagtttgaacaatacgccaaactcaataaaaaaatccccgccgaaattatcggcagcattaacggcattgccgaaaacagccggctaaccgatacagtcgcagcgcatttgcagttgaaactgacgcaacgccaacagattttggagatttccgaaatcggcaaacggatggaattcctgctggcacagctggaatccgaactcgacattatgcaggccgaaaaacgcatacgcggacgcgtcaaacgccaaatggaaaaatcccagcgcgaatattatctgaacgaacagattaaagcgatacacaaagaattgggcgaagaagacgaaaacggcgaactggatgccttggaagcaggcatcaaaaaggcgggtatgagtaaagaagcggaagaaaaatgcctgtccgaactgaaaaaactcaaaatgatgccgccgatgtctgccgaatccaccgtcgtacgcaactacatcgacaccctgctcgaactgccgtggaagaaaaaatcccgcgtcagcaaagacatcgccaaagccggactggtgctggatgccgaccactacggcctggaaaaagtcaaagaacggattttggaatacctcgccgtccaaaaacgtatggacaaactcaaaggcccgattctgtgcctggtcggccctccaggcgtgggcaaaacctctttgggcgaatccatcgccaaagcaacggggcggaaatatgtccgcatggctttgggcggcgtgcgcgacgaaagcgaaatccggggacaccgccgcacctatatcggctccatgcctggtaagattctgcagaatatggcaaaagccggcgtaaaaaacccattgttcctgctcgacgaaatcgacaaattgggtagcgacttccggggcgatcccgccagcgcgttgctcgaagtgcttgatcccgagcaaaacaacaagttcgccgatcattatgccgaagtggattacgatttgagcgatgtgatgtttattgcgacttcaaacagcctgaatatcccgaccccgctgctcgaccgtatggaaatcatccgtctgtccggctacaccgaagacgaaaaaatcaatatcgcgatgcagtacctcgtgccgaagcaaatgaagcgcaacggcgtgaaagaaggggaattggcaatcgaagaaagcgcggtgcgcgatattatccgttactacacccgcgaggcgggcgtgcgttcgctcgaccgcgagattgccaaaatctgccgcaaggtggtgatgcagattaccttggacgaagataagaagaggttgtctgaaaccaagaaaaccagcaaagccaaacctaaagcggttaaagtaaatgagaaaaatctgcacgactatttgggtgtgcgccgcttcgattacggcgttgccgaaagcgaaaaccgtatcggacaagtaaccggtctggcgtggacagaagtcggcggtgaactgctgaccgtcgaagccgcagcattgccgggtaagggcgtgattcagtgcaccggccagttgggcgatgtgatgaaggaatccgtgtctgcagcgtggtcggttgtccgctcccgcgcggaatcagtgggcttggctcctgatttttacgagaaaaaagacatccatgtccatgttcccgaaggtgcgacgccgaaagacggtccgagtgcgggcattgccatgactttggcgatggtgtctgcattcaccaaaatcccggtgcgcgccgatgttgccatgacgggcgaaattaccctgcgcggcgaagtcctgccgattggcggtctgaaggaaaaactgttggctgcgcttcgcggcggcatcaaacacgttttaattccaaaagacaacctcaaagacttggaagaaatccctgaaaacgtgaaaaccggcctgaccatccatccggtcaaatggatagacgaggtattggctctgggtttggaaagccagcctgagccttgggcagaaccttctggtgcggaagcggcggcggaatccgcttcaaaaccaaaaccccgcagcagggcaaccaaacattga

SEQ ID NO: 48468 - DNA, 1677 bp, Neisseria meningitidis; identical to SEQ ID NO: 39578

SEQ ID NO: 48469 - DNA, 822 bp, Neisseria meningitidis
atggattttctgattgtcctgaaagccctgatgatgggcttggtagaaggttttaccgaatttttaccgatttccagcaccggacatttgattgtgttcggcaatctgattgattttcacagcaatcacaaggtttttgaaattgccatccagcttggtgcggttttggcagtagtgtttgaataccggcagcgtttcagcaatgtgttgcacggcttaggaaaagaccggaaagccaaccgtttcgtcctcaatcttgccattgcttttatacctgccgccgtgatggggctgttgttcggcaaacaaatcaaagagtatctgtttaaccccttgagtgttgcagtcatgctggttttgggcggtttttttattttgtgggtggagaaacgccaaagccgagcagagcctaaaattgccgatgttgatgcattgcgtccgattgatgccttgatgatcggtatcgcgcaggtgtttgccttgattccgggaacatcccgctcgggcagtacgattatgggcgggatgctttggggaatcgagcggaaaacggcaacggagttttcatttttcttggccgttccgatgatggttgccgcaacggcttatgatgtcctgaaacattaccggtttttcaccctgcatgatgtcggtttgattctgataggctttattgccgcttttgtttccggtttagtagcggtcaaagcactgctgaagtttgtttccaagaaaaactatatcccgtttgcctattaccgcattgttttcggcatcgtcatcataatattgtggttgtcgggctggataagttgggaatga

SEQ ID NO: 48470 - DNA, 1218 bp, Neisseria meningitidis; identical to SEQ ID NO: 38556

SEQ ID NO: 48471 - DNA, 648 bp, Neisseria meningitidis; identical to SEQ ID NO: 36887

SEQ ID NO: 48472 - DNA, 654 bp, Neisseria meningitidis
atgaagataacgcactgcaaattaaagaaaaaagtacagaaagaactgctccgtttttttgtactcgaagttaccgcccgttctgccgccgatattttgggtatccatcccaattcggcagcactgttctaccgtaaaatccgcacggttatcaaccatcatttggccttggctgccgatgaggtttttgagggccctgtcgagcaggacgaaagcgatttcggcggacggcgtaaaggcagacgtggtcggggtgcggcaggaaaagtggttgtcttcggcattctgaaacacaacggacgggtctataccgttatcgtagataatgccaaatctgaaacgttactccctgtcatcaaaaagaaaatcatgccggacagtattgtttataccgatagtctgagcagctgcgacaagttggacgtgagcggttttatccattaccgcatcaaccattccaaggaatttgcagaccgtcagaaccacattaacggcattgagaacttttggaatcaggcaaaacgcgtcttgcgaaaatacaatggaatcgatcgcaaatctttcccgctgttcttgaaagaatgcgaatttcgatttaacttcggcacaccgtctcaacagcttaaaatcctgcgggattggtgtgggatttag

SEQ ID NO: 48473 - DNA, 1131 bp, Neisseria meningitidis; identical to SEQ ID NO: 38490

SEQ ID NO: 48474 - DNA, 1377 bp, Neisseria meningitidis; identical to SEQ ID NO: 39536

SEQ ID NO: 48475 - DNA, 1251 bp, Neisseria meningitidis; identical to SEQ ID NO: 38424

SEQ ID NO: 48476 - DNA, 216 bp, Neisseria meningitidis; identical to SEQ ID NO: 38828

SEQ ID NO: 48477 - DNA, 228 bp, Neisseria meningitidis; identical to SEQ ID NO: 40081

SEQ ID NO: 48478 - DNA, 2385 bp, Neisseria meningitidis
atggccgacaactacgtaatctggtttgaaaacctgcgtatgacagatgttgaacgcgtgggcggtaaaaacgcctcgctgggcgaaatgatcagtcagctgaccgaaaaaggcgttcgcgtccccggcggctttgccaccacagccgatgcctaccgcgcattcctcgcacacaacggtctgagcgaacgcatttccgccgcactggcaaaattagatgtcgaagacgttgccgaactggcacgcgtcggcaaagaaatccgccaatggattttggacacgcccttccccgaacagctcgatgccgaaatcgaagcggcatggaacaaaatggttgccgatgccggcggtgcggacatttccgttgccgtacgctcttccgcaaccgccgaagacctgcccgacgcatcatttgccggacaacaggaaaccttcttgaacatcaacggcttggataacgttaaagaagcgatgcgccatgtattcgcctccctgtacaacgaccgcgccatttcctaccgcgtccacaaaggcttcgaacacgacatcgtcgccctttccgccggcgttcaacgcatggtgcgttccgacagtggcgcatcaggtgtgatgttcaccctcgacaccgaatccggctacgatcaagtcgtctttgttacctcctcttacggtctgggcgaaaacgtcgtacaaggcgcggtcaacccggacgaattttatgtgttcaaacctacgctcaaagcgggcaagcccgccatcctgcgtaaaaccatgggttcgaaacacatcaaaatgatttttaccgacaaagccgaagccggcaaatcggtaaccaacgtcgatgtccccgaagaagaccgcaaccgcttctccattaccgacgaagaaatcaccgagttggcgcattacgcgctgaccatcgaaaaacactacggccgcccgatggatatcgaatggggtcgcgacggcttggacggcaaactctatatcctgcaagcccgtcccgaaaccgtaaaatcccaagaagagggcaaccgcaacctgcgccgcttcgccatcaacggcgacaaaaccgtattatgcgaaggccgcgccatcggtcagaaagtcggtcagggcaaggtgcgcctgattaaagatgcttccgagatggattccgtcgaagccggcgacgtactcgttaccgacatgaccgatccggattgggaacccgtgatgaaacgtgcttctgccatcgtgaccaaccgcggcggccgtacctgccacgccgccatcatcgcgcgtgaattgggcattcctgccgttgtcggctgcggcaatgcaaccgaattgctgaaaaacggtcaagaagttaccgtatcctgtgccgaaggcgataccggctttatctatgccggtctgttggacgtacagattaccgatgtcgccttagacaatatgcccaaagcaccggttaaagtcatgatgaacgtcggcaatcccgaactcgcattcagcttcgccaacctgcccagcgaaggcatcggcttggcgcgtatggaatttatcatcaaccgccaaatcggtatccaccccaaagccttgttggaatttgacaaacaagacgacgaattgaaagcggaaattacccgccgcatcgccggctatgcgtcccctgtcgacttctacgtcgataaaatcgcagaaggcgtggcaactttggccgcatcggtttatccgcgtaaaaccatcgtccgtatgtccgacttcaaatccaacgaatacgccaacctggtcggcggcaacgtatacgaaccgcatgaagaaaacccgatgttgggcttccggggcgcggcgcgttatgtcgccgacaacttcaaagactgtttcgccttggaatgcaaagccttgaaacgcgtccgcgatgaaatggggttgaccaacgttgaaatcatgattccgttcgtccgcaccttgggcgaagccgaagccgttgtcaaagccctgaaagaaaacggcttggaacgcggcaaaaacggcctgcgcctgattatgatgtgcgagctgccgagcaacgcggtattggcggaacaattcctgcaatacttcgacggcttctccatcggctcgaacgacatgacccaactgaccctcggtctcgaccgcgacagcggcttggtatccgaatcgtttgacgaacgcaaccctgccgtcaaagtgatgctgcaccttgccatctccgcctgccgcaagcagaacaaatatgtcggcatctgcggtcaaggcccgtccgaccatccggacttcgccaaatggctggttgaggaaggcattgaaagcgtttccctgaacccggataccgtcatcgaaacttggctgtatttggcgaatgaattgaacaaataa

SEQ ID NO: 48479 - DNA, 255 bp, Neisseria meningitidis; identical to SEQ ID NO: 39349

SEQ ID NO: 48480 - DNA, 882 bp, Neisseria meningitidis; identical to SEQ ID NO: 45356

SEQ ID NO: 48481 - DNA, 456 bp, Neisseria meningitidis
ttggacaaacaaatcgacgaccacacccacacgcattttgacggcaaagcccaagtggcggagcaaatcaaaggcatcggttcgataacgacggctacgctgatggtgatgttgcccgaattggggcggctgtcgcacaaacggatagcgagtttggtcggcattgccccgcacccgagggagagcggggaaaccaaattcaaaagccgctgctttggcggaaggtctgcggtgcgtaaggcactgtatatggctaccgtggcagcgacacgttttgaaccgcttattcgggatttctaccaacgcctgccgtccgagggtaagccgtataaggttgccgttacggcatgtatgcgcaaactgctgacgatatcgaatgcccggatgcgtgattattttgccgaaaacgataccgccgaaaacgataccgccgaaaacggtatccggacggcttga

SEQ ID NO: 48482 - DNA, 1677 bp, Neisseria meningitidis; identical to SEQ ID NO: 38898

SEQ ID NO: 48483 - DNA, 1305 bp, Neisseria meningitidis; identical to SEQ ID NO: 38397

SEQ ID NO: 48484 - DNA, 1113 bp, Neisseria meningitidis; identical to SEQ ID NO: 45010

SEQ ID NO: 48485 - DNA, 1662 bp, Neisseria meningitidis
atgctgacctacactccgcccgatgcccgcccgcccgccaaaacccacgaaaagccgtggctgctgctgttgatggcgtttgcctggttgtggcccggcgtgttttcccacgatttgtggaatcctgccgaacctgccgtctataccgccgtcgaagcactggcaggcagccccacccccttggttgcccatctgttcggtcaaaccgatttcggcataccgcccgtgtatctttgggttgccgccgcgttcaaacatttgctgtcgccgtgggctgccgacccatacgatgccgcacgctttgcaggcgtgttttttgccgttgtcgggctgacttcctgcggctttgccggtttcaactttttgggcagacaccacgggcgcagcgttgttttaatccttatcggctgtatcgggctgattccggttgcccatttcctcaatcccgccgccgccgcctttgccgccgccggcctggtgctgcacggctactcgctggcacgccggcgcgtgattgccgcctctttcctgcttggtacgggttggacgctgatgtcgctggcggcagcttatccggcggcatttgcgctgatgctgcccctgcccgtgctgatgtttttccgtccgtggcaaagcaggcgtttgatgttgacggcagtcgcctcgcttgcctttgccctgccgcttatgaccgtttacccgttgcttttggcaaaaacgcagcccgcgctgttcgcgcaatggctcgactatcacgttttcggtacgttcggcggcgtgcggcacgttcagacggcattcagtttgttttactatctgaaaaacctgctttggtttgcattgcccgcgctgccgctggcggtttggacggtatgccgcacgcgtctgttttcgaccgattgggggattttgggcgttgtgtggatggttgccgttttggtgctgcttgccgccaatccgcagcgttttcaggacaacctcgtctggctgctgccaccgcttgccctgttcggcgcggcgcaactggacagcctgaggcgcggcgcggcggcgtttgtcaactggttcggcattatggcgttcggactgtttgccgtgttcctgtggacgggctttttcgccatgaattacggctggcccgccaagcttgccgaacgcgccgcctacttcagcccgtattacgttcccgacatcgatcccattccgatggcggttgccgtactgttcacacccttgtggctgtgggcgattacccggaaaaacatacgcggcaggcaggcggttaccaactgggcggcaggcgttaccctgacctgggctttgctgatgacgctgttcctgccgtggctggacgcggcgaaaagccacgcgccggtcgtccggagtatggaggcatcgctttccccggaattaaaacgggagctttcagacggcatcgagtgtatcggcataggcggcggcgacctgcacacgcggattgtttggacgcagtacggcacattgccgcaccgcgtcggcgatgtacaatgccgctaccgcattgtccgcctgccccaaaacgcggatgcgccgcaaggctggcagacggtttggcagggtgcgcgcccgcgcaacaaagacagtaagttcgcactgatacggaaaatcggggaaaatatataa

SEQ ID NO: 48486 - DNA, 924 bp, Neisseria meningitidis; identical to SEQ ID NO: 37161

SEQ ID NO: 48487 - DNA, 648 bp, Neisseria meningitidis; identical to SEQ ID NO: 39288

SEQ ID NO: 48488 - DNA, 303 bp, Neisseria meningitidis; identical to SEQ ID NO: 39628

SEQ ID NO: 48489 - DNA, 135 bp, Neisseria meningitidis; identical to SEQ ID NO: 44583

SEQ ID NO: 48490 - DNA, 1338 bp, Neisseria meningitidis
atgctgccttccggtcggagcagtaaaaaagcggaaagtaaaacggtcattcctgccgaaagacacaacatccgtgccgaaatgttgagctttgccgccgaaaacgtcatacgccgcctgaaagaggcagggtttcaggcttatgtggtcggcggcgcggtcagggacctgctgctcggcatcgaacccaaggatttcgatgtcgcaaccgatgccatgcccgaacaggtgcacaaactcttccgccgcagccgcatcgtcggcaggcgttttcaaatcgtccatgtgatgaacggtgcggagattatcgaagtaacgacgtttcgcggcggtgcgaaagttcatcagaacgcgcacggcaggattatgaaggacaacacctacggcagcatcgaagaagatgcgatgcggcgcgattttacctgcaatgccttgtattacgatccggaaaaagaagagattttggatttccacaacgggattgccgatgttgccgcccgcaggctggttatgattggcgatgccgccgaacgctatcaggaagaccctgtcaggattttgcgcgccatccgcctgtcgggcaaattgggctttgagctgtcggaagaaaccgccgcaccgattgccgaatcgatatgccgtctgaagcacgaaccggtagcgaggctgttcgacgaaattatgaaactgctgttttcagggcacgcgcgcgagtgtctaaaacgtttgaacggatttgacataccggacgacatccatccgctgctcaatgccttgcgcgtttcagacggcatcgccggaaaaatgacggtgcttgccctgaaaaataccgatgagcggctgcgtgccgacaaatcggtttcggtcggtttcgtactggcggccctgatgtggcccgagttggaacgccattggaaaagcaatctgcaacagggtttgaaacccgtgcccgccctgtccgatgcaatcaatacgatgcgcgaaaccgtcgaacgcggttggggcgtaccgcaacgcttttccgccacgatgcgcgaaatttggatgttccagccgcagtttgaaaaccgcaaaggcgcaaggccgcacaaactgtttgcacaggcgcgtttccgtgccacctatgatttcctgctcttgcgcgccgaaaccggcaatgcggaccgcgcccttgccgagtggtggacggcgtttcagacggcatcgcaggaacaacggacggagatgaccaaaaacgaagccgccgcccgacacgaaaaaaacgaaggacaggcgaaaaaacgccgccgtcgcaggcgcaaacccaagccgaaggttgtgggaacggattgggaataa

SEQ ID NO: 48491 - DNA, 1008 bp, Neisseria meningitidis
atgagtaccttcttccagcaaaccgcacaagccatgattgccaaacacatcgaccgcttcccactattgaagttggatcaggtgattgattggcaaccgatcgaacagtacctgaatcgtcaaagaacccgttaccttcgagaccaccgaggccgtcccgcctatcccctgttatccatgttcaaagccgtcctgctcggacaatggcacagcctttccgatcccgaactcgaacacagcctcatcacccgcatcgatttcaacctgttttgtcgttttgacgaactgagcatccccgattacagcaccttatgccgctaccgtaactggctggcgcaagacaacaccctgtccgaattgctggaactgattaaccgacaactgaccgaaaaaaacctaaaaatagagaaagcatccgccgccgtcattgacgccaccattattcagaccgccggcagcgaacagcgtcaggccatagaagtcgatgaagagggacaagtcagcggtcaaaccacactgagtaaggacaaaaatgcccgttggacaaagaaaaacagcctctacaaactcggttacaaacaacatacccgtaccgatgcggaaggctatatcgagaaactgtacatcactcccaccaatgcccatgagtgcacacacctgtcgccgttgttggaaggactgcccaaaggtacgaccgtctatgccgacaaaggctacgacagcaaggaaaaccggcaacacctgaaagaacatcggttgcagaacggcattatgcgcaaagcctgccgcaaccgtccgctgacggaaacgcaaaccaaacgtaaccgatatttgtcgaaaacccgttatgtggtcgaacaaagcttcggtacgctgcaccgtaaattccgctacgcccgggcagcctatttcgggctgattaaagtgagtgcgcaaagccatctgaaggcgatgtgtttaaacctgttgaaagcggccaacaggctaagtgcgcccgctgccgcctaa

SEQ ID NO: 48492 - DNA, 999 bp, Neisseria meningitidis
atgagcagacccgtacccgccgtattcggcagcgtttttcacagtcaaatgcccgtcctcgcctaccgcgaaggcaaatggcagccgaccgaatggcaatcttcccaagacctctccctcgcaccgggtgcgcacgccctgcactacggcagcgaatgtttcgagggactgaaagccttccgtcaggcagacggcaaaatcgtgctgttccgtccgactgccaatatcgcgcgtatgcggcaaagtgcggacattttgcacctgccccgccccgaaacccaagcctatctcgatgctttggtcgaactggtcaaacgtgccgccgatgaaattcccgacgcgcctgccgccctgtacctgcgcccgaccttaatcggtaccgatcccgtcatcggcaaggcaggctcgccgtccgaaaccgccctgctgtatattttggcttcccccgtcggcgactatttcaaagtcggctcgcccgttaaaatcttggtggaaaccgaacatatccgctgcgccccgcacatgggccgcgtcaaatgcggcggcaactacgcttctgccatgcactgggtgctgaaggcgaaagccgaatacggcgcaaaccaagtgctgttctgcccgaacggcgacgtgcaggaaaccggcgcgtccaactttatcctgattaacggcgatgaaatcattaccaaaccgctgaccgacgaatttttgcacggcgtaacccgcgattccgtactgacggttgccaaagatttgggctataccgtcagcgaacgcaatttcacggttgacgaactcaaagctgcggtggaaaacggtgcggaggcgattctgaccggtacggcagccgtcatctcgcccgttacttccttcgtcatcggcggcaaagaaatcgaagtgaaaagccaagaacgcggctatgccatccgtaaggcgattaccgacatccagtatggtttggcggaagacaaatacggctggctggttgaagtgtgctga

SEQ ID NO: 48493 - DNA, 966 bp, Neisseria meningitidis; identical to SEQ ID NO: 38346

SEQ ID NO: 48494 - DNA, 621 bp, Neisseria meningitidis
atggcacagtttttcgctattcatcccgacaacccccaagaacgcctcatcaagcaggcggtcgaaatcgtcaataaaggcggcgtggtcgtttatccgaccgattcctgttatgccttgggttgcaaactcggcgataaggcggcgatggaacgcatactctccatccgaaaaatcgatttgaaacaccacctgaccctgatgtgcgccgatttgagcgagttgggcacatacgccaaaatcgacaacgtacagtttcgtcagcttaaggccgccacgcccgggccttatacctttatcttgcaggcgacgaaggaagtgccggcgcgcacgctgcacccgaaacgcaaaaccatcgggctgcgtattcccgataatgccattgcacaagccctgctgggggaattgggcgagccgcttttaagctgcaccctgatgctgcccgaagacggcgaaccattgaccgatccttatgaaatccgcgagcgtttggaacacgccgtcgatttggtgattgacggcggctggtgcggaaccgagccgaccaccgtcgtcgatatgaccgacggcacggaactggtgcgccggggttgtggcgatacggcggtgttcggtttgtag

SEQ ID NO: 48495 - DNA, 168 bp, Neisseria meningitidis; identical to SEQ ID NO: 38803

SEQ ID NO: 48496 - DNA, 2472 bp, Neisseria meningitidis; identical to SEQ ID NO: 39687

SEQ ID NO: 48497 - DNA, 1266 bp, Neisseria meningitidis
atgagtacgaacaacccgacacaaccgaccaggcgcaccctctttaaaaccgcactcgcagccggcgtgggcggcgcaatcggaggttatctcggtgggaaggggctgggtgaaactgccgaacgcaccgccgaaagccaacactcgccccaagcctatccctgttacggaaagaatcaggcaggtatcgttacgccgcagcaggcattttccatcatgtgcgcctttgacgttaccgcgcaaaacgccaagcagctggaaaacctgttccgcacgctgactgctcgtatcgagtttctcactcaaggcggcgaataccaagacggcgacgacaaacttccgccggccggcagcggcattttgggcaaagccttcaaccccgacggattgaccgttaccgtgggggtgggcagcagcttgtttgacggacgattcggactcaaagacaaaaaaccggttcatttgcaggaaatgcgcgacttccccaacgacaagctgcaaaaaagctggtgcgacggcgatttgagcctgcaaatctgtgccttcacccccgaaacctgccaagccgccctgcgcgacatcatcaaacacaccgtccaaaccgccgttatccgctggagtatcgacgggtggcagcccaaatccgaacccggcgcgatggcggcgcgcaacctgttgggcttcagggacggcacgggcaaccccaaagtttccgaccccaaaaccgccgacgaggttttgtggacgggtgtggccgccaacagcctcgacgaaccggagtgggcgaaaaacggcagctatcaggcagtccgccttatccgccactttgtcgagttttgggacaggacgccgcttcaagagcaaaccgacattttcgggcggcgcaaatacagcggtgcgccaatggacggcaaaaaagaagccgaccaaccggattttgccaaagaccccgagggtaataccacgcccaaagacagccatatacgcctggcgaatccgcgcgatcccgaattcctcaaaaaacaccgcctcttccgccgcgcctacagctattcgcgcggactcgcctcaagcggacagcttgatgtcgggctggtgttcatctgctatcaggcaaaccttgccgacggttttatcttcgtgcaaaacctccttaacggcgaaccgctggaagaatacatcagccccttcggcggcggctatttcttcgtcttgcccggcgtggaaaaaggcggctttttggggcaagggctgctgggcgtataa

SEQ ID NO: 48498 - DNA, 594 bp, Neisseria meningitidis; identical to SEQ ID NO: 38781

SEQ ID NO: 48499 - DNA, 1203 bp, Neisseria meningitidis; identical to SEQ ID NO: 38870

SEQ ID NO: 48500 - DNA, 651 bp, Neisseria meningitidis; identical to SEQ ID NO: 38684

SEQ ID NO: 48501 - DNA, 246 bp, Neisseria meningitidis; identical to SEQ ID NO: 39751

SEQ ID NO: 48502 - DNA, 468 bp, Neisseria meningitidis
atgcaaatagataatatatccgatgaacaggttgtgattgtcagaatgtcttgttatcttaagaaagatgaaatttttaagaatatagaaagatatggatatcagtcatcagatattaagaaaattagtcctccttttccattaaatattttacctgttcccaaaccttattatttttatctttatgatacccatttgaatcaaatttatgatttggcttggtcatgtaatgattttttaatgtttgaaatatttattttggatagggaaagcatcaaatatatagataaagataaactttttaaatctagagaaacactatattcgaattttaaatctattaaaaatcaatgcaaaaattattttttttgcggttttgattttgatgccccttactttaaaagcggtgtgagtcaggtggcagattataattttgttcctgatgcattttctttattctttatttaa

SEQ ID NO: 48503 - DNA, 567 bp, Neisseria meningitidis
atgtgtgcggttcaggtgggcggtccgtggctgagcctgtctgaagatgttgtctgtgtgccgcgagatatgtcgatgtcggcggaaaatatggctttggcggatgtttctgcggatatgctgcttttcccgcatactctggaaggcggtgttccttcgcaaatcctgtcggaagcgcaccggatattgaaaccgtgcggacgtttgatgctgacgggtttcaatccgtattcgctctggggattcagccgttggtttgacggcgaacgcctgccggaaaaacggttttgtctgccgctgcccgagttgaaaaggcagcttgcggatgtcggtttcgatattgaatttgggaaatttatggtgtatctgccgcccgtttcgtcgctcgggcaaatacgcttttggcggtttatggaaaaggcgggcgaccgttggtggccgcagtgtgccgcagtgtacggtttggttttggtcaaaagggcggcgggcgtaacgcccctgcccgcgtgggacgggtatttgggcggcaaagcccttgcggcgggtgcggcaaggattgcggattag

SEQ ID NO: 48504 - DNA, 966 bp, Neisseria meningitidis; identical to SEQ ID NO: 38346

SEQ ID NO: 48505 - DNA, 156 bp, Neisseria meningitidis
atggaaaaacgaaacacatacgccttcctgctcggtataggctcgctgctgggtctgttccatcccgcaaaaaccgccatccgccccaatcccgccgacgatctcaaaaacatcggcggcgattttcaacgcgccatagagaaagcgcgcaaatga

SEQ ID NO: 48506 - DNA, 159 bp, Neisseria meningitidis; identical to SEQ ID NO: 38499

SEQ ID NO: 48507 - DNA, 507 bp, Neisseria meningitidis; identical to SEQ ID NO: 38538

SEQ ID NO: 48508 - DNA, 954 bp, Neisseria meningitidis
atgaatcagaagaaagtagtcgtattggatgcggatactttacccggtcggacttttcacttcgatttcccacacgagcttgcggtttacggtacgacagatgctgcggaaacggcaggacgggtgcgcgacgcgcatattatcatcaccaataaagtgatgatttcagcggatatcattgcacacgctccgcaacttgaattgattgccgtcagtgcgaccggtgtgaacaatgtcgatattggggcggcgaaggcggcgggcgttgcggtatgcaatgtccgcgcctacggaaacgaatcggttgcggaacacgcctttatgctgatgattgcgttgatgcggaatttgcctgcctatcagcgtgatgttgcggcaggattatgggagaagtcgccgtttttctgccattacggcgcgccgattcgggatttgaacggtaaaacgctggcggttttcggacgtggcaatatcggacggacgcttgccggatacgcgcaggcattcggtatgggggtggtgtttgccgaacacaaacacgcgcccgacgtgcgcgaaggctatgtttcctttgaagatgcggtacagactgccgacgtgttgtcgctgcactgtccgctaaacgcccaaactgaaaatatgataggcgaaaacgaattgcggcagatgaagcctggcgcggttttaatcaattgtgggcgcggcgggctggtggatgaaaacgcgctgcttgccgcactcaaatacgggcagatcggtggggcgggtgtcgatgttttgacggaggagccgccaaggggcggcaatcccttgctgaatgcacgcctgcccaatctgattgttacgccgcataccgcgtgggcgagccgcgaggctgtggacaggctgtttgatatattgttggcgaacattcacgcctttgtgaaaggcgaggcacaaaatcgggtggtttga

SEQ ID NO: 48509 - DNA, 999 bp, Neisseria meningitidis; identical to SEQ ID NO: 38940

SEQ ID NO: 48510 - DNA, 579 bp, Neisseria meningitidis; identical to SEQ ID NO: 45203

SEQ ID NO: 48511 - DNA, 3486 bp, Neisseria meningitidis; identical to SEQ ID NO: 38863

SEQ ID NO: 48512 - DNA, 1689 bp, Neisseria meningitidis
atgctcaataaagaccaatttgcggacaaccattttatccgcaccttcatcgaagaagacctcaaaagcggcaaacacgaaaccatccaaacccgttttccgccggagcccaacggctacctgcacatcggacacgccaaatccatctgcctgaacttcggtttggcgtatatttacgacggcttgtgcaacctgcgttttgacgataccaaccccgaaaaagaaaacgacgaatacgtcaacgccatcaaagaagacgttgagtggctcggtttccattgggcgggcgagccgcgtttcgcttccaactatttcgaccagctttatgactacgccgtcggtttggttaaagacggcaaagcgtatgtcgatgatttgacgccagaagaaatgcgcgaataccgcggtacgctgaccgaagcaggcaaaaacagcccttatcgcgaccgcagtatcgaagaaaacctcgacctgttcacgcgcatgaaaaacggtgagttccccgacggcagcaaaaccctgcgcctgaaaatcgacatggcatccggcaacatcaatatgcgcgatccggtcatctaccgcatccgccgcgcccatcaccacaacaccggcgacaaatggtgcatctatccgatgtacgactacacgcattgtatttccgatgccatcgaaggcatcacgcattccttgtgtacgctcgaatttgaagcccatcgtccgctgtatgactgggtgttggacaacatccccgcgccgcacgccacacgtccgcgccaatacgagttttcacgcttggagcttttgtacaccattacctccaaacggaaattgaatcagttggttgtggaaaaacacgtttccggctgggacgatccgcgtatgccgaccatttccggtatgcgccgacgcggctacacgcccgaagggctgcgcctgtttgccaaacgcgccggtatttccaaatctgaaaacatcgtcgatatgagcgtgttggaaggcgcgattcgcgaagagttggaaaattccgccccacgcctgatggcggtgttgaacccgctcaaagtgaccctgaccaactttgaaaccggcagaacccaaagccgccgtgccgcgttccatccgaaccacgaggaaatgggcgagcgcgaagtacctatttcacaaaccatctatattgaagccgacgactttgccgaaaatccgcccaaaggcttcaaacgcctgattcccggcggcgaagtacgcttgcgccacggctatgtcatcaagtgcgatgaagtcgtcaaagacgaagcaggcaatgtggttgaactcaaatgcagcatcgaccacgacaccttgggcaaaaatccagaaggccgtaaagttaaaggcgtgattcattgggtttccgccgaacacgccgccgaaatcaaagtccgtctgtacgaccgcctctttaccgtcgagcgtcccgatgccgtgcgcggcgaagacggcgaatacctgccgttcaccgatttcctcaatccggaatccgtcaaggaaatcaccgcctacgccgaacctgccgccaaagatttgccggcagaaagccgttggcagttcgagcgtatcggctacttcgtaaccgaccgtaaagaccacggcaaagacacgccggtgtttaaccgcacggtcacgctgaaagattcttggcagcctaagtaa

SEQ ID NO: 48513 - DNA, 372 bp, Neisseria meningitidis; identical to SEQ ID NO: 39277

SEQ ID NO: 48514 - DNA, 513 bp, Neisseria meningitidis; identical to SEQ ID NO: 38230

SEQ ID NO: 48515 - DNA, 465 bp, Neisseria meningitidis; identical to SEQ ID NO: 38027

SEQ ID NO: 48516 - DNA, 843 bp, Neisseria meningitidis; identical to SEQ ID NO: 39439

SEQ ID NO: 48517 - DNA, 648 bp, Neisseria meningitidis; identical to SEQ ID NO: 38905

SEQ ID NO: 48518 - DNA, 756 bp, Neisseria meningitidis
atgaagtttgcccggttactctttctctgtgcggcactcgccggcactcaagcggcagctgccgaaatggttcaaatcgaaggcggcagctaccgcccgctttatctgaaaaaagataccggtctgattaaagtcaaaccgttcaaactggataaatatcccgttaccaatgccgagtttgccgaatttgtcaacagccacccccaatggcaaaaaggcaggatcggttccaaacaggcagaacccgcttacctgaagcattggatgaaaaacggcagccgcagctatgcgccgaaggcgggcgaattaaaacaaccggtaaccaatgtttcctggtttgccgccaacgcctattgcgccgcacaaggcaaacgcctgccgaccattgacgaatgggaatttgccggacttgcttccgccacgcagaaaaacggctcaaacgaacccggctacaaccgcactattctcgattggtatgccgacggcggacggaaaggcctgcacgatgtcggcaaaggccgcccgaactactggggcgtttatgatatgcacgggctgatttgggaatggacggaagatttcaacagcagcctgctttcttccggcaatgccaacgcgcaaatgttttgcagcggcgcgtctatcgggtcgagcgactcgtccaactatgccgccttcctccgctacggcatccgcaccagcctgcaatccaaatatgtcttgcacaacttgggcttccgttgcacaagccgataa

SEQ ID NO: 48519 - DNA, 1404 bp, Neisseria meningitidis
atggatactacattgaaaaccaccttgacttctgttgcagcagccttcgcattatccgcctgcaccatgattccccaatacgagcagcccaaagtcgaagttgccgaaacgttcaaaaacgataccgccgacagcggcatccgtgcggtcgatttaggttggcatgactattttgccgacccgcgcctgcaaaagctgatcgacatcgcactcgagcgcaataccagtttgcgtaccgccgtattgaacagcgaaatctaccgcaaacaatacatgattgagcgcaacaacctcctgcccacgcttgccgccaatgcgaacgactcgcgccaaggcagcttgagcggcggcaatgtaagcagcagctacaaagtcggactgggtgcggcatcttacgaactcgatttgttcgggcgtgtacgcagcagcagcgaggcggcactgcaaggctatttcgccagcaccgccaaccgcgatgcggcacatttgagcctgattgccaccgttgccaaagcctatttcaacgaacgttacgccgaagaagcgatgtctttggcgcaacgtgttttgaaaacgcgcgaggaaacctacaagctgtccgaattacgttacaaggcaggcgtgatttccgccgtcgccctacgtcagcaggaagccctaatcgaatctgccaaagccgattatgcccatgccgcgcgcagccgcgaacaggcgcgcaatgccttggcaaccttgattaaccaaccgatacccgaagacctgcctgccggtttgccgctggacaagcagttttttgttgaaaaactgccggccggtttgagttccgaagtattgctcgaccgtcccgatatccgtgctgccgaacacgcgctcaaacaggcaaacgccaatatcggtgcggcacgcgccgcctttttcccatccatccgcctgaccggaaccgtcggtacgggttctgccgaattgggtgggttgttcaaaagcggcacgggcgtttggtcgttcgcgccgtctattaccctgccgatttttacctggggtacgaacaaggcgaaccttgatgtagccaagctgcgccaacaggcacaaatcgttgcctatgaatccgccgtccaatccgcatttcaagacgtggcaaacgcattggcggcgcgcgagcagttggataaagcctatgacgctttaagcaaacaaagccgcgcctctaaagaagcgttgcgtttggtcggtctgcgttacaaacacggcgtatccggcgcgctcgacttgctcgatgcggaacgcagcagctattcggcggaaggtgcggctttgtcggcacaactgacccgcgccgaaaaccttgccgatttgtacaaggcactcggcggcggattgaaacgggatacccaaaccgacaaataa

SEQ ID NO: 48520 - DNA, 1005 bp, Neisseria meningitidis
atgagcaccttcttccggcaaaccgcccaagccatgattgccaagcacatcgactgcttcccactattgaagttggaccaggtaattgattggcagccgatcgaacaatacctgaaccgtcaaagaacccgttacctcagagaccaccgcggccgtcctgcctacccgctgttgtccatgttcaaagccgtcctgctcggacaatggcacagcctctccgttcccgaactcgaacacagcctcatcacccgcatcgacttcaacctgttttgccgtttcgacgaactgagcatccccgattacagcaccttatgccgttaccgcaactggctggcgcaagacgacaccctgtccgaattgctggaactgattaaccgccaactgaccgaaaaaggcctaaaaatagagaaagcatccgccgtcgttggcgccaccattattcaaaccgccggcagcaaacagcgccaggccatagaagtcgatgaagaaggacaagtcagcggccaaaccacaccgagtaaggacagcgatgcccgttggataaagaaaaacggcctctacaaactcggttacaaacaacatacccgtaccgatgcggaaggctatatcgagaaactgcacattacccccgccaatgcccatgagtgcaaacacctgccgccgttgttggaaggggtacctagaggtacgaccgtctatgccgacaaaggctacgacagtgcggaaaaccggcaacatctggaagaacatcagttgcaggacggcattatgcgcaaagcctgccgcaaccgtccgctgacggaagcgcaaaccaaacgcaaccggtatttatcgaagacccgttatgtggtcgaacagagcttcggtacgctgcaccgcaaattccgctatgcgcggtcaacctatttcggactgattaaagtgagtgcgcaaagccatctgaaggcgatgtgtttgaacctgttgaaagccgccaacaggctaagtgcgcccgctgccgcctaa

SEQ ID NO: 48521 - DNA, 1299 bp, Neisseria meningitidis; identical to SEQ ID NO: 38202

SEQ ID NO: 48522 - DNA, 543 bp, Neisseria meningitidis; identical to SEQ ID NO: 38476

SEQ ID NO: 48523 - DNA, 675 bp, Neisseria meningitidis
gtgcaggcggatttagcctatgccgccgaacgcattacccacgattatccgcaagcaaccggtgcaaacaacacaagcacagtaagcgattatttcagaaacatccgtgcgcattccatccaccctcgtgtgtcggtcggctacgatttcggcgactggaggatagcggcagattatgccagttacagaaaatggaaagaaagtaattcttctactaaaaaagttactgaagagataaaagacaactacaaagaaaccaaaacagaacatcaaggaaacggcagcttccacgccgcttcttctctcggcttatccgccatttacgatttcaaactcaacgataaattcaaaccctatatcggtgcgcgcgtcgcctacggacacgttagacatcaagttaattcggtcgacaaagaaactattactcttatctctaaaccaaagggaaactctccagggggaggccgtgtcgtatcaagcctgcccagcaaacctccctatcacgaaagcaacagtatcagcagcttgggtcttggtgtcatcgccggtgtcggtttcgacatcacgcccaagctgaccttggacaccggataccgctaccacaactggggacgcttgaaaaacacccgcttcaaaacccacgaagtctcattgggcatgcgctaccacttctga

SEQ ID NO: 48524 - DNA, 390 bp, Neisseria meningitidis; identical to SEQ ID NO: 39501

SEQ ID NO: 48525 - DNA, 1344 bp, Neisseria meningitidis; identical to SEQ ID NO: 38748

SEQ ID NO: 48526 - DNA, 1134 bp, Neisseria meningitidis
atgtttaaaaaattcaaaccggtactgttgtcattttttgcacttgtatttgccttttggctgggaacgggtattgcctatgagattaatccgcgttggtttttgagcgatacggcaactgaagtacctgaaaatccgaatgcttttgtggcgaaacttgcccgcctgttccgaaatgccgacagggcggttgtcatcgtgaaggaatcgatgaggacggaggaaagtcttgccgaaactgtggatgacggtccgttgcagtcggagaaggattatctcgcgctcgctatccggctcagtcgtttgaaagaaaaggcgaaatggtttcacgtaacggagcaggaacatggggaagaggtttggctggattactatatcggcgagggcggtttggttgcggtttcgcttttgcaacgctcgccggaagcgtttgttaatgccgaatatctgtatcggaacgatcgtccgttttctgtaaatgtgtacggcggaacggctcacggggaaaattatgaaacgacaggagaatatcgggttgtttggcaaccggacggttcggtatttgatgcggcagggcgcgggaaaatcggggaagatgtttatgagcattgcctcgggtgttatcagatggcccaggtatatttggcgaaataccgggatgtcgcgaatgatgagcagaaggtttgggacttccgcgaagagagcaaccggattgcatcggactcgcgcgattatgtgttttatcagaatatgcgggaattgatgccccgggggatgaaggcaaacagtcttgtggtcggctatgatgcggatggtctgccgcagaaagtctattggagtttcgacaatggaaaaaaacgccagagtttcgaatattatttgaaaaacggaaatctttttattgcacaatcttcgacggtagcattgaaagcggatggcgtaacggcggatatacagacctatcatgcgcaacagacgtggtatttggatggcgggcggattatccgcgaagagaaacagggagacagactgcctgattttcctttgaacttggaaaatttggaaaaagaggtgcgccgttatgcagaggctgcggcgagacgttcgggcggcaggcgcgacctttctcactga

SEQ ID NO: 48527 - DNA, 1248 bp, Neisseria meningitidis; identical to SEQ ID NO: 39122

SEQ ID NO: 48528 - DNA, 423 bp, Neisseria meningitidis; identical to SEQ ID NO: 38711

SEQ ID NO: 48529 - DNA, 1221 bp, Neisseria meningitidis
ttgatcggctttatttatatcgtattaaaaatattcggaattggaataatggcaacacacggagacgaagtgaaaattcaaaacagacaagaagccgatagcgcaaaagccaaacgcaaacgccgcctgacggcattgacgctgctgttcgcgcttgccgccgcagccgccgggtcggcgttttttttatggtggcagcacgaagaggaaacggaagacgcttatgttgccggacgcgtggttcaggttacgccgcaaaagggcggtacggtgcggaaggttttgcacgacgatacggatgccgtgaaaaaaggcgacgtgctggcggtattggacgacgataatgatgtgctggcttacgagcgggcaaaaaacgagctggttcaggcggtgcggcaaaaccgccggcaaaatgccgccacttcgcaggcgggggcgcaggttgccttgcgccgggcggatttggcacgcgcacaggatgatttgcgccgccggtctgctttggcggaatcgggcgcggtgtccgccgaagagctggcacacgcccgtgcggcagtgtctcaggctcaggcggcagttaaggcggctttggcggaagaatcttcggcacgtgcggctttgggcggtcaggtttctttgcgcgaacagccggcggttcagacggcaatcggcaggttgaaagatgcgtggttgaaccttcagcggacgcaaatccgcgcgtcggcggacggtcaggtggcgaagcgttcggtgcaggtcgggcagcaggtggcggcaggcgcgccgctgatggcggtggtgccgctgtcggatgtgtgggtggatgctaattttaaagagacgcagttgcggcatatgaaaatcggacagcctgccgagctggtgtccgatttgtacggcaaacaaattgtttatcgcggcagggtggcaggtttttcggcaggtacgggcagcgcgttttcgctgattccggcgcaaaacgcaacgggcaactggattaaagtggtgcagcgcgtccccgtccgtatcgtgctgaaccgcgaagatgtggacaggcatccgttgcgtatcggtttgtcgatgacggttaaagtggatacttccgccgcaggcgcgcctgtttcaaaaacgccgggtgcggcattgccggaaatggaaagtaccgactggtcggaagtcgatcggacggtcgatgaaatcctcgggcaatccgcgccctga

SEQ ID NO: 48530 - DNA, 510 bp, Neisseria meningitidis; identical to SEQ ID NO: 39512

SEQ ID NO: 48531 - DNA, 231 bp, Neisseria meningitidis; identical to SEQ ID NO: 38834

SEQ ID NO: 48532 - DNA, 402 bp, Neisseria meningitidis
gtgaagcgcgaatggttcgtcatcgatgcccaagacaaagtcttgggtcgcgttgcggccgaagtcgccagccgtctgcgtggcaaacacaaacctgaatacaccccccacgtcgataccggcgattacatcattgttatcaatgcggacaaactgcgtgtaaccggtgccaaattcgaagataaaaaatacttccgccattccggtttcccaggcggtatctacgaacgcactttccgcgaaatgcaagagcaattcccgggccgcgctttggaacaagctgtaaaaggtatgctgcccaaaggtcctttgggttacgccatgattaaaaaactgaaagtgtatgcgggtgcggaacacgcccatgctgcgcaacaacccaaagttttggaactgaaataa

SEQ ID NO: 48533 - DNA, 1413 bp, Neisseria meningitidis; identical to SEQ ID NO: 38542

SEQ ID NO: 48534 - DNA, 1512 bp, Neisseria meningitidis; identical to SEQ ID NO: 39641

SEQ ID NO: 48535 - DNA, 1200 bp, Neisseria meningitidis
atgtccgaccaactcattcttgttctgaactgcggcagttcatcgctcaaaggtgccgttatcgaccgcaaaagcggcagcgtcgtcctaagctgcctcggcgaacgcctgaccacgcccgaagccgtcattacgttcaacaaagacggcaacaaacgccaagttcccctgagcggccgaaactgccacgccggcgcggtgggtatgttattgaacgaactggaaaaacacggactgcacgaccgcatcgaagccatcggccaccgcatcgcccacggcggagaaaaatacagcgagtctgttttgatcgaccaagccgtcatggacgaactcaatgcctgcattccgcttgcaccgctgcacaaccccgccaacatcagcggcatcctcgccgcgcaggaacatttccccggcctgtccaatgtcggcgtgatggatacttcgttccaccaaactatgcccgaacgtgcctacacttatgccgtgccgcgcgagttgcgtaaaaaatacgccttccgccgctacggtttccacggtaccagtatgcgttacgtcgcccccgaagccgcgcggattctaggcaaacctctggaagacatccgcatgattattgcccacctcggcaacggcgcatccattaccgccatcaaaaacggcaaatccgtcgataccagtatgggtttcacgccgatcgaaggtttggtaatgggtacacgttgcggcgacatcgatccgggcgtatacagctatctgacttcccacgccgggatggatgttgcccaagtggatgaaatgctgaacaaaaaatcaggtttgctcggtatttccgaactttccaacgactgccgcaccctcgaaatcgccgccgacgaaggccacgaaggcgcgcgcctcgccctcgaagtcatgacctaccgcctcgccaaatacatcgcttcgatggctgtggcctgcggcggcgttgacgcactcgtgttcaccggcggtattggcgaaaactcacgtaatatccgagctaaaaccgtttcctatcttgatttcttgggtctgcacatcgacactaaagccaatatggacaaacgctacggcaattcgggtattatcagcccgaccgattcttctccggctgttttggttgtcccgaccaatgaagaactgatgattgcctgcgacactgccgaacttgtcggcatcttgtag

SEQ ID NO: 48536 - DNA, 435 bp, Neisseria meningitidis; identical to SEQ ID NO: 43084

SEQ ID NO: 48537 - DNA, 795 bp, Neisseria meningitidis; identical to SEQ ID NO: 45478

SEQ ID NO: 48538 - DNA, 1419 bp, Neisseria meningitidis; identical to SEQ ID NO: 45619

SEQ ID NO: 48539 - DNA, 606 bp, Neisseria meningitidis; identical to SEQ ID NO: 45264

SEQ ID NO: 48540 - DNA, 969 bp, Neisseria meningitidis; identical to SEQ ID NO: 39457

SEQ ID NO: 48541 - DNA, 3834 bp, Neisseria meningitidis
atgaccacgactaccgcccctcagcgtattcgggaaatcccctacaactatacttcctacaccgaccgcgaaatcgtcatccgattattgggcgacgaggcgtggcagattctgcaagacttgcgcggacagcgtaaaaccggacgttcggcgcggatgctgtttgaagtgttgggcgatatttgggtagttgtgcgcaatccatatctggtcgatgacttgttggagcacccgaaacgccgcaccgcgctggtgcgggaaatgcgccaccgtttgaacgaaatccgcaaacgccgcgacgacaatcggcaagtggatgtcttggttgcggcggcggacaaagcggtcgggcgttttgacggcagctttgacgaaacgcgccaaaagcggcagcagattttggagcgtttgagcaaaatcaccaagccgcacaatattatgttcgacgggctggcgcgggtaacgcacgttaccgatgcgaccgactggcgcgtggagtatccgtttgtggtcgtcaatcccgacacggaggcggaaatcgcgcctttggtgtgcgccttaatcgagctggatttggtcattattccgcgcggcggcggcacgggttataccggcggcgcgattcctttggacgcgatgagcgcggtcatcaatacggaaaagctggataaacataatggcgtggaatttgtcgaactggcgggcttggacggcaaacatccgattatccggtgcggcgcgggcgtggttacgcggcgggtggaagaaaccgcgcatcaggcgggtttggtattcgccgtcgatccgacttccgccgatgcgtcctgcgtgggcggcaatgtggcgatgaacgcgggcggcaaaaaagccgtactgtgggggacggcgttggacaatctcgcctactggcagatggtcaaccctcagggcgaatggctgcgcatcgagcgcgtgcgccataatttcggcaaaatccacgacgaagaaaccgccgtgttcgacgttcacacgctggattcagacggcctcaatatcgttaaaaccgaacgtttggaaatccccggtcacaaattccgcaaagtcggtttgggcaaagacgttaccgacaaattcttgagcggcctgcccggcgtgcaaaaagaaggtacggacggcatcatcaccggcgtcgccttcgtgttgcacaaaatgccgaaatacacgcgcaccgtgtgtatggagtttttcggtacggtcgccaccgccacgccatctattgtcgaaatccgcgactttttgcttgcccatgaaagcgtgcggctggcgggtttggaacatttggactggcgttatgtccgcgccgtcggctacgccaccaaagcggcgggcaagggacggccgaaaatggtcttgctggcggatgtggtttcagacgacgaagccgccgtgcaggcagccgccgaacacatctgcgaactcgcccgcgcccgcgacggcgaaggctttatcgccgtgtcgcccgaagcgcgcaaaaccttctggctcgaccgcagccgcaccgccgccatcgccaaacacaccaacgcctttaaaatcaacgaagacgtggtgattccgctggagcggctcggcgagtattcagacggcatcgaacgcatcaacatcgagctttccatccaaaacaaactcaaactctgtgccgcattggagcaatatctttcgggcaaactccccatcgacaaaatgggaaccgacctgccgaccgccgaactattgggcgaacgcggcaaacacgccctggcccacgtttccgccgtcaaagcgcgttgggactggttgctcgccaatctcgacacgccgcttgccgactacaagacccgctacggcgcagccgtccacgccgcgcccgaagccaaagacgatgaaagttgctttattgccttccgcgatttccgcctgcgcgtgtctgtcaaagcagacgtaatgaagccgctttctgaaatcttcagcggcaaaaccgataccaaaattatccaaggcttgggcaaaatccacgccaaaaccgtacgcagccgcgtcttcgtcgccctgcatatgcacgccggcgacggcaatgtccacaccaatattccggtcaattcagacgatgccgaaatgcttcagacagcctatcgttcggtcgaacgcattatgaaaatcgcccgttcgcttaacggcgtgatttcgggcgaacacggcatcggcatcaccaagctcgaatttttaagcgatgaagaaatgcagccgttttggaactacaaaaaccaagtcgatcccaaacacaccttcaaccgccacaaactgatgaaaggatcggacttacgcaacgcctacacgccgtcgttcgagcttttgggtgcggaatcgctgattatggaaaaatcagatctcggcacgattgccgattccgtcaaagactgcctgcgctgcggcaaatgcaaacccgtctgctctactcacgttccgcgtgccaacctgctgtacagtccgcgcaacaaaatcctcggcgtgggcttgctgaccgaagccttcttatacgaagaacaaacccgccgcggcgtttccgtcaaacactttgaagaactcatggacatcggcgaccactgcaccgtgtgccaccgctgcgtcaaaccctgccccgtcaacatcgacttcggcgacgtaaccgtagccgtccgcaactaccttgccgattccggccacaaacgatttgcgcctgccgcagctatgggtatggcgtttttgaacgccaccggcccgaaaaccatcaaagcccttcgcgccgccatgatacagaccggcttcccagcgcaaaactttgcctacaaaatcggcaagcttcttccgatcggcacgaaaaagcaaaaagccgaacccaaggcaaccgtcggcaaagccccaattaaagaacaggttatccatttcatcaaccgtcctttgccgaaaagcgtacccgccaaaacaccgcgctccttattgggcatcgaagacggcaaaagcatccccatcatccgcaaccccgccgcgcccgaagatgccgaagccgtgttctacttcccgggttgcggttcggaacgcctgttcagccaaatcggacttgccgttcaagccatgctctggcacgtcggcgtacaaaccgtcctgccgcccggctatatgtgttgcggctatccgcaagacgcgggcggcaacaaggctaaagccgaagaaatgagcaccaacaaccgcgtggctttccaccgtatggcaaacaccctcaactacctcgacattaagaccgtcgttgtcagttgcggcacttgttacgaccagctcgaaaaataccgctttgaagaaatcttccccggctgccgcatcatcgacatccacgaatacctgctcgaaaaaggcgtgaaactcgacggcgtgcaaggtcagcaatacctctaccacgacccctgccacacccccatcaaaaccatgaacgccacccaaatggccagcagcctgatggggcagaaagtcgtcttaagcgaccgctgctgcggcgagtccggtatgttcgccgtcaaacgacccgatatcgccacccaagtcaaattccgcaaacaagaggaaatcgagaaaaacctcaaagagctgccgcagggtgaacccgtcaaaatgcttacttcctgcccagcctgcctgcaaggcttgagccgctacaccgacgacaacaatatgcctgccgactacatcgtcatcgaaatggcgaaacacatcctcggcgaaaactggctagacgagtttgtgaaaaaagccaacaacggcggcgtggaaaaagtattgctgtaa

SEQ ID NO: 48542 - DNA, 1305 bp, Neisseria meningitidis
atgaaaaaacacatatgggcggcatctttgctgccgacatccctatcggcagaacctttaaactggtggaagccttattccgccgtcaattcgggcgataccgcctgggtgatgactgcggctgccttggtactgttgatgacgcttcccgggctggctttattctacggcggtatggtgcggaaaaaaaacctgctctcgacgatgatgcacagcttttccatcgcgacattggtgggaatcctttgggtcgccgtcggctattctttagcgttcacgccgggaaatgcctttatcggcggtttggggcgcgtatttttaagcgggatgcagatagacgctgccgcacagatgctgaccgtgtcgcccaatgcgccgactgttcccgaaccggtatttatgttttttcagatgacgtttgccattatttcgaccgccattattaccggcgcgtttgccgaacggatgaaatattcggcaatgatgctgttttcgggcatatggtttttattggtttatgtgccgggcgcgcattgggtctggggcggcggctttatgagcaagggcggcgtattggattatgccggcggtacggtggtgcacatcaatgccggtatcgcgggactcgtcgccgccttggttttgggcaggcgcataggctacgggcgcgaggcgatgcctccgcacaatatggcgatgacactgatcggcgcggcaatgttgtggttcggctggttcggctttaacgccggatcggcgcttgcggcagacgcggcggcgggtatggcgatggcggtaacgcaggtgtcggccgtattcggcgcggcaggctggcttgcctgcgaaaaaatagcgggacacaaaccttccgctttggggctggcttccggcgcggtttccggtctggtcggcatcacccctgccgccggctttaccggcccgtcgggcgcggccgccatcggtatattgactgccgccgcgtgctttgtgtccgtcaccgtcgtcaaacacaaattgcgttacgatgattctttggacgctttcggcatacacggattcggcgggctggtgggcggaatattgaccggcatctttttcgacaaccgcattttcggcggggatgcggcagtttggcagcagttgtggatacaggtaaaagacgggttcgttatggcggcatacagcgggctgatgagttgggcgattttgaaggtcgtggggaaaatctgcggcggcctgcgcgtcggcaaggatgtcgaacgcgaaggtttggatctgaatatccacggcgaacgcgtggaataa

SEQ ID NO: 48543 - DNA, 597 bp, Neisseria meningitidis
atgcgcaaacagaacactttgacgggaatcccgacttctgacggacagagggggtttgcactgtttatcgtgctgatggtgatgatcgtcgtggcttttttggttgtaactgccgcgcagtcttacaataccgagcagcggatcagtgccaacgaatcagacaggaaattggctttgtctttggccgaggcggctttgcgggaaggcgaacttcaggttttggatttggaatatgatacggacagtaaggttacatttagcgaaaactgtggaaaaggtctgtgtaccgcagtgaatgtgcggacaaataatactggtaatgaagaggcttttgacaatatcgtggtgcaaggcaatcccaccgttgaggcggtgaagcgtttttgccctgcaaattctaccgacctgtgcattgacaagaaagggatggaatataagaaaggcacgagaagcgtcagcaaaccaccacgctatattatcgaatatttgggcgtgaagaacggagaaaatgtttatcgggttactgccaaggcttggggtaagaatgccaataccgtggtcgtccttcaatcttatgtaagcaataatgatgagtaa

SEQ ID NO: 48544 - DNA, 1215 bp, Neisseria meningitidis; identical to SEQ ID NO: 45657

SEQ ID NO: 48545 - DNA, 1152 bp, Neisseria meningitidis; identical to SEQ ID NO: 39535

SEQ ID NO: 48546 - DNA, 4179 bp, Neisseria meningitidis; identical to SEQ ID NO: 38984

SEQ ID NO: 48547 - DNA, 1860 bp, Neisseria meningitidis; identical to SEQ ID NO: 38116

SEQ ID NO: 48548 - DNA, 1008 bp, Neisseria meningitidis
atgagcaccttcttccagcaaaccgcacaagccatgattgccaaacacatcgaccgcttcccactattgaagttggatcaggtgattgattggcaaccgatcgaacagtacctgaatcgtcaaagaacccgttaccttcgagaccaccgaggccgtcccgcctatcccctgttatccatgttcaaagccgtcctgctcggacaatggcacagcctttccgatcccgaactcgaacacagcctcatcacccgcatcgatttcaacctgttttgtcgttttgacgaactgagcatccccgattacagcaccttatgccgctaccgtaactggctggcgcaagacaacaccctgtccgaattgctggaactgattaaccgacaactgaccgaaaaaaacctaaaaatagagaaagcatccgccgccgtcattgacgccaccattattcagaccgccggcagcgaacagcgtcaggccatagaagtcgatgaagagggacaagtcagcggtcaaaccacactgagtaaggacaaaaatgcccgttggacaaagaaaaacagcctctacaaactcggttacaaacaacatacccgtaccgatgcggaaggctatatcgagaaactgtacatcactcccaccaatgcccatgagtgcacacacctgtcgccgttgttggaaggactgcccaaaggtacgaccgtctatgccgacaaaggctacgacagcaaggaaaaccggcaacacctgaaagaacatcggttgcagaacggcattatgcgcaaagcctgccgcaaccgtccgctgacggaaacgcaaaccaaacgtaaccgatatttgtcgaaaacccgttatgtggtcgaacaaagctttggtacgctgcaccgtaaattccgctacgcccgggcagcctatttcgggctgattaaagtgagtgcgcaaagccatctgaaggcgatgtgtttaaacctgttgaaagcagctaacaggctaagtgtgcccgctgccgcctaa

SEQ ID NO: 48549 - DNA, 630 bp, Neisseria meningitidis; identical to SEQ ID NO: 38660

SEQ ID NO: 48550 - DNA, 966 bp, Neisseria meningitidis
atgagctacacgcaactgacccaaggcgaacgataccacatccaatacctgtcccgccactgcaccgtcaccgaaatcgccaaacagcttaaccgccacaaaagcaccatcagccgcgaaatcagacggcaccgcacccaagggcagcaatacagcgccgaaaaagcccagcggcaaagccagactatcaaacagcgtaagcgacaaccctataagctcgattcgcagctgattcagcacatcgacacccttatccgccgcaaactcagtcccgaacaagtatgcgcctacctgtgcaaacaccaccggatcactctccaccacagcaccatttaccgctaccttcgccaagacaaaagcaacggcagcacgttgtggcaacatctcagaatatgcagcaaaccctaccgcaaacgctacggcagcacatggaccagaggcaaagtccccaaccgtgtcggcatagaaaaccgacccgctatcgtcgaccagaaatcccgtatcggcgattgggaagccgacaccattgtcggcaaaggacagaaaagcgcattattgaccttggtcgaacgcgttacccgctacaccatcatctgcaaattggatagcctcaaagccgaagacactgcccgggcagctgttagggcattaaaggcacataaagacagggtgcacaccattaccatggataacggcaaagagttctaccaacacaccaaaataaccaaagcattgaaagcggagacttatttttgtcgcccttaccattcttgggagaaagggctgaatgagaacaccaacggactcatccggcaatacttccccaaacaaaccgatttccgtaacatcagtgatcgggagatacgcagggttcaagatgagttgaaccaccgaccaagaaaaacacttggctacgaaacgccaagtgttttattcttgaatctgttccaaccactaatacactag

SEQ ID NO: 48551 - DNA, 531 bp, Neisseria meningitidis
atgaaattcgtcagcgaccttttgtccgtcatcctgtttttcgccacctataccgttaccaaaaacatgattgccgcaacggcggtcgcattggttgccggtgtggttcaggcggcttttctgtattggaaatataaaaagctggatacgatgcagtgggtcggattggtgctgattgtggtattcggcggcgcaaccattgttttgggcgacagccgcttcattatgtggaagccgagcgttttgttttggctgggtgcgctgttcctgtggggcagccacctcgccggtaaaaacggcttgaaggcgagtatcggcagggagattcagcttccggatgccgtatgggcgaaattgacgtatatgtgggtcggtttcctgatttttatgggtatcgccaactggtttgtgtttacccggttcgagtcgcaatgggtcaactataaaatgttcggctcgactgcactgatgcttgttttctttattattcagggtatttatctgagtacctgtctgaaaaaggaggattga

SEQ ID NO: 48552 - DNA, 1404 bp, Neisseria meningitidis; identical to SEQ ID NO: 44608

SEQ ID NO: 48553 - DNA, 678 bp, Neisseria meningitidis; identical to SEQ ID NO: 38272

SEQ ID NO: 48554 - DNA, 738 bp, Neisseria meningitidis; identical to SEQ ID NO: 38635

SEQ ID NO: 48555 - DNA, 129 bp, Neisseria meningitidis
atggattttaggtttcatgcaggctacagcttgctgcggcggcggtataaaagtatttttagtgatttaccgtttttggtaattttgcccgacggggttaaaaatacagttgctactcttgctgcatga

SEQ ID NO: 48556 - DNA, 993 bp, Neisseria meningitidis; identical to SEQ ID NO: 38854

SEQ ID NO: 48557 - DNA, 357 bp, Neisseria meningitidis; identical to SEQ ID NO: 39132

SEQ ID NO: 48558 - DNA, 372 bp, Neisseria meningitidis; identical to SEQ ID NO: 36753

SEQ ID NO: 48559 - DNA, 717 bp, Neisseria meningitidis; identical to SEQ ID NO: 39647

SEQ ID NO: 48560 - DNA, 321 bp, Neisseria meningitidis; identical to SEQ ID NO: 41873

SEQ ID NO: 48561 - DNA, 759 bp, Neisseria meningitidis; identical to SEQ ID NO: 38830

SEQ ID NO: 48562 - DNA, 915 bp, Neisseria meningitidis; identical to SEQ ID NO: 39506

SEQ ID NO: 48563 - DNA, 1596 bp, Neisseria meningitidis
atgtcccaagaaatcctcgaccaagtgcgccgccgccgcacgtttgccatcatctcccaccctgacgcaggtaaaaccacgttgactgaaaaactcttgctgttttcaggtgcgattcaaagcgcgggtacggtaaaaggcaaaaaaaccggcaaattcgccacttccgactggatggaaatcgagaagcagcgcggcatttccgtggcatcaagcgtgatgcagttcgactacaaagaccacaccgtcaacctcttggacacgccgggacaccaagacttctccgaagacacctaccgcgttttaaccgccgtggacagcgcattaatggtcatcgacgcggcaaaaggcgtggaagcgcaaaccatcaagctcttaaacgtctgccgcctgcgcgatacgccgattgttacgtttatgaacaaatacgaccgcgaagtgcgcgattcgctggaactcttggacgaagtggaaaacatcctgcaaatccgctgcgcgcccgttacctggccgatcggtatgggcaaaaacttcaaaggcgtataccacatcctgaacgacgaaatctatctctttgaagcgggcggcgaacgcctgccgcacgagttcgacatcatcaaaggcatagaaaatcccgaattggaacaacgctttccattggaaatccaacagttgcgcgacgaaatcgaattggtgcaggcggcttccaacgagttcaatctcgacgaattcctcgccggcgaactcacgcccgtattcttcggctctgcgattaacaacttcggtattcaggaaatcctcaattcattgattgaatgggcgcccgcgccgaaaccacgcgatgcgaccgtgcgtatggtcgagccggacgagccgaagttttccggatttatcttcaaaatccaagccaatatggacccgaaacaccgcgaccgtattgccttcttgcgcgtctgctccggcaaattcgagcgcggcatgaaaatgaaacacctgcgtatcaaccgcgaaatcgccgcctccagcgtggtaaccttcatgtcccacgaccgcgagctggttgaagaagcctacgccggcgacattatcggtatcccaaaccacggcaacatccaaatcggcgacagcttctccgaaggcgaacaactgacgtttaccggcatcccattcttcgcgcccgaactgttccgcagcgttcgcatcaaaaacccgctgaaaatcaagcaactgcaaaaaggtttgcaacagcttggcgaagaaggtgcggtgcaggtgttcaaaccgatgagcggcgcggatttgattttgggcgcggtcggcgtgttgcaatttgaagtcgttacctcgcggctggccaacgaatacggcgtagaagccgtgttcgacagcgcatccatctggtcggcgcgctgggtatcgtgcgacgacaagaaaaaactggcggaatttgaaaaagccaatgcaggcaacctcgccatcgacgcgggcggcaacctcgcctacctcgcccctaaccgcgtgaatctgggactcacgcaagaacgctggccggacatcgtgttccacgaaacgcgcgaacattcggtcaaactttag

SEQ ID NO: 48564 - DNA, 426 bp, Neisseria meningitidis; identical to SEQ ID NO: 39813

SEQ ID NO: 48565 - DNA, 120 bp, Neisseria meningitidis; identical to SEQ ID NO: 38409

SEQ ID NO: 48566 - DNA, 1815 bp, Neisseria meningitidis
atgcccgctgaaacgaccgtatccggcgcgcaccccaccgccaaactgccgatttacatcctgccctgcttcctttggataggcatcgtcccctttacctttgcgctcaggctgcaaccgtcgcccgacttttaccacgatgccgccgccgcagccggcctgattgtcctgttgttcctcacggcaggaaaaaagctgtttgatgtcaaaatcccacctatcagcttccttctgtttgcaatggcggcgttttggtatcttcaggcacgcctgatgaacctgatttaccccggtatgaacgacatcgtctcttggattttcatcttgctcgccgtcagcgcgtgggcctgcaagagtttggtcgcacactacggacaagaacgcatcgttaccctgcttgcctggtcgctgcttatcggctccctgcttcaatcctgcatcgtcgtcatccagtttgccggctgggaagacacccccatgcttcaaaacattattgtttacagcgggcaaggcgtaatcggacacatcggacagcgcaacaacctcggacactacctgatgtggggcatactcgccgccgcctacctcaacggacaacgaaaaatcccgcccgccctcggcgcaatctgcctgattatgcagaccgccgttttaggtttggtcaattcgcgcaccatcttgacctacatagccgccatcgccctcatccttcccttctggtatttccgttcggacaaatccaacaggcggacgatgctcggcatagccgcagccgtattccttaccgcgctgttccaattttccatgaacaccattctggaaacctttaccggcatccgctacgaaactgccgtcgaacgcgttgccaacggcggtttcacagacttgccgcgccaaatcgaatggaataaagcccttgccgccttccagtccgccccgatattcgggcacggctggaacagttttgcccaacaaaccttcctcatcaatgccgaacaacacaacatacacgacaacctcctcagcaacttgtttacccattcccacaacatcgtcctccaactccttgcagagatgggaatcagcggcacgcttctggttgccgcaaccctgctgacgggcattgccaggctgctgaaacaccccctgacccccgcatcgcttttcctgatctgcacgcttgccgtcagtatgtgccacagtatgctcgaatatcctttgtggtatgtctatttcctcatccccttcggactgatgctcttcctgtcccccgcagaggcttcagacggcatcgccttcaaaaaagccgccaatctcggcatactgaccgcctccgccgccatattcgcaggattgctgcacttggactggacatacacccggctggttaacgccttttcccccgccactgacgacagtgccaaaaccctcaaccggaaaatcaacgagttgcgctatatttccgcaaacagtccgatgctgtccttttatgccgacttctccctcgtaaacttcgccctgccggaataccccgaaacccagacttgggcggaagaagcaaccctcaaagcactaaaataccgcccctactccgccacctaccgcatcgccctctacctgatgcggcaaggcaaagttgcagaagcaaaacaatggatgcgggcgacacagtcctattacccctacctgatgccccgatacgccgacgaaatccgcaaactgcccgtatgggcgccgctgttgcccgaactgctcaaagactgcaaagccttcgccgccgcgcccggccatccggaagcaaaaccctgcaaatga

SEQ ID NO: 48567 - DNA, 1041 bp, Neisseria meningitidis; identical to SEQ ID NO: 38687

SEQ ID NO: 48568 - DNA, 519 bp, Neisseria meningitidis; identical to SEQ ID NO: 39562

SEQ ID NO: 48569 - DNA, 780 bp, Neisseria meningitidis; identical to SEQ ID NO: 39372

SEQ ID NO: 48570 - DNA, 1149 bp, Neisseria meningitidis
atgcccctccctctcccctctcccgaagcacggcaatcctcgctcaaactgcaaaccctcattgccgaaaaaatcggcaaacacggcaactggattccattttcacgttttatggaattggttttatacgctccgcaatacggctactacaccggcggcagccataaaatcggcaataccggggattttattaccgcaccgaccctcacctctctgtttgcacagacactggcacgccaacttcaagaacttctatcccaaacggcgggcaatatctatgaattcggcgcgggaaccggacagcttgccgccgatttgttgggcagcatttcggacggcatcagccgttactatattattgaaatatcgccggagctggcagcacgtcagaaaaacctgattcaagcccgcgcaccggaagcatctcaaaaagttgtccacttgaccacacttcccgaagcgtttgacggcatcatcatcggcaacgaagtactcgatgccatgcctgtcgaaatcgtccgtaaagatgaaggcggctcattcgagcatgtcggcgtttgcacggacaacggccgtttcgcctattctgcaagacccttgcacgacccgtcgctttccacctcggcttccctctattttcctcaaacagattatccctacaccagcgaactacatccgcaacaatatgcctttatccgcacccttgcctcaagactcgaacacggctgcatgatattcatcgactacggttttgatgcagcgcagtattaccacccgcaacgcaatcaaggtactctaatcggacactaccgacatcacgttatccacaatccttttgacttcatcggattggccgacctgaccgcgcatgtcaactttaccgacattgcccaagccgggacggatgccggattagatttgataggttaccttccccaatcccatttcttattgaacctgggcattaccgagctattggcacagacggggaaaacgaattcggcagcctatatccgtgaagctgctgccgttcagaaactgattgaccagcacgaaatgggcgaactgtttaaagtcatcgcattcggaaaaaatatcggcatcgactgggcaggattccgcttcggcgacatctgccacaaactctaa

SEQ ID NO: 48571 - DNA, 903 bp, Neisseria meningitidis
atggacagcctgatgacgttgctttcggtattgataccgatgtttgccggattttttatccgtgtgcccaagccttacctgcccgctttggataaggtgctatcggtcttggtgtatgctgtgctgctgctgatcggcgtctcgttgtcgcgcgtggaggatttgggttcgcggttggacgatatggcgttgacggttctgtggctgtttgtttgtacggtcggggcgaacctgcttgctttggcagtgttgggaaagttattcccgtggcggataaaggggaaagggaagggcgtttcggtcggtgtgtcgggcagtgtggggcagctcggatgcgtgctgctcggatttgcatccggcaaactgatgcgcgatatttggatgccgtctgaaaacgcgggtatgtattgtctgatgctgctggtgctcctcatcggcgtacagctcaaaagcagcggcgtatcgttgcggcaggttttggtcaaccgcaggggtattcggttgtcggtctggtttatgctttcatctctttcaggcgggctgctgtttgccgcatcggcagacggtgtgtcgtgggtgaaaggtttggcgatggcttccggcttcggttggtattccctctcgggtttggtgatgaccgaggcttacggcgcggtatggggcagtatcgcgcttttgaacgatttggcacgagagctgttcgcgctggcatttattccgctgctgatgaagcgttttcccgatgcggcagtgggggtcggcggcgcgaccagtgtggatttcacattgcccgtgattcggggtgcgggcggcttggaagccgtaccggtagcggtcagcttcggcgtggtggtcaatatcgccgctccgtttctgatggtggtgttttccgctttgggctga

SEQ ID NO: 48572 - DNA, 1542 bp, Neisseria meningitidis; identical to SEQ ID NO: 38465

SEQ ID NO: 48573 - DNA, 1887 bp, Neisseria meningitidis; identical to SEQ ID NO: 38970

SEQ ID NO: 48574 - DNA, 432 bp, Neisseria meningitidis
atggatatccaaaccatcctcgaaaaaaccctgcccggcctgggctacgaactggtcgatttcgaactgaccgcgcaaggaacattgcgcgtgttcatcgacaaagaaggcggcattaccgtcgaagactgcgcaaccgtcagcaaccatttgagccgcgtcttcatggttgaagacatcgactacaaaaacctggaaatttccagccccggactcgaccgtcccttgaaaaaagccgccgacttcgtgcgctttgccggtcagaatgccaaaatcaaaacccgcctgccgatagacggtcagaaaaactttatcggtaaaatcgaaggctgcgaaaatgataccgttaccatatccttcgacggcaaaaccgtacaaatcgaattgggcaacatcgacaaagcccgtctgcgccccgaattcaaattctaa

SEQ ID NO: 48575 - DNA, 966 bp, Neisseria meningitidis; identical to SEQ ID NO: 39688

SEQ ID NO: 48576 - DNA, 1023 bp, Neisseria meningitidis
ttgagttaccgcgatgcaggtgtcgatatcgacgcaggcgaccaactggtcgaaaacatcaaaccgtttgccaaacgcaccatgcgtccggaagtattgggggatttgggcggttttggcgcattggtcgaaatcggcaagaaatataaaaatcccgtattggtcagcggtacggacggcgtgggtaccaagctcaaacttgccttcgattgggataaacacgatacggtgggcatcgaccttgttgcaatgagtgtcaacgatattttggttcaaggagcagaacctctgtttttcttggattatttcgcctgcggcaaattggatgttccgcgcgcaaccgatgtcatcaaaggcattgcacaaggttgcgaagaatccggctgcgccctgattggcggggaaactgccgaaatgccgggtatgtatcccgtcggagaatacgatttggcgggttttgccgtcggcgtagtggaaaaagagaatgtcattaccggccgcagcatcggcgcgggcgatgtggtattgggtttggcttccaacggcgcacattcaaacggctattcccttatccgtaaaatcatcgaacgcgacaatcccgatttggatgccgagtttgataatggcaaaaccttgcgtgaggctgttattgcgccgacccgtctgtatgtgaaaccgattcttgccgctttggaaaaatttaccattaaaggtatggcacacattaccggcggcggcattaccgaaaacgtgccgcgcgtgttgcctgaaaacacggttgcacaaatcgatgctaaatcgtgggaattgcccaagctcttccaatggcttcaaaaggcgggcaatgtggaaacccaagaaatgtaccgaacctttaactgcggcatcggcatggtcgttattgttgctgccgaagatgccgatgcggttcagggtctcttgggtgaacaaggtgaaacagtttaccgtttaggtttgatccgtgagcgtcagggagacgagcatcaaacccaggttgcctga

SEQ ID NO: 48577 - DNA, 1296 bp, Neisseria meningitidis; identical to SEQ ID NO: 39533

SEQ ID NO: 48578 - DNA, 669 bp, Neisseria meningitidis; identical to SEQ ID NO: 39796

SEQ ID NO: 48579 - DNA, 1527 bp, Neisseria meningitidis; identical to SEQ ID NO: 40054

SEQ ID NO: 48580 - DNA, 738 bp, Neisseria meningitidis; identical to SEQ ID NO: 39092

SEQ ID NO: 48581 - DNA, 510 bp, Neisseria meningitidis; identical to SEQ ID NO: 42226

SEQ ID NO: 48582 - DNA, 873 bp, Neisseria meningitidis; identical to SEQ ID NO: 38119

SEQ ID NO: 48583 - DNA, 918 bp, Neisseria meningitidis; identical to SEQ ID NO: 39118

SEQ ID NO: 48584 - DNA, 903 bp, Neisseria meningitidis
atgaagggttttaccattattgaatttttggttgcgggcatgctcagtatgattgtcctgatggcggtcggatcgagttacttcacatcccggaaattaaatgatgcggcaaacgagcgtctttccgcgcaacaggatttgcggaatgcggcaacattgattgtccgcgatgcaagaatggcagggggcttcggttgtttcaatatgtccgagcatcctgcaactgatgttgtttccgatgtggtgcaaaaaaaccgtcttttttccttaaacttaaaaaggaacagtacaaataaacttatccccataacggaatcttcaaatatcaattatccgaattttttccaggttgatagcgcattgatttttcaatacggaatcgatgatgttaatgcaagcaccgcgactaccgtcgtcagcagctgtgccgcaatatcgaaaccgggcaagcaaatccctactttagaagatgcaaaaaaagaattgaagattctggatcaggataaggagcaaaatggcaatatagcgcgtcaaaggcatgtggtcaatgcctatgcggtcggcaggattgccgatgaggaaggtttgttccgcttccaattggatgataagggcaagtggggtaatcctcagttgctcgtgaaaaaggttagacgtatgaaagtgcggtatatctatgtttccggctgtcctgaagatgacgatgccggcaaagaggaaacattcaaatatacggataaattcgacagctccacaaatgctgttacgcccgccggggtggaggttttattgagtagcggtactgataccaagattgccgcttcttcagacaatcatatttatgcttaccgtatcgatgcgacaatacgcgggggaaatgtatgcgcaaacagaacactttga

SEQ ID NO: 48585 - DNA, 624 bp, Neisseria meningitidis; identical to SEQ ID NO: 37310

SEQ ID NO: 48586 - DNA, 489 bp, Neisseria meningitidis; identical to SEQ ID NO: 39373

SEQ ID NO: 48587 - DNA, 480 bp, Neisseria meningitidis; identical to SEQ ID NO: 39285

SEQ ID NO: 48588 - DNA, 1569 bp, Neisseria meningitidis
atgagtcaaaccgatacgcaacgggacggacgatttttacgcacagtcgaatggctgggcaatatgttgccgcacccggttacgctttttattattttcattgtgttattgctgattgcctctgccgccggtgcgtatttcggactatccgtccccgatccgcgccctgttggtgcgaaaggacgtgccgatgacggtttgattcacgttgtcagcctgctcgatgctgacggtttgatcaaaatcctgacgcataccgttaaaaatttcaccggtttcgcgccgttgggaacggtgttggtttctttattgggcgtggggattgcggaaaaatcgggcttgatttccgcattaatgcgcttattgctcacaaaatctccacgcaaactcactacttttatggttgtttttacagggattttatctaataccgcttctgaattgggctatgtcgtcctaatccctttgtccgccatcatctttcattccctcggccgccatccgcttgccggtctggctgcggctttcgccggcgtttcgggcggttattcggccaatctgttcttaggcacaatcgatccgctcttggcaggcatcacccaacaggcggcgcaaatcatccatcccgactacgtcgtaggccctgaagccaactggttttttatggtagccagtacgtttgtgattgctttgattggttattttgttactgaaaaaatcgtcgaaccgcaattgggcccttatcaatcagatttgtcacaagaagaaaaagacattcggcattccaatgaaatcacgcctttggaatataaaggattaatttgggctggcgtggtgtttgttgccttatccgccctattggcttggagcatcgtccctgccgacggtattttgcgtcatcctgaaacaggattggtttccggttcgccgtttttaaaatcgattgttgtttttattttcttgttgtttgcactgccgggcattgtttatggccgggtaacccgaagtttgcgcggcgaacaggaagtcgttaatgcgatggccgaatcgatgagtactctggggctttatttggtcatcatcttttttgccgcacagtttgtcgcattttttaattggacgaatattgggcaatatattgccgttaaaggggcgacgttcttaaaagaagtcggcttgggcggcagcgtgttgtttatcggttttattttaatttgtgcttttatcaatctgatgataggctccgcctccgcgcaatgggcggtaactgcgccgattttcgtccctatgctgatgttggccggctacgcgcccgaagtcattcaagccgcttaccgcatcggtgattccgttaccaatattattacgccgatgatgagttatttcgggctgattatggcgacggtgatcaaatacaaaaaagatgcgggcgtgggtacgctgatttctatgatgttgccgtattccgctttcttcttaattgcatggattgccttattctgcatttgggtatttgttttgggcctgcccgtcggtcccggcgcacccactttgtatcccgcaccttaa

SEQ ID NO: 48589 - DNA, 843 bp, Neisseria meningitidis; identical to SEQ ID NO: 40151

SEQ ID NO: 48590 - DNA, 729 bp, Neisseria meningitidis; identical to SEQ ID NO: 38130

SEQ ID NO: 48591 - DNA, 624 bp, Neisseria meningitidis
atggaacgcaaagaacgcctgcgtgcaggcattgccgcgatggggctggatatttcggaaacggcgcaggacaggcttttggcctatgtggatctgttgaaaaagtggaacaaaacctacaatctgaccgccctgcgcgacgaggaaaaaatgattgtccatcatcttttggacagcctgacgctgctgccccatatcgagggtgtgcaaacgatgctggatgtcggttcgggcggcggtcagcccggcattccggcggcggtgtgccgtccggatgtgcagataacccttttggatgcgaatacgaagaaaacggcttttttacagcaggcggttatcgagttggggttggacaatgtgcgcgtggtatccggacgcgtggaggcggtttcggacgtgcgtgccgacgtggttaccagccgtgcgtttgcagaactggcggattttgtgtcgtggacggtgcatctgttgaaagacggcggctactgggcggcgatgaagggcgtgtatccgcaggaagaaatcggccgcctgccgcaggatgtgtgcgttgaaaaagtccaaaggctcgacgtgccgggcttggatgcggaacgccatatcgtcatcctgagtaagcgttga

SEQ ID NO: 48592 - DNA, 852 bp, Neisseria meningitidis; identical to SEQ ID NO: 39477

SEQ ID NO: 48593 - DNA, 279 bp, Neisseria meningitidis; identical to SEQ ID NO: 36597

SEQ ID NO: 48594 - DNA, 567 bp, Neisseria meningitidis; identical to SEQ ID NO: 38679

SEQ ID NO: 48595 - DNA, 639 bp, Neisseria meningitidis; identical to SEQ ID NO: 39714

SEQ ID NO: 48596 - DNA, 636 bp, Neisseria meningitidis
atgattgtttccattgatgttgatgcacaaaaaacgtttacgccactgtgtcctgacgaactgcccgtgaacgaggggcatttgattgtcgaggagttgaatgctcaagccgctttggcggatttgcgcgtgatgacgaaagatgcgcatcatatggtagcgaaatggcttgtggataaccctgttgatatgttgaagccgacaggtttgcctgatgcggatttgacttgggtggctcatgcgatggtcggtacgcgcggctatgaattattggacggactgccttctgccaaagaatatgattattgcgtttggaaaggtgttgatcctgaattgcatccttacggcgcgtgttttcacgatattgaggaaaaactaagcacagggctgattgaatggctgcgttgtcaaaatacggatacggttattatcggtgggttagctacggattattgtgttaaaacaacggttttgcagttacttaaaggtggtaattggcaggttatcgtcaatgaagcggcttgtcggggcattgcgccggataccattgaaacggcatggcaggaaatgagttctgccggtgcagtcatcttaaaaaacgttgaagaaattaaaaaatatattaataatcaataa

SEQ ID NO: 48597 - DNA, 1458 bp, Neisseria meningitidis; identical to SEQ ID NO: 38457

SEQ ID NO: 48598 - DNA, 375 bp, Neisseria meningitidis; identical to SEQ ID NO: 38891

SEQ ID NO: 48599 - DNA, 1998 bp, Neisseria meningitidis; identical to SEQ ID NO: 39248

SEQ ID NO: 48600 - DNA, 1341 bp, Neisseria meningitidis
atgaacaaacaacccctttccctcgccgtcgtcggacacaccaacaccggcaaaacctcgctcctgcgtacccttttgcgcgacagcggtttcggcgaagtcagaaacgccccatcgaccacgcgtcatgtcgaagaagccgccatcagcgacggcgcagacacgctggttttcctgtacgacacgcccggactcgaagacgcgggcggcgtgctggaatggctggaaaaccatacggacaatcgttcagacggcatcgaacggctgcaacagtttctcggcagccacggcgcgcaccatgatttcaatcaggaagccaaagtcttacggcaagtcttgcaaagcgatatggcaatgtacgtcatcgacgcgcgcgaacccgttctcgacaaatatcgggatgaattgattatcctttcatggtgcgccaaaccggttatgcccgtgttcaactttaccggcggacagcctcccgaatcgtggacaaccatgctggcgaggagaaacctgcacgttttcgcagggttcgacaccgtcgcctttgattttgaaggcgaactgcgcctgtgggaaaacctcgccaccatgttgcccgaacgcagcacactcgaccgcctgacagccatgcgccggcgcgaatggcagcggctggacggcgaagcgcgccgcgaaatcgccgatttcctgctcgatgccgccgccttcaggcaggaagtggacgaaaacgaggataccgccaccgtgctgcaaaccatgcaggcggaaatacgccaactcgaacggcagatgcagcagcggctgtttgccctctaccgtttctaccacagcgaaatcgacggcggcgactggatgccgcaagccttccgccaagacccgttcgacagcgaattgctcaaacaatacggcatccgcaccggcacgggcgcggcaaccggcgcgctcatcggcttggggctggacatcgccacactcggcggctcgctcggattgggtacggcaatcggcggctttttgggcggcatcctgcccaatacccgcaccatttccgacaaactctccggccgccaaaccttgcacaccgaccctgaaaccttgaccctgctcgccgcccgcgccctcgatctgctccacgtcctgcaaacgcgcggacacgcggcacagtcggatattgagctgcacagccgcaaagccccgtgggacgccgccagactcccgcccgaactcaacaaagctcgcagtcattggaaatggtcgtcgctcaatacgcaccgccccgaaaccagccacgccgaacgcagggaatatgcggagaagcttgggatacgtttagcgggcaaataa

SEQ ID NO: 48601 - DNA, 489 bp, Neisseria meningitidis; identical to SEQ ID NO: 38994

SEQ ID NO: 48602 - DNA, 804 bp, Neisseria meningitidis; identical to SEQ ID NO: 38447

SEQ ID NO: 48603 - DNA, 423 bp, Neisseria meningitidis; identical to SEQ ID NO: 38759

SEQ ID NO: 48604 - DNA, 2940 bp, Neisseria meningitidis
atgagcggttttaattacgagaaaaaccagccgcaccaaatgcgggcggtttcggcggttttgggcgtgtttgacggggcaacgcccaaatatcggacggcagacgaaaatcccgaacttttgtttgctgcaaaacaatacgcaaacaatatcctgaaagtgcaaagccaaaacggtatagacggccgattccccgaccgttcggacgaccaaaatatccttgatatttccatggaaacgggcacgggcaaaacctatacctacacacaaaccatgttcgagctgcaccgttggctgggcgtgttcaaatttatcgtggtcgtgccgactttgtccattaaggcgggaacacagcagtttttgcaaagcaaggctttggcagagcattttgaacaggatttcggcggcgattatgaaggcgtacgcctgaaaacctatgtggtggaaagcgcgaaaaagaataagggcaaaaagtccaatgcgcccataacgattgagcaatttgtcaaagcggaaaacaaaaaggaaattcatgtgctgctgattaacgcgggcatggttaattcgtcgtccatgaacgatacgggcgacaaggcattgaaggatttgtttgacaatcccgttgatgcattggccgccgtgcgcccgtttatgattgtggacgaaccgcataaattcccgacccgagatagcgcgaaaacgtggggcaatatcaaacgcttaaaaccgcaatatattttgcgctacggtgcaacatttaacgatgaatattacaacttgctttaccgtttgacggcagtagacgcgtttaacgacgggctggtcaaaggcgtgcgcgtgtttcaggaagaaatgcagggcggcatggatgcggcggtaaaactggtgtcgtcggacggcaaagaagcgaaatttgaattaaacgaaaaggacaaaaagcagacgttcaaactggcaaaaggcgaagatttggcgcaaatccatccggctatttcggatttgaaaatcgacaaaatgaataaaaccgtggtggtgttaagcaacggcttggagttgaaaacgggtgccgtcatcaacccttattcctattcgcaaacggtgcaggatgcgatgatgcagcgggcggttgccgaacatttcaagctggaacgcgcgcttttggcagaacgcgcgccacagcccaaaatcaagccgctgacgctgttttttattgacgatatcgcgggctaccgcagcggcaacgagctttcaggcagcctgaaagataaatttgaaagctggattcgcgcggaagcggcacgccgtctgaaaacggaaagcgacccgttttaccgcgattacctgcaaaagacattggacgatgtatccgcctgccacggcggctatttttccaaagacaatacagacagcgacgatagaatcgagcaggaaatcaatgaaatcctgcacgataaggaaaaactgctgtctttggacaacccgcgccgctttattttttccaaatggacgctgcgcgaaggctgggacaatcccaacgttttccagatttgcaaactgcgttccagcggcagcacgacttccaagctgcaagaagtcggacgcggcctgcgcctgccggtaaacgagctgatggcgcgggtgcgcgatgtaccgtacaaactgaattattttgtcgatagcagcgaaaaagactttgtgaagcagcttgtcggcgaaatcaacgacaattcttttcaggaagaaatctccaaaaagtttaccgaagagctgaaacaaaaaatattgcaaaaataccccgatatcaaaccgctggtattggtaaaccaactgttttcagacggcatcattgacgacaatgaaaactttgccgaagacggctatgacaaattaaaagccgcctatcccgaagccttccccaaaggtttggacaaaggcaaagtcagcaacgccaaagacgagggcaaagacaccatcatcatgcgcgaaggcaaatatgaagaactcaaagccttgtgggagctgattcaccataaagccgttttgcagtacaaaatcaaggatgaagccgaatttgtcgatttatttaccgcctatttgcgtgaaaacgccgccaaattcccgcaggcaggcatacgcacggcggtaaacgaagcttatatcaacaacgggcttatgctttcccgccgcatagacagttttgaagatgaagattttatccgttttaacacaatgacttaccgtgagcttctggaaaaactggcacaaacggcaaaaatccgcatgcagactttgcatcaggcgttttatcgcgtccgcgacgaactgaacattggcgattttttgaatatgcagaccatcgcccaaatcaaaaacggcttcaaccggtttttgcttcatcattccttccataaatttgaactggattaccggcttgtcggcagcaaaatccatccgaccaaatttaccgataaagacggcaaaccgcgcgcggtgaaaaaagcagatttgggcagatttgaagatacggagcaccggcctgccgccggctatctcttcgacgaaattttctacgattcggatatagaacatgaaaatgtcgccaacaaccaaattgaaggcgtaaccgtattcaccaaaataccgagaaactccatcaaaatccccgttgccggcggcggcacgtattcgcccgattttgcctatatcgtgaaaaccaaaagcggcgagattctgaactttgtgattgaagccaaagggactgacggggcggaagatttgcgaaaaagcgaagagcggaaaatcaaacatgccgaaaagctgtttgccgagatttccaaagaaatcaaggtggtgttcaaaacgcagtttgacggcgagaggatagccgaactgatcgggcaaaatatgcccgcaggcgggcattctgaaaacggacactga

SEQ ID NO: 48605 - DNA, 1128 bp, Neisseria meningitidis
atgttagaatgcacgataaattactgttcaggcgaaattatgtcccaaactatcgacgaactcctcatcccgcaccgcaacgccatcgacaccattgatgcggaaatcctgcgcctgctcaacgaacgcgcgcaacacgcacacgccatcggcgaactgaaaggcacgggcgcagtgtaccgtcccgaacgcgaagtcgccgtgttgcgccgcattcaggatttgaacaaaggcccgctgcccgacgaatcggtagcacgcctgtttcgggaagtgatgagcgagtgcctcgccgtagaacgcccgctgaccatcgcctatctggggccgcagggcacgtttacccagcaggcggcgatcaagcatttcggacacgccgcgcacaccatggcgtgtccgaccatagacaactgcttcaagcaggttgaaacccgtcaggcggattatctggtcgcgcccgtggaaaactcgaccgaaggctcggtcgggcgcacgttggatttgcttgccgttaccgcgttgcaggcgtgcggcgaagtcgttttgcgcatccaccacaaccttttgcgtaaaaacaacggcagcaccgaaggcattgccaaagtcttttcccacgcgcaggcgttggcgcagtgcaacgactggttgggcagacacctgcccaacgccgaacggattgccgtgtccagcaatgccgaagccgcaaggctggttgccgaatcggacgacggtacggttgccgccatcgccggacgcacggcggcggaaatctacggactcgatatggttgccgagtgcatcgaagacgaaccgaacaacaccacgcgcttcttggtgatgggacatcacgaaaccggtgcaagcagcagcgacaagacttcgctggccgtttccgcgcccaaccgcgccggtgcggttgcctcgctgctgcaaccgctgaccgagtcgggtatttccatgaccaagtttgagagccgtccgagcaaatccgttttgtgggaatacctgttcttcatcgacatcgaaggacaccgccgggacgcgcagattcagacggcattggaacgcttgggcgaacgcgcttcgttcgtcaaagtcatcggttcgtacccgaccgccgttttgtag

SEQ ID NO: 48606 - DNA, 750 bp, Neisseria meningitidis; identical to SEQ ID NO: 38989

SEQ ID NO: 48607 - DNA, 1014 bp, Neisseria meningitidis; identical to SEQ ID NO: 38694

SEQ ID NO: 48608 - DNA, 1980 bp, Neisseria meningitidis
atgtctcaactggcaaacgcaatccgcttcctctcggccgatgccgttcaaaaagccaattccggccaccccggcgcgcctatgggtatggcggaaatggcggaaacattgtggacgaaattcctcaatcacaaccccgccaaccccaaattctacaaccgcgaccgcttcgtcctctccaacggccacgcgtctatgctgttgtacagcctgctgcacctgaccggctacaacctaagcattgaagacttgaaaaacttccgccaactgcacagcaaaacccccggccatcccgaatacggctacaccgacggcgtggaaaccacgaccggcccgttggggcaagggattgccaacgcggtgggtatggcattggcagaaaaaatccttgccgccgaatttaataaagacggtttgaacatcgtcgatcattacacctacgtctttatgggcgacggctgtctgatggaaggcgtatcgcacgaagcctgttcgctcgccggcaccttgggcttgggcaaactgattgttttatatgatgacaacaatatttccattgatggtaaagtggacggctggtttaccgaaaacatcccgcaacgctttgaaagctacggctggcacgtcgttcctaacgtaaatggtcatgacaccgccgccattcaagccgccatcgaagccgcacgtgccgaaaccggcaaaccgtccatcatctgctgtaaaaccttaatcggcaaaggcagtgccaataaagaaggcagccacaaaacccacggcgcacctttgggtgcggacgaaatcgaagccacgcgcaaacatttgggctggacttaccctgcctttgaaatcccgcaagaaatttacgatgcgtggaatgccaaagaaaaaggcgcgaaactggaagccgaatgggacaaactgttcgcgcaataccaagccaaatatcctgccgaagccgcagaatttgtgcgccgtatggataaaaaactgccggaaaactttgacgggtacgttcagacggcattgaaagaagtgtgcgccaaagccgaaaccgtcgccacccgcaaagccagccaaaacagcatcgaaatcttggcaaaagagctgcccgaactggtgggcggctctgccgacctgaccccgtccaatctgaccgactggtcaaacagcgtctccgttacccgcgacaaaggcggcaactacatccactacggcgtgcgcgagttcggcatgggtgcgattataaacggcttggtattgcacggcggcgtgaaaccctttggcgcgaccttcctgatgttcagcgaatacgagcgcaacgccctgcgtatggcggcactgatgaaaatcaaccccgtgttcgtgttcacccacgattccatcggtttgggcgaagacggcccaacccaccagccgattgagcaaaccgccaccctgcgcctgattccgaatatggacgtatggcggccgtgcgacaccgccgaatccttggtcgcttgggcagaagccgtcaaagccgccgatcacccgtcctgcctgattttcagccgtcaaaacctgaaattccaagcgcgcagcgaacaacaactggacgacatcaaacgcggcggctacatcatcagcgaagcccaaggcaacgcccaagccgtcatcattgccaccggctcagaagtcgagctggctttggaagcgcaaaaagccctcgccgcgcaaaacatcgccgtgcgcgtcgtttccatgccgtccaccaacgtattcgaccgccaagacgccgcctatcaagccgccgtcctgcccgaaagcctgccgcgcatcgccgtagaagccggccacgccgacggctggtacaaatatgtcggactgaacggcgcagtcgtcggcatcaaccgcttcggcgaatccgcccctgccgatttactcttcaaagcattcggctttaccgtggacaatgtggtcgatacagtgaaatccgtgctgtaa

SEQ ID NO: 48609 - DNA, 1011 bp, Neisseria meningitidis; identical to SEQ ID NO: 38121

SEQ ID NO: 48610 - DNA, 624 bp, Neisseria meningitidis; identical to SEQ ID NO: 36421

SEQ ID NO: 48611 - DNA, 1017 bp, Neisseria meningitidis
atgtatcggaaactcattgcgctgccgtttgccctgctgcttgccgcttgcggcagggaagaaccgcccaaggcattggaatgcgccaaccccgccgtgttgcaaggcatacgcggcaatattcaggaaacgctcacgcaggaagcgcgttctttcgcgcgcgaagacggcaggcagtttgtcgatgccgacaaaattatcgccgccgcctacggtttggcgttttctttggaacacgcttcggaaacgcaggaaggcgggcgcacgttctgtatcgccgatttgaacattaccgtgccgtctgaaacgcttgccgatgccaaggcaaacagccccctgctgtacggggaaaccgctttgtcggatattgtgcggcagaagacgggcggcaatgtcgagtttaaagacggcgtattgacggcagccgtccgcttcctacccgtcaaagacggtcagacggcatttgtcgacaacacggtcggtatggcggcgcaaacgctgtctgccgcgttgctgccttacggcgtgaagagcatcgtgatgatagacggcaaggcggtgaaaaaagaagacgcggtcaggatttttagcggaaaagcccgtgaagaagaaccgtccaaacccacgcccgaagacattttggagcacaatgccgccggcggcgatgcgggcgtaccccaagccgcagaaggcgcgcccgaaccggaaatcctgcatcctgacgacggcgagcgtgccgataccgttaccgtatcacggggagaagtggaagaggcgcgcgtacaaaaccagcgtgcggaatccgaaattaccaaactttggggaggactcgataccgacgtgcaaaaagagttggtcggcgaacaacgcaagtgggcgcaggaaaaaatcagcaactgccgacaagccgccgcgcaggcagaccggcaggaatacgccgaatacctcaaattgcagtgcgacacgcggatgacgcgcgaacggatacagtatcttcgcggctattccatcgattag

SEQ ID NO: 48612 - DNA, 486 bp, Neisseria meningitidis
atgtttgtgaacgagaaagatctttatgcggctctgtttgcggggctggtgtttttgacgctgccgttcgcactgtcggtgcatgatgccttggcatttgcgttcggacggacggggctgctggtgtcggtgtcggacggcggattcggccggcgtggcggttgggacggcactgtttggtttgtgttcggcgtgtttgcgtttttgaatgtggttgtatcagcgggtctgacgaaactggcgtacaaaaagatgatgcggcggcattcgcgttacgcgctgtttctgtcgggcgtggcggcttgcgcggctgctgcggtcgcgtggattttcgagctgctgtttggcagtgaggctttgggcgggctgcgtggggaggcggtgttggaatatgcgtttgccgtgtggctggtgtcgatgctgacgctgcccaaacgcttgacgcgcgcgccggtgcagccggtggtgtttcacaggaaaaaatag

SEQ ID NO: 48613 - DNA, 1413 bp, Neisseria meningitidis; identical to SEQ ID NO: 45127

SEQ ID NO: 48614 - DNA, 975 bp, Neisseria meningitidis
atgctcgagaatctgccctatttccagcgacatctgcctgaagaccttgccaaagtcaatgaagtcatcaaccgtgcggtgcaatccgatgtcgcactgatttcgcaaatcggtacatatatcatcagcgcgggcggcaaacgcctgcgtccgattatgacgattttggcgggtaaggcggtcggttatgatgacgagaaactgtattcgctggcggcgatggtcgagtttatccacacttccaccctcctgcacgacgatgtcgtcgatgaaagcgatttgcgccgtgggcgggcaacggcaaacaatctgttcggcaatgcggcggcagtgttggttggcgactttttatacacgcgcgcctttcaactgatggttgcctcgggcagtatgcgcgttttggaagtgatggcggatgcaaccaacattattgccgagggcgaagtcatgcagctgatgaacatcggcaatacggacattaccgaagaacaatatatccaagtcatccaatataaaacggcaaaattgtttgaagctgccgctcaagtcggcgcaattttgggcaaggcttcccccgaacacgaacgggcgttgaaagactacggtatgtatgtcggtacggcattccaaattattgacgatgtgctggactattctggcgaaaccgaagaaaccggcaaaaacgtcggcgacgatttggcggaaggaaaaccgactttgcctttgatttatctgatgcgtcagggttccgaacaggttgcgaacgatgtgcgtactgctttggaaaatgcagatcgcagctattttgagaaaatccacgattatgtcgtccgttcggatgcgttggcatattcgataggcgaggcgcgcaaagcagtcgattgtgccgttaccgccttggatgccctgcccgacagcgaagtgaaggatgccatgattcagctggcgaaggaatctttggtcagggtgtcttga

SEQ ID NO: 48615 - DNA, 132 bp, Neisseria meningitidis
atgagcaccttctttcaacaaaccgcacaagccatgattgccaaacacatcgaccgtttcccgctattgaagttggatcaagtgattgattggcagccgatcgagcaaaggtacgaccatctatgccgataa

SEQ ID NO: 48616 - DNA, 534 bp, Neisseria meningitidis; identical to SEQ ID NO: 39728

SEQ ID NO: 48617 - DNA, 546 bp, Neisseria meningitidis; identical to SEQ ID NO: 38190

SEQ ID NO: 48618 - DNA, 876 bp, Neisseria meningitidis; identical to SEQ ID NO: 44815

SEQ ID NO: 48619 - DNA, 492 bp, Neisseria meningitidis; identical to SEQ ID NO: 39482

SEQ ID NO: 48620 - DNA, 1392 bp, Neisseria meningitidis; identical to SEQ ID NO: 38504

SEQ ID NO: 48621 - DNA, 1812 bp, Neisseria meningitidis; identical to SEQ ID NO: 46737

SEQ ID NO: 48622 - DNA, 303 bp, Neisseria meningitidis; identical to SEQ ID NO: 39071

SEQ ID NO: 48623 - DNA, 618 bp, Neisseria meningitidis; identical to SEQ ID NO: 39495

SEQ ID NO: 48624 - DNA, 2028 bp, Neisseria meningitidis; identical to SEQ ID NO: 39522

SEQ ID NO: 48625 - DNA, 768 bp, Neisseria meningitidis; identical to SEQ ID NO: 39326

SEQ ID NO: 48626 - DNA, 1065 bp, Neisseria meningitidis; identical to SEQ ID NO: 39469

SEQ ID NO: 48627 - DNA, 1059 bp, Neisseria meningitidis; identical to SEQ ID NO: 37985

SEQ ID NO: 48628 - DNA, 237 bp, Neisseria meningitidis; identical to SEQ ID NO: 37424

SEQ ID NO: 48629 - DNA, 1260 bp, Neisseria meningitidis
atgcacgtctccgaattacaaaccctgcacatttccaaactcttagaattggcggaagaacacggcatcgaaaacgccaaccgattccgcaaacaagacctcgtatttgccatcgtccgccagatgatgaaaaaaggcgagggtttcacctgctccggcacgcttgaaatcctgcccgacggcttcggcttcctccgcagcgcggacacgtcctatcttgccggccccgacgacatctatgtctcgcccacccaaatccgccgcttcaacctgcatacgggcgacaccatcgaaggaagcgtgcgcgtcccaaaagacaacgaacgctattttgccctggtcaggcttgataccatcaacggcgaccacccggaagtatgccgccataaaatcctgtttgaaaacctgaccccgctgtttccgaccgaacagttgaagctggaacgcgacttaaagtccgaagaaaacctgaccggacgtgccatcgacctgatttcccctatcggcaaaggtcagcgcgccctcttggttgccccgcccaaaagcggtaaaaccgtgatgctgcaaaacattgcccacgccgttacctcaaactatcccgaagtcgaactcatcgtcctcttgattgacgagcgtcccgaagaagtaaccgaaatgagccgttccgtccgcggcgaagtggtttcctccacctttgacgaaccggcgcaacgccacgtccaagttgccgaaatggtgcttgaaaaagccaagcgtatggtagaacacaaaaaagacgtggtcatcctgctggattcgattacccgccttgcccgcgcctacaataccgtcgtgcctacctcgggcaaaatcctaaccggcggtgtcgatgccaacgcgctgcaccgccccaaacgtttcttcggtgcggcgcgcaacgtggaagaaggcggttcgctgaccattatcgccaccgcattggttgaaaccggcagccgtatggacgatgtgatttacgaagaattcaaaggcaccggcaatatggaattgcaccttgatcgccgtatggcggaaaaacgcctcttccccgccatcaacatcaacaaatccggcacgcgccgcgaagagctgcttgtgccgaacgaccagttgcaacgtatgtggctgctgcgcaagttcctgcacccgatggacgaaatcgaggcagccgaatttttaatcggaaaaatcaaagcctctaaaaacaatgatgatttctttgaactgatgcgcggaaaataa

SEQ ID NO: 48630 - DNA, 126 bp, Neisseria meningitidis; identical to SEQ ID NO: 38379

SEQ ID NO: 48631 - DNA, 1146 bp, Neisseria meningitidis
atgaccgaaacccgatccctagagcttgccaaagaattgattgcccgaccgtccgttacgccggatgaccaaaattgccaaaaactccttgccgaacgcctgcacaaaatcggttttgcggctgaagaactccatttcggcgacaccaaaaacatctggttgcgacgcggcacgaaagttcccgtcgtctgttttgcagggcataccgacgttgtgccgacaggccctgttgaaaaatgggattcgcccccgttcgagccgaccgagcgcgacggaagattatacgggcgcggtgcggcggatatgaaaaccagcatcgcctgttttgttaccgcctgcgaacgctttgttgccgaacatcccgaccaccaaggcagcatcgcgctcctgattacttccgacgaagagggcgacgcgctggacggtacgaccaaagtcgtcgatgtgttgaaagcgcgcggcgagttgattgactactgcatcgtcggcgagccgaccgccgtgggcaaattgggcgatatgattaaaaacggccggcgtggctcgctgtcgggcaacctgaccgtcaaaggcaagcaaggtcatattgcctatccgcatttggcaatcaatcccgtccatacttttgccccggccttgttagagctgacgcaggaagtctgggacgaaggcaacgaatacttcccgccgaccagtttccagatttccaatatcaacggcggcacaggcgcgaccaacgtcattccgggcgagctgaatgtcaaattcaatttccgtttctccaccgagtccaccgaagcagggctgaaacaacgcgtccacgccattttggacaaacacggtgtgcaatacgatttgcagtggtcgtgttcggggcagcccttcctgacccacgcgggcaaactgaccgacgtggcacgcgccgccattgccgaaatctgcggcgtagagaccgaattgtccaccaccggcggcacttcggacggacgcttcatcaaagccattgcaaaagaactcatcgaattaggctcgtccaatgcgaccatccaccaaatcaacgaaaacgtgcggctggacgatattccgaagctgtcggcggtgtatgaggggatattggcgcgcttgttggctggaaatgccgtctga

SEQ ID NO: 48632 - DNA, 1008 bp, Neisseria meningitidis; identical to SEQ ID NO: 46762

SEQ ID NO: 48633 - DNA, 1068 bp, Neisseria meningitidis; identical to SEQ ID NO: 39103

SEQ ID NO: 48634 - DNA, 474 bp, Neisseria meningitidis; identical to SEQ ID NO: 39290

SEQ ID NO: 48635 - DNA, 1701 bp, Neisseria meningitidis; identical to SEQ ID NO: 39576

SEQ ID NO: 48636 - DNA, 279 bp, Neisseria meningitidis
atgtactaccaagtcggaaataaatgtcttgagaagcaccaggctgaaaacctttatttcagcttggtagtaccaagaatcaaagaaaacggacagattgtcaggccggaatataacggcagcctgtggaagatgtcggacggtcagccgctaaggcttttattggcggaatgcagtctgaaagacaacctgcaaagcggccttgaaacaggctggatagtattcggcgtgatggcgtccgtttactttgtttccctgctgaaaaaggttttgaaatga

SEQ ID NO: 48637 - DNA, 552 bp, Neisseria meningitidis
atgaaagcgtatctggctctgatttctgccgccgttatcggtttggctgcctgctctcaagaacctgccgcgcctgctgccgaggcaactcctgctgctgaagcacccgcttccgaagcgcctgccgccgaagctgctcctgcagatgctgccgaagcccctgctgccggcaactgtgcggcaactgtcgaatccaacgacaatatgcagttcaacactaaagacatccaagtaagcaaagcttgtaaggaattcaccatcaccctgaaacacaccggtacccaacctaaaaccagcatgggtcacaacattgtcatcggtaaaactgaagacatggacggtattttcaaagatggcgttggcgcagctgacactgactacgttaaacctgacgatgcgcgcgttgttgcccacaccaaactgatcggcggcggcgaagagtcttccctgactctagatcctgccaaattggctgacggcgactacaaatttgcctgcaccttcccgggtcacggtgctttgatgaacggtaaaattactttggttgactaa

SEQ ID NO: 48638 - DNA, 213 bp, Neisseria meningitidis
ttgaaaatctgcggcatccgccgcaaacgtaaacccgtaatgtatttgaccgtggtcttttttgtttcggttcgccttctttccagcaagcggcgtgccaaaacggggttcggctcggcattttacagaatatttttttatttgtctgtttggtattggtatttttttatatcaacgcggcgcggcctgcggcggaataatgcggcgggctga

SEQ ID NO: 48639 - DNA, 318 bp, Neisseria meningitidis; identical to SEQ ID NO: 39456

SEQ ID NO: 48640 - DNA, 900 bp, Neisseria meningitidis; identical to SEQ ID NO: 38170

SEQ ID NO: 48641 - DNA, 663 bp, Neisseria meningitidis; identical to SEQ ID NO: 38761

SEQ ID NO: 48642 - DNA, 744 bp, Neisseria meningitidis; identical to SEQ ID NO: 39971

SEQ ID NO: 48643 - DNA, 1845 bp, Neisseria meningitidis
atgttacctaaccgtttcaaaatgttaactgtgttgacggcaaccttgattgccggacaggtatctgccgccggaggcggtgcgggggatatgaaacagccgaaggaagtcggaaaggttttcagaaagcagcagcgttacagcgaggaagaaatcaaaaacgaacgcgcacggcttgcggcagtgggcgagcgggttaatcagatatttacgttgctgggaggggaaaccgccttgcaaaaggggcaggcgggaacggctttggcaacctatatgctgatgttggaacgcacaaaatcccccgaagtcgccgaacgcgccttggaaatggccgtgtcgctgaacgcgtttgaacaggcggaaatgatttatcagaaatggcggcagattgagcctataccgggtaaggcgcaaaaacgggcggggtggctgcggaacgtgctgagggaaagaggaaatcagcatctggacggactggaagaagtgctggctcaggcggacgaaggacagaaccgcagggtgtttttattgttggcacaagccgccgtgcaacaggacgggttggcgcaaaaagcatcgaaagcggttcgccgtgcggcgttgaaatatgaacatctgcccgaagcggcggttgccgatgtggtgttcagcgtacaggggcgtgaaaaggaaaaggcaatcggagctttgcagcgtttggcgaagctcgatacggaaatattgccccccactttaatgacgttgcgtctgactgcacgcaaatatcccgaaatactcgacggctttttcgagcagacagacacccaaaacctttcggccgtctggcaggaaatggaaattatgaatctggtttccctgcacaggctggatgatgcctatgcgcgtttgaacgtgctgttggaacgcaatccgaatgcagacctgtatattcaggcagcgatattggcggcaaaccgaaaagaaggtgcttccgttatcgacggctacgccgaaaaggcatacggcagggggacggaggaacagcggagcagggcggcgctaacggcggcgatgatgtatgccgaccgaagggattacaccaaagtcaggcagtggttgaaaaaagtgtccgcgccggaatacctgttcgacaaaggtgtgctggcggctgcggcggctgtcgagttggacggcggcagggcggctttgcggcagatcggcagggtgcggaaacttcccgaacagcaggggcggtattttacggcagacaatttgtccaaaatacagatgctcgccctgtcgaagctgcccgataaacgggaggctttgagggggttggacaagattatcgaaaaaccgcctgccggcagtaatacagagttacaggcagaggcattggtacagcggtcagttgtttacgatcggcttggcaagcggaaaaaaatgatttcagatcttgaaaaggcgttcaggcttgcacccgataacgctcagattatgaataatctgggctacagcctgctttccgattccaaacgtttggacgaaggcttcgccctgcttcagacggcataccaaatcaacccggacgataccgctgtcaacgacagcataggctgggcgtattacctgaaaggcgacgcggaaagcgcgctgccgtatctgcggtattcgtttgaaaacgaccccgagcccgaagttgccgcccatttgggcgaagtgttgtgggcattgggcgaacgcgatcaggcggttgacgtatggacgcaggcggcacaccttacgggagacaagaaaatatggcgggaaacgctcaaacgtcacggcatcgcattgccccaaccttcccgcaaaccccggaaataa

SEQ ID NO: 48644 - DNA, 741 bp, Neisseria meningitidis; identical to SEQ ID NO: 39703

SEQ ID NO: 48645 - DNA, 1911 bp, Neisseria meningitidis
atgactctggaaaccctgatcgccctgccgcgcaacatcaagaaaatctgtttcctcatacacgattttctgatgattttcattgccttttggttcacccaaagcctaaaggccgactactcggacgaatggttcgattttgccaactggcagtcttttttgctgactgccttgctgaccatcacattatttatccgaatggggctttaccgcgccgttacacgcttcgtcagcttccgcatcctctccaccgcgctggcaggcagcattgtttccgccgtcctgttcttcctcaacacattgatttttgaagaaaggctgcgcctcgccctgccgattgtctatttcttactgctgtttgtttccgtgaccggctcgcgtatggttttgcgcggactgttgtccgaacaccccaaaaaacagatgatccctgtcatcatttacggcgcgggacggtcgggcagacaactgcttgaggccgtcaaacaaatgcgcgaatattccgccgccgcctttgtagacgacgaccccaaactgtggcacaccgtcatctacgaccttgccgtttaccagcccgatgccatcgccttcctcatcgaacgctacggcgtggaaaaaatcctgctcgccatccccggcgcgacccaggaacaacgccgccgaatcatcaacaaactggaagcctatccgtgcgaagtgttgaccattcccggaatgaaagacctgatggacggaaaaatcagcatcggcacgctcaaaaaaatctctgtgtccgacctgctcgggcgtgattccgtcgcgcccgacgaccgcctgatgagtgccgacatcgaaggcaaaaccgtcatggtaaccggcgcgggcggctccatcggttcggaactctgccgccagattatccgccgccgccccgaaaagctgctgctgttcgagttatccgaattcgccctgtacgccatcgaaaaagaattgcgcgaaacctgcatccaaaaacgcctcgacaccgaaatcctgccctttctcggttcggtgcaaaaccgcacgctgctcgaacacgtcatgaccgccttttccgttgcgaccgtctatcacgccgctgcctacaaacacgtccccatggtcgagttcaacaccgtcgaaggcatacgcaacaacatcttcggcacactcgagtgcgcgcttgccgccacgacatcgggcgtaagaactttcgtcctcatctccaccgacaaagccgtccgccccaccaacaccatgggtgccagcaaacgcatggcggaactctgccttcaggcactcgccgccgaacccggacaaaaaacccgcttcagcatggtacgtttcggcaatgttttaggttcgtccggctccgttgtcccgctgtttgaaaaacagattgcagaaggcggcccgcttaccctgacccaccccgaaatcacacgttatttcatgaccatacccgaagccgcccaactcgtcatacaggcaggcgcgatgggtacgggcggcgacgtattcgtcctcgacatgggtgaatccgtcaaaatcatcgaccttgcccgccaaatgattaccctaagcggcctcaaacccaacacacccgaacaacccgacggcgacatcgaaatcctcattaccggactgcgtcccggcgaaaaactctacgaagagctgctcatcggcgacaacgtccgcaaaaccgcccatccgcgcattatgacggctgacgaggcgatgctgccgtggcacgagctctccgccctgctcgaccgcatccgtgcggcctgcgaccgttacgaccagcaggcaatccgcaccctgctcatcaacgccccgaccggctttgccccgagcgacggcatctgcgacctgctttgggtacgagaaacacacagaaaaaatgccgtctga

SEQ ID NO: 48646 - DNA, 1215 bp, Neisseria meningitidis; identical to SEQ ID NO: 38942

SEQ ID NO: 48647 - DNA, 723 bp, Neisseria meningitidis; identical to SEQ ID NO: 45562

SEQ ID NO: 48648 - DNA, 1287 bp, Neisseria meningitidis
atgatttacatcgtactgttcctcgccgccgtcctcgccgttgtcgcctacaatatgtatcaggaaaaccaataccgcaaaaaagtgcgcgaccagttcggacactccgacaaagatgccctgctcaacagcaaaaccagccatgtccgcgacggcaaaccgtccggcgggtcagtcatgatgccgaaaccccaaccggcggtcaaaaaaacggcaaaactccaagaccctgctatgcgcaacctgcaagaacaggatgccgtctacatcgccaagcagaaacaggcaaaagcctccccgttcaaaaccgaaatcgaaaccgccttggaagaaagcggcattatcggcaactccgcccacaccgtttccgaaccccaaaccggacattccgcaccgaaacctgccgacgcgccggcaaaacctgcacccgttccgcaaacacctgcaaaaccgctgattacgctcaaagaactgtcaaaagtcgaattaccctggtttgacgtgcgcttcgacttcatctcctatatcgcgctgaccgaagccaaagaactgcacgcactgccgcgcctttccaaccgctgccgctaccagattgtcggctgcaccatggacgaccatttccagattgccgaacccatcccgggcatccgctatcaggcatttatcgtgggtattcaggcagtcagccgcaacggacttgcctcgcaggaagaactctccgcattcaaccgccaggtggacgcattcgcacaaagcatgggcggtcagacgctgcacaccgaccttgccgcctttatcgaagtggcttccgcactggacgcattctgcgcgcgcgtcgaccagaccatcgccatccatttggtttccccgaccagcatcagcggcgtagaactgcgttccgccgtaacgggcgtgggtttcgttttggaagacgacggcgcgttccactataccgacacgtcgggctcgaccatgttctccatctgctcgctcaacaacgagccgtttaccaacgcccttttggacaaccagtcctacaaaggcttcagtatgctgctcgacatcccgcactctccggcaggcgaaaaaaccttcgacgatttgtttatggatttggcggtacgcctgtccggccagttgaacctgaatctggtcaacgacaaaatggaagaagtttcgacccaatggctcaaagacgtgcgcacttatgtattggcgcgtcagtccgagatgctcaaagtcggtatcgaaccgggcggcaaaaccgcattgcgcctgttctcctaa

SEQ ID NO: 48649 - DNA, 1407 bp, Neisseria meningitidis; identical to SEQ ID NO: 38418

SEQ ID NO: 48650 - DNA, 1539 bp, Neisseria meningitidis; identical to SEQ ID NO: 38255

SEQ ID NO: 48651 - DNA, 393 bp, Neisseria meningitidis; identical to SEQ ID NO: 38784

SEQ ID NO: 48652 - DNA, 546 bp, Neisseria meningitidis
atgaaacactatgccttactcatcagctttctggctctctccgcgtgttcccaaggttctgaggacctaaacgaatggacggcacaaacgcgacgcgaagccaaagcagaaatcatacctttccaagcacctaccctgccggttgcgccggtatacagcccgccgcagcttacagggccgaacgcattcgacttccgccgcatggaaaccgacaaaaaaggggaaaatgcccccgacaccaagcgtattaaagaaacgctggaaaaattcagtttggaaaatatgcgttatgtcggcattttgaagtctggacagaaagtctccggcttcatcgaggctgaaggttatgtctacactgtcggtgtcggcaactatttgggacaaaactacggtagaatcgaaagcattaccgacgacagcatcgtcctgaacgagctgatagaagacagcacgggcaactgggtttcccgtaaagcagaactgctgttgaattcttccgacaaaaacaccgaacaagcggcagcacctgccgcagaacaaaattaa

SEQ ID NO: 48653 - DNA, 4266 bp, Neisseria meningitidis; identical to SEQ ID NO: 38636

SEQ ID NO: 48654 - DNA, 1539 bp, Neisseria meningitidis; identical to SEQ ID NO: 39517

SEQ ID NO: 48655 - DNA, 177 bp, Neisseria meningitidis; identical to SEQ ID NO: 38772

SEQ ID NO: 48656 - DNA, 186 bp, Neisseria meningitidis; identical to SEQ ID NO: 37143

SEQ ID NO: 48657 - DNA, 381 bp, Neisseria meningitidis; identical to SEQ ID NO: 39549

SEQ ID NO: 48658 - DNA, 810 bp, Neisseria meningitidis
atgcacgccctcccccgctacgccgtttttggcaaccccgtcgcccacagcaaatcgccgcaaattcatcaacaatttgcccttcaggaaggcgttgacattgaatacgaacgcatttgcgccgacatcggcggtttcgcgcaggcggtttcgacattttttggaacaggcggttgcggggcaaacgttaccgtaccgttcaaacaggaagcgtttcatctggcggacgagcattccgaccgcgctttggcagcaggtgcggtcaatacgctgattctgttgaaaaacggcaagctgcgtggcgacaataccgacggtatcggtttggccaacgacatcacgcaggtcaaaaacattgccattgagggcaaaaccattttgcttttgggcgcgggcggcgcggtgcgcggcgtaattccggttttgaaaggacaccgccctgcccgtatcgtcgttgccaaccgcacccacgccaaagccgaagaattggcgcggcttttcggcattgaagccgtcccgatggcggatgtgaacggcggttttgatatcatcatcaacggcacgtccggcggcttgagcggtcagcttcctgccgtcagtcctgaaattttcctcggctgccgccttgcctacgatatggtttacggcgacgcggcgcaggagtttttgaactttgcccaaagcaacggtgcggccgaagtttcagacggactgggtatgctggtcggtcaagcggcggcttcctacgccctctggcgcggatttacgcccgatatccgccctgttatcgaatacatgaaagccatgtaa

SEQ ID NO: 48659 - DNA, 558 bp, Neisseria meningitidis
atggaaaataacaaagccaaatctgatgataattcagtttctattgaatttatacaagattttataactgcaagtacggatgtaattaatctgagttacgaaaattttcgtaaaaatttttatacacaaatgtcaactgattctaccaattatgcagccaaacatgaaagtttaggaaaatcggtacaacgtgaattacaaaaaacacaaagtcagttgagacaagttgtaagaaaaatgcagagtaaatataatataaataataaagcacgagtagcagaaatatctttgttaaggcaaatgcaaagccaattttctcgaaaagatgtaaacaaaaatcttggtaacggcaacactttggctcaacaaggcagctacaccaaaaaagacggcacaaccgcgcaagcaggcgattcgctgttggctgctgacaacctgcacagcctcctcacggacaaaatgctatccattagccatgttcgggaaaacacgatttccccgtttgttttaggctgtctaaaacaaataaccatgaatgtatctcattatttaaaataa

SEQ ID NO: 48660 - DNA, 546 bp, Neisseria meningitidis; identical to SEQ ID NO: 39790

SEQ ID NO: 48661 - DNA, 1782 bp, Neisseria meningitidis
atgccttatttcgccctgtttgacgatgccgtaagcggccgcgcaaaacgctatcaaaatcatgtggaaagccgttttttccgtcccgaagaactcgatgctttggacggcgcgctgcaaaagggctggcaaaaagggctgcattcggtgttgtttgcagactacgaattcggtttgccgctgacgggggttgagtccgagcgcggcggcaaccttgccctgcactggtttgccgactgcaccgacaccgatgccgcaagctggcttgcccgacactcagacgaccttcccgccggcatttccacgccgcaatcctccgtatccgaaaccgattacctcgaccgcatccgccaaatccacgaagccatccggcgcggcgacacctatcaaatcaactacaccactcgcctgcacctgcaagcctacggcaatcccgtcagcctctaccgccgcctgcgccagcccgtcccctatgccgtcttgtcccacctgcccgatgcggaggggcaatccgcgtggacgctgtgtttctcgcccgaactcttcctcaaaatcggttcagacggcaccatcagcaccgaaccgatgaaaggcaccgcgccgattttgggcgacggacaagacgaacgccgcgccgccgagttgcaagcagacccgaaaaaccgcgccgaaaacgtgatgattgtcgatttgctgcgtaacgatctcggcaaaatcgcccaaaccggcacagtatgcgtacccgaaccgtttaaagtatcgcgtttcggcagcgtttggcagatgaccagcaccatccaagcccaagccttgccgcacacctcgttcgccgacatcctccgcgccgccttcccctgcggcagcatcaccggcgcgcccaaaaaaatgagtatgcagattatcgaatcgctcgaagccgaagcgcgcggactttatacgggcagcatcggctatttgaacccgtgttccggcggcttggggtttgaaggcacgttcaacgtcgttatccgcaccttgtcgctcacgccgctttcagacggcatttatcaaggcgtgtacggtgtcggttccggcatcgtcatcgacagcgaccccgccgccgaatatcgcgaatgcggctggaaagcccgtttcctcaacgaattgcgccccgacttcggcatttttgaaaccctgcgcgcggaaaacggacgctgcaccctgctcgaccgccacctatgccgtctgaaaacctccgcccaagccctcaacctgcccctgcccgacggctgcgaaaatcaaatcaaacaatacattgccgacttgcccgatggcgcgttccgcgtcaaagccctgctcgcttcagacggcatcagcctgtcccgcgccgttttaaaccgtctgaccgacaaacaacgcgtcatcatttcgccgaccatcctgcccgcacaaaactacctgcgccgcttcaaaaccacctgccgcaccgtcttcgaccaagcgtggcaaaccgccgaaacacaaggcgcgttcgacagcctgtttttcaattcagacggcatcctgctcgaaggcggcagaagcaacgtgttcgtcaaacatcgcggacaatggcttacgccctctttagatttggacattttaaacggcataatgcgccaagccgtattggacgaaccgcaaaaatatttgcaaacaaatcaagtaatcgaaacacacatcacacaaaaaacactgcaagaagccgaagaaatccgcctctccaacgccctgcgcggcgtatttgccgccgcccttgcctga

SEQ ID NO: 48662 - DNA, 600 bp, Neisseria meningitidis; identical to SEQ ID NO: 38221

SEQ ID NO: 48663 - DNA, 594 bp, Neisseria meningitidis
atgtctgaattattaaactatgtcgcttcgtgccgcctgccgaccgaatggggcgtgtttacgatgcacggttttgaagaagcaggcgggcaggaacacgtcgcgctgaccgtcggtaatttttcagacggcaatccggttctgacgcgcatccactccgaatgcctgacgggcgatgcgctgttctcgagaaaatgcgactgcggacctcaacttgaagcggccatgagggcggtacagacagaggggcgcggcatcatcgtctatctgcgtcaggaaggacgcggcatcgggctgattaacaaaatccgcgcctatcatctgcaagaccaaggtatggatacggttgaagccaatttggcactcgggctgcccgtcgatgcccgcgatttccgtttggcgcaatctatctacgaatatctgggcatccgctcggtcaaactgctgaccaacaaccccgaaaaaatccaaaccctgaaagatgcggggattaacgtggtcgaacgcatccccctgcacgtcggggaaaaccttgaaaacaaacgctacctccaaaccaaagcagacaagctgggacatctgatgtcggaataa

SEQ ID NO: 48664 - DNA, 1092 bp, Neisseria meningitidis
atgtcccatatttcccccatccccgaaatcctagccgacatcaaagtcggcaaaatggtcatcatcaccgatgccgaagaccgagaaaacgaaggcgacctgctgatggcggcgcaattcgtcacgcccgaagccatcaacttcatgatcaaacacgcgcgcggcttggtctgcctgccgatggacggcgaaatggtcgaaaaactcgggctgccgatgatgacccaaaaaaacggcgcgcaatacggcaccaactttaccgtctccatcgaagccgcacacggcattaccaccggcatttccgccgccgaccgcgccctgactattcaaaccgccgtttccccgaccgccaaacccgaagacatcgtccaacccggtcatatctttccgcttcgcgcccaaaaaggcggcgtactcgtccgcgccggacacaccgaagccggcgtcgacctggcgcaaatgaacgggctgattcctgccgccgttatttgcgaaatcatcaacgacgacggcacgatggcgcgtatgcccgaactgatgaagtttgccgaagaacacaagctcaaaatcggcaccattaccgacctcatcgaataccgcagccgtaccgaaagcctgctcgaagacatgggcaatgcgcctgtacaaaccccgtggggcgagttccaacaacacgtttacgtcgacaaactctccggcgaaacccacctcgccctcgtcaaaggcacgcccgccgccgacaccgaaaccctcgtccgcgtccacgaacccttcagcgtgatggacttcatccaagccaatccgcgccattcatggtcgctgcccaaagcccttgagcgcatccaacaagccgaaagcggcgtcgtcatcctcttacaccgcgccgaagacggcgcatccctgctcgaccgcaccctgcccaaaggtgcaaaccaagcctacaaatgggacagcaaaagctacggcatcggcgcacaaatcctcgtcggcctcaacgtcaaaaaactgcgcgtcctcgggcagccctcatctttcaccggcctgaccggcttcggtttggaagtcgtcggctttgaagaagcggaaaaataa

SEQ ID NO: 48665 - DNA, 1887 bp, Neisseria meningitidis
atgccgtctgaagccgtttttcaaatgattgatatgaatacagaaaaccgttctccggaacaattcgatatcccgctcttcctcaaaaacctgcccaagctgccgggcgtgtaccgtttttttgacgaaggcggcaaagtcttatacgtcggcaaagcggtcaacctcaagcggcgcgtgtccggctatttccaaaaaaacgaccattcgccgcgcatcgcattgatggtaaaacaggttcatcatatcgaaaccaccatcacgcgttccgaagccgaagccctgattctcgaaaacaacctcatcaaagccttgtcgccgaaatacaatatccttttccgcgacgacaaaagctatccctacctcatgctcagcggacatcaatatccgcagatggcgtattaccgtggcacactgaaaaagccgaaccaatacttcggcccctatcctaacagcaacgccgtgcgcgacagcatccaagtcctgcaaaaagtcttcatgctgcgcacctgcgaagacagcgtgttcgaacaccgcgaccgcccttgcctgctgtatcaaatcaaacgctgcagcgcaccctgtgtcggccatatcagcgaagaagactaccacgacagcgtgcgcgaggcctcgacttttctcaacggcaagaccgacgaactgacccgcaccctgcaacacaaaatgcagaccgccgccgcgaatttgcaatttgaagaagccgcccgctaccgcgaccaaatccaagcgctcggcatcatgcagagtaatcagttcatcgacagcaaaaacccgaacaaccccaacgatatcgacctgcttgcgcttgccgtttcagacggcctcgtctgcgtacactgggtcagcatccgcggcggacggcacgttggcgataaaagctttttccccgacaccaaaaacgatcccgagccaaacggacaagattacgccgaagcctttgtcgcccaacactatctaggcaaaagcaaacccgacatcatcatcagcaactttcccgttcccgatgcgctaaaagaggctttggaaggcgaacatggcaaacaaatgcagttcgttaccaaaaccataggcgaacgcaaagtttggttgaaaatggcggaacaaaacgcgcaaatggcgattgcacaacgctgcctgcaacaaagcagccagcaacaccgtatcgacgagttggcaaaaatcctgaacatgaattcagacgacctcaaccgcctcgaatgcttcgacatcagccacacgcaaggcgaggccactattgcgtcctgcgttgtgtacgatgagcaaaacatccagccctcgcaataccgccgctacaacatcacgaccgccaaacccggcgacgactacgccgccatgcgcgaagtgttgacgcgccgttacggcaaaatgcaggaggccgaagccaacggcgagaccgtcaaatggcccgatgtcgtattgattgacggcggcaaagggcaaatcggcgtagccgtatcggtatgggaagaactcgggctgcacattcctttggtcggtatcgccaaaggcccggagcgcaaagccggtatggaggagctcatactgccttttaccggcgaagtcttccgcttgccgcccaacagcccggccttgcatttattgcaaaccgtacgcgatgaatcgcaccgtttcgccattaccggccaccgcaaaaaacgcgacaaagcccgcgttacctcctccttaagcgacatccccggcgtaggcagcaaacgccgccaagccctgcttacccgcttcggcggtctgcgcggcgtgattgccgccagccgcgaggatttggaacaagtggaaggcatcagcaaggcattggcggaaaccatttacaatcatctgcattag

SEQ ID NO: 48666 - DNA, 237 bp, Neisseria meningitidis; identical to SEQ ID NO: 40080

SEQ ID NO: 48667 - DNA, 3633 bp, Neisseria meningitidis
ttggacggtgacggtatagaaaccgttgccaccaaaggctttgcaggtgcattgttcgaccaccgcaatcaaggcatccgcaccgccaccggttgggtttctgccgatgacggtctgcttgtgcgcgatttgaacggcaacggcatcatcgacaacggtgcggaactcttcggcgacaacaccaaactggcagacggttcttttgccaaacacggctacgcggctttggccgaattggattcaaacggcgacaacatcatcaacgcggcagacgccgcattccaatccctgcgtgtatggcaggatctcaatcaggacggcatttcccaagctaatgaattgcgtacccttgaagaattgggtatccaatctttggatctcgcctataaagatgtaaataaaaatctcggtaacggtaacactttggctcagcaaggcagctataccaaaacagacggtacaaccgcaaaaatgggggatttacttttagcagccgacaatctgcacagccgcttcaaagacaaagtggaactcactgccgaacaggcaaaagccgccaatcttgcgggcattggtcgtctgcgcgatttgcgcgaagctgccgcattgtccggcgatttggccaatatgctgaaagcttattctgccgccgaaactaaagaagcacagttggcattgttagataatttgattcacaaatgggcggaaaccgattcgaactggggcaaaaaatcgccaatgcgactttcaaccgattggacgcaaacggctaatgaaggtattgcactgacaccatcccaagtagcacaactaaaaaagaacgctttagtttccctttctgataaagctaaagcagctattgacgccgcccgcgaccgcattgccgtgcttgatgcctacacggggcaggattccagcacgctctattacatgagcgaggaagatgcgcttaatatcgtcaaagtaaccaacgatacatacgaccatctcgccaaaaacatctaccaaaacctgttgttccaaacccgtttgcagccatatttgaatcaaatcagtttcaaaatggaaaatgatacgttcactttggattttagtggtcttgttcaagcatttaaccatgtcaaagaaactaatccgcaaaaagcttttgtggatttggccgagatgcttgcatatggcgaacttcgttcttggtatgaaggccgaagactaatggccgattatgtggaggaggcaaaaaaagcaggtaaatttgaagattaccagaaagtgttgggtcaggagaccgttgcattattagctaaaacatcgggtacgcaagcagatgatatcctgcaaaatgtaggctttggtcataataaaaatgtttctttatatggtaatgacggcaacgacactctgatcggcggtgccggtaatgattacttggagggcggcagcggttcggatacttatgtcttcggcaaaggcttcggtcaggatacggtctataattacgactacgctaccggacgcaaagacatcatccgctttaccgacggtattacagccgatatgctgacttttacccgagagggcaaccatcttcttatcaaggcaaaagacggcagtggacaagtgactgttcagtcctatttccagaacgatggctcaggtgcttaccgtatcgatgagattcatttcgataacggcaaagtactggatgttgccactgtcaaaaaactggtacagcaatccaccgacggttcggacagattgtatgcctaccaatccggaaataccttaaatggcggattgggcgatgactatctgtacggtgccgacggggatgacctgctgaatggtgatgcaggcaacgacagtatctacagtggcaatggcaatgatacgctcgatggaggagaaggcaacgacgccctgtacggctataatggtaacgatgtactgaatggtgccgaaggcaatgatcatttgaacggcgaagacggtaacgacactctaatcggcggtgcaggcaatgattacttggagggcggcagcggttcggatacttatgtcttcggcaaaggcttcggtcaggatacggtctataattacgactacgctaccggacgcaaagacatcatccgctttaccgacggtattacagccgatatgctgacttttacccgagagggcaaccatcttcttatcaaggcaaaagacggcagtggacaagtgactgttcagtcctatttccagaacgatggctcaggtgcttaccgtatcgatgagattcatttcgataacggcaaagtactggatgttgccactgtcaaaaaactggtacagcaatccaccgacggttcggacagattgtatgcctaccaatccggaaataccttaaatggcggattgggcgatgactatctgtacggtgccgacggggatgacctgctgaatggtgatgcaggcaacgacagtatctacagtggcaatggcaatgatacgctcgatggaggagaaggcaacgacgccctgtacggctataatggtaacgatgtactgaatggtgccgaaggcaatgatcatttgaacggcgaagacggtaacgacactctaatcggcggtgcaggcaatgattacttggagggcggcagcggttcggatacttatgtcttcggcaaaggcttcggtcaggatacggtctataattacgactacgctaccggacgcaaagacatcatccgctttaccgacggtattacagccgatatgctgacttttacccgagagggcaaccatcttcttatcaaggcaaaagacgacagtggacaagtgactgttcagtcctatttccagaacgatggctcaggtgcttaccgtatcgatgagattcatttcgataacggcaaagtactggatgttgccactgtcaaagaactggtacagcaatccaccgacggttcggacagattgtatgcctaccaatccggaaataccttaaatggcggattgggcgatgactatctgtacggtgccgacggggatgacctgctgaatggtgatgcaggcaacgacagtatctacagtggcaatggcaatgatacgctcgatggaggagaaggcaacgacgccctgtacggctataatggtaacgatgcactgaatggtggcgaaggcaatgatcatttgaacggcgaagacggtaacgacactctgatcggcggtgccggtaatgattacttggagggcggcagcggttcggatacttatgtcttcggcaaaggcttcggtcaggatacggtctataattaccatgtggataaaaactctgacactatgcactttaaaggatttaaagcagcagatgttcattttatccgttccggaagtgatttggtgcttagcgcttctgaacaagacaacgtacgtatttccggattcttctatggtgaaaaccatcgtgtagatacatttgtctttgatgatgcagctatcagtaatccagattttgccaagtatattaatgctggcaataatttggtacagtctatgtctgtgttcggttctaatactgctgcgacaggaggaaatgtggatgccaatatacaatccgtacagcagccgttattggtaacgccatctgcataa

SEQ ID NO: 48668 - DNA, 1434 bp, Neisseria meningitidis; identical to SEQ ID NO: 39702

SEQ ID NO: 48669 - DNA, 360 bp, Neisseria meningitidis; identical to SEQ ID NO: 39544

SEQ ID NO: 48670 - DNA, 783 bp, Neisseria meningitidis; identical to SEQ ID NO: 38566

SEQ ID NO: 48671 - DNA, 321 bp, Neisseria meningitidis; identical to SEQ ID NO: 38688

SEQ ID NO: 48672 - DNA, 372 bp, Neisseria meningitidis; identical to SEQ ID NO: 39100

SEQ ID NO: 48673 - DNA, 393 bp, Neisseria meningitidis; identical to SEQ ID NO: 45621

SEQ ID NO: 48674 - DNA, 597 bp, Neisseria meningitidis
atgaatatcaatacttccgaaaataaagatgctgttgccgaacacaccggacaatggttggaaaaagccgtcatcggtctgaacctgtgtccctttgccaaagccccccacgttaaaaaccttgtccgcatcgcaatcagcgaagccaaacaccttgacagttttttggaagacttggacgaagaactgcagcgactgggcaatacacccgccaccgaactggaaaccaccctgctggttcacccgaccctattccccgatttcgacgtattcaacgatatgctcgatattgccgatgccgccgttatcgaaaacggcttggaaggcatcgtccaaatcgcaccgttccatccccaattccgctttcagaataccgaacccgacgacatcggcaactacaccaaccgttctccctatccgacgctgcacctcatccgcgaagacagcattgccaaagccgcacaagcctttcccgacgcttcggcaatattcgaacgcaatatcgccctgctggaaaaaatgggacatgaaggctgggcaaaactcggtatcacatcctgcccttatccgcacaataagaaaaatatttcaaaatga

SEQ ID NO: 48675 - DNA, 312 bp, Neisseria meningitidis; identical to SEQ ID NO: 38726

SEQ ID NO: 48676 - DNA, 957 bp, Neisseria meningitidis
atgaatataatcgggctggacatctcaaaggacaccatagacgcaacattgcataaaacaaacggaagtatccattacattaaatttaagaataatgatgatggattaaaacagtttagattgtggataaagggaaacagaatcagaaaagtctatatcggcatggaggcaacaggcatctattacgaaaaggcagcagatatgctttcttcctactatactgtttacgttattaatcccttaaaaatcaaggactacggaaaaagcaggtttaaccgtaccaaaaccgacaaagcagattcaaacctgatagcagactacataaaaaggcatcaagatacattgataccgtatcagatacccaaaaacaaagcactgcaaaaactgattaatcttaaaaaccaattacagcaacagcagaagcaaattaaaaaccgtcttcatagcactgaagaagacttcataaggaacatacatcaagacttgatagataccatacaggacaagatggaacaggtaaaaatagccatatccgaacaaatcaaaaaacaaacggactataaccattaccgcaatcttcaaaccatcccgagcataggcaaagacaccgcatcagttctttatgcgcaactgacagaaaaacattttaaaaccgcaaaccagtttgtatcctatgccggattaagtcccgccatcatacaatcagggacaagcgtaagaggtcggggcagattgagccgatacggaaacagacgattaaaaagtacgctgtatatgcccgccctttgtgcttaccgttttaacgcatttccgaaattaataaataatctgaaaaaagcgggtaagccaaagatggtaattatcgttgccatcatgcgcaaactggcgaagctcgcctattatattgttaaaaccggccagccttacgatgcggaaagacaccgattgaatcaataa

SEQ ID NO: 48677 - DNA, 165 bp, Neisseria meningitidis; identical to SEQ ID NO: 38385

SEQ ID NO: 48678 - DNA, 927 bp, Neisseria meningitidis; identical to SEQ ID NO: 38159

SEQ ID NO: 48679 - DNA, 1509 bp, Neisseria meningitidis; identical to SEQ ID NO: 39804

SEQ ID NO: 48680 - DNA, 2889 bp, Neisseria meningitidis
atgagtaacacaaccgtagaacaatttgccgccgagctgaaacgccccgtcgaagacctgttgaaacagttgaaagaagccggcgtcagcaaaaacagcggcagcgattccctgacgctggacgacaaacagcttctgaacgcctacctgaccaagaaaaacggcagcaacggcggcaccatcagcatccgccgcaccaaaaccgaagtcagcaccgttgacggcgtaaaagtcgaaacacgcaaacgcggacgcactgtcaacattccttctgccgaagaattggcagcacaggtaaaagccgcccaaacccaagccgcacctgtccggccggagcagacggcagaagacgcggcaaaagcccgagccgaagctgccacacgtgcagaagcccgtgccaaggcagaagcggaagcggcaaaactgaaagcggcaaaagcaggcaacaaagccaaacctgccgcgcagaaacccaccgaagcaaaagccgaaaccgcacccgttgcggcggaaaccaaacccgccgaagaaagcaaagcggaaaaagcccaagccgacaaaataccgtctaaaaaacccgccgagcccaaagaaaaagccgccaagccgaaacacgagcgaaacggcaaaggcaaagatgccaaaaaaccggcgaaacctgccgcacccgccgccccgcaacccgtggtcagcgcagaagaacaggcgcaacgcgacgaagaggcgcgccgtgccgccgcacttcgcgcccaccaggaagccctgttgaaagagaaacaggaacgccaggcacgccgcgaagccatgaaacaacaggcagaacaacaggcaaaagccgcacaggaagccaaaaccggcagacagcgtcccgccaaacctgccgagaaaccgcaggcagccgcgccggccgtcgaaaacaaacctgtcaatccggcaaaagcgaaaaaagaagaccgccgcaaccgcgatgacgaaggtcaaggccgcaacgccaaaggcaaaggcggaaaaggcggacgcgaccgcaacaatgcacgcaatggcgacgacgagcgcgtacgcggcggtaaaaaaggcaaaaaactcaaactcgagccgaaccaacacgccttccaagcaccgaccgaacctgtcgtacacgaagttttggtgcctgaaaccattaccgttgccgacttggcacacaaaatggcagtcaaaggcgtggaagtggtcaaagccctgatgaagatgggcatgatggttaccatcaaccaatccatcgaccaagacaccgccctgattgtcgtcgaagaactcggacacatcggcaaacccgccgcagcggacgaccctgaagcattcttggacgagggcgcggaagcggtggaagccgaagcattgccgcgtccgcccgtcgttaccgtcatgggccacgtcgaccacggcaaaacctcgctgctggactacatccgccgtaccaaagtggtacagggcgaagcaggcggcattacccaacacatcggtgcataccacgttgaaaccccacgcggcgtgattaccttcttggacactccgggtcacgaagcgtttactgccatgcgtgcgcgcggtgcgaaagcaaccgatatcgtgattcttgtggtcgccgccgacgacggtgtgatgccgcaaaccatcgaagcgattgcccacgccaaagcggcaggcgtaccgatggtggttgccgtcaacaaaatcgataaagaagccgccaacccagagcgtatccgccaagagctgaccgcacacgaagtcgtgcctgacgaatggggcggcgatgtacagtttatcgacgtttccgctaaaaaaggcctgaacatcgatgcattgctcgaagcagtcttgctcgaagccgaagttttggaactgactgcccctgtcgatgcacctgccaaaggtatcatcgttgaggcacgtttggacaaaggccgcggcgcggttgccacattgctggttcaaagcggtacgctgaaaaaaggcgatatgctgctggccggtacggcattcggcaaaatccgcgcgatggtcgatgaaaacggcaaatccattaccgaagccggcccgtccatccccgtcgaaatcctcggcttgtccgacgtaccgaatgcgggtgaagacgcgatggtattggcggacgagaaaaaagcgcgcgaaatcgccctcttccgccaaggcaaataccgcgacgtgcgccttgccaaacagcaggcggcgaagctggaaaatatgttcaacaatatgggcgaaacccaggcccaatccttgtccgtcatcatcaaagcagacgttcagggctcttacgaggctttggcgggcagcctgaaaaaactgtccaccgacgaggtgaaagtgaacgtgttgcacagcggcgtgggcggcattaccgaatcggatgtcaaccttgccatcgcttcgggcgcgttcattatcggctttaacgtgcgtgcagatgcctcttcgcgcaaacttgccgaaaatgaaaacgtggaaatccgctactacaacatcatctatgatgccatcgacgacgtgaaagcggcgatgagcggtatgctttctcccgaagagaaagaacaggttaccggtacggtcgaaatccgtcaggttatctccgtttccaaagtcggcaatattgcaggctgtatggttaccgacggcgtggtcaaacgcgattcccatgtccgcctcatccgcaacaacgtggttatccacacgggcgaactggcttcgttgaaacgctataaagacgatgtaaaagaagtccgcatgggcttcgagtgcggtctgatgctcaaaggctacaacgaaatcatggaaggcgaccaactggaatgcttcgacatcgtcgaagttgcccgcagcctgtaa

SEQ ID NO: 48681 - DNA, 1398 bp, Neisseria meningitidis; identical to SEQ ID NO: 39557

SEQ ID NO: 48682 - DNA, 204 bp, Neisseria meningitidis; identical to SEQ ID NO: 39642

SEQ ID NO: 48683 - DNA, 540 bp, Neisseria meningitidis; identical to SEQ ID NO: 44661

SEQ ID NO: 48684 - DNA, 1419 bp, Neisseria meningitidis
gtgaaaccgctgcgcagactgacaaacctccttgccgcctgcgccgtagcggccgccgccttcggacagcccgccctcgcggcggacttggcgcaagacccgttcattaccgataacgcccaacggcagcactacgaacccggcggcaaataccacctcttcggcgacccgcgcggcagcgtttccgaccgcaccggtcaaatcaacgtcatccaagactatacccaccagatgggcaacctgctcatccaacaggcaaacatcaacggcacaatcggctaccacacccgcttttccggacacggacacgaagaacacgcccccttcgacaaccacgccgccgacagcgcaagcaaagaacaaggcaacgttgacgaaggctttaccgtgtaccggctcaactgggaaggacacgagcaccatcccgccgatgcctacgacggcccgaagggcggcaattaccccaaacctacgggcgcacgcgacgaatacacctatcacgtcaacggcacagcacgcagcatcaaactcaatccgaccgacacccgcagcatccggcaacgcatatccgacaattacagcaacctcggcagcaatttctccgaccgcgccgatgaagccaacagaaaaatgttcgagcacaatgccaagctcgaccgctggggcaacagcatggagtttatcaacggcgtcgccgccggagcactcaacccctttatcagcgcgggcgaagccttgggcataggcgacatactgtacggaacgcgctatgccatagacaaagccgcaatgcgcaacatcgcccccttgcccaccgagggcaaattcgccgtcatcggcggcttgggcagcgtggcgggctttgaaaagaatacgcgcgaagccgttgaccggtggatacaggaaaaccccaatgccgccgaaaccgtcgaagccgtcttcaacgttgccgctgccgccaaagtcgcgaagctggcaaaggcggcgaaaccggggaaagctgcggttagcggggatttctcagactcctacaagcataacactgcttcaagattatctcagtctgtagatggagaaatgtttcaaacccgcaatgttgattttaaagcaaaatctattgggactaaaattcatgatggagctcaagggaaacatatttcgggacatagaaactacattgaaggtaagagtactttaaatcaaaacattaatcctcaagaattgttgaacggaatacattcaggtgcttatccagttatttctaaaggagcaagaggaaatcctgttgttgattttgggtatcctataggcagcgatgggaaatcaggattaagtaccaattttggtacgattcattcaggtaaaaatggagttcacattgttccggctaaccctaaaaccattaaaaaggtgcaatag

SEQ ID NO: 48685 - DNA, 288 bp, Neisseria meningitidis; identical to SEQ ID NO: 39764

SEQ ID NO: 48686 - DNA, 603 bp, Neisseria meningitidis; identical to SEQ ID NO: 36499

SEQ ID NO: 48687 - DNA, 1032 bp, Neisseria meningitidis
atgggcatcaaagtcgccatcaacggctacggacgcatcggccgccaggttttgcgcgccatctacgattatcagattcaagaccaactccaaatcgtcgccgtcaacgccagcggcagccttgaaaccaacgcccacctcaccaaattcgacaccgtgcacggacgctttgaagccgacgtatcccacgacggcggcaacctcatcgtcaacggcgacaaaatccccttcttctcgacccgcaaccctgccgaactgccgtggaaagaactcggtgtcgatttggtcatggaatgcaccggcgcgttcaccagcaaagaaaaagccaaagttcatctggaaagcggcgcgaaaaaagtcctcatttccgcaccgggcggcgacgatgtcgatgcaaccgtcgtgtacggcgtgaacgacagcatcctgaccgccgacatgaccgtcgtttccaacgcttcctgcaccaccaactgcctctcgccggttgccaaagtgttgagcgaaagcgtcggcatcgtcaaaggcgcgatgaccaccatccacgcgctgaccaacgaccaaaccgttaccgacgtgcgccacaaagacctgcgccgcgcccgcagcggcgtggaaaacatgattccgaccaaaactggcgcggcaaaagccgtcggactggtactgcccgaattgaaagacaaactcgacgggcttgccatccgcgtgccgaccgtcaacgtatcattggtagatttgaacttccaagccgcgcgcgacacgacaatcgaagaaatcaacgcactgatgaaagccgcctcggaagcaggcgcgctcaaaggcgttttaggctacaacaccctgcccttggtttccatggacttcaaccacaccaccgaagccagccacttcgacgcaacactgaccaaagtcgttgacggcaacatgattaaagtcttcgcatggtatgacaacgaatggggcttcagctgccaaatgctgaacaccgcacgccgtatgttcggacttgaagtgcgcccgctcaaataa

SEQ ID NO: 48688 - DNA, 210 bp, Neisseria meningitidis; identical to SEQ ID NO: 38274

SEQ ID NO: 48689 - DNA, 291 bp, Neisseria meningitidis; identical to SEQ ID NO: 39715

SEQ ID NO: 48690 - DNA, 687 bp, Neisseria meningitidis
atgtacgcatttactgccgcacagcaacagaaggcactcttctggctggtgcttttccatatcctcatcatcgccgccagcaactatctggtgcagttccccttccaaattttcggcatccacaccacttggggcgcgttttcctttcccttcatcttccttgccaccgacctgaccgtccgcattttcggttcgcacttggcacggcggattatcttttgggtcatgttccccgcccttttgctttcctatgtcttttccgttttgttccacaacggcagttggacgggcttgggcgcactgtccgaattcaacacctttgtcggacgcatcgcgctggccagctttgccgcctacgcgctcggacaaatccttgatatttttgtgttcaacaaattacgccgtctgaaagcgtggtggattgccccgaccgcatcaaccgtcatcggcaacgctttggatacgctggtatttttcgccgttgccttttacgccagcagcgatggatttatggcggcaaactggcagggcatcgccttggtcgattacctgttcaaactcaccgtctgcggtctgtttttcctgcccgcctacggcgtgattctgaatctgctgacgaaaaaactgacgaccctgcaaaccaaacaggcgcaagaccgccccgcgccctcgctgcaaaatccgtaa

SEQ ID NO: 48691 - DNA, 564 bp, Neisseria meningitidis; identical to SEQ ID NO: 38634

SEQ ID NO: 48692 - DNA, 345 bp, Neisseria meningitidis; identical to SEQ ID NO: 39778

SEQ ID NO: 48693 - DNA, 714 bp, Neisseria meningitidis; identical to SEQ ID NO: 46738

SEQ ID NO: 48694 - DNA, 255 bp, Neisseria meningitidis; identical to SEQ ID NO: 40075

SEQ ID NO: 48695 - DNA, 453 bp, Neisseria meningitidis; identical to SEQ ID NO: 39716

SEQ ID NO: 48696 - DNA, 750 bp, Neisseria meningitidis; identical to SEQ ID NO: 36645

SEQ ID NO: 48697 - DNA, 1056 bp, Neisseria meningitidis; identical to SEQ ID NO: 47211

SEQ ID NO: 48698 - DNA, 1350 bp, Neisseria meningitidis; identical to SEQ ID NO: 38529

SEQ ID NO: 48699 - DNA, 789 bp, Neisseria meningitidis; identical to SEQ ID NO: 44945

SEQ ID NO: 48700 - DNA, 654 bp, Neisseria meningitidis; identical to SEQ ID NO: 47925

SEQ ID NO: 48701 - DNA, 360 bp, Neisseria meningitidis; identical to SEQ ID NO: 39325

SEQ ID NO: 48702 - DNA, 549 bp, Neisseria meningitidis; identical to SEQ ID NO: 36303

SEQ ID NO: 48703 - DNA, 1215 bp, Neisseria meningitidis; identical to SEQ ID NO: 38760

SEQ ID NO: 48704 - DNA, 861 bp, Neisseria meningitidis; identical to SEQ ID NO: 38865

SEQ ID NO: 48705 - DNA, 1467 bp, Neisseria meningitidis; identical to SEQ ID NO: 39873

SEQ ID NO: 48706 - DNA, 1644 bp, Neisseria meningitidis
atgaatgcttttacccgtgcatggtatgcgctcgaacgccattatcaggatacgcgtcatgtccttttgcgcgaccgctttgcctgcgaacccgaccgttttgagcgtatgcacgagcgtttggacgggatgttgttcgattacagcaaaaaccgtttgggcgaagatacgctgcaactgctctgcaatcttgccgatgcggcggatttggaagggaaaatgcgtgctttgcggacgggtgcgaaggtcaacaacagtgaggggcgtgccgcgctgcatacggctttgcgcctgcccgacggtgcgggtgccgtttatgcggacggcagggacgtgttgcccgaaatccgccgcgagttaaatcgtgcgttgaagtttgcacacagtttggacgacggttcgtatcaggggacaaccggaaaacggattacggattttgtccacatcggcataggcggatccgacctcgggccggcaatgtgcgtgcaggcacttgagccgttcagacggcatatcgccgtccattttgccgccaacgccgatcctgcctgcctggatgaggtcttatgccgtctgacccccgaaacgacggtgttttgcgttgccagcaagtccttcaaaacgcctgaaaccctgctcaatgcagaggcggtcaaggcttggtatcgtggtgcggggttctcggaatccgaaacagcacgccatttttgcgcggtgtctgccgacactgcggcagctgcggcttttggtatcgcggcggaacgcgtgtttgcgatgtacgactgggtgggcggacgctattccgtctggtcgcccgtcggtttgcccgtgatggttgcggtcggcggggcgcgtttccgcgagttgttggcgggggcgcacgcgatggacagccattttttccacacgccgccgcgccgcaacattcccgttctgatggcactgattgccgtgtggtataacaatttccaacacgcggacgggcagaccgccgttccgtacagccacaacctgcgcctgctgccggtgtggctgaaccagctcgatatggagagtttgggcaaaagccgcgcttcagacggcagtcccgccgtgtgcaaaacgggcggcatcgtgttcggcggtgaaggggtcaactgccagcacgcctatttccaactgctccaccaaggcacgcgcctaattccctgcgactttatcgtcccggtgacggcgcagggcgtggaggacggacgcagccgttttaccgttgccaacgcctttgcccaagcggaagccctgatgaagggcaaaaccttggacgaagcacgcgccgaactggcagatttgcccgaagcggaacgcgaacgcctcgcgccgcacaaagagttccccggcaaccgccccagcaacagcatcctgctcgaccgcctcacgccctacaatctgggtatgctgatggcggcttacgaacacaaaacctttgtgcagggtgtaatttgggacatcaatcccttcgatcagtggggggttgagtacggcaaacagttggcgaaaaccatcatcggcgaactggaaggcggcacgtccgtacacgatgcctcgaccgaagggctgatggcgttttaccgcgaatgccgtctgaaaggcggcggcgcggcataa

SEQ ID NO: 48707 - DNA, 1281 bp, Neisseria meningitidis; identical to SEQ ID NO: 39228

SEQ ID NO: 48708 - DNA, 1266 bp, Neisseria meningitidis; identical to SEQ ID NO: 39430

SEQ ID NO: 48709 - DNA, 2076 bp, Neisseria meningitidis; identical to SEQ ID NO: 38829

SEQ ID NO: 48710 - DNA, 1122 bp, Neisseria meningitidis
atgagtaatcaagatttttatgcgacgctgggtgtggcaagaacagctaccgatgatgagattaaaaaagcctaccggaaattggcgatgaaatatcatcccgaccgcaatcctgacaataaagaggcggaagagaagtttaaagaagtacaaaaggcgtatgaaactttgtccgacaaggaaaagcgcgctatgtacgaccagtatggtcatgcggcgtttgaaggcggcggacaggggggcttcggagggtttggcggatttggcggtgcgcagggttttgactttggggatattttcagccaaatgtttggaggcggttcggggcgcgcccagcctgattatcagggtgaggacgttcaagtcggtatcgaaatcacgcttgaagaagccgcaaaaggtgtgaagaaacgcatcaatattccgacttatgaagcgtgtgatgtctgtaacggcagcggcgcgaaaccggggacatccccggaaacctgcccgacttgcaaaggttcgggtacggtgcacatccagcaggcgattttccgtatgcagcagacttgtccgacctgccacggtgcgggcaagcacattaaagaaccttgcgtcaaatgccgtggcgcggggcggaataaggcggtcaagacggtggaagtcaatattcccgccggtatcgatgacgggcagcgtatccgtttgagcggcgaaggcggaccgggtatgcacggtgcgcctgccggcgacctgtatgtaaccgtccgcattcgggcgcataagattttccaacgcgacggtctggacttgcattgcgaactgccgatcagttttgccacggctgctttgggcggggagttggaagtgccgaccttggacggaaaggtcaagctcaccgtccccaaagaaacccaaaccggcaggaggatgcgcgtgaagggtaagggtgtcaaatctttacgcagcagcgcgaccggcgatttgtactgccatattgttgtcgaaacgcctgtcaatttgaccgaccgtcaaaaagagcttttggaagaatttgagcggatttctaccggcttggaaaaccaaacaccgcgcaagaaatcgtttttagacaagctgcgcgatttgtttgattga

SEQ ID NO: 48711 - DNA, 1290 bp, Neisseria meningitidis; identical to SEQ ID NO: 38999

SEQ ID NO: 48712 - DNA, 513 bp, Neisseria meningitidis; identical to SEQ ID NO: 38107

SEQ ID NO: 48713 - DNA, 648 bp, Neisseria meningitidis; identical to SEQ ID NO: 38134

SEQ ID NO: 48714 - DNA, 2151 bp, Neisseria meningitidis
atgctcaccgatttagaaaaaaacgccatccgcgaccattaccaaaacatcggcaaaaacctgcccggtttccgtccgcgcgcttcgcagcgggaaatgattgcggcggttgccaacgctttttcgcggacgttggcgcgcgaagaaggcggcgagccgcccaagcgcgagggcgagagcattgccgtaatcgaaggcccgaccggcgtgggcaaatcgcttgcctacctgctggcgggcggcatcatggcgcaaacacgcggcaagcggctgattgtgagcagcgcgacggttgccttgcaggagcagttggtagaccgcgacctgccgtttttggtcgaaaaaagcggtttggaactgagcttcgcgcttgccaaagggcgcggccgttatctctgcccctacaaactctatcaactgacgcaaaacaacgcccagcaaaacctgacgggttttgaaacgccggaagtgttgtgggacagcaaacccaagcccgaagaattgaagctgctgcgcgacatcgccgacgaattttccgcccgacggttcaacggcgaccgcgacacttggccggaaaaaatcgatgacgcgatttggctcaaagtgaccaacgaccgccacggctgcctgaaaaccgcctgtcccaaccgtccggaatgccctttttacctggcacgcgatgtcttggaaaccgtcgatgtcgtcgttgccaaccacgatcttctgcttgccgacatcagcatgggcggcggtgtaattctgcccgcgcccgaaaacagtttctattgtatcgacgaagcgcaccacctgcccaaaaaagccctcagccgttttgccgccgaacattcatggaatattgccgtttggacgctggaaaaactgccgcagatgaccggcaaaattgccgcgctgaccgataaagccgaacttgccaaccttgccgacgaaaccgccgcatcattgctcgacagcctgcacgaatggcagttccatttggcggaagagccgtctttaagtttggaggtgtctgaaaacgacagacgaaccaacagcgaaccgacttggctgtgggaagacggcaaaatccccgaaggcctcgaaaccaccgtttccaacaccgccattgccgcacgcagcctgctcaaacacgttatcgggctgaacgatgcgctttccgctgcgcgccgcgaaaaagaacaagacagcgcgctcctcgaccgcctgaccggcgagttcggtctttttatcgcccgtatcgaacaaatcagcgcggtttgggatttgctctccaccgtccctctcgaaggtgaagaaccgctggcaaaatggataacccgccgcgccgacgacaaaaacgactacattttcaacgccagccccatcagcagcgcgtcccacctcgccaacagtctgtggcggcgcgcggcaggcgcggtgttgacctccgccaccctgcaatccttgggcaactttaacctgatattgcgccaaaccgggctgcaatggctgcccgaaaccaccaccctcgccctcaaaagcccctttgactttgaaaaacagggcgaactctacatccctcccatatacgccagccccaaagaccccgaagcccacaccgccgccatcatcgaatggctgcccaagcttatttcgcccaccgaagccatcggcacgctcgtcttgttttcctcgcgcaaacaaatgcaggatgtcgccctgcgcctgcccggagactacctgccgctcttgctcgtacaaggcgaattacccaaagccgtcctcctgcaaaaacaccaccgggccatagaagaaggcaaagccagcatcatcttcggactcgacagctttgccgaaggactcgacctgcccggcaccgcctgcgtgcaagtcatcatcgccaaacttcccttcgccatgcccgacaaccccatcgaaaaaacccaaaaccgctggatagaacagcgcggcggcaaccctttcatcgaaatcaccgtccccgaagccggcatcaaactgatccaggccgtcggccgcctcatccgcaccgaacaagactacggccgcgtaaccatcctcgacaaccgcatcaaaacgcagcggtacggccaacaattattggccggcctgccaccgtttaaaaggatagggtaa

SEQ ID NO: 48715 - DNA, 390 bp, Neisseria meningitidis; identical to SEQ ID NO: 38449

SEQ ID NO: 48716 - DNA, 2586 bp, Neisseria meningitidis
atgttagaagcctatcgtaaagccgccgccgagcgcgccgccctcggcattcccgccctccctttgaacgcgcagcaaaccgccgatttggttgagctgctgaaaagcccgcccgcaggcgaaggcgagttcttggtcgaactgcttgcccaccgtgttccgcccggtgtggacgatgccgccaaagtcaaagcctcattcctggctgccgttgccgaaggcagcgcgtccagcccgctgatctcccccgaatatgcgaccgaactcttaggtacgatgctcggcggttacaatatccacgccttaatcgaactcttggacgacgacaaactcgcgcccattgccgccaaaggcttgaaacatacgcttctgatgttcgattccttccacgacgttcaggaaaaagccgaaaaaggcaacaaatacgcgcaagaagttttgcaatcttgggcagatgccgaatggtttacctcacgcgccaaagttcccgaaaaaatcaccgttaccgttttcaaagttgacggcgaaaccaatacagacgacctctcccccgcgcccgacgcgtggagtcgtcccgatattccgctgcacgcgctggccatgctgaaaaacccgcgcgacggcatcacgcccgacaaaccgggcgaagtcggtccgattaaattgttggaagaactcaaagccaaaggccatccggttgcttacgtcggcgacgtggtcggtactggttcttcacgcaaatccgcgaccaactccgtcatttggcataccggcgaagacattccgttcgtgccgaacaaacgcttcggcggcgtgtgcttgggcggcaaaatcgcgccgattttcttcaatacccaagaagactccggcgcgctgccgattgaagtcgatgtttccgctctaaaaatgggcgatgtcgtcgatatcctgccttatgaaggcaaaatcgtgaaaaacggcgagactgttgccgagtttgaattgaaatcacaagtattgctggacgaagtgcaagccggcggccgtatcaacctgattatcggccgaggtctgaccgccaaagcgcgcgaagccctgaaactgcctgcctctactgcattccgcctgccgcaagcgcctgccgaaagcaaagccggtttcaccttggcgcaaaaaatggtcggccgcgcctgcggtcttcccgaaggacaaggcgtgcgtccgggtacttactgcgaaccgcgtatgacgacggtcggctcgcaagacacgaccggcccgatgacccgcgacgagttgaaagacttggcttgtttgggcttctccgccgatatggtgatgcagtctttctgccacaccgccgcctatccgaaacctgtcgatgtaaaaacccataaagaactgcccgcctttatttccacccgtggcggcgtgtccctgcgtccgggcgacggcgtcatccactcgtggctcaaccgcctgctgctgcccgataccgtcggcaccggcggcgacagccacacccgtttccccatcggtatttccttccccgccggctccggcttggttgcctttgccgccgcaacaggcgtaatgccgctcgatatgcccgagtctgtattggtacgcttcagcggcaaactgcaaccgggtgtaaccctgcgcgatttggtgaacgccattccgctgtacgcaatcaaacaaggtttgctgaccgttgccaaagccggtaagaaaaacatcttctccggccgcatcctcgaaatcgaaggcctgcctgatttgaaagtggaacaagcctttgaattgaccgacgcatccgccgaacgctccgccgccggctgtaccgtgaagctcaacaaagagccgattatcgagtacatgaaatccaacgtcgtgttgatgaaaaacatgattgccgacggctatcaagacccgcgtactttggaacgccgcatcaaagccatggaaaaatggctggcaaatcccgagttgctcgaagcggataaagatgccgaatacgccgccgtgattgaaatcaacatggacgacatcaaagagccgattatcgcctgcccgaacgacccggacgacgtgtgcttcatgtccgaacgctccggcaccaaaatcgacgaagtattcatcggttcgtgtatgaccaacatcggccacttccgcgccgcctccaaacttttggaaggcaaggcagacacccccgtccgcctgtggattgcgccgccgaccaaaatggacgcgaaacaattgtccgacgaaggacactacggcgtactcggacgtgccggcgcgcgtatggaaatgccgggttgctccttatgtatgggtaatcaggcgcaagtacgcgaaggtgcgaccgttatgtccacctccacccgcaactttccgaaccgtttgggtaaaaacacctttgtttacctcggttcggcggaattggcagcgatttgctccaaactgggtaaaatcccgaccgttgaagaatatcaagccaatatcggcatcatcaacgaacagggcgataaaatctaccgctatatgaacttcaacgaaatcgacagctacaacgaagtagccgagaccgtgaacgtttaa

SEQ ID NO: 48717 - DNA, 501 bp, Neisseria meningitidis
atgaatgcaatgccccaaaccgccgcacaaaacgaaaccctgcacacttgtagcattattgtcgatgatgcacaggatttttcccccatgcttctcgatgcagggcgggacgacacacttatcagcgaatcgatgattccgcaaatccgcaccgttgccgccctgatagccgccgaacggcacgacttcagccgcagcagccccgccgagtttaccgatgccgccgatttttttgccgcacggattctcgtattgggcgtgcgacgcttccatctggacgtatcgctgcttcagattttgaaaaccgccaacagccgcgcccgccgctttgccgaaaaacaccgcctgtttttcacacccgcacaagccgaattgagcctgaacaaacacaaaaaccgccgcctgctgaccgtagaaaccgaacacgaagtcgaaaacaaaggcaacccagtcgccaacagcctcgcatttgtccgcaaattgcaccccctgcccctgtaa

SEQ ID NO: 48718 - DNA, 1422 bp, Neisseria meningitidis; identical to SEQ ID NO: 38326

SEQ ID NO: 48719 - DNA, 876 bp, Neisseria meningitidis; identical to SEQ ID NO: 38647

SEQ ID NO: 48720 - DNA, 1176 bp, Neisseria meningitidis; identical to SEQ ID NO: 38512

SEQ ID NO: 48721 - DNA, 2559 bp, Neisseria meningitidis; identical to SEQ ID NO: 39560

SEQ ID NO: 48722 - DNA, 1143 bp, Neisseria meningitidis; identical to SEQ ID NO: 39151

SEQ ID NO: 48723 - DNA, 222 bp, Neisseria meningitidis; identical to SEQ ID NO: 45776

SEQ ID NO: 48724 - DNA, 303 bp, Neisseria meningitidis
atgactctcactaaagcagaactggccgatattttggtagacaaagtcagcaacgtcaccaaaaacgatgccaaagaaatcgtcgaactcttttttgaggaaatccgcagcactttggcaagcggcgaagaaatcaaaatttccggtttcggaaatttccagttgcgcgacaagccgcaacgcccgggtcgtaatcctaaaaccggcgaggaagtgccgattaccgcccgccgcgtggtaactttccatgccagccagaaactcaaaagcatggtggaacactactatgacaaacaacgttga

SEQ ID NO: 48725 - DNA, 1284 bp, Neisseria meningitidis
gtgatacgcatatcggggaaaaacctgctgccgatggcagaggctttgtgtgggaaaacgcccaagccgcgcgtggcaacctatgctgattttacggacgcggacggtcaggcaatcgacagcgggcttttgcttttttttgccgcaccggcaagttttacgggcgaagatgttatcgagcttcagggacacggcgggccggtagtgatggatatgctgctgaaccgctgtttggaattgggcgcgcgccttgccgaaccgggcgagtttacgaagcgtgcgtttttaaacgacaaactggacttggcacaggcggaaggcgtggcggatttgattgacgcatccagccgttcggcggcgcgtctggcgttgcgctcgctcaaaggcgatttttcgcggcggatacacggtctggtcgaagacttgattaccttgcggatgctggtcgaagcgacgttagattttcccgaggaagacattgattttctcgaagcggcagacgcacgcggcaaactggacggcttgcgccgcgccgtggatgatgtgcttgccaacgcgcagcagggcgcgattttgcgcgaaggtctgaatgtcgtattggtcggcgcgccgaatgtcggcaaatccagcctgttgaacgcgctggcgggcgacgaagtggcgattgttaccgatattgccggaacgacgcgcgacgcggtcagggaacgtatcctgattgacggcgttccggtgcatattgtcgatacggcaggtttgcgcgagacggacgacgtggtcgaacgcatcggcatcgaacgcagccgcaaagccgtatccgaagccgatgtcgcgctggtgttggtcgatccgcgcgaaggcgtgaacgacaagacacgggcgattttggacgcgttgccgccggagttgaaacgcatcgaaatccacagcaaatccgatttgcacgcacacgcggcaggcgggttcggtacgggcgcggaaaccgtcatcgcgctgtcggcgaaaaccggcgacggcttggacgcgctgaaacggacgttgttgcgcgaggccggatggcagggcgagggcgaagggctgtttttggcgcggacgcggcacgtcaacgcactcaaagcagcgcaggaagaattgtcgctggcggcattgtgcggcaaccatcaaatcgagctgtttgccgaacacttgcgcttggcgcaggtcgcatgcggcgaaatcacgggcgagtttacggcggacgacctgctcggcgtgattttttcgaggttttgtatcggaaaataa

SEQ ID NO: 48726 - DNA, 1155 bp, Neisseria meningitidis; identical to SEQ ID NO: 45256

SEQ ID NO: 48727 - DNA, 849 bp, Neisseria meningitidis
atggacttcaaacaatttgattttttacacctgatcagtgtttccggttgggagcatctggctgaaaaggcgtgggcgttcgggctgaaccttgccgccgcgctgcttatttttttggtcggaaaatgggcggcgaaacgcattgtcgctgtgatgagggcggcgatgacgcgcgcgcaggtcgatgccacgctgattagttttttgtgtaatgttgccaatatcggcttattgattttggtgattattgccgcattgggcagattgggcgtttccacaacatccgtaaccgccttaatcggcggcgcgggtttggcggtggcgttgtccttgaaagaccagctgtccaattttgccgccggtgcgctgattatcctgttccgcccgttcaaagtcggcgattttatccgcgtcggcggttttgaaggatatgtccgagagattaaaatggtgcagacttctttgcggacgaccgacaacgaagaagtcgtgctgcccaacagcgtggtgatgggcaacagcatcgtcaaccgttccaccctgccgctttgccgcgcccaagtgatagtcggcgtcgattacaactgcgatttgaaagtggcgaaagaggcggtgttgaaagccgccgtcgaacaccccttgagcgttcaaaacgaagagcggcaggccgccgcctacatcaccgccttgggcgacaatgccatcgaaatcacattatgggcttgggcaaacgaagcagaccgctggacgctgcaatgcgacttgaacgaacaagtggtcgaaaacctccgcaaagtcaatatcaacatcccgttcccgcaacgcgacatacacatcatcaattcttaa

SEQ ID NO: 48728 - DNA, 1836 bp, Neisseria meningitidis; identical to SEQ ID NO: 39289

SEQ ID NO: 48729 - DNA, 864 bp, Neisseria meningitidis
atgttcgagccgctgtggaacaataaatacatcgaaagcgtgcagttgaccatcgccgagcagttgggcgtggaagagcgcggcgagttttacgacattaccggcgcgttgcgcgatatggtgcaaaaccatttgatgcagatgctgtgcatgactgcgatggaagcccccgccagcttggatgccgacgcggtgcgcgatgaaaaagtcaaagtcatcaagtcattgaagccgctgaccgtcgagtctgtcaatgaaaacgtcgtgcgcggacaatataccgccgccagaggcatgaacggctatcttgaagaaatcaacgttccgcaagacagctttaccgaaacctacgtcgccattaaagccgaaatcgaaaacgaacgctggaagggcgttcccttctacctgcgtaccggcaaacgcatggcgggcaaagtggcggaaatcgttttgaacttcaaagatttgaacagccatatttttgaaggcagccgcaccgcgcccaaccggctcgttatcgagttgcaaccatatgaatccgtgcgcctctatacgcagatgaaaaccccgggggcaggaaataaggtcgaaaccgtgccgctggcaaccgatttgggcaaagcattggaaagccgccgcgcggaagcttacgagcgcctgctgctggatgtgattaacggcaaactcgctttgtttaaccgccgcgacgaactcgaagccgcgtgggaatatgtgatgccgattttggaaaactggacaaataacaccacgccgccgcacggctacggcgcacactcgtgggggcctgaagccgcgcgcgaactattggcgcgcgacggacacaagtggcacgaagagcagtaa

SEQ ID NO: 48730 - DNA, 489 bp, Neisseria meningitidis; identical to SEQ ID NO: 45541

SEQ ID NO: 48731 - DNA, 180 bp, Neisseria meningitidis; identical to SEQ ID NO: 39090

SEQ ID NO: 48732 - DNA, 588 bp, Neisseria meningitidis; identical to SEQ ID NO: 45803

SEQ ID NO: 48733 - DNA, 231 bp, Neisseria meningitidis; identical to SEQ ID NO: 39231

SEQ ID NO: 48734 - DNA, 648 bp, Neisseria meningitidis; identical to SEQ ID NO: 44369

SEQ ID NO: 48735 - DNA, 585 bp, Neisseria meningitidis; identical to SEQ ID NO: 38223

SEQ ID NO: 48736 - DNA, 378 bp, Neisseria meningitidis; identical to SEQ ID NO: 40737

SEQ ID NO: 48737 - DNA, 1395 bp, Neisseria meningitidis
atgaccgtcaaaacccgtttcgcccccagcccaaccggctacctgcacatcggcggcgtacgcaccgccctgttttcttgggcgtttgcccgccatcataaaggcgaattcttattgcgcatcgaagacaccgacttggcgcgctctactgccgaatccgtcaacatcatcctcgacggcatgaaatgggtcggactcgattacgacaacgccggcaacgtcgtgtaccaaacccgccgtttcgaccgctataaagaagtcatcgccgaacttttagaaaaaggcgatgcctactactgctattgcagcaaagaagagttggaagccatgcgcgagaaagccgaaaaagaaggcacggcgacttacgaccgccgctggcggccggaagcaggcaaaaccctgcccgaaatccctgccggcgtgcaacccgtcgtccgcttcaaaacgcctttggacggcgtaaccaagtgggcggacctggtcaaaggcgaaatctccatccccaacgaagcactcgacgacctgattatcgcccgcgccgacggcacgccgacctacaacttctgcgttgtcgtggacgactacgacatgggcgttacccacgttatccggggcgacgaccatgtgaacaacaccccgaaacaaatcaacatcttaaaagccatcggcgctaccctgcctgaatacggccacctgccgatgattcttaacgaacaaggcaaaaaaatctccaaacgcagcggcgataccgttgccattaccgatttcggcgcgatgggcatcctgcccgaagccatgctcaactatctggcacgtttgggctgggcgcacggcgacgatgagttcttcacgatggaacaatttatcgaatggtttgatttgaaagacgtttctccatctccaagccgcatggatttgaagaaactctactggatcaacggcgaacacatcaaaatcacgcccaacggcaaactcgccgaactcgtcaaaccgcgtctcgctctgcgcgatatccatgaaactgaaaaacctgcattggaagacgtgttggcactggtcaaagaccgcgcccaagacctgaacacacttgccgacgagtgcctctacttctacgtcaaacaaacgcctactgaagcggacgtgcagaaacactgggacgatgaagccgccgcccgtatgctgcgctttgccgaacgcctcgaagggctggaagactggaatgccgaagccatccacgacctcttcaaacccttctgcgacgaagaaggcattaaaatgggcaaactcggcatgcccctgcgccttgccgtctgcggtacggcgaaaacccccagcgtcgatgctgtgttggcattaatcggcaaagaagaagtgttgaaacgcatccgcgcttaa

SEQ ID NO: 48738 - DNA, 921 bp, Neisseria meningitidis
atgagaatcaggctggggcggcacaacgcgcccgactttccgcacggggccgccgtaaccataggcaattttgacggcgtacacctcggacacaaacacatcctccaaaaactccgcctcgaagccgatacgcgcggattacccgtcgtgaccgtcgttttcgaaccccaacccaaagaatttttcgcactccgcaccggcaggatgccaccgtgtcggatcagccccctgcgcaccaagctcgaattattggaaggcacaggctgtgtcgatgccgtctgggttttgcgtttcgatcaaaatttttccgaaatatccgcgcaagggtttatcgaccgcctgctgcgtcaaaccttgaatacgcgttatttgctcgtcggcgacgatttccgtttcggtgcggggcgggaaggctgttttgaacttttggcacaacagcccgatatgcagaccgagcgtacgccttccgtcatcgtcgaagacatccgcaccagcagtaccgccgtgcgacaagccctttcagacggcaaccttgcctatgcgaaaaaacttttgggacacgactacgtcttgagcggcagggtggtgcacggcagaaaactcggacgcaccttaaacgccccgactgccaacatccgcctgccccgccaccgttatgcactcggcggcgtgttcgtcgtcgaagcggacggcgcattcggcacgcggcgcggcgtggcgagcttcggcttcaatcccaccgttgatagcggctgttctcaaaagcttgaagtccacctgttcgactttcaaggcgacctgtacggacaacggttgaacgtccgcttcctgcacaaactgcgcgatgaagaaaagtttgacggtatggcagaactgaaaaggcagatagcagccgatatggaagccgcaaagtgttggtag

SEQ ID NO: 48739 - DNA, 768 bp, Neisseria meningitidis; identical to SEQ ID NO: 39411

SEQ ID NO: 48740 - DNA, 141 bp, Neisseria meningitidis
atgagcaccttctttcagcaaaccgcacaagccatgattgccaaacacatcgaccgcttcccgctattgaagttggaccaggtgattgattggcagccgatcgaacagtacctgaatcgtcaaagaacccatttaccttag

SEQ ID NO: 48741 - DNA, 132 bp, Neisseria meningitidis; identical to SEQ ID NO: 38857

SEQ ID NO: 48742 - DNA, 540 bp, Neisseria meningitidis; identical to SEQ ID NO: 44661

SEQ ID NO: 48743 - DNA, 840 bp, Neisseria meningitidis
atgaccgccacagccgccgccatagaccgcctgcttccccaaacccaatgccgcgaatgcggctacgacggctgcctgccctacgcacaggcagtcgcaacaggcgaagcgtacaacctctgcgccccgggcggagaagccgtcgtccgcgaccttgccgccctgctcggcaaaccccttgtcgcacctgccaaaacccaagccaaagcactcgcccggatagacgaaaccgcctgtatcggctgcaccgcctgcatccgcgcctgccctgccgatgccattatgggcgcgggcaaacttatgcacaccgtcatcgccgacgaatgcaccggctgcggactctgcgtcgccccctgccccgtcgactgcatccatatgcagcccgttgccgacaccgtcctgccccgcgcgcgccgcttcagcctgtccgccgacagccgttttgccgccgccgaacacgcgcgcgcgcgctacctcaaacgcaacgaacgcaaacagcgcgaagccgacgaacgcaaggccatgcttgccgaacgcgaagccgccgtccgcaacgcgcgtccgcaaacgcccgacacaccgaaaaaaccgacgtttaaccctgccgacctcatcgccaaagccatggcaaaagcgcaaacccaacaagaccgcctcgccgccgccgacaaccgcaaagactatcaggcgaaacagatagccgaagcccgcgaacgcgccgagttgcgccgcgcccaacgcgatatgaaatacggcagcgacagcgaaaaagccgccgccctcgaatatctcaaacaatacaaagccaaacaggaagccgcacagaataccgcctcctga

SEQ ID NO: 48744 - DNA, 606 bp, Neisseria meningitidis; identical to SEQ ID NO: 38535

SEQ ID NO: 48745 - DNA, 939 bp, Neisseria meningitidis
atgtccatccatactctgaaacgcctgccctcatcgctgctgctcggtctctgcctttccctgccgtcagcccacctttttgccgacaacgacattttagggcaatttttagaacagaacatgcttacctcctccgatccgatagaaatattcgccgaaagcacaatacaccccaccaacacccaagccattacaggcggtctgattctctcctcacagtctgccctggtcgtcaacaacaaaaccggacagatactgtatcagaaaaacgccgacaggattatgcccatcgcctccatttccaaactgatgagcgcgatggtcgttttggatgcaaacttggacatgaacgaaaccgttaccattacgcccgacgaaatcgaccgcctcaaagggaccggcagccgtcttgccataggtacggcacttacacgcaaagaactgctgcacctgagcctgatgagcagcgaaaaccgcgccacccatgcattgggcagaacctaccccggcggcatgggcgcatttgtcgccgccatgaaccgtaaagcccaaagcctcggtatgtacggcagccgcttttacgaaccgaccggactcaacttccaaaacgtttctaccgccaaagacctgagccttatggtcaacgccgccgcccaatatccgcaaatccgcaccaactcgacttccaactacgcctcggtacagaccaaaaacgggcagcagaactacaaaaactccaatgccctggtcagagaaggcatgtggaacatcgaattgcagaaaaccggctacatacgcgaagcaggcaggtctatggttgtcaaagccaacattcaaaatcaacccgttaccatcgtattgctgaactcgcccacatccgccacacgcgtcaacgacgcccgcaaaatcgaatcgtggatgctgcagcaacgctcctga

SEQ ID NO: 48746 - DNA, 819 bp, Neisseria meningitidis
atgaaaggtatggataaattgagataccaacaggattttttaaatatccgccccatttttacagccggcgaacaagaatacctgaccggattgtccgatcggcttcctttatctgttttaacgggctccgtgcgtaatattgaagaaatcggtatcgattttgtatatagttctgccaaattggaaggaaacacttataatcaatacgatacgcaggcattgcttaaactcgggcaaaccgcaggcgggaagttatattcggatgccgtaatgttaatcaacctgagggaaagttaccggcacctgctgtccggtttggacagccccgagccgtttgactggttggatttcttaaaaaccacccacagcctgatttccgaaaacttactggaaaaaggctccggcggcgtagtccgccgcgacagcgttaccataagcgggacagactacacccctttatctaacccgcaaagtttggatacggaattaaaatggttgcttcaagaagctcccaaaatagaaaatcctttcgaccgcgccgtttatctccataataatttggcgtatcttcaatattttaaagattgcaataaacgtactgccagaaactgcatgaccttgtcgctgatgcgctccggtttttttccttgcgtattctcccccgacagttatcccgcctatgccgaggctgtcgtagcctattacgaaaccggcgattacggtttattcaagaaatattttatttcggcatacgaaaataccgtaaataagtacggtccccagcctgatatggatatttcccgcaacttctccctttaa

SEQ ID NO: 48747 - DNA, 1011 bp, Neisseria meningitidis; identical to SEQ ID NO: 38365

SEQ ID NO: 48748 - DNA, 540 bp, Neisseria meningitidis; identical to SEQ ID NO: 44661

SEQ ID NO: 48749 - DNA, 483 bp, Neisseria meningitidis; identical to SEQ ID NO: 39984

SEQ ID NO: 48750 - DNA, 1893 bp, Neisseria meningitidis
atgcctatccttaccatccgtgaagtgtgcaacattaatcattggggcataggttattatgatgttgacgattccggcgaaatcatcgtctgccccaatccctcgcaacacaatcaaactgtttcactgcaaaaactgactgaagccgtgcaacaaaaacatcaggcgcgcctgcctgttttgttttgttttccgcaaatcctcgaacaccgcctccgcgacattaaccgcgcctttcagacggcacgggaagagtgcggctataagggcggttattgtttggtttaccctatcaaggtcaaccaacaccgccgcgtcatcgaatcgcttatgtcaagcggacaaccgcatggtttggaagctggttctaaagccgaactgatggcggttttggcacacgccggcacccggcaaacattaatcgtctgcaacggctataaagaccgtgaatatatccgtttcgccttgatgggcgaaaaactggggcatcaggtttatttggtgattgagaagctgtccgaaatacaaatggtattggaagaggcggaaaaactcggcatcaagccccgtttgggtgtgcgcgccagactggcttcccaaggttcgggaaaatggcagtcttcgggtggggaaaaatcaaaattcggcttgtcggcttcccaagttttgcaactggtcgatattttgaaacaaaaaaacaggctggattgcctgcagcttttgcatttccatttgggctcgcagcttgggaacatccgtgatgttgccacaggtgtacacgaatcggctcggttttatgttgagttgcacaaactgggggtaaatatccgctgttttgatgtaggcggcgggcttggcgtggattacgaaggaaaccgcacacaatcggattgttccgttaattacagcctcaacgaatatgccgccacagtcgtatggggcatcagtcaggcttgtctcgaacacgggctgccgcatccgacaatcatcaccgagagcgggcgcggcattaccgcacatcacgccgttttggttgctaatgttataggcgttgagcgttacaaaccgcgccggctggatgcgccatcgcccgaagcgccgcgtgtgttgcacagtatgtgggaaacttggacggatatttccgcctcgcgggaaaaacgttccttacgcagctggatacacgaagggcagtttgatcttgccgatgtgcataatcagtataatgtcgggctgttgagtttggcgcaacgtgcgtgggcggagcaactgtatttaaatatctgtcatgaagtcggcgaattgtttaatgaaaaacaccggtctcaccgaaccattattgacgaattgcaagaacgttttgccgataagctgtatgtcaatttctcactcttccaatctttgcccgatgcttggggcatagatcaacttttccctgtttgtcccattaccggtttgaatgaaccgattgcgcgccgcgccgtgttgttggacattacctgcgattcagacggtacgattgaccactacatcgacggagacggcatcgccggtacgatgcctatgcctgattatcccgaagaagagccgccgcttttaggcttttttatggtgggagcatatcaggaaatactcggcaatatgcacaatcttttcggcgacactgccactgccgatgttgttgtaggggaagacggacaatttaccgtcatcgattacgatgaaggaaacaccgttgccgatatgctcgaatacgtttatcaagatccgaaagagctgatgaaacgctatcgcgaacaaatcgaacattcagaccttcctgcctcgcaggctatgtctttcttaaaagaactcgaagcggggcttaatggttatacctatttggaagacgaatag

SEQ ID NO: 48751 - DNA, 1356 bp, Neisseria meningitidis
atgtctgatttttttcattctgacgtgttgtccgtttccgagttgaacgcatttgccaaaagtcttttggaaaaccaccttgccggcctgtggattgcgggcgaagtgtccaacctgacccgtgccgccagcggacattattatttctcgctcaaagacagccgcgcgcaggtgcgttgcgcgatgttcaaaggtgcggcggcgcgtttggcgaagcctttgaaagaaggcgaccatatcgaagtatcaggaaaaatcagtatttacgaggcgcggggcgaatttcaaattaccgtgaatgaggtgcggctcaaaggtttggggcagctttacgaagcctacgagcggttgaaggcacagttgcaggcggaaggcgcgtttgcggcggaacgcaaaaagccgttgcctacccgtccgcaatgtatcggcatcgtcaccagcctggcagcagcggcattgcgcgatgtcgttaccaccttgaaacgccgcgcgcccgaaattcccgttatcgtttatccgacacctgttcaaggcgcaggcagcgagttacaaattgcccaagcgattaaaaccgcctcgcaacgcgccgaatgcgacgtgttgattgtctgtcgcggcggcggcagcattgaagacttgtgggcgtttaacgaagaaccggtcgtgcgcgcaatcgaagcctgcacggttcccgtcgtcagtggcgtgggacacgaaaccgattttacgcttgccgattttgtcgccgacgtgcgcgcgcccacgccgaccggtgcggcggagctggtcagccccaaccgccaagaatcgctacatcgtctcgctcaggcgcaaggccgtctgaaaaccgttttggaacaacgctatttcgatgccagccaaaaactcgactggcttgcgcggcaaatccgtcatccgcgccaaaaacttgatgagcagcgcgcttcaatcggcaagctggcgcaaacgctgtcttactctatgaagcaaaacctccgtgcccacaccgcccgttttgaacgccaaacccaagccctgcaacattaccgtcctgatgtttccgtttgcaaaaacaacatcgtccgccttcagacggcattgcccgccgccttcagccaactgcttacccaccgccgccaaagcctgaccgcccaagccgcattgctcgaagccgtttcgccgcagcacattctggagcgcggcttttccgtcgtcaaaaacacacgcggacaagtcatccgcaacgccgatgttttgaagcaggggcagaagctgcacattaccttcgccgacggcgaaaccgacgtgcgcgtaagcaaagaacaagggcagcaggatttgttcgattgcatttaa

SEQ ID NO: 48752 - DNA, 780 bp, Neisseria meningitidis; identical to SEQ ID NO: 38783

SEQ ID NO: 48753 - DNA, 120 bp, Neisseria meningitidis
ttggctgtaaaagaaaaattacaaaattcagatttttctacagagcccttagtgaaaaatattattcatgtacttgaatatgctataaaaaatgaaaaaacagtaatttttcatttttga

SEQ ID NO: 48754 - DNA, 861 bp, Neisseria meningitidis; identical to SEQ ID NO: 36326

SEQ ID NO: 48755 - DNA, 387 bp, Neisseria meningitidis; identical to SEQ ID NO: 39590

SEQ ID NO: 48756 - DNA, 1194 bp, Neisseria meningitidis; identical to SEQ ID NO: 36937

SEQ ID NO: 48757 - DNA, 516 bp, Neisseria meningitidis
atgtacacttgcacttcctgcggcgaaaaacatgaagatatgcccgcaatcggctttaccgcccccgatccctataatcaactcagtgaagaagaacgcattgcttatcaagcagaatgcgattctgatttctgcatcatccgctatcccgaccaaaccgaccgctttatccgcgcggtgctgccgattccgattatcgggcatgaggaaacgctggaatatggcgtgtgggtgtccgtcagcgaaaagagttttaacgactatcaaagccactttcacgacaatccggaaaacgccgtttatttcggcatgatctgcaaccggctgccctcttatgaatccgacaccttcggtttgcattgcaatgtcgttacccaacccgatggtcaacgccctttgctgcaacttcatcaaagcggcggacatccgctggtacgcgacttttatcacggcatagaatatgccgaagcacaggcaaggataggggcggtatccgaatcggattgttcaggataa

SEQ ID NO: 48758 - DNA, 591 bp, Neisseria meningitidis
atgcttttgtttatcgacaattacgacagttttacttacaacatcgtccagtatttcgctgaattggggcaggaagtcgccgtgcgccgcaacgatgatattacgttggaagaaatcgaggcattgaatccgcaatatctcgttatcggacccggcccgtgttcgcccaaagaagcggggatttccgtggcggcgatgcgccattttgccggccggctgccgattatgggcgtgtgcctcgggcatcagacgataggcgaggcgttcggcggcaggatagtccgcgccaaaacgctgatgcacggtaaggtgtcgcccgtgtcccattcgggcaagggtatgtttaagggtttgcccaatccggttacctgtacgcgttatcacagcctcgttatcgatcggaatacgatgcccgaatgtttggaagtaacggcttggactgaggacggcgagattatgggtgtgcgccataaggaatatgccgtcgagggcgtgcagttccaccccgaagccctcttgaccgagcacggacatgatatgttaaacaattttttaatcgaatttcaaaacttcaaaccgcaaaaaatctga

SEQ ID NO: 48759 - DNA, 1431 bp, Neisseria meningitidis; identical to SEQ ID NO: 38362

SEQ ID NO: 48760 - DNA, 132 bp, Neisseria meningitidis
atgcatatttatgatttttatttgcctgaaggggaatatttatttgagatttctgataatagtgaatatattccactttacgatgaaataaataattctataagaatagtagttaatgcacgaattcagtaa

SEQ ID NO: 48761 - DNA, 1371 bp, Neisseria meningitidis
atgccgcaaaacactttaaacatcgtcatcctcgccgccggcaaaggcacgcgcatgtattccaaaatgcccaaggttttgcacgaaatcggcggcgaaacaatgctcgggcgcgttatcgacaccgccgccgcgctgaatccgcaaaacatctgcgtcgtcgtcggccacggcaaagagcaagttttagacaccgtcaaacgcgatgtcgtctgggttgaacaaaccgaacagctcggcaccggccacgccgtcaaaaccgccctgccccaccttgccgccgaaggccgcacgctggtgttgtacggcgacgttcctttaattgacgttgaaaccctcgaaaccctgctcgaagccgcaggcaacgaagtcgggctgttgaccgacgtgcccgccgacccgtcaggtttggggcgcatcatccgcgacggcagcggcagcgtaaccgccattgtcgaagaaaaagacgccgataccgcccaaaaagccgtgaaagaaaccaacaccggcatcctcgtcctgcccaacgccaaactggaaaactggctgaacagcctttccagcaacaatgcccaaggcgaatactacctgaccgacctcatcgccaaagccgttgccgacggtattaaagttcatcccgtccaagtccgcgcctcccacctcgccgccggcgtgaacaacaaacgccagctcgccgaactcgaacgcatcttccaaaccggacaggcgcaagaattgctcaaagcaggcgttaccctgcacgacccggcacgtttcgatttacgaggccgtctgaaacacggacaggatgtcgtaattgatgtgaactgtatctttgaaggcgaagtcgaaatcggcgacaacgtcgaaatcggcgcaaactgcgtcatcaaaaacgccaaaatcggtgcaaacagcaaaatcgcccccttctcccacctcgaagactgcgaagtcggcgaaaacaaccgaatcggcccgtacgcccgcctgcgtccgcaagcccgccttgcagacgacgtacacgtcggcaacttcgtcgaaatcaaaaacgccgccatcggcaaaggcaccaaagccaaccacctcacctacattggtgatgccgaagtcggcagcaaaaccaacttcggcgcaggtacgattattgccaactacgacggcgtgcacaaacacaaaaccgtcatcggcgacgaagtgcgcatcggttcaaactgcgtactggttgcccctgtaacactgggcaacaaagtaaccacaggcgcaggcagcacgattacccgcaatatcgaagacaacaaactcgccctcgcccgcgcccgccaaaccgtcatcgaaggctgggtgcgtcccgaaaaagacaaacaataa

SEQ ID NO: 48762 - DNA, 975 bp, Neisseria meningitidis
atgccgtctgaaaaaaatatcggttttatggcaggaagcagccgtccgttgtgggtcgcctttgcgctgttgctggtttcctgcgtcctgtttatgacgctcaacgtcaaaggcgattgggattttgtactgcacctgcggctgaccaagcttgccgcgctgctgatggtcgcctatgcggtcggcgtgtccacgcaactcttccaaacgctgaccaacaatccgattctcacgccctcgattttgggtttcgattcgctgtatgtgtttttgcagaccttgctggtgtttacgttcggcggcgtgggctatgcttccctgccgttgacgggcaaattcggctttgaactggtcgttatgatgggcggctcgctgctgttgttctacacgctcatcaaacagggcggacgcgatttgccgcgtatgattttaatcggcgtgattttcgggattttgttccgcagcctgtcatcgctgctttcgcgcatgatagaccccgaagaatttacggcggcgcaggcgaatatgtttgccggattcaataccgtacacagcgagcttttgggcataggcgcgctgattctgctcgtcagcgcggcggtcgtttggcgcgaacgctaccgcttggacgtacaccttttggggcgcgaccaagccatcaatttgggcatcaactacacgcgcaataccttatggctgctgttgtggatcgccgcgttggtggcgacggcgaccgccgtggtcggcccggtaagctttttcgggcttctcgccgcctcgcttgccaaccacttttccccgtccgtgcgccattccgtccgcctgccgatgacggtttgtgtcggcggcatcctcctggtcggcggacagaccgtattcgaacacttcttgggcatgaaggcggtattaagcgtggtggtcgaatttgcgggcggactcgttttcctctatctcgttttaaaacacaaaaaatga

SEQ ID NO: 48763 - DNA, 1437 bp, Neisseria meningitidis; identical to SEQ ID NO: 38258

SEQ ID NO: 48764 - DNA, 171 bp, Neisseria meningitidis
ttgccaattatccgaaagaaagttaagcctgatggcattgtatacacggatacctttcgtagttatgatgtgcttgatattagtgaatttagccatttacgtaagtttaacggcattcccaaagagcatttggggctgcatttaaagaaatgccaatggcattttaaatag

SEQ ID NO: 48765 - DNA, 876 bp, Neisseria meningitidis; identical to SEQ ID NO: 38442

SEQ ID NO: 48766 - DNA, 1098 bp, Neisseria meningitidis; identical to SEQ ID NO: 39446

SEQ ID NO: 48767 - DNA, 693 bp, Neisseria meningitidis
gtgcaggcggatttagcctacgccgccgaacgcattacccacgattatccgaaaccaaccggtacagacaaagacaaaataagcacggtaagcgattatttcagaaacatccgtgcgcattccatccacccccgggtgtcggtcggctacgatttcggcggctggaggatagcggcagattatgccagttacagaaaatggaacaacaataaatattccgtcaacacaaaagtgttgcaagaaaaaaatggcaacaggaaagaactgaagacggaaaatcaggaaaacggtacattccacgccgcttcttctctcggcttatccgccatttacgatttcaaactcaacgataaattcgataaattcaaaccctatatcggcgcgcgcgtcgcctacggacacgttaaacatcaggttcattcagtgaaaaaagaaaccacgactgttttcactgcaccaacgcaaggtgctcaaaagggaggcgttatcccagaagctacgattagcaaacctgcctatcacgaaagccacagcatcagcagcttgggtcttggtgtcatcgccggtgtcggtttcgacatcacgcccaagctgaccttggacaccggataccgctaccacaactggggacgcttgaaaaacacccgcttcaaaacccacgaagtctcattgggcatgcgctaccgcttctga

SEQ ID NO: 48768 - DNA, 1263 bp, Neisseria meningitidis; identical to SEQ ID NO: 38724

SEQ ID NO: 48769 - DNA, 159 bp, Neisseria meningitidis
atgaaaaccttcgaaaaaacatggtctgcacaatatcgggatatggaaatttcagtacggaatttttggaatttggagcggacaggggcggaagtctatatcaacggaaggcgggtttatcataacgaagccgaaatggcgtctgcttctttgcgttag

SEQ ID NO: 48770 - DNA, 966 bp, Neisseria meningitidis; identical to SEQ ID NO: 38346

SEQ ID NO: 48771 - DNA, 1218 bp, Neisseria meningitidis; identical to SEQ ID NO: 47300

SEQ ID NO: 48772 - DNA, 1410 bp, Neisseria meningitidis
atgaatttccccaaaacagcggcctccctgctgctgcttctcgcctccctcgccgcacacgcgctcgataccggccgcattccgcaaaacgaaatcgccgtatatgtccaagagcttgacagcggaaaagtcatcattgaccaccgctcggatgtccccgtcaaccccgcctccacaatgaaactcgttaccgcgtttgccgccttcaaaaccttcggcagcaattaccgctgggcgaccgagtttaaaagcaacggtacggtaaacgacggcacgcttgacggaaacctatattgggcgggcagcggcgaccccgttttcaatcaggaaaacctgcttgatgctcaaaaacagttgcgcgaacaaggcatactcaatatcacgggacacctgatgctcgaccacagcctgtggggcgaagtcggcagccccgaccattttgaagccgacagcggttcgccgtttatgaccccccccaatccgactatgctgtctgccggtatggttatggtgcgcgccgaacgcaatgccgccggcagtaccgacatcctcaccgatccgcctttgccgcatattttcgcccaaaacaacttgaaaattaccgcctcccaagccgcctgcccttcggtcaaaaaactgatgcgtgcatctttttcggacaatacgctgaaattgcgcggcaatattcccgagagctgtttgggcaagcctgtcggtgtccggatgttcgcgcttgacgaactgatccggcaaagttttaccaaccactggctgctcggcggcggacggatttcagacggtatcggcatagccgacacgccggaaggcgcgcagacgcttgccgttgcacacgccaaaccgatgaaggaaattttgacggacatgaacaagcgttcggacaatctaattgcgcgttccgtcttcctcaaactcggcggcgacggcaaactgcccgccgtttccgaacaggcggcatctgccgtccggcgcgaacttgccgtgtcgggcatcgatattgcggatttggttttggaaaacggttcaggcctgtccagaaaagaaagggtaacggcgagaatgatggcgcaaatgttggaaacggcttatttcagcccgtttgcacaagatttcatcgatacgctacccatcgccggcacagacgggactttacgcaaccgcttcaaacaaagcggcgggctgttgcgcttaaaaaccggcacgctcaacaatgtccgcgcccttgcaggttattggctgggcgacaaaccgatggcggtggtcgtcatcatcaacagcggccgcgccgtttccctgctgcccgacttggacaacttcgttgccaaaaacatcatctccggcggcgacggctggctggatgcgaaactgatgtgcaaagaacgccgagcctga

SEQ ID NO: 48773 - DNA, 1251 bp, Neisseria meningitidis
atgtttgttccgctggcaatgcttgcaggtatgttttcctactacgaaaccttccacgaaacggaagcgttgcaggacgacctgctccgtcaggcggcattgtacgtcgcccccgattccaaacccgaaactttgcccgagggcgacggcgatacgcgtattttggtacagatgccgcagcaggaagaccctgttgtcagcctgcctgcgcatctggcggacggtctgcacacgcttcaggcggacggggacgacgattattaccgcgtctatatccgcacgaccgaacagggacggattgccgttatgcaggaaaacgaataccgtgaagatttggcggcggatgcggcacggcaaagcgtgttgcccctgctggcggcactgccgctgatgatactgctgaccgtgtggattacgcacaaagccatgcgccccgtccgcaaattgtcgcaaagtctcgaacaacgccgaatcaatgacctgtctgccttgagtgtggacaatattcccagtgaaatcagagggttcgtaaccgccatcaacttgcttttgaaacgtgcggatgaagacatccgccaccgtcagcggtttgtcgccgacgcggcacacgaattgcgtacgccgatgacagccctttcccttcaggcggaacggctcaacaatatgtctctgccacccgatgcggcgcggcagtctgccgttttgcagcaaagcatacggcgcaacaaacacctgctcgagcagcttttggcactggcgcgttcgcagtcggacgaaacccctttggcgaaaacgacattcggtctgcaaagccgtttccgccaagtgttgcaggaactgatgccgcttgccttggaaaaacgtcaggacattggtgtggcggtcggaggtgatgtcgaaatatttgccgatgaaactgaaatctataccttggttaaaacgtttgttgataacgcaatacgttataccccgtccgaaggcaggatagatttgggtttcacagacgaagggaaatatcttgccgtgtgggtggaagataacgggaacggcattcccgaatccgaacgcgcccgcgtcctcgatccgttttaccgtattttgggaacggagcagcaggggacggggctgggtctgtccatcgccgacacgcttgccaaaaaatacggcggacatttggaactgaccgacagccgacgtttcggacacggtctgttgatacgggcgttgttggacaaggaaaccctgaaatag

SEQ ID NO: 48774 - DNA, 1356 bp, Neisseria meningitidis; identical to SEQ ID NO: 38710

SEQ ID NO: 48775 - DNA, 252 bp, Neisseria meningitidis; identical to SEQ ID NO: 39189

SEQ ID NO: 48776 - DNA, 495 bp, Neisseria meningitidis; identical to SEQ ID NO: 39710

SEQ ID NO: 48777 - DNA, 1380 bp, Neisseria meningitidis; identical to SEQ ID NO: 39141

SEQ ID NO: 48778 - DNA, 1245 bp, Neisseria meningitidis
atgtccaacgaaaaccgtacctgttccttttgcggaaaatccaaatcacacgtcaaacatttaattgagggcgaaaacgcctttatctgtgacgaatgcgtctcaaactgtattgaaatattgcatgaagacggaaatgacggcacgcctccggaaagtgccggaggggagccggaagaatccggcaaactgcccacgcccgccgaaatcgtcgccaacctcaacgaccacgttatcggtcaggaacaagccaagaaagccttggcggtgtcggtgtacaaccattacaaacgcctgcgccacccgaaagccggagctaatgtcgaattgtcgaaatccaacatcctgcttatcggcccgaccggatcgggtaaaaccctgctggcgcaatctttggcgcgtaaactggacgtaccgttcgtgatggcggatgcaaccacgctgactgaagcaggttatgtcggcgaagatgtcgagcaaatcatcaccaaactcttgggcaaatgtgatttcgatgttgaaaaagcccagcgcggcatcgtctatatcgacgaaatcgataaaatttcacgcaaaggcgacaatccgtccatcacgcgcgacgtgtccggcgaaggtgtgcaacaagccttgctgaaactgattgaaggtacggtggcaagtgttccgccccaaggcggccgcaagcatccgaatcaggaatttatcaacgtcgataccaccaacatcctgtttatctgcggcggtgcgtttgcaggcttggaaaaagtcatccgccagcgcaccgagaaaggcggtatcggtttcggtgcgtccgttcacagcaaggacgaaaatgccgacattaccaagctgttcggcatcgtcgaaccggaagatttaatcaaattcggtctgattccggaattaatcggacgtttgcctgtgattgcaacgttagaagaactggatgaggacgcgctgattaatattttgaccgagccgaaaaatgctttggtcaagcagtatcaagccttgttcggtatggaaaatgtcgaactggagtttgaagaaggcgcattgcgttccatcgcgcgtcaggcaatggagcgcaaaaccggcgcgcgcggcctgcgttccatcgtcgaacgctgcctgttggatacgatgtaccgcctgcccgatttgaaaggcttgaaaaaagtggtggtcggtaaggcagtcatcgaagagggcagggaaccggaattggtgttcgagtcctga

SEQ ID NO: 48779 - DNA, 1383 bp, Neisseria meningitidis; identical to SEQ ID NO: 39452

SEQ ID NO: 48780 - DNA, 2394 bp, Neisseria meningitidis
atgaaactgaaacagattgcttccgcactgatggtcttgggcatatcgcctttggcacttgccgacttcaccatccaagacatccgcgtcgaaggcttgcagcgtaccgagccgagtaccgtattcaactacctgcccgtcaaagtcggcgacacctacaacgacacacacggcagtgccatcatcaaaagcctgtacgccaccggtttctttgacgacgtacgcgtcgagactgcggacgggcagctcctgctgaccgtcatcgaacgccccaccatcggctcgctcaacatcaccggcgcaaaaatgctgcaaaacgacgccattaagaaaaatctcgaatcgttcgggctggcgcagtcgcaatactttaatcaggcgacactcaatcaggcagtcgccggcctgaaagaagaatacctcgggcgcggcaaactcaatatccaaatcacgcccaaagtaaccaaactcgcccgcaaccgcgtcgacatcgacatcacgattgacgagggcaaatccgccaaaatcaccgacatcgaatttgaaggcaaccaagtctattccgaccgcaaactgatgcggcagatgtcgctgaccgaaggcggcatttggacatggctgacacgaagcaaccaattcaacgagcagaaatttgcccaagacatggaaaaagtaaccgacttctaccaaaacaacggctacttcgatttccgcatcctcgataccgacatccaaaccaacgaagacaaaaccaagcagaccatcaaaatcaccgtccacgaaggcgaacgtttccgttggggcaaagtctccatcgaaggcgacaccaacgaagtccccaaagccgaactggaaaaactgctgaccatgaagcccggcaaatggtacgaacgccagcagatgaccgccgttttgggtgagattcagaaccgcatgggctcggcaggctacgcatacagcgaaatcagcgtacagccgctgccaaacgccgaaaccaaaaccgtcgatttcgtcctgcacatcgaaccgggccggaaaatctacgtcaacgaaatccacatcaccggcaacaacaaaacccgcgacgaagtcgtgcgccgcgaattgcgccaaatggaatccgcgccttacgacacctccaagctgcaacgctccaaagagcgcgtcgagcttttgggctacttcgacaatgtccagtttgacgccgtcccgcttgccggcacgcccgacaaagtcgatttgaacatgagcctgaccgaacgttccaccggttccctggatttgagcgcgggttgggtacaggataccggcctggtcatgtccgcaggcgtttcccaagacaacctgttcggtacgggcaagtcggccgccctgcgcgcctcacgaagcaaaaccacgctcaacggctcgctgtcgtttaccgacccgtacttcacggcagacggggtcagcctgggctacgatgtttacggaaaagccttcgacccgcgcaaagcatcgaccagcatcaaacaatataaaaccaccacggcaggcgcaggcatccgcatgagcgtgcctgttaccgaatacgaccgcgtgaatttcggtttggtggcagaacacctgaccgtcaacacctacaacaaagcgcccaaacactatgccgactttatcaaacaatacggcaaaaccgacggcacagacggcagcttcaaaggctggctgtacaaaggtaccgtcggctgggggcgcaacaaaaccgacagcgcgttatggccgacgcgcggctacctgacgggcgtgaacgccgaaatcgccctgcccggcagcaaactgcaatactactccgccacccacaaccaaacctggttcttccccctgagcaaaaccttcacactgatgcttggcggcgaaatcggctatgccaacggctacggcaaaaccaaagaaatccccttctttgaaaacttctacggcggcggcctgggttcggtacgaggttacgaaagcggcacactcggtccgaaagtctatgacgaatacggcgaaaaaatcagctacggcggcaacaaaaaagccaacgtctccgccgagctgctcttcccgatgcccggcgcgaaagacgcgcgcaccgtccgcctgagcctgtttgccgacgcaggcagcgtgtgggacggcaaaacctacgacgacaacagcagttccgcgaccggcggcagggttcaaaacatttacggcgccggcaatacccataaatccacctttaccaacgaattgcgctattccgccggcggcgcggttacctggctctcgcctttaggcccgatgaaattcagctacgcctacccgctgaagaaaaaaccggaagacgaaatccaacgcttccaattccaactcggcacgacgttctaa

SEQ ID NO: 48781 - DNA, 681 bp, Neisseria meningitidis; identical to SEQ ID NO: 38168

SEQ ID NO: 48782 - DNA, 1302 bp, Neisseria meningitidis; identical to SEQ ID NO: 38582

SEQ ID NO: 48783 - DNA, 624 bp, Neisseria meningitidis
atgatgaaaccgcacaacctgttccaatttctcgccgtttgctccctgaccgtctccgtcgcttccgcacaggcgggcgcggtggacgcgctcaagcaattcaacaacgatgccgacggtatcagcggcagcttcacccaaaccgtccaaagcaaaaagaaaacccaaaccgcgcacggcacgttcaaaatcctgcgcccgggcctcttcaaatgggaatacacttcgccctacaaacagactattgtcggcgacggtcaaaccgtttggctctacgatgttgatttggcacaagtgaccaagtcgtcccaagaccaggccataggcggcagccccgccgccatcctgtcgaacaaaaccgccctcgaaagcagctacacgctgaaagaggacggttcgtccaacggcatcgattatgtgctggcaacgcccaaacgcaacaacgccggctaccaatacatccgcatcggcttcaaaggcggcaacctcgccgccatgcagcttaaagacagcttcggcaaccaaacctccatcagtttcggcggtttgaataccaatccccaactctcgcgcggcgcgttcaagtttaccccgcccaaaggcgtggacgtgttgagcaactga

SEQ ID NO: 48784 - DNA, 564 bp, Neisseria meningitidis
gtgacggcggaaggacgggacaaaaatgccgtcaatgccgagtttgttaaaaaattcaacaatttcaccagaaaatcaaaaaatggtagctttaaaaccgaattggtatcgcgcagtgcgatgccgcgctatcaatataccaacggcagacgcattcaaacaggttgggaggagcgtgcggaatttaaggtcgagggtagggattttgatgcgttgaaccgttttattgccgatgttcaggcagatgccgcgttggaatatacggatttccatgtgtcgcgcgaacgccgcaacgaggtcatcgatcaggtcagcaaggatgccgttttgcgtttcaaggcgcgtgccgaaaagttggcgggcgttttgggtgcgtccggttataaaatcgtcaaattaaatttgggacacatcggcagccatatcgcgggagggggagctgctcaggcaaaaatgcttcgtgccatgccgatggcggcaagcgtcaatatggagggtgcggattccgccgcgcctggtgtggaggaaatcagcatcagcgtcaatgggacggttcagttctga

SEQ ID NO: 48785 - DNA, 930 bp, Neisseria meningitidis; identical to SEQ ID NO: 38428

SEQ ID NO: 48786 - DNA, 1422 bp, Neisseria meningitidis
atggacacaaaagaaatcctcggctacgcggcaggctcgatcggcagcgcggttttagccgtcatcatcctgccgctgctgtcgtggtatttccccgccgacgacatcgggcgcatcgtgctgatgcagacggcggcgggactgacggtgtcggtattgtgcctcgggctggatcaggcatacgtccgcgaatactatgccgccgccgacaaagacaccttgttcaaaaccctgttcctgccgccgctgctgtctgccgccgcgatagccgccctgctgctttcccgcccgtccctgccgtctgaaatcctgttttcgctcgacgatgccgccgccggcatcgggctggtgctgtttgaactgagcttcctgcccatccgctttctcttactggttttgcgtatggaaggacgcgcccttgccttttcgtccgcgcaactcgtgtccaagctcgccatcctgctgctgctgccgctgacggtcgggctgctgcactttccggcgaacaccgccgtcctgaccgccgtttacgcgctggcaaaccttgccgccgccgcctttttgctgtttcaaaaccgatgccgtctgaaggccgtccggcgcgcaccgttttcatccgccgtcctgcatcgcggcctgcgctacggcataccgatcgcactaagcagcatcgcctattgggggctggcatccgccgaccgtttgttcctgaaaaaatatgccggcctagaacagctcggcgtttattcgatgggtatttcgttcggcggggcggcattattgttccaaagcatcttttcaacggtctggacaccgtatattttccgcgcaatcgaagaaaacgccccgcccgcccgcctctcggcaacggcagaatccgcctccgccctgcttgccgccgccgtctgcctgaccggcattttctcgcccctcgcctccctcctgctgccggaaaactacgccgccgtccggtttatcgtcgtatcgtgtatgctgccgccgctgttttgcacgctggtagaaatcagcggcatcggtttgaacgtcgtccgaaaaacacgcccgatcgcgctcgccaccttgggcgcgctggcggcaaacctgctgctgctggggcttgccgtaccgtccggcggcgcgcgcggcgcggcggttgcctgtgccgcctcattctggttgttttttgttttcaagacagaaagctcctgtcgcctgtggcagccgctcaaacgcctgccgctttatatgcacacattgttctgcctggcctcctcggcggcctacacctgcttcggcacaccggcaaactaccccctgtttgccggcgtatgggcggcatatctggcaggctgcatcctgcgccaccggaaagatttgcacaaactgtttcattatttgaaaaaacaaggtttcccattatga

SEQ ID NO: 48787 - DNA, 1479 bp, Neisseria meningitidis; identical to SEQ ID NO: 39417

SEQ ID NO: 48788 - DNA, 825 bp, Neisseria meningitidis
atgaaatggctcttcacccttttggcggtactcaatattgccgtattcggcggcacggtgggctataaattggccgttaaagcgacgggcggcgtgccggaaaaccgggccgtcgaaaacacgccccccgcaacgcccgccgccgacaatgcggcggcatccgtggaggatacggcggcactgctcaaaccgggcgacatcctgaccgaagaacaggcggagcagttgcgcttgaagaaagaagcggaacagaaaaaactgaaagagaaaaaacagcgtgaagaaaaagcccgccgcgaaaaactcgccgccgaaaaggcgcaggcggaacgcgaaaacggcgcggcggatgccttatgcgccgcgcaggcaagcctcacgatggacgaagacgactaccaccgcatcaaagggcttttgggcaaatggtcgcacgttgccagcaggagcgtcgaaaaacgcaccgccaaagccaaacctgccgacaaaacctaccgcgtcgtcctgcccgtttccgccgatgccgaaaatcaggcggcggagctgtctgccaaaggtttcaaccccataccgtttgacggcgcattgagtttgggtgtcggcaacagccgggaaaacgcccaagccctgcaaaaccggcttgccggcgccggattcggcggggcgcatattgtcgaacactttgccgaagccgacaggcaggacgattctttgagcgtgtcgcgtatgacggttttgtttaccggcgtgaatgccgccgatgcggacgaaattcgtaaaatcacgtccctatacggcaaactgaacctcaagtcttgcaaatag

SEQ ID NO: 48789 - DNA, 735 bp, Neisseria meningitidis; identical to SEQ ID NO: 38010

SEQ ID NO: 48790 - DNA, 837 bp, Neisseria meningitidis; identical to SEQ ID NO: 38310

SEQ ID NO: 48791 - DNA, 297 bp, Neisseria meningitidis; identical to SEQ ID NO: 38519

SEQ ID NO: 48792 - DNA, 2835 bp, Neisseria meningitidis; identical to SEQ ID NO: 38502

SEQ ID NO: 48793 - DNA, 2751 bp, Neisseria meningitidis; identical to SEQ ID NO: 38201

SEQ ID NO: 48794 - DNA, 1575 bp, Neisseria meningitidis; identical to SEQ ID NO: 38934

SEQ ID NO: 48795 - DNA, 156 bp, Neisseria meningitidis; identical to SEQ ID NO: 38050

SEQ ID NO: 48796 - DNA, 1344 bp, Neisseria meningitidis; identical to SEQ ID NO: 39032

SEQ ID NO: 48797 - DNA, 837 bp, Neisseria meningitidis
atgcaaatcatacataccattcaagaactgcgcgcctggcgtaaaaatgcgggaacggtggcatttgtgccgaccatgggcaatctgcacgaagggcatcttgccctcgttcgcgaagccaaaaaacgcgccgacaacgttgttgtcagcatattcgtcaaccgcctgcaattcggtcagggcgaggatttcgacaaatatccgcgtactttgcaacaggatgcggacaagctggaagccgagggtgttgccgttgttttcgcgcccgatgagaaagaactctatccgaacgtggagcaacggtataacgtcgaaccgcccaacctgcaaaatgagttgtgcggcaagtttcgtccgggacatttccgcggggtggcaacggtagtgtccaagctgttcaatattgtcgcgccggatgttgcctgtttcggcaaaaaagactatcagcagcttgccgtgattaaaggtttgaccgaggatttgaattttgatgttgaaatagtgcctgtcgatacggggcgcacggaagacggtttggcactctccagccgcaaccagtatttgagtgcggcggaacgcgacgaagcaccgcgcctgtaccgcgaattaaaggctgttgccgaatccttggcgcagggcagtttggattatgcaggtttggagcggcaggctgccgaccatttgaccgctgcgggctgggtggtcgattatgtcgaaatccgccgcgccgatacgctcgaagtggcgcgggcgggagataagaaactggtggtcttggccgccgcccgtctggggacgacgcgcctgattgacaatttggaaataaaactcccttaa

SEQ ID NO: 48798 - DNA, 1248 bp, Neisseria meningitidis; identical to SEQ ID NO: 39099

SEQ ID NO: 48799 - DNA, 1587 bp, Neisseria meningitidis; identical to SEQ ID NO: 38328

SEQ ID NO: 48800 - DNA, 432 bp, Neisseria meningitidis; identical to SEQ ID NO: 38797

SEQ ID NO: 48801 - DNA, 672 bp, Neisseria meningitidis; identical to SEQ ID NO: 39257

SEQ ID NO: 48802 - DNA, 552 bp, Neisseria meningitidis; identical to SEQ ID NO: 37494

SEQ ID NO: 48803 - DNA, 1980 bp, Neisseria meningitidis
atgcctaaaattttacaacaaacaaccttacatcgcttttttcgcgcaaacacgcaccatccgatcagcccgtccgttttgcagcaggctggcgatttgataagatggttatgtttttcagacggcatttcagatttccgtccatgccgtctgaagccgcaaaacccgattggaggaactgttatgaataccgtatcgaattacctgtccgcattgcgcgaagccatgaaggcgcaaggcttggacgcgctcgtcatcccttccgccgacccccacctgtccgaatacctgcccgagcattggcaggcgcgccgcgaattatcgggctttaccggctcggtcggcacgtttgtcctgaccaccgatgaagcgggcgtatgggtggacagccgctattgggaacaagccgccaagcagcttgcgggcagcggcatcgaactgcaaaaaagcgggcaagtgccgccgtataacgaatggctcgcggcaaacctgcccgaaaacgccgccgtcggcatcccttccgatatggtctcgctcaccggcaaacgcactttggcgcaatccctgaccgccaaaaacatccgcatcgaacacccggacgatctgcttgaccaagtgtggacaagccgtcccgctatccccgccgaaaccgtgttcatccacgaccccgcctacgtctccgaaaccgccgccgaaaaactcgcccgcgtgcgcgccgtgatggcggaaaaaggcgcggattaccacttggtttcatcgcttgacgacatcgcttggctgaccaacctgcgcggcagcgacgtgcctttcaatcccgttttcgtgtccttcctgctgattggcaaagacaacgccgtcctgtttaccgaacaatgccgtctgaacgccgaagccgccgccgcgctgcaaaccgccggcatcacggtcgaaccttacgcccaagttgccgacaagctcgcgcaaatcggcggcgcgctgcttatcgaaccgaacaaaaccgccgtcagtacgctcgtgcgcctgcccgaaagcgtacgcctaatcgaaggcaccaacccgtccacgctgttcaaatcctgcaaatccgaagccgacatcgcccgcatccgcgaagcgatggaacacgacggcgcggcgttgtgcggtttcttcgccgagtttgaagacatcatcggcaacggcggcagcctgaccgaaatcgacgtggacaccatgctttaccgccaccgcagcgtgcgcccgggttttgtgtcattgagtttcgacaccatcgcaggcttcaacgccaacggcgccctgccgcattacagcgcaacgcccgaaagccacagcaccatcagcggcaacgggctgctgctcatcgactccggcgcgcaatacaaaggcggcacgaccgacatcacccgcgtcgtccctgtcggcacacccaccgccgaacaaaaacgcgacaacaccctcgttctcaaagcccatatcgcgcttgccgaagccgtgttcccagaaaacatcccctcgccgctgattgatgcgatttgccgcaaacccctgtggcaggcgcaatgcgactacggccacggcaccggacacggcgtaggctatttcctcaacgtccacgaaggcccgcagcgcatcgccttcgccgcccccgccacgcccgaaaccgccatgaaaaaaggcatggttacctccatcgaacccggactctaccgcccgggaaaatggggcatccgcattgaaaaccttgccgccaaccaagccgtcgccgcccctcaagaaaccgaattcggcagcttcctctgttttgaaaccctgaccctctgccccatcgacacccgcctgatggacaccgccctcatgaccgacggcgaaatcgactgggtcaaccgctaccacgccgaagtccgccgccgcctcgagccgctgaccgaaggcgcggcaaaagcgtggctgatcaaacgcaccgaaccgctggcgcgttaa

SEQ ID NO: 48804 - DNA, 1212 bp, Neisseria meningitidis; identical to SEQ ID NO: 39712

SEQ ID NO: 48805 - DNA, 966 bp, Neisseria meningitidis; identical to SEQ ID NO: 38346

SEQ ID NO: 48806 - DNA, 1854 bp, Neisseria meningitidis
atgaaccgttatcctttatggaaatatctgctgattgtgttcacgattgcggttgccgcagtgtattcgctgcccaacctattcggcgaaacacccgccgtgcaggtatcgaccaaccgacaagccatcatcatcaacgaacagactcaatccaaagtggatgccgcgctgcaaaacgcgggtattcagaccgacgggatgtttgttgtggacaattcactgaaagtgcgtttcaaagacacagaaacgcagcttaaagcgcgcgacgtcatcgaaaacactttgggcgaagggtatattaccgcgctcaacctgttggcggacagccccgaatggatggcgaaaatcaaagccaatccgatgtttttgggtttggacctgcgcggcggcgtgcatttcaccatgcaggtcgatatgaaagcggcgatgcagaaaacgtttgaacgttattcgggcgacatccgccgcgaactgcgccgcgaaaaaatccgcagcggcacggtgcgtcaggctggaaacagcctgaccgtccctttgcaggatgcaggtgatgtgcaaaaggcactgccgcagttgcgcaagctgtttcctgaagcaacgctgaattcagacggcagcaatatcgtcttgacgctttcggaagaggcggtcaataaagtgcgttccgatgcggtcaaacagaacatcactaccctgcacaaccgtgtgaacgagttgggcgtggccgaacccgtcatccagcagtcaggtgcagaccgtatcgtcgtgcagcttccgggcgttcaggatactgccaaggcaaaagacatcatcggccgtaccgcgactttggaattgcgtatggtggaggacgatcctgccaagttgcgcgaggcattggaaggcaacgtgccgagcggttatgagctgctttcaagcggcggagatcgtcccgaaactctgctaatcagcaaacaggtcgagctgacgggcgacaacatcaacgatgcgcaaccgagtttcgaccaaatgggcgcacctgccgtcagtctgagcttggacagcgcgggtggcagcatttttggcgaactgactgccgcaaatgtcggcaaacgcatggcgatggttttgatcgaccaaggaaaatccgaggttgtaaccgcgccggttatccgtactgccattaccggcggacgcgtggaaatttccggaagcatgacgacagccgaagccaatgatacgtctttgctgttgcgtgccggttctcttgccgcaccgatgcagattgtcgaagaacgtaccatcggtccgtctttgggtaaggagaacatcgaaaaaggcttccattcgactttatggggttttgccatcgttgctgcattcatggtggtttactatcgtctgatgggtttcttttctaccattgcattgagtgccaacatactgttcctaatcggtattttgtctgccatgcaggcaacgttgacgttaccgggtatggccgcgctggcgttgactttgggtatggcaatcgactccaacgtcttgattaacgaacgtatccgcgaagaattgcgtgccggcgtgccgccgcagcaggcaatcaatctcggtttccaacacgcatgggcgaccattgtcgattccaacctgacttcgctgattgccggtatcgcgcttttggtattcggttccggcccggtacgcggttttgcggtcgtacactgtttgggtattctgacttcgatgtattcgtccgtcgtcgtattccgtgcgttggtcaatctgtggtacggacgcagacgcaaattgcagaatatttccatcggttcggtgtggaagccgaaagccgaaatggcaggaggcaaggagtaa

SEQ ID NO: 48807 - DNA, 1434 bp, Neisseria meningitidis; identical to SEQ ID NO: 39392

SEQ ID NO: 48808 - DNA, 267 bp, Neisseria meningitidis; identical to SEQ ID NO: 39635

SEQ ID NO: 48809 - DNA, 1257 bp, Neisseria meningitidis; identical to SEQ ID NO: 38146

SEQ ID NO: 48810 - DNA, 540 bp, Neisseria meningitidis; identical to SEQ ID NO: 44661

SEQ ID NO: 48811 - DNA, 1548 bp, Neisseria meningitidis
atgcagcttaatcctgctgaaattagcgatttgattaaagccaagatcgaaaatctgtctgtaaatgccgaagtgcgtactcgtggtaccgttgtttctgttacagacggcattgtgcgcattcatggcttgtcagacgcgatgcaaggtgagatgctcgaattccccggtaacactttcggtctggccatgaacttggagcgcgactccgtcggtgccgtagtgttgggcgagtacgaacacattaaagaaggcgatacagttacttgtaccggtcgtatcttggaagtgccggtcggacgcgaactggtcggacgcgtcgttgatgcattgggtcggcctatcgacggcaaaggcccgattaatacaactttgaccgcccctatcgaaaaaatcgcaccgggcgtgattgcgcgcaaatcggttgaccagccgatgcaaaccggtctgaaggcgattgactctatggttcctgtcggtcgcggtcagcgtgagttgattattggcgaccgtcagacaggtaaaacggccgtagcattggatgccatcgtcaaccaaaaaggtacgggtgttatctgtatctatgtcgctatcggtcaaaaagcatcttctattgccaacgtggtccgcaaattggaagagcatggcgcgatggagcataccatcgtggttgctgcaactgcatctgaagcggcggcattgcaatatatcgcaccttactccggttgtacgatgggtgaattcttccgcgaccgcggcgaagatgccttgattgtttatgacgatttgtccaaacaggctgtggcttaccgtcaaatttccctgcttttgcgccgtccgcccggccgcgaagcctatcccggcgatgtgttctacctgcactcccgtctgttggaacgtgcagcacgtgtcaatgaacacgaagtggagaaattgaccaacggcgaagtaaaaggcaaaaccggttctctgaccgcgttgccgattatcgaaacccaagcgggcgacgtatctgctttcgttccgactaacgtcatttcgattaccgacggtcagattttcttggaaaccgacctcttcaacgccggtatccgtcctgcaatcaatgccggtatttccgtatcccgcgtaggcggtgctgcacaaaccaaagtgattaaaaagctgggtggcggtatccgtttggcgttggcgcaatatcgtgaattggcggctttctcgcaatttgcatccgatttggatgaagctacgcgcaaacaattggagcatggcgaagtcgtaaccgaactgatgaaacagaaacagttcagtacgttgaatacggctgaaatggctttgaccctttgggcaatcaacaacggttcgtattctgatgttccggttgccaaagctctggcttttgaatctgaatttttgagctttgtccgtacccaacatccggaagttttggaagccgtcaatgcttcaggtgcaatgtccgacgagagcgagaaaacgcttgaagcagccatgaaatccttcaaatcttcttacgcctatcaggcataa

SEQ ID NO: 48812 - DNA, 324 bp, Neisseria meningitidis; identical to SEQ ID NO: 38645

SEQ ID NO: 48813 - DNA, 999 bp, Neisseria meningitidis; identical to SEQ ID NO: 45517

SEQ ID NO: 48814 - DNA, 573 bp, Neisseria meningitidis
atgacttatgaaattcaagcctctgttcgtgaagcacaaggcactggtgcgagccgccgcctgcgtcgcgaaggccaaatccccggcattttgtacggtgaaggccaagagcccgttgcaattgctgtggatcacaaaactgtattctacgcattggaaaaagaatctttccatactgcgttgattaagttgtctttgaacggtgaaactaaagacgttatcgtccgcgatttccaaatgcacccgttccgccgcgaagttcaacatatcgacttccaagctgtgaaagctgatcaacttgtacgtatccgtgttcccctgcacatcgttaacgctgaaaattcccaagctgttaaattgcaaggcggccgcgtatctctgttgaacacttctgttgaagtagttgctttgcctgccaatatccctgctttcttggatttggattgtgccgaagtggttgccggtgacattttgcacttgtcagacatcaaattgcctgaaggtgtagaaagcgtttccctgaaacgtaacgaaaatctggctgttgccaccgttaccggtaagaaacgctaa

SEQ ID NO: 48815 - DNA, 552 bp, Neisseria meningitidis; identical to SEQ ID NO: 38599

SEQ ID NO: 48816 - DNA, 933 bp, Neisseria meningitidis; identical to SEQ ID NO: 38311

SEQ ID NO: 48817 - DNA, 1026 bp, Neisseria meningitidis
atggattatcagggtaagaaagaccgattggaagaagttatcggtctttccgaagaccccgaactttggaacgacccgaaacgcgcccaagaaatcggcaaagagcgcaaaatcctcgaaggcatcgtgttgacgctcgacaacatcgcttcgggcatcgaagacaaccgcatgctgattgaaatgaccgtcgaagaaaacgacgaagaaggttttgccgccgtgcaggaagatgtggcggggctggaaaaacagatggcggatttggagttcaaacggatgttcaaccagcccgccgacccgaacaactgctttatcgacatcaccgcaggcgcgggcggtacggaagcggaagactgggcgggtatgctgttccgcatgtacagccgctacgccgagcgcaaaggcttcaaaatcgaaatcctcgaagaagacgatggcgaaatcgcgggcatcaaccgcgcgactatccgagtggaaggcgaatacgcctatggtttgctgcgtaccgaaactggcgttcaccgcttggtgcgctattcaccgtttgactcgaacaacaaacgccatacttcgtttgcctccgtgttcgtttaccctgaaatcgatgattccatcgaaatcgaaatcaaccccgccgatttgcgtatcgacacctatcgcgcatcgggcgcgggcggtcagcacatcaacaaaaccgactccgccgtgcgtattacccacgagccgacggggattgtggtgcaatgtcaaaacgaccgttcgcaacacgccaacaaagccgccgcgatggaaatgttgaagtccaaactgtatgaattggaaatgcgcaaacgcaatgaagagaaacaggcgttggaagaaggtaaatccgatgtaggttggggtagccaaatccgttcgtatgttttggattcctcacgtatcaaagacttgcgtacaggctacgaagtcggcaacaccaaagccgtattggatggcgatttggacggctttatcgaagccagcctgaaacagggcgtgtaa

SEQ ID NO: 48818 - DNA, 777 bp, Neisseria meningitidis; identical to SEQ ID NO: 39426

SEQ ID NO: 48819 - DNA, 1164 bp, Neisseria meningitidis
gtgcatattaacttttcaatggaatataaagaatttaatgaaaattatttatataaaaagccatttatttttaaaaatgctttagatgttagttctatctcatggaaagaaattaatgaattgtatcaacgtgcagaccctactgattggcaatttaagttccgaaaaggggaaataattccaaaagaagcctatgttgaatcattcaatgacgtgggtaggatacgtcatcgatttaataaaacagccgtgtatcagtatttgcaagatggcgcgacaatggtttataaccgtattgataatgagccatttgttgatactattgctaaacaagttgctcaatttgcacaagcacaaactgttgttagtggttatttagcgtttggtagctcatcatcatatcgtaatcattgggatactcgagatgtatttgcagtacaattgattggcaaaaaacattggacaatttctgccccaaattttgatatgccgttgtatatgcagcaagcaaaagatatgccgcacattactccatctaaaacagtggatatggaagtcattttagaagcaggagatattctatatattccacgtggttggtggcataatcctatgcctatgaattgtgaaacattccatttagctattggtacatttccgccaaacggttataactatatggaatggttgatgaaaaaaatacctgatatccagagtattcgtcaaaatttcatagactgggaacacgaccaaaaaaatatagataatgcggctcaggcagttactgaaatgatgaagaaccaagaaaattatcaagcattcatacaagattttttgggaaatcaacgcgtaaatactgcatttaatatgcaaatttttggaaatctggataatgacagattacctgaaaatagtacaattaaactcaattcgttggataaccgtacaattaaacaaggatatatcatagcgaatggcatcaaaaccaacttggacaatgatagccaaacgattttgcaatggattgctgacaaacatagtgttaagttaactcaactgtatgaattttgccaaaatcaaaacattaatttggaaaaagtggaaaaattagtgtttgatttgacaatgatcgatgtattggaatgtttaactgatgaaagataa

SEQ ID NO: 48820 - DNA, 987 bp, Neisseria meningitidis; identical to SEQ ID NO: 38696

SEQ ID NO: 48821 - DNA, 486 bp, Neisseria meningitidis; identical to SEQ ID NO: 39660

SEQ ID NO: 48822 - DNA, 888 bp, Neisseria meningitidis; identical to SEQ ID NO: 39159

SEQ ID NO: 48823 - DNA, 747 bp, Neisseria meningitidis; identical to SEQ ID NO: 39933

SEQ ID NO: 48824 - DNA, 1581 bp, Neisseria meningitidis
atgccttccatcaaacgcgccctgatcagcctgtccgacaagacgggcgcagtcgaatttgcccaaaccctgaccaagctcggtgtcgaaatcctctctaccggcggcacggcgaagctgcttgccgatgcgggcgttcccgtgattgaagttgccgactacaccggtttccccgaaatgctcgacggccgcgtgaaaaccctgcatccgaaaatccacggcggtattttgggccggcgcgatttggacgaacacgtcgccaagatggaagaacacggcatcggcaacatcgacctcgtgtgtgtcaacctctaccccttcgccgccaccatcgccaaaccaaactgcacgctggaagacgcgattgaaaatatcgacatcggcggcccgaccatggtgcgctccgccgcgaaaaactggaaacacgtcgccatcgttaccgacacagccgatttcccggccatcgccgccgaactcgaagccaacaatggcgcattgagcgacaaaacccgcttcaacctgtcgcgcaaggcgttcagccacaccgcccaatacgacggcatgatttccaactacctgacctcactttcagacgacgttttgagcggagagcctgaaatcggcgaatttccaagccagttcaaccaaagctggattaaagtgcaagacatgcgctatggcgaaaacccgcatcagcgcgccgcgttctaccgcgatattgaccccgccgcaggcagcctttccgcctacaaacaactgcaaggcaaagaattgtcttacaacaacatcgccgatgccgatgccgcatgggaagccgtcaaatcctttgacgcgccagcctgcgtgatcgtcaaacacgccaatccgtgcggcgtcgccgttgcagccgatacattgaccgcctacaaactcgcctacgtcaccgacaccaccagcgcgttcggcggcatcatcgccttcaaccgcgaagtggacggcgaaaccgtcaaacagattaccgacaaccagtttatggaagtcttgatggcgccgaagtttaccgccgaagccctcgaaatcgccgccgccaagaaaaacgtgcgcgtattggaagtgccgcttgaggcaggcgcaaaccgcttcgaactcaaacgcgtcggcggcggactgttggtacaaacccctgatattcaccgcctcaaccgcgccgatttgaaagtcgtctccaaacgccaaccaaccgagcaagaatggaacgacctgatgtttgtttggaacgtcgcaaaatacgtcaaatccaacgccatcgtcttcggcaaaggcggtcaaacctacggcatcggcgcaggccaaatgagccgcgtggacagcacccgcatcgccgcccgcaaagcgcaagatgccaatctcgacctcaacggcgcatgtgccgcttccgatgctttcttccccttccgcgacggcgtggacgtgattgccgagcagggcatcaaagccatcatccatccggcaggttcgatgcgcgatcaggaagtcttcgacgcagcggacgaacacggcatcgccatggtcgtaaccgacgtgcgccacttccgccattaa

SEQ ID NO: 48825 - DNA, 720 bp, Neisseria meningitidis; identical to SEQ ID NO: 39388

SEQ ID NO: 48826 - DNA, 1773 bp, Neisseria meningitidis; identical to SEQ ID NO: 38280

SEQ ID NO: 48827 - DNA, 525 bp, Neisseria meningitidis; identical to SEQ ID NO: 46910

SEQ ID NO: 48828 - DNA, 1110 bp, Neisseria meningitidis
atgttttcggacacagatatatccatgatggaaaacgccctccgacttgccgctttggggcgtttttccacttcgcccaatccgcgcgtcggctgcgttatcgcacacggcagccaaattgtcgggcaaggcttccacgtcaaagcgggcgaaccgcacgccgaagtccacgccctgcatcaggcgggggaaatggcaaaaggcgcgaccgcctttgttaccctcgaaccgtgcagccattacgggcgtaccccgccctgtgccgaagctctgctccgttccggcgtaacacgcgtcgttgccgccatgcgcgaccccaacccgctggttgccggcaaagggcttgccctgctcgaatcggcaggcatcaaaacagaatgcggactgcttgaaaacaaagcacgcgaactcaaccggggatttttatcgagcatcgaacgccgccgtcccttcgtccgcctcaaatgcgccgtttcgctggacggcaaaaccgccctttcagacggcagcagcttttggattaccggcgaagacgcgcgtgccgacgtacaggttttgcgtgccgaaagctgcgcggtgctaaccggcatcggcacggtgttggcggacaatccccagctcaacgtccgcgcttttccaactttgcgccaacccgcacgcatcgttttagacagccgcctgcgcctgcccttggacagccaccttctgaccgacggacaatctccaacctacatcgccacactcgaacgcaacgaagacagactgcacccctatcgggaacacgcacacatccgcatcctgatgccgtctgaaacggcaggcggcaaaatcgacctgaaccacctgatgcgcctccttgccgacgaaggtttcggagaaatcatggtcgaagcaggctccgaactcacatccgcatttctggcagaagatctggcggacgaaatcgtgctgtaccgttcgcccaaaatcctcggcagcggcaaagacctgctttccctgcccgaaaaccgcgccgccctttccgcaccgcccttgtggacacccgtttcaagcgaaatcctcggacacgacatcaaaaccgtgttccggaaaaacgataacgccttttaa

SEQ ID NO: 48829 - DNA, 240 bp, Neisseria meningitidis; identical to SEQ ID NO: 39582

SEQ ID NO: 48830 - DNA, 330 bp, Neisseria meningitidis; identical to SEQ ID NO: 37077

SEQ ID NO: 48831 - DNA, 465 bp, Neisseria meningitidis; identical to SEQ ID NO: 46351

SEQ ID NO: 48832 - DNA, 2055 bp, Neisseria meningitidis; identical to SEQ ID NO: 38820

SEQ ID NO: 48833 - DNA, 312 bp, Neisseria meningitidis; identical to SEQ ID NO: 39461

SEQ ID NO: 48834 - DNA, 234 bp, Neisseria meningitidis; identical to SEQ ID NO: 39683

SEQ ID NO: 48835 - DNA, 780 bp, Neisseria meningitidis; identical to SEQ ID NO: 44868

SEQ ID NO: 48836 - DNA, 600 bp, Neisseria meningitidis; identical to SEQ ID NO: 39793

SEQ ID NO: 48837 - DNA, 855 bp, Neisseria meningitidis
atgttttaccaaatccttgccctgattatctggagcagctcgtttattgccgccaaatatgtctatggcggcatcgatcccgcattgatggtcggcgtgcgcctgctaattgccgcgctgcctgcactgcccgcctgccgccgtcatgtcggcaagattccgcgtgaggaatggaagccgttgctgattgcggcgtttgtcaactatgtgctgaccctgctgcttcagtttgtcgggttgaaatacacttccgccgccagcgcatcggtcattgtcggactcgagccgctgctgatggtgtttgtcggacactttttcttcaacgacaaagcgcgtgcctaccactggatatgcggcgcggcggcatttgccggtgtcgcgctgctgatggcgggcggtgcggaagagggcggcgaagtcggctggttcggctgcctgctggtgttgttggcgggcgcgggcttttgtgccgctatgcgtccgacgcaaaggctgattgcacgcatcggcgcaccggcattcacatctgtttccattgccgccgcatcgttgatgtgcctgccgttttcgcttgctttggcgcaaagttataccgtggactggaacgtcgggatggtattgtcgctgctgtatttgggcttggggtgcggctggtacgcctattggctgtggaacaaggggatgagccgtgttcctgccaacgtgtcgggactgttgatttcgctcgaacccgtcgtcggcgtgctgctggcggttttgattttgggcgaacacctgtcgcccgtgtccgccttgggcgtgtttgtcgtcatcgccgccaccttggttgccggccggctgtcgcatcaaaaataa

SEQ ID NO: 48838 - DNA, 600 bp, Neisseria meningitidis
ttgctgctttcatgccgtctgaagcacgtttcagatggcatcggtttacatcagataaggataaaaatgggtatttacgattttcaaatgaaagatgcggaaggcaatgcggttgatttgtcaggctatcgcggcaaggttctgctgattgtcaacacggcaacgcgttgcggtctgaccccgcaatacgaggctttgcagaagctgtatgcacaatataccgcagaaggcttggagattttggattttccgtgcaaccagttccgcgaacaggctcccgaaagcagcggagaaattgcccaagtgtgtatgatgaagtttggcacgaagtttaagattttcgacaaaatcgaagtcaatggagcaaataccgcgcccttgtatgcctacctgaaatccgtcaaaccgcaagataaaggcaatcatctgtttaaagatttcgtgttgaagctcgcagctttgggagagaagcgcgacgaaggcgacatcaaatggaactttaccaaattcctcgtcaaccgcgacggcgaagtggtcgagcgttttgcgcctagtgttacgcccgaagaaatcgaagccgatattcgggcattgctgtaa

SEQ ID NO: 48839 - DNA, 693 bp, Neisseria meningitidis; identical to SEQ ID NO: 38646

SEQ ID NO: 48840 - DNA, 1104 bp, Neisseria meningitidis; identical to SEQ ID NO: 44519

SEQ ID NO: 48841 - DNA, 867 bp, Neisseria meningitidis; identical to SEQ ID NO: 40507

SEQ ID NO: 48842 - DNA, 612 bp, Neisseria meningitidis; identical to SEQ ID NO: 39736

SEQ ID NO: 48843 - DNA, 537 bp, Neisseria meningitidis; identical to SEQ ID NO: 38926

SEQ ID NO: 48844 - DNA, 384 bp, Neisseria meningitidis; identical to SEQ ID NO: 45542

SEQ ID NO: 48845 - DNA, 1098 bp, Neisseria meningitidis; identical to SEQ ID NO: 36189

SEQ ID NO: 48846 - DNA, 645 bp, Neisseria meningitidis; identical to SEQ ID NO: 38405

SEQ ID NO: 48847 - DNA, 1005 bp, Neisseria meningitidis
atgtcgggcgcggctgccgcgctgcttgccggcatcatcctttatttcaaaagcgacaagaagcggcaggaaaacggtgaatggagttccggcctcgaatacgcctatatcctgacagcggtcggcgtgtttgccgctttgtccctgtttatgagctttaccgccgttttcctgattttcgttgtattgtgcggtacggcttggggggtatacaaataccgcctgaagactcatcccgaaatctcggaaagcagccacttcggcgattatttcggcagtttcttccctaccgttttggtattgtttctcatccggtcgtttattgccgaaccgttccaaattccatccagctccatgcgcccgggcctgatcaagggcgatttcattttggtcggcaaattttcctacggcttgcgcgtacccgttttaaacaatatatttatccccacaggcaaaatcgaacggggcgatgtcgttgtttttaattatcctctgcagccggagatgacctacatcaagcgtattgtcggcattccgggcgatgtggtcgaatatcgggataagattttgacggtaaatggcaaacccacttccgatattcctaacggcacataccgttatcccgacgacaccgacccatccgaaatccacaatacggatatgttccacagcggtttggacggcaaatccttcaatattctgaaaaaagaaggacagcctgccgtttccctgcccgtattgggcaaatatacctccgatattatgtctgaaaacggatattccatagagcaaagcggtttggaacactgccaatatgccgacgacggcagcggtttcgtgtgcaaagttcccgaaggacgctatttcgctatgggcgacaaccgcgacaacagtgccgattctcgctactggggatttgtggatgacaagctggttgtcggcaaggcaatgttcattttgatgaacttcggcgatttcggcagggccggtacggcaatccgttag

SEQ ID NO: 48848 - DNA, 975 bp, Neisseria meningitidis
atggacacactgacccaattcctccccgaacacctgcaacaaaaccagctgcccgaagcactcggcggcgttttactgtccgttgtttccgcctgcaccgaaatcaacgccaaagtccgcctcggcgcactggccggcgtattgggtatggcgggcacgggcaatattcagggcgaagaccaaaaaaaactggatgttatcgccaacaacatcatgattgacacactcaaagccaaccctgccgttgccggtttggcaagcgaggaagaagactctttcgtaagtgccggtgaaaacggacgctatctcgtcctattcgaccctttagacggatcgtccaatattgatgtcaacatttccgtcggtacaattttctccatccttgaaaaacccgaaggcgcattggcaaccgaatcattccttcaaacgggcagacagcagcttgccgctggttacgttctttacgggcctcaaacccagctcgtattcacattcggacacggcgtatatatgttcacgctcaatgccgaaaacgaatttgtgctgacaaaagaaaaaccgaaagtacccgaaagtaccaaagaatttgccatcaatatgtccaaccgccgccactggctgccccccgtccaacaatacatcgacgagctcttggcgggcgaaaccggcacgcgcggcaaaaactacaatatgcgctgggtagccagcatggttgccgaaatccaccgcatactgatgcgcgggggcgtgttcatgtatccgcaagacaaacgcgacccgtccaaacccggcaaactgcgcctgatgtatgaagccaatcctatggccctgatactcgaacaagccggcgcatcggcaagcaacgcccgtcaggacatactcggcatccgtcccgaaagcctgcaccagcgcgtcgccgtcattatgggcagcagcgaagaagtggattacctcaaccgcctgcattcaaaataa

SEQ ID NO: 48849 - DNA, 483 bp, Neisseria meningitidis
atgggctacatcaaaggcgtattcggcataaaaggctggttgaaaattgccgccaacaccgaatattccgacagccttttggactaccccgagtggcatttggtcaaggacggcaaaaccgtcagcgttacccttgaagccggaaaagtcgtcaacagcgaactccaagtcaaattcgaaggcataaacgaccgcgacttggcattctcattgcgcggttacaccatcgaaataccccgtgaagcattcgccccgacagaagaagacgaatactactggacagacttggtcggcatgaccgtcgtcaacaaagaccataccgttttaggcaaggtaagcaacctgatggaaaccggcgcaaacgacgtattgatgattgacggagaacacgggcagattctgattccgttcgtttcccaatatatcgaaaccgtcgataccggcagcaagattattactgccgactggggtttggactactga

SEQ ID NO: 48850 - DNA, 483 bp, Neisseria meningitidis
atgacacaacaacgccaactgccttcgcacgaactcattatgtccgaactgatgatgccggacaccgccaatttcagcggcaacgtacacggcggcgaactcctgctcctgctcgaccaagtcgcctattcctgcgccagccgttacagcggcaattattgcgttaccctgtcggttgacaaagtcctgtttaaagaacccatccacatcggcgatttggttaccttttacgccgctgtcaactacacgggacgcacctcgatggaaatcggcatccgtgtcgaagcacaaaacatccgcaccggcgaaatccgccataccaacagctgctacttcacgatggttgcggtcaaagacggcaaacccgtccctgtccctccgctggaaatcctgaccgaccgccaacgctgccgctacgaaaaagccaaaaaacgcagagacatcagcctgcaagcctctgaagacatgtcctgcggctgctga

SEQ ID NO: 48851 - DNA, 2214 bp, Neisseria meningitidis; identical to SEQ ID NO: 38410

SEQ ID NO: 48852 - DNA, 627 bp, Neisseria meningitidis; identical to SEQ ID NO: 39768

SEQ ID NO: 48853 - DNA, 465 bp, Neisseria meningitidis; identical to SEQ ID NO: 38372

SEQ ID NO: 48854 - DNA, 747 bp, Neisseria meningitidis; identical to SEQ ID NO: 38219

SEQ ID NO: 48855 - DNA, 924 bp, Neisseria meningitidis; identical to SEQ ID NO: 46119

SEQ ID NO: 48856 - DNA, 1296 bp, Neisseria meningitidis
atgattcgccctgattttcaagaatatctgccttcttattatttcagttcggttaatcctcatactgtttatccgaaacttcaatgccgtctgaaaaccgatacctgtatcatcggcggcggattgagtggtttgtgcactgcattgcccttggcggagcagggacatgaaacggttgtgttggaagccgcgcgtatcggtttcggcgcgtcgggacggagtggcgggcaggttatcagcgattacgcctgcggtatggaggaaattgaaaaacaggtcggtttggaacaggcgcaatggttttggcaacagtctttgcaggcgatcgaactggtggacgaacgcgtccgcaaacataccatcgattgcgattggcagcgcggttatgccacggttgccgtccgtccgcagcattgggaagaattgcaacaatggcatgaacacgcccaacggcattacggtgcgagtcattatcaactctgggataacactgaactgaagcagcagcttgacagcgatatgtaccaaggcgcacagttcgatcccttgtccgggcatctccatccgctcaattacacgttgggcatcgcccgcgccgctgccgaagctggtacgaagatttttgagcattctcccatgatacgcattgaaccttatcaaaacggttggctggtttacacccccgaaggcagcgtcgaatgcaaaaatctggtgtacgccgtcaatacttatgccggtttgaatccgatattccggcctttggaacgcaaggcgattgctgtcagcacctttattattgccacagaacccttgggcgcgcgtgcaaaagggcttatccgcaacaatatggcagtatgcgacaaccgccatattttggattattaccgcctcagcgcggacggcagactgcttttcggcggtaaggataacgagtttatcgacaatcccgcgcgtatgaccgagcttgtccgccaagatatgcttaaagtttttccgcagcttgccgatgtcaaaatcgaatattcgtggggcggggagtgcgacattaccgccaaccttgtcccgcatttcggacgtttagccccgaatgttttttatacgcaaggttattccggacacgggatggcgataacaggcattgcaggtctggcggttgccgaagcaattttaggggacgaatgccgtctgaagccgtttgagcggttgcgccagccgaatattatcctgcaaccgtttttgcgcaaactcggttctttcctcggctcgaaatattatcagtggaaagacagccgttaa

SEQ ID NO: 48857 - DNA, 381 bp, Neisseria meningitidis
atggcagacaacggagagcgaatccaaatccccgttttggaaaatcctgacattagggaaatcaatcactttttttccgtatcaaattttgagaaaaaaaccggcgtccttgttttcagaatcatccccgagccggaatttggcaataccgaattaactgtctattttgaaaaaggatattatttgccaatgattcaaacaattttagaaggcggggatattgaagtcaaaaaccttaaaacggaaaattatagtggaaatacaatggaaatttggggagattcctaccctattgagcatatctctaaaaatatttctacaattcaaaatataatttctgaatttatgatacaaaaacaaacaccggcaccaataatttga

SEQ ID NO: 48858 - DNA, 942 bp, Neisseria meningitidis; identical to SEQ ID NO: 39753

SEQ ID NO: 48859 - DNA, 339 bp, Neisseria meningitidis
atgaaaaaaatcgaggcgattgtcaaaccgttcaaactcgacgacgtgcgcgaggcgttgacggaaatcggcattacgggcatgaccgtcagcgaggtcaaagggttcggcaggcagaaggggcatacggagatttaccggggcgcggaatacgctgtcgatttcctgcccaaggtcaaaatcgagcttgtgttggcggatgatgctgtggaacgcgcgattgacgtgattgtcgaggtggcgcgttcgggaaaaatcggcgacggcaagatttttgtgctgccggtcgaggaggcaatccgtatccgcacgggcgaacgtgcggacgcagcagtctga

SEQ ID NO: 48860 - DNA, 1935 bp, Neisseria meningitidis; identical to SEQ ID NO: 38770

SEQ ID NO: 48861 - DNA, 1428 bp, Neisseria meningitidis; identical to SEQ ID NO: 39120

SEQ ID NO: 48862 - DNA, 828 bp, Neisseria meningitidis; identical to SEQ ID NO: 38917

SEQ ID NO: 48863 - DNA, 726 bp, Neisseria meningitidis
atgagcatcattgtcgaaaacctgaccgtcagctaccgccgccgacctgccgtgcaccatgtggacattacttttgaagaacatagtatgtgggcggttttcggtcccaacggcgcagggaaatccacctttctcaaatccttaatgggattgcagcctatcgatacgggcagcatccggctggacggattgacccgtcagaacattgcctaccttccccagcagtccgacatcgaccgctcgcagcccatgaccgttttcgacttggcggcaatggggctatggtatgaaatcggttttttcagaggaataaatgccgttcaaaaacaacgcgttcacgaatctttggaacgcgtcgggatgcggcagtttgccggccgccaaatcgcccacctctcaaacggacaattccagcgtgtcctttttgcccgaatgctggttcaaaacgccaaattcctacttctagacgaacctttcaacgctgttgatgcacggacgacctacgaacttctcgacgtattgcagaaatgccattgcggcggacacgccatcatcgccgtactgcacgattacgaacaagtccgtgcctactttcccaataccctgctgctcgcccgcgaaaaaattgcggcaggcgcaaccgagaccattctgacagaaccctacctcgcccaagccaacgccaaaatgcagcaacaggaaagccccgagtggtgcgcgtcataa

SEQ ID NO: 48864 - DNA, 1644 bp, Neisseria meningitidis; identical to SEQ ID NO: 39802

SEQ ID NO: 48865 - DNA, 465 bp, Neisseria meningitidis; identical to SEQ ID NO: 39709

SEQ ID NO: 48866 - DNA, 591 bp, Neisseria meningitidis; identical to SEQ ID NO: 39124

SEQ ID NO: 48867 - DNA, 858 bp, Neisseria meningitidis; identical to SEQ ID NO: 38769

SEQ ID NO: 48868 - DNA, 924 bp, Neisseria meningitidis; identical to SEQ ID NO: 38439

SEQ ID NO: 48869 - DNA, 1026 bp, Neisseria meningitidis; identical to SEQ ID NO: 39757

SEQ ID NO: 48870 - DNA, 471 bp, Neisseria meningitidis; identical to SEQ ID NO: 39004

SEQ ID NO: 48871 - DNA, 1044 bp, Neisseria meningitidis
atgagtaaaaaaatcaaagtcggcattgtcggcgcgacgggctacaccggcgtggaactgctgcgcctgcttgccgcccatcccgatgtcgaagtcgccgccgtaaccagccgcagcgaagcgggaaccgcagttgccgattactttccaagtctgcgcggcgtgtacggcctcgccttccaaacgcccgacgaggcaggtttggaacaatgcgacatcgtcttcttcgccacgcccaacggcatcgctatgaaagacgcgctgcgccttttggaacagggcgtgcgcgtcatcgacctttccgccgacttccgcatacgggacattccgacctgggaacactggtacggcatgacccacgccgcccccggcctcgtttcccaagccgtgtacggattgagcgaactcaaccgcgaagccgtcgcacaggcgcgcctcgtcgccaaccccggctgctacccgacctgcgtatccctaccgctcgtgccgctgttgcggcaatgccgtctgaagcccggtatgccgctgattgccgactgcaaatccggcgtatccggcgcgggcaggaaaggcaatgtcggttcgctgttgtgcgaagccggcgacaacttcaaagcctacggcatagccggacaccgccacctgcccgaaatcaggcagaccatcgccgggcttcaggacggcatcgccgaaggattcgtgttcacgccgcacctcgcgccgatgatacgcggtatgcacgccaccgtttacctccacctttcagacggcagcaaccccgaaaccgttttgcgcgactattatcgcgacagcctgttcgtggacatcctgcccgccggttcgacacccgaaacccgcagcgtgcgcggcgcaaacctctgccgcatcagcatccaacaggcggcgcaatccgatgtgtgggtcgtcctttccgtcatcgacaacctcgtcaaaggcgcggcgggacaggcggtgcaaaatatgaacatcatgttcggactgaaggaaacacacggcttggacgcaatccccctgctcccctga

SEQ ID NO: 48872 - DNA, 657 bp, Neisseria meningitidis
gtgaacaaacggctgttttgcagccgcaacggcttgcgctattacctgttgggcggtttctgtttgagtgtttttccgcttttgctggtgtttacctcatccgtttgggcggtttatcggacgggcgggcaggttttgccgccgtatgtccgggcggatgccgcgctggtgttgggtgccgccgcatgggacaaacgcccttcccctgtttttcgggaacgcatcaaccacgccatcgcgctttaccaaagccgcagggtaggcaaaatcgtgtttacgggagggcgaaccaaaaaaggctatatgaccgaagccgaggtcgggcggcggtacgcgctcaaacagggggttccggcgcgcaacatcctgtttgaaaacacttcgcgcaacacttatgaaaacctgaacaacatccgtccggttttgcgtgccaacggtattgccagcgtggtgattgtcagcgatccctaccatttggcgcgggcggcggaaatggcggaggatttgggtgtccgcgtttatatgtctgccaccccgaccacgcggtttgatgcgggaaataagaaaaaaatctttatgctgcaagagggatatgcgttatccctctaccgtttggaaaaatggggcagccgctttttgggatggctgtctgattga

SEQ ID NO: 48873 - DNA, 264 bp, Neisseria meningitidis; identical to SEQ ID NO: 39198

SEQ ID NO: 48874 - DNA, 291 bp, Neisseria meningitidis; identical to SEQ ID NO: 44816

SEQ ID NO: 48875 - DNA, 1518 bp, Neisseria meningitidis; identical to SEQ ID NO: 38183

SEQ ID NO: 48876 - DNA, 2178 bp, Neisseria meningitidis; identical to SEQ ID NO: 38950

SEQ ID NO: 48877 - DNA, 387 bp, Neisseria meningitidis; identical to SEQ ID NO: 45290

SEQ ID NO: 48878 - DNA, 342 bp, Neisseria meningitidis; identical to SEQ ID NO: 39379

SEQ ID NO: 48879 - DNA, 1008 bp, Neisseria meningitidis; identical to SEQ ID NO: 39286

SEQ ID NO: 48880 - DNA, 612 bp, Neisseria meningitidis; identical to SEQ ID NO: 39476

SEQ ID NO: 48881 - DNA, 147 bp, Neisseria meningitidis
ttgaggcacacccgcctgacagacggaacatcatataaaggtcgtctgaaaccgcaaatcaggtttcagacgacctctggcaacaagcataaagcaatcaggaaagaacaaaaacaatgcagaattttggcaaagtggccgtattga

SEQ ID NO: 48882 - DNA, 363 bp, Neisseria meningitidis
atggcttcaagcaacgtaaacaaagaaatcaaagacaaaaaactctccctgtgggccaagcgtcaagacggttcggtaaaatggttctgcggacagccggttacgcgcaacgacaccgccaaagacgacaccgtcgccgccgacaccgacaccgccaagaagatcgacaccaagcacctgccgtcaacctgccgcgatgattcatctaccggttgcatagaaacaccacgcgccgacttcaaacacttccaaaaaatcagccgttaccgagtattgcccgaatcacggcacatggccgaaaaacttcgtcattcccgcgcaggcgggaatctaggtctgtcggcacagaaacttatcgggtaa

SEQ ID NO: 48883 - DNA, 2277 bp, Neisseria meningitidis; identical to SEQ ID NO: 45398

SEQ ID NO: 48884 - DNA, 957 bp, Neisseria meningitidis; identical to SEQ ID NO: 39251

SEQ ID NO: 48885 - DNA, 1293 bp, Neisseria meningitidis; identical to SEQ ID NO: 38978

SEQ ID NO: 48886 - DNA, 1131 bp, Neisseria meningitidis; identical to SEQ ID NO: 38545

SEQ ID NO: 48887 - DNA, 453 bp, Neisseria meningitidis; identical to SEQ ID NO: 38623

SEQ ID NO: 48888 - DNA, 687 bp, Neisseria meningitidis; identical to SEQ ID NO: 38756

SEQ ID NO: 48889 - DNA, 843 bp, Neisseria meningitidis; identical to SEQ ID NO: 40191

SEQ ID NO: 48890 - DNA, 462 bp, Neisseria meningitidis; identical to SEQ ID NO: 38683

SEQ ID NO: 48891 - DNA, 588 bp, Neisseria meningitidis; identical to SEQ ID NO: 38982

SEQ ID NO: 48892 - DNA, 792 bp, Neisseria meningitidis; identical to SEQ ID NO: 38850

SEQ ID NO: 48893 - DNA, 816 bp, Neisseria meningitidis; identical to SEQ ID NO: 38138

SEQ ID NO: 48894 - DNA, 1380 bp, Neisseria meningitidis; identical to SEQ ID NO: 38437

SEQ ID NO: 48895 - DNA, 186 bp, Neisseria meningitidis; identical to SEQ ID NO: 37303

SEQ ID NO: 48896 - DNA, 390 bp, Neisseria meningitidis; identical to SEQ ID NO: 38387

SEQ ID NO: 48897 - DNA, 753 bp, Neisseria meningitidis; identical to SEQ ID NO: 38815

SEQ ID NO: 48898 - DNA, 2703 bp, Neisseria meningitidis
atgcaactgcatattctgaacaatccgaaggacgcggctttggcggcggacgcggaatttctgaaacaatccctgttcaacctcctgcacgaagaagcctcgccgttggttgtcgaaacggtcaaactcttgtccacttccgacgacagcgcggcattgattgaaaaagtattgccgcaattggacgaacaacaaacccacgatttaaccttggcctgcggcctgttcgcccagattttgaatatcgccgaagacgtgcaccacgaacgccgccgccaaatccacgaagaagccggacgcggcggcgcggaaggcagcctgacggaaaccgtccgcaggctcaaagcggggaaagccgacggcaaatcggtgcagcggcagttggacaatacgtccgttaccgccgttttgaccgcgcacccgaccgaagtgcaacgccaaaccgtcttaagcttcaaccgccgcatccgcgcactgttgccgcaacgcgaacgctgcaccaatgccgacgcgctggcacggctgcgccgcgaaatcgacactatcctgctgggcttgtggcagaccagcgaaacgcgccgccacaaactcagcgtcaacgacgaaatcaacaacggcgtgtccatcttcccgatgagctttttcgaagccctgcccaagctctaccgcaatatggaacacgactttcagatggtctatcccgatgtctgcgttccgaacatcctcaaaatcggcggctggatcggtggcgaccgcgacggcaatccgttcgtttctgccgaaaccttgcgttttgccttccgccgccacgccgatgccgtgttccgtttttaccgtggcgaactcgacaaactttaccgcgaactgccgctctccatccgccgcgtcaaagtcaacgacgacgtaatggcactggcagccctctcgcctgacgaagaaatcgctcgcaccgaagaaccctaccgccgcgccattgcttacatcatggcgcgcgctatgggcaaagcgcgcgcgctcggtttgggcatgggctgcaaattcggctttctcgagccgtatgcttcggcacaagaatttctcgatgatttgaaaaaattgcaacgttcccttatcgacaacggcagccgcctgcttgctgaaggccgtttggcagacctcatccgttccgtgtccgtgttcggcttccacatgatgccgctcgacctgcgccaacacgcaggcaaacacgccgatgtggttgccgagcttttccaacacgcaggcttggaagactacaacagcctgaacgaagagcaaaaacaagccgccctgttgcgcgaattgagccatcaacgtccgctgtacagcccgttcatcacatacagcgaccatacccgccacgaactggcaattttcaacgaagcgcgcaaaatcaaagacgaattcggcgaagatgccgttacacaaagcattatttccaactgcgaacaacccagcgacctgctcgccttggcattgctgctgaaagaaagcggcctgctggcggtggaaaacggcaaaccgcgcagccgcatcaatatcgtgccgctgtttgaaaccatcgaagcactcgaaaacgcctgtccggtcatggaaaccatgttccgcctcgattggtacgatgccctgctcgaaagctgcggcaacatccaagaaattatgctcggctactccgactccaacaaagacggcggctatgttaccagctcatggtgtctgtatcaggcggaattgggcttggtcgaactcttcaaaaaatacgatgtccgcatgcgcctgttccacggtcgcggcggcagcgtcggacgcggcggcggcccttcttaccaagccattctcgcccaaccggcgggcagcgtggcgggacaaatccgcattaccgaacaaggcgaagtcattaccgccaaatacgccgaccccggcaatgcccaacgcaacttggaaaccttggttgccgcgactttggaagccagcatcctgccggataaaaaagaccctgatgccaaactgatgcaggcattgtcggacgtatcgttcaaatactaccgcgaactgattacccaccccgacttcatcgactacttcctgcaaaccagcccgattcaggaaatcgccaccctcaacctcggcagccgtcctgccagccgcaaaaccttggcgcggattcaggacttgcgcgctattccgtgggtattctcatggatgcaaaaccgcctcatgctgcctgcttggtacggtttcggcagcgcggtggaaaccttgtgcgaagacaaacccgaaacgctcgccgccctgcgcgaacacgcccaaagcaacccgttcttccaagccatgctttccaatatggagcaagtgatggcgaaaaccgacatcaccctcgcggaaaactatgccggcttgagcgaatcgccggaaaaagccgccgtcatcttcggcatgattaaggaagaataccaacgcagccgcaaagccctgctcgacctgctgcaaaccgaagaacttttacgcgacaaccgcagcctcgcccgttcgcttgccttgaggattccatatttgaacgcgctcaacggcctgcaggtcgccatgctcaaacgcctgcgtaaagaacccgacaatccgcacgcgctgctgatggttcacctgaccatcaacggcgtggcgcaaggtttgcgcaatacaggctga

SEQ ID NO: 48899 - DNA, 1161 bp, Neisseria meningitidis
ttgcgcagcgagcaggtggatttgaagagcatcgggctgatggcgttaatcggtctgccgtttacttggaaatttttgtggtcgccgctgatggacgcggtcaggctgcccgttttgggacggcggcgcgggtggatgctgctgacgcaggcagggttgctggcggctttggcggtctatgcctttttaaacccccgtaatcatctgccgctgattgccggcttgtcggtgcttgtcgcttttttttccgccagtcaggatattgtattggatgcgttcaggcgcgagattttgtcagacgaagaattgggtttgggcaactcggttcatgtgaacgcctaccggattgccgccctgattcccggttcattgagtttggtgttggcagacaggatgccgtggtcagaagtatttgttatcacttcattatttatgctgcccggccttctgatgacgctgtttcttgcgagcgaacccgtgttgcctcctgccgttcctaaaacgttgaagcagaccgtggtagagccgtttaaagaattttttacgcgcaagggcatcgcttcggcggtgtgcgtgctgctgtttatcttcctttacaaactcggcgacagtatggcaaccgcgttggcaacgccgttttatctggatatgggtttcagcaagacagacatcggtttgattgcgaaaaatgcaggactgtggccggcagtggcggcaggtatcttgggcggcgtgtggatgctgaaaatcggcgtaaacaaagccttgtggctattcggcgcggtgcaggctgtaaccgttttggggtttgtatggctggcagggttcggacctttcgacacggtcggcacaggcgagaggctgatgctggcggcagttatcggcgcggaagcggtcggcgtggggttggggacggcggcgttcgtatcgtatatggcgcgtgaaaccaatcccgcatttaccgcaacgcagcttgcgctgtttaccagcctgtccgccgtcccgcgcacggtcatcaattcctttgccggttatctgattgaatggctcggttatgtaccgtttttccaactgtgtttcgcactcgccctaccgggtatgctgctgctgctgaaagttgcgccttggaacggggagaaaactcaggatgcaggcagatga

SEQ ID NO: 48900 - DNA, 864 bp, Neisseria meningitidis; identical to SEQ ID NO: 47634

SEQ ID NO: 48901 - DNA, 639 bp, Neisseria meningitidis; identical to SEQ ID NO: 39626

SEQ ID NO: 48902 - DNA, 540 bp, Neisseria meningitidis; identical to SEQ ID NO: 44661

SEQ ID NO: 48903 - DNA, 537 bp, Neisseria meningitidis; identical to SEQ ID NO: 45905

SEQ ID NO: 48904 - DNA, 792 bp, Neisseria meningitidis; identical to SEQ ID NO: 38218

SEQ ID NO: 48905 - DNA, 591 bp, Neisseria meningitidis; identical to SEQ ID NO: 38699

SEQ ID NO: 48906 - DNA, 924 bp, Neisseria meningitidis; identical to SEQ ID NO: 39636

SEQ ID NO: 48907 - DNA, 1140 bp, Neisseria meningitidis
atgagtcaaaatgcctcggtgggcattgtaacgccccaaaaaattccgtttgaaatgccgctggttttggaaaacggtaaaactttgccgcgtttcgatctgatgattgaaacctacggcgagctgaatgccgaaaaaaataatgcggttttaatctgtcatgcgctgtcaggcaaccatcatgttgcgggcaggcattcggcggaggataaatatacgggctggtgggacaatatggtaggacccggcaaaccgattgatacggaacgttttttcgtggtcggtttgaacaatctgggcggctgtgacggcagcagcggacctttgtcgatcaatcctgaaacgggtagggaatacggcgcggattttccggtggttacggtgaaggactgggtaaaatcacaagccgcgcttgccgactatctcggcatcgggcaatgggcggcggttgtcggcggcagtttgggcggtatgcaggctttgcagtgggcgatttcctatcccgaacgcgtgcgccatgccttagtgattgcgtctgcgccgaaactgtccacgcaaaatatcgcgttcaacgatgtggcgcgtcaggcgattttgaccgaccccgatttcaacgaaggacattaccgcagccataataccgttcctgcacggggcttgcggattgcccgcatgatggggcacattacctatcttgccgaagacggtttgggcaaaaaattcggacgcgatttgcgttccaacggctatcaatacggttatggcgttgaatttgaagtagaatcctatctgcgctatcagggcgacaaattcgtcgggcggtttgatgccaacacctatttgctgatgaccaaagctttggactatttcgatccggcggcggatttcggcaacagcctgacccgcgccgtgcaggatgtgcaggcaaaattctttgtcgccagcttcagcaccgattggcgtttcgcgcccgaacgttcgcacgaactggtcaaggccctgattgccgcccaaaaatccgtgcagtatatcgaagtcaaatccgcacacgggcacgatgcctttttaatggaagacgaagcctatatgcgtgcggtcgccgcctatatgaacaacgtttataaggaatgtcagcaatga

SEQ ID NO: 48908 - DNA, 687 bp, Neisseria meningitidis; identical to SEQ ID NO: 38997

SEQ ID NO: 48909 - DNA, 153 bp, Neisseria meningitidis; identical to SEQ ID NO: 38893

SEQ ID NO: 48910 - DNA, 4659 bp, Neisseria meningitidis; identical to SEQ ID NO: 38680

SEQ ID NO: 48911 - DNA, 909 bp, Neisseria meningitidis
atgaacacgccccaatccgccatcattcccgaccacgcccaagccggcatctttatcgaagccgacttcgccgccaaccgcctcaacgatattaaagccgcctgccgcgcttcgctcgacgcgttaactgccttgaaagcccgctttccggacgatattttgggtctgaccatcgccttcggcagcaaagcctgggcaacattcggacatacggacgaaggcagtgaaatcaaacccttctccgaaatgggcaacgggcttgcgccgtccacgcagcacgatatgtccatccacatccaatccttccgccaaaacgccgcctacgcgcttgcccaatccgttttgggcgcgttcggcgacagcatatgcgtcgcgtccgaagaacacggtttgcgcctgtatcaggatcgcggactggacggtttcgtcgacggcacggaaaacccgcagggcgatgaaaatgtccgcgaagtcgccatcatccccgaaggaaaacccgatgcgggcggcagctatgtcctgctgcaaaaatacctgcacgatttgaaaaaatgggatgccgtccccgtcgccgaacaggaggcctcggttggacgcggcaaggaaaccgacgacgaattcggccgcgatgtccgcctgcccgattcgcacctcggccgcgtcaacctgaaagaaaacggagtcggcctgaaaatcgtccgccgcagcctgcccttcggcaaaatcagcggcgaacacggtttgatgtttaccgcatactgccgcacgctgcacaatatcgaagcgcaattattgagtatgttcggcgatacggacggcaaaaccgacctgctgctccgacatctctccgccgccgtttcgggcggatactactacgcgccgtctgtcgaacgcctgcaaaacctctaa

SEQ ID NO: 48912 - DNA, 2775 bp, Neisseria meningitidis; identical to SEQ ID NO: 38521

SEQ ID NO: 48913 - DNA, 1116 bp, Neisseria meningitidis; identical to SEQ ID NO: 39337

SEQ ID NO: 48914 - DNA, 1677 bp, Neisseria meningitidis
atgagcttcaaaaccgatgccgaaatcgcccaatcctccaccatgcgcccgattggcgaaattgccgccaagctgggtctgaatgccgacaacattgagccttacggtcattacaaggcgaaaatcaatcctgccgaagcgttcaaactgccgcaaaaacagggcaggctgattttggttaccgccattaatccgactccggcgggcgaaggcaaaaccaccgtaaccatcggtttggcggacgcgttgcgccacatcggcaaagatgccgtgattgccctgcgcgaaccttctctggggccggtgttcggcgtgaaaggcggcgcggcaggcggcggctatgcccaagttttgccgatggaagacatcaacctgcacttcaccggagattttcacgccatcggtgcggcaaataatctgcttgccgcgatgctcgacaaccatatctatcagggcaacgagttggacatcgaccccaaacgcgtgctgtggcggcgcgtggtcgatatgaacgaccgccagttgcgcaacatcatcgacggcatgggtaaacccgttgacggtgtgatgcgccccgacggttttgatatcaccgttgcctccgaagtgatggcggtattctgccttgccaaagacatcagcgatttgaaagagcgtttgggcaacatcctcgtcgcctacgccaaagacggcagccccgtttacgccaaagatttgaaggcacacggcgcgatggcggtcctgctcaaagatgcgattaagcccaatttggtgcaaaccatcgaaggcacgcccgccttcgtacacggcggcccgttcgccaacatcgcccacggctgcaactccgtaaccgcaacccgtctggcgaaacaccttgccgattacgccgtaaccgaagcaggcttcggcgcggatttgggcgcggaaaaattctgcgacatcaaatgccgccttgccggtttgaaacctgatgcggcggtcgtcgtggcgactgtccgcgctttgaaatacaacggcggcgtggaacgtgccaacctcggtgaagaaaacctcgaagccttggcaaaaggtttgcctaatctcttgaaacacatttccaacctgaaaaacgtattcggactgcccgtcgtcgttgcgctcaaccgcttcgtgtccgactccgatgccgagttggcgatgattgaaaaagcctgtgcggaacacggcgttgaagtttccttgaccgaagtgtggggcaaaggcggcgcgggtggtgcagacttggcgcacaaagtcgttaacgccatcgaaaaccaaccgaacaacttcaattttgcctacgatgttgagttgagcattaaagacaaaatccgtgcgattgcccaaaaagtgtacggcgcggaagatgtcgatttcagcgcggaagcgtctgccgaaattgcctcgctggaaaaactgggcttggacaaaatgtcgatctgcatggcgaaaacccaatactctttgagtgacaacgccaaactgttgggctgccccgaaggcttccgcatcgccgtgcgcggcatcaccgtttccgccggcgcgggcttcatcgtcgcgctgtgcggcaatatgatgaagatgccgggtctgccgaaagttccggccgccgagaaaatcgatgtggacgaacacggcgtgattcacggcttgttctga

SEQ ID NO: 48915 - DNA, 2397 bp, Neisseria meningitidis; identical to SEQ ID NO: 39059

SEQ ID NO: 48916 - DNA, 693 bp, Neisseria meningitidis; identical to SEQ ID NO: 39347

SEQ ID NO: 48917 - DNA, 567 bp, Neisseria meningitidis; identical to SEQ ID NO: 45282

SEQ ID NO: 48918 - DNA, 1245 bp, Neisseria meningitidis
atggaacagcagcaaagatacatcagcgtactggatatcggtacgtctaaagtcctcgcactgatcggggaagttcaagatgacgacaaaatcaacatcgtcggtttggggcaggctccttcacggggcttgcgcgcgggcatggtaaccaatatcgatgccaccgtccaagccatcaggcaggcggtcaatgatgccgagctgatggcggataccaaaattacccacgttaccacaggtatcgcaggcaaccacatccgcagtctcaattcgcaaggtgtggttaaaattaaagacggggaagtcacgcaggcagacatcgaccgcgccattgaaacggcaaaggcaatcaatatcccgcccgatcaaaaaattctcgatgccgtggttcaagactacattatcgacacccaacttggcgtgagggagcccatcggtatgagcggtgtgcgtctggatacgcgggtgcacatcattaccggtgcaagtacggcagtgcagaatgtccaaaaatgtatcgagcggtgcggcttgaaaagcgatcaaatcatgcttcagccgttggcaagcgggcaggcggtgctgactgaagatgaaaaagacctcggcgtatgcgtcatcgacattggtggcggaacgaccgatattgccgtttatatgaacggtgccatccgccatacgtccgtcattccggccggtggtaatctgattaccaaagatttgtccaaatcgttgagaacacctctcgatgccgccgagtacattaaaatccattatggcgtgacatcatgcgatacggaaggcttgggtgagatgattgaagttccgggcgtgggtgaccggacatcgcgtcaggtttccagtaaggttttggcagcaatcatcagtgcacgtattcaggagatttttggcgtagtgctgggcgagctgcaaaaatcgggtttccccaaagaagtgctgaatgcgggtatcgttctgaccggcggtgtgtccatgatgaccgggattgtggaatttgccgaaaaaatcttcgatttgcctgtacgcaccggtgcgccccaagaaatgggcggtttgtccgaccgcgtccgcacaccgcgcttttctaccgccatcgggctgcttcatgcagcatgcaagctggaaggaaacttgccgcagccggaaaacggtgcagtgcaagagagggaagggggcggcggtttgttggcaagattgaaacggtggattgaaaacagcttctga

SEQ ID NO: 48919 - DNA, 1008 bp, Neisseria meningitidis; identical to SEQ ID NO: 38469

SEQ ID NO: 48920 - DNA, 1746 bp, Neisseria meningitidis; identical to SEQ ID NO: 39815

SEQ ID NO: 48921 - DNA, 156 bp, Neisseria meningitidis; identical to SEQ ID NO: 39708

SEQ ID NO: 48922 - DNA, 1155 bp, Neisseria meningitidis
atgaaatttaccaagcaccccgtctgggcaatggcgttccgcccgttttattcgctggcggctctgtacggcgcattgtccgtattgctgtggggtttcggctacacgggaacgcacgagctgtccggtttctattggcacgcgcatgagatgatttggggttatgccggactggtcgtcgtcgccttcctgctgaccgccgtcgccacttggacggggcagccgcccacgcggggcggcgttctggtcggcttgactatcttttggctggctgcgcggattgccgcctttatcccgggttggggtgcgtcggcaagcggcatactcggtacgctgtttttctggtacggcgcggtgtgcatggctttgcccgttatccgttcacagaatcaacgcaactatgttgccgtgttcgcgctgttcgtcttgggcggcacgcatgcggcgttccacgtccagctgcacaacggcaacctaggcggactcttgagcggattacagtcgggcttggtgatggtgtcgggttttatcggtctgattggtacgcggattatttcgttttttacgtccaaacggttgaatgtgccgcagattcccagtccgaaatgggtggcgcaggcttcgctgtggctgcccatgctgaccgccatgctgatggcgcacggcgtgatgccttggctgtcggcggctttcgcgtttgcggcaggcgtgatctttaccgtgcaggtgtaccgctggtggtataagcctgtgttgaaagagccgatgctgtggattctgtttgccggctatctgtttaccggattggggctgattgcggtcggcgcgtcttatttcaaacccgctttcctcaatctgggtgtgcatctgatcggggtcggcggtatcggcgtgctgactttgggcatgatggcgcgtaccgcgctcggtcatacgggcaatccgatttatccgccgcccaaagccgttcccgttgcgttttggctgatgatggcggcaaccgccgtccgtatggttgccgtattttcttccggcactgcctacacgcacagcatacgcacctcttcggttttgtttgcactcgcgcttttggtgtatgcgtggaagtatattccttggctgattcgtccgcgttcggacggcaggcccggttga

SEQ ID NO: 48923 - DNA, 810 bp, Neisseria meningitidis; identical to SEQ ID NO: 38580

SEQ ID NO: 48924 - DNA, 747 bp, Neisseria meningitidis; identical to SEQ ID NO: 44685

SEQ ID NO: 48925 - DNA, 1179 bp, Neisseria meningitidis; identical to SEQ ID NO: 39224

SEQ ID NO: 48926 - DNA, 483 bp, Neisseria meningitidis; identical to SEQ ID NO: 38704

SEQ ID NO: 48927 - DNA, 1209 bp, Neisseria meningitidis; identical to SEQ ID NO: 36314

SEQ ID NO: 48928 - DNA, 669 bp, Neisseria meningitidis; identical to SEQ ID NO: 44164

SEQ ID NO: 48929 - DNA, 345 bp, Neisseria meningitidis
ttgttggatgacaagaaactggggatatctgcacgcaaactgatagaaaatccgagaaatgcgatctttgtcagtgcagcaagtatttgggaaatttccatcaagcagaacaaggggttgttgaaattaccggaagagttttttgatgtgcttcaagaagaggattttgaaatgttgcctataggtctgtttcatgcaaaacaggctggaagccttctggagatacacaaagaccctttcgataggatgttgattgcacaaacccaagcggaaggctttgaactgatgactgtcgatgaatatattccgcaatatggaattagagttgtcaacgcatcaagctga

SEQ ID NO: 48930 - DNA, 1053 bp, Neisseria meningitidis
atgtggaaagaaattttactgaattacggtattttcctgctcgaactgcttaccgtgttcggcgcaattgcgctgattgtgttggctatcgtacagagtaagaaacagtcggaaagcggcagtgtcgtactgacggatttttcggaaaattataaaaaacagcggcaatcgtttgaagcattctttttaagcggggaagaggcaaaacatcaggaaaaagaggaaaagaaaaaggaaaaggcggaagccaaagcagagaaaaagcgtttgaaggagggtggggagaaatcttccgaaacgcaaaaatcccgcctttttgtgttggattttgacggcgatttgtatgcacacgccgtagaatccttgcgtcatgagattacggcggtgcttttgattgccaagcctgaagatgaggttctgcttagattggaaagtccgggcggcgtggttcacggttacggtttggcggcttcgcagcttaggcgtttgcgcgaacgcaatattccgctgatcgtcgccgtcgataaggtggcggcgagcggtggttatatgatggcgtgtgtggcggataaaattgtttccgctccgtttgcgattgtcggttcggtgggtgttgtagcggaagtaccgaatatccaccgcctgttgaaaaaacatgatattgatgtggatgtgatgacggcgggcgaatttaagcgcacggttacttttatgggtgaaaatacggaaaagggcaaacagaaattccgacaggaactggaggaaacgcatcagttgttcaagcagtttgtcagcgagaaccgccctcaattggatattgaggaagtggcaacgggcgagcattggttcggtcggcaggcgttggcgttgaacttgattgacgagatttcgaccagtgatgatttgttgttgaaagcgtttgaaaacaaacaggttatcgaagtgaaatatcaggagaagcaaagcctgatccagcgcattggtttgcaggcggaagcttctgttgaaaagttgtttgccaaacttgtcaaccggcgggcggatgtgatgtag

SEQ ID NO: 48931 - DNA, 378 bp, Neisseria meningitidis; identical to SEQ ID NO: 39350

SEQ ID NO: 48932 - DNA, 657 bp, Neisseria meningitidis; identical to SEQ ID NO: 39594

SEQ ID NO: 48933 - DNA, 807 bp, Neisseria meningitidis; identical to SEQ ID NO: 39051

SEQ ID NO: 48934 - DNA, 777 bp, Neisseria meningitidis; identical to SEQ ID NO: 38952

SEQ ID NO: 48935 - DNA, 384 bp, Neisseria meningitidis; identical to SEQ ID NO: 38800

SEQ ID NO: 48936 - DNA, 783 bp, Neisseria meningitidis; identical to SEQ ID NO: 38738

SEQ ID NO: 48937 - DNA, 384 bp, Neisseria meningitidis; identical to SEQ ID NO: 36608

SEQ ID NO: 48938 - DNA, 729 bp, Neisseria meningitidis
atgcctgattacatccgcatctcgcgcgccgccgacagcctgcgcgatatcaaaatcacccctcatttcctgccgcatacggacggttcgtgccttattgaatgcggcaataccaaagtgatttgtaccgcttccatagatgaaaacgtcccgccgtttctgcgcggtaaaaaccaaggctgggtaacggcggaatacgggatgctgcctgcctcaactgcttcccggatgcgccgcgaagcttcggcgggcaaacagtccgggcgcacacaagaaatccaacgccttatcgggcgttcgctgcgcgcggtcgtggatatggaaaaactcggcgaacgccaaatcttgattgactgcgacgtgattcaggcagacggcggtacgcgtacggcttcgattaccggtgcgtttgtcgcgctgcaaatcgccgtcggcaaactggtttcagacggcattttgagtgaaaaccccatccgcgaagccgttgccgctgtgtcagtaggcgtagtgaacggcgtgccgcttttggatttggattatcccgaagactccggttgcgacagtgatgtgaatatcgtcatgaccgcatcgggaaaaatcatcgaaatccaaggtacggcggaagacgcgccgttcagtttggacgaattgggcaaactggttgcactggcgcaaaaaggcataggcgaactgctgcaacaccagcaaaatgcgttgtccgccgcctga

SEQ ID NO: 48939 - DNA, 516 bp, Neisseria meningitidis; identical to SEQ ID NO: 38690

SEQ ID NO: 48940 - DNA, 492 bp, Neisseria meningitidis; identical to SEQ ID NO: 39153

SEQ ID NO: 48941 - DNA, 891 bp, Neisseria meningitidis
ttggcacttttggcggcgatgacgtggggaacgctgccgattgccgtgcggcaggtattgaagtttgtcgatgcgccgacgctggtgtgggtgcgttttaccgtggcggcggcggtattgtttgttttgctggcattgggcgggcggctgccgaagcggcgggatttttcttggtgctcattcaggctgctgctgctcggcgtggcgggcatttcggcaaactttgtgctgattgcccaagggctgcattatatttcgccgaccacgacgcaggttttgtggcagatttcgccgtttacgatgattgttgtcggcgtgttggtgtttaaagaccggatgactgccgctcagaaaatcggcttggttttgctgcttgccggtttgcttatgttttttaacgataaattcggcgagttgtcgggtttgggcgcgtatgcgaagggcgtgttgctgtgtgcggcaggcagtatggcatgggtgtgttatgccgtggcgcaaaagctgctgtcggcgcaattcgggccgcaacagattctgctgttgatttatgcggcaagtgccgccgtgttcctgccgtttgccgaaccggcacacatcggaagtttggacggtacgttggcgtgggtttgttttgcgtattgctgcttgaatacgttaatcggttacggctcgttcggcgaggcgttgaaacattgggaggcttccaaagtcagcgcggtaacaaccttgctccccgtgtttaccgtaatattttctttgctcgggcattatgtgatgcctgatacttttgccgcgccggatatgaacggtttgggttatgttggcgcactggtcgtggtcgggggtgcggttacggcggcggtgggggacaggctgttcaaacgccgctag

SEQ ID NO: 48942 - DNA, 621 bp, Neisseria meningitidis
atgctgaccccgaaaagttgcgatttgttcaatatcccgtttttccaattttcccagcttaaaaaataccagcctgaaagcattccgcaaatcaaggctgactataaagaaaactggcagatatggcagcagctgattcagcaggttgccgccgaattgggtgcgccgtttgcgcctccgcacatcgaacgctggtgtaacggctggcaggttcgcgcccatttctttgcctatttcaaatacgcccaatacaaaaactctgccgccatcctgtcgatactacttaaccgccgccgtctgagtgtcagcttggattggcactgctacaaagccgacgtgtcgccgattactctgcccgattacaaccgatggctggataattttgacactgaaaaatacgccgcattcgatatgtggcacggcgcggaaagcgaatacgacgactaccgcaccgtcgcgcaacaaaacgagtccgaccgaaagttgcaaaacgacgaagactttttctgcatcggcaaacacatcgaacgcgacgatttgggcaggcaggatgtcgcgaaatggatagcggaaacggtggaagatttgctgccgctttacgaagcgtgtcatggtgcttga

SEQ ID NO: 48943 - DNA, 1101 bp, Neisseria meningitidis
atggaaacacagctttacatcggcatcatgtcgggaaccagtatggatggggcggatgccgtgctggtacggatggacggcggcaaatggctgggcgcggaagggcacgcctttaccccctatcccgacaggctgcgccgccaattgctggatttgcaggacacgggggcggacgaactgcaccgcagcaggattttgtcgcaagaactcagccgcctgtacgcgcaaaccgccgccgaactgctgtgcagtcaaaacctcgcgccgtccgacattaccgccctcggctgccacgggcaaaccgtccgacacgcgccggaacacggttacagcatacagcttgccgatttgccgctgctggcggaactgactcagatttttaccgtcggcgacttccgcagccgcgaccttgcggccggcggacaaggtgcgccgctcgtccccgcctttcacaaagccctgttccgcgatgacaaagaaacacgcgtggtactgaacatcggcgggattgccaacatcagcgtactcccctccgacgcacccgccttcggcttcgacacagggccgggcaatatgctgatggacgcgtggacgcaggcacactggcagcttccttacgacaaaaacggtgcaaaggcggcacaaggcaacatattgccgcaactgctcgacaggctgctcgcccacccgtatttcgcacaaccccaccctaaaagcacggggcgcgaactgtttgccctaaattggctcgaaacctaccttgacggcggcgaaaaccgatacgacgtattgcggacgctttcccgttttaccgcgcaaaccgtttgcgacgccgtctcacacgcagcggcagatgcccgtcaaatgtacatttgcggcggcggcatccgcaatcctgttttaatggcggatttggcggaatatttcggcacacgcgtttccttacgcagcaccgccgaactgaagctcgatccgcaatgggtggaagcagccgcatttgcgtggttggcggcgtgttggattaatcgcattcccggtagttcgcacaaagcaaccggcgcatccaaaccgtgtattctgggcgcgggatattattattga

SEQ ID NO: 48944 - DNA, 774 bp, Neisseria meningitidis; identical to SEQ ID NO: 39003

SEQ ID NO: 48945 - DNA, 702 bp, Neisseria meningitidis; identical to SEQ ID NO: 44292

SEQ ID NO: 48946 - DNA, 684 bp, Neisseria meningitidis; identical to SEQ ID NO: 38237

SEQ ID NO: 48947 - DNA, 1503 bp, Neisseria meningitidis; identical to SEQ ID NO: 39819

SEQ ID NO: 48948 - DNA, 1554 bp, Neisseria meningitidis
atgaaccggacttatgccaatttctacgaaatgctcgccgccgcctgccgcaaaaacggcaacggcacggcagtgttcgacggcaaggaaaaaaccgcctaccgcgcgctcaagcaggaggccgaagccgtcgcggcgtatctgcaaaatatcggcgtgaagttcggcgacacggtcgcgctggcggtttccaattccacagaatttattaccgcctatttcgccgtctccgccatcggcgcggtcgccgtaccgatgaacacatttttgaaaaacagcgaatacgcgtatatcctgaacgactgcaaggcgcgcttcctgttcgcctcggcgggcctgtcaaaagagttggcgggcttgaaggcgcaaacgcccgtcgaaaaaatcatttggacggacaaaagccgtccggccggcgaaatggcggaaggcgatgccttttttgaagacgtgcgccgcttccccgaaaaacccgacttgggccgccaaccccggataaatgatttggcacacatcatctacacctccggcacgacggggcatcccaaaggcgcgctaatcagttacgccaacctgttcgccaacctgaacggcatcgaacgcatctttaaaatctccaagcgcgaccgctttatcgttttcctgccgatgttccacagcttcacgctgacggctatggtgctgctgccgatttatatggcgtgttcgattattttggtcaaatccgttttcccgttttccaacgttttgaaacaggccctgctcaaacgcgcgaccgtgtttttgggcatacccgcgatttacaccgcaatgagcaaggcgaaaatcccttggtatttcagatggttcaaccgcattcgcctgtttatcagcggcggtgcgcctttggcggaacaaaccatcctcgatttcaaagccaagttcccccgcgccaaattgctggaaggctacggactgagcgaagcctctcccgtcgtcgccgtcaatacgcccgagaggcaaaaagcccgcagcgtcggcatccccctgcccggtttggaagccaaagccgtcgatgaagaattggtcgaagtgccgcgcggcgaagtgggcgaactgatcgtcaggggcggttcggtgatgcggggctacctcaatatgcctgccgccaccgatgaaaccatcgtcaacggctggttgaaaacgggcgatttcgttaccatagacgaagacggctttatctttatcgtcgaccgcaaaaaagatttgattatttccaaaggtcaaaacgtctatccgcgcgaaatcgaagaagaaatctacaaactcgatgccgtcgaagccgctgccgtcatcggcgtgaaagaccgttatgccgacgaggaaatcgtcgccttcgtccaattgaaggaaggtatggatttgggcgagaacgaaatccgccgccacctgtgtaccgtgctggcaaatttcaaaatccccaaacaaatccactttaaagacgggctgccgcgcaacgctacgggcaaggtattgaaacgggtgttgaaggagcagtttgacggaaacaaatga

SEQ ID NO: 48949 - DNA, 273 bp, Neisseria meningitidis
atggcaagtaaaaaagcaggcggcagcacccgcaacggtcgcgattcagaagccaaacgcttgggcgttaaagcctacggcaacgagctgattcccgcaggttccatcatcgtacgccaacgcggtaccaaattccacgcaggcgacaacgtaggcatgggcaaagatcacactttgttcgccaaagttgacggttatgttgaattcaaaaccaaaggcgcgctgaaccgtaaaactgtcagcatccgtccttacaccggttctgaagaataa

SEQ ID NO: 48950 - DNA, 369 bp, Neisseria meningitidis
ttggtcgtgtatttttatccgaaagacagtacgccgggctgtacgacggaaggcttggatttcaatgcgcgtttggaacagtttgaggcattgggttataccgtggtcggtatttcccgcgacggcgtaaaggcgcatcagaatttttgcgccaagcagggtttccggttcgagctgttgagcgacaaggatgaaacagtgtgccgcctgtttgatgtcatcaaattgaagaaactgtacgggaaagagtcgttaggtatcgagcgcagtacgttcgtcttgaataaggatggagaaatcgcccatgaatggcggaaagtcaaagtggcgggtcacgcgcaggaagtattggaaacgctttcccgataa

SEQ ID NO: 48951 - DNA, 630 bp, Neisseria meningitidis; identical to SEQ ID NO: 39496

SEQ ID NO: 48952 - DNA, 891 bp, Neisseria meningitidis; identical to SEQ ID NO: 38992

SEQ ID NO: 48953 - DNA, 594 bp, Neisseria meningitidis; identical to SEQ ID NO: 38421

SEQ ID NO: 48954 - DNA, 777 bp, Neisseria meningitidis; identical to SEQ ID NO: 38682

SEQ ID NO: 48955 - DNA, 966 bp, Neisseria meningitidis
atgttgcgtttgaccgcattgaccctctgcaccgtcctcgccttgggcgcgtgttcgccgcaaaattccgactctgccccacaagccaaagaacaggcagtttccgccgcacaaaccgaaggcgcgtccgttaccgtcaaaaccgcgcgcggcgatgcgaaagtgccgcaaaatccggagcgcattgccgtttacgatttgggtatgctcgacactttaaacaaattgggcgtgaaaaccggtttgtccgtcaataaaaacctgctgccttatttggacgaatatttcaaaaccacgaaacctgccggaactttgtttgagccggattacgaagcactcaacgcttacaaaccgcagctcatcatcatcggcagccgcgcagccaaagcgtttgacaagttgaacgaaatcgcgccgaccatcgaaatgaccgccgataccgccaacctgaaagaaagtgccaaagagcgtatcgacgcgctggcgcaaatcttcggcaaacaggcggaagccgacaaactgaaggcggaaatcgacgcatcttttgaagccgcgaaaaccgctgcgcaaggcaaaggcaaaggtttggtgattctggtcaacggcggcaagatgtcggctttcggcccgtcttcacgcttgggcggctggctgcacaaagacatcggcgttcccgctgtcgatgaatcgattaaagaaggcagccacggccagcccgtcagctttgaatacctgaaagagaaaaatcccgactggctgtttgtccttgaccgcagcgcggccatcggcgaagagggtcaggcggcgaaagacgtgttggataatccgctggttgccgaaacaaccgcctggaaaaaaggacaggtggtttacctcgttcccgaaacttatttggcggccggcggcgcgcaagagctgctgaatgcaagcaaacaggttgcggatgcgttcaacgcggcaaaataa

SEQ ID NO: 48956 - DNA, 1575 bp, Neisseria meningitidis
atgaaaaaatctttccttacgcttgttctgtattcgtctttacttaccgccagcgaaattgcctatcgctttgtatttgggattgaaaccttaccggcggcaaaaattgcggaaacgtttgcgctgacatttgtgattgctgcgctgtatctgtttgcgcgttataaggtgacgcgtttgttgattgcggtgttttttgcgttcagcattattgccaacaatgtgcattacgcggtttatcaaagctggatgacgggcatcaattattggctgatgctgaaagaggttaccgaagtcggcagcgcgggtgcgtcgatgttggataagttgtggctgcctgtgttgtggggcgtgttggaagtcatgttgttttgcagccttgccaagttccgccgtaagacgcatttttctgccgatatactgtttgccttcctaatgctgatgattttcgtgcgttcgttcgacacgaaacaagagcacggtatttcgcccaaaccgacatacagccgcatcaaagccaattatttcagcttcggttattttgtcggacgcgtgttgccgtatcagttgtttgatttaagcaggattcccgcctttaagcagcctgctccaagcaaaatcgggcagggcagtgttcaaaatatcgtcctgattatgggcgaaagcgaaagcgcggcgcatttgaagctgtttggctacggacgcgaaacttcgccgtttttaacccagctgtcgcaagccgattttaagccgattgtgaaacaaagttattccgcaggctttatgacggcagtatccctgcccagtttctttaacgtcataccgcatgccaacggcttggaacaaatcagcggcggcgataccaatatgttccgcctcgccaaagagcagggctatgagacgtatttttacagtgctcaggctgaaaaccaaatggcaattttgaacttaatcggtaagaaatggatagaccatctgattcaaccgacgcagcttggctacggcaacggcgacaatatgcccgatgagaagctgctgccgctgttcgacaaaatcaatttgcagcagggcaggcattttatcgtgttgcaccaacgcggttcgcacgccccatacggcgcattgttgcagcctcaagataaagtattcggcgaagccgatattgtggataagtacgacaacaccatccacaaaaccgaccaaatgattcaaacagtattcgagcagctgcaaaagcagcctgacggcaactggctgtttgcctatacctccgatcatggccagtatgttcgccaagatatctacaatcaaggcacggtgcagcccgacagctatattgtgccgctggtgttgtacagcccgaataaggccgtgcaacaggctgccaaccaggcttttgcaccttgcgagattgccttccatcagcagctttcaacgttcctgattcacacgttgggctacgatatgccggtttcaggttgtcgcgaaagctcggtaacgggcaacctgattacgggtgatgcaggcagcttgaacattcgcgacggcaaggcggaatatgtttatccgcaatga

SEQ ID NO: 48957 - DNA, 2631 bp, Neisseria meningitidis; identical to SEQ ID NO: 38629

SEQ ID NO: 48958 - DNA, 438 bp, Neisseria meningitidis; identical to SEQ ID NO: 38425

SEQ ID NO: 48959 - DNA, 1035 bp, Neisseria meningitidis; identical to SEQ ID NO: 48366

SEQ ID NO: 48960 - DNA, 594 bp, Neisseria meningitidis; identical to SEQ ID NO: 39701

SEQ ID NO: 48961 - DNA, 774 bp, Neisseria meningitidis; identical to SEQ ID NO: 39571

SEQ ID NO: 48962 - DNA, 2106 bp, Neisseria meningitidis
ttgacactctatgccgtagaagagctcaactacgacaaacttgacagccaaaaaaggcgcagatttctcggcatcagctacagcaaagcacacgacaccaccacccaagtcatgaaaaccgcgctgccctcaagggtagttgcagaatcagccaacctccaatcgggctgggataccaaactgcaaggcacacagtttgaaaccacactgggtggcgcaaccatacgcgcaggcgtaggcgagcaggcacgggcagatgccaagattatcctcgaagggatcaaaagcagcatccacacagaaaccgtgagcagcagcaaatctgctctatggcaaaaacaggcaggacggggcagtaacatcgaaaccttgcaattgccgagtttcaccggtcccgttgcgcccgtactgtccgcacccggcggttacattgtcgacattccgaaaggcaatctgaaaacccaaatcgaaaccctcaccaagcagcccgagtatgcttatttgaaacaacttcaagttgcgaaaaacatcaactggaatcaggtgcagcttgcttacgataaatgggactacaaacaggagggcatgacacccgcagcagcagctgtcgtcgttatcgtcgtaaccgtattgacctacggtgcactgtccgccccggcagccgccggaacggcgggcgcggcaggcgcaggagcgggaggagccgcagcaggaacggcagccggaactggagtagcagcaggaacggcagccacaaccggagtagcagcaggcacatcagctgcagctatcaccacagccgcaggcaaagccgcactggccagtctcgccagccaagccgcagtttccctcatcaacaacaaaggagacataaaccataccctgaaagaactgggcaaaagcagcaccgtcagacaggccgccaccgccgccgtaaccgcaggcgtactgcagggcataagcgggctgaacacccaagcagccgaagccgtcagcaaacattttcacagtcccgcagcaggcaaactgaccgctaacctgatcaacagcaccgctgccgcaagtgtccataccgccatcaacggcggcagcctaaaagacaacttgggcgatgccgcactgggtgcgatagtcagtaccgtacacggagaagtagcgagcaaaatcaaatttaatctcagcgaagactacattgcccacaagattgcccatgccatagcgggctgtgcggcagcggtagcaaataaaggcaaatgtcgggacggcgcaatcggcgcggcagtcggcgagatggtgggagaaaccctgttggacggacgcgatgtaggcaaactgtcaccccaagaacgccaaaaagtcatagcctactcgcagattatcgcaggcagcgcagtggcattggttaaaggggatgtgaatacggcggcgaatgcggctactgtggcagtggagaataatagtcttttagctcgcaggagggtaaatatacgttggactccgcgacaagaattggaacatgaatatgccattcttgaaatccaggccattaccaatcaaatccgaaggctggatccgaaatttaacgggattgctattatgaggaatcctagagagccgtggacaagacatgatgtacaaacatacaggcaatattataatcaattaagggaatccagaggcattcctgttctcccaatttatagaatgaggataaacaacggcaatgaatttaaccgtatcatgtcatcaaaatacccttataatgagctttatgtagccaatcctaaatcggtaacgggacattttagggtagattcgtataatcctgcaacaagggaaattatttcaagaaaatttacccaattttctcaaatccaagaaagtacggggattggttatatcaaggaggctgttagaaaatatagccctggtgctgtcatttccaatgttccaagtacacctgcttcgctaagaggaagaaaacttacaggaaaacttattttagaagttcctgctcaggtcaatccaattccacaatctgtattaagggcggcacaagaagaaaatgttatcattagagatacaacaggaaggatttacaaatga

SEQ ID NO: 48963 - DNA, 1125 bp, Neisseria meningitidis; identical to SEQ ID NO: 38515

SEQ ID NO: 48964 - DNA, 717 bp, Neisseria meningitidis; identical to SEQ ID NO: 45129

SEQ ID NO: 48965 - DNA, 1218 bp, Neisseria meningitidis; identical to SEQ ID NO: 39744

SEQ ID NO: 48966 - DNA, 2106 bp, Neisseria meningitidis; identical to SEQ ID NO: 44972

SEQ ID NO: 48967 - DNA, 954 bp, Neisseria meningitidis; identical to SEQ ID NO: 38235

SEQ ID NO: 48968 - DNA, 573 bp, Neisseria meningitidis
atggacaatcacgccgaagcacactggcaaaacggctggcttcaaagcatacgccataccccgtcgcccaatttcagcccgagggaaacgggggaaacggtttccctgatcgtgttgcacaacatttcgctgccgccgttcgaatatggtacggatgcggtggaaaagctgtttgccaaccggctcgaccccgacggacatccgttcttcagcctgatacacactttgcgcgtatccagccattttttaatcaaacgcgacggcgaaacggtacagttcgtttcctgcgacaatatggcataccatgccggcgtatcctcgtttcgcggacgggaaaaatgcaacgcattttccatcggcatcgaactggaaggctgcgatttcgaaccctttaccgaagcgcaataccgttcgctcgaagccttgttggacgcaatctgccgccgctaccccatcacggcggtaacggggcaccaagacatcgcgcccggccgcaaaaccgaccccggtcattttttcgactggcggcggatacgggggaaagggtttcccgtggacagaaatgccgtctga

SEQ ID NO: 48969 - DNA, 435 bp, Neisseria meningitidis; identical to SEQ ID NO: 38925

SEQ ID NO: 48970 - DNA, 900 bp, Neisseria meningitidis; identical to SEQ ID NO: 36345

SEQ ID NO: 48971 - DNA, 480 bp, Neisseria meningitidis; identical to SEQ ID NO: 39570

SEQ ID NO: 48972 - DNA, 1893 bp, Neisseria meningitidis; identical to SEQ ID NO: 38453

SEQ ID NO: 48973 - DNA, 294 bp, Neisseria meningitidis; identical to SEQ ID NO: 38112

SEQ ID NO: 48974 - DNA, 1485 bp, Neisseria meningitidis; identical to SEQ ID NO: 38944

SEQ ID NO: 48975 - DNA, 1185 bp, Neisseria meningitidis
atggctaaggaaaaattcgaacgtagcaaaccgcacgtaaacgttggcaccatcggtcacgttgaccatggtaaaaccaccctgactgccgctttgactactattttggctaaaaaattcggcggtgctgtaaaagcttacgaccaaatcgacaacgcacccgaagaaaaagcacgcggtattaccattaacacctcgcacgtggaatacgaaaccgaaacccgccactacgcacacgtagactgcccggggcacgccgactacgttaaaaacatgattaccggcgccgcacaaatggacggtgcaatcctggtatgttccgcagccgacggccctatgccgcaaacccgcgaacacatcctgctggcccgccaagtaggcgtaccttacatcatcgtgttcatgaacaaatgcgacatggtcgacgatgccgagctgttggaactggttgaaatggaaatccgcgacctgctgtccagctacgacttccccggcgacgactgcccgattgtacaaggttccgcactgaaagccttggaaggcgatgccgcttacgaagaaaaaatcttcgaactggctgccgcattggacagctacatcccgactcccgagcgtgccgtggacaaaccgttcctgctgcctatcgaagacgtgttctccatttccggccgcggtacagtagtaaccggccgtgtagagcgcggtatcatccacgttggtgacgagatcgaaatcgtcggtctgaaagaaacccaaaaaaccacctgtaccggcgttgaaatgttccgcaaactgctggacgaaggtcaggcgggcgacaacgtaggcgtattgctgcgcggtaccaaacgtgaagacgtagagcgtggtcaggtattggccaaaccgggtactatcactcctcacaccaagttcaaagcagaagtgtacgtactgagcaaagaagagggcggccgccataccccgttcttcgccaactaccgtccccaattctacttccgtaccaccgacgtaaccggcgcggttactttggaagaaggtgtggaaatggtaatgccgggtgagaacgtaaccattaccgtagaactgattgcgcctatcgctatggaagaaggcctgcgctttgcgattcgcgaaggcggccgtaccgtgggtgccggcgtggtttcttctgttatcgcttaa

SEQ ID NO: 48976 - DNA, 369 bp, Neisseria meningitidis; identical to SEQ ID NO: 39308

SEQ ID NO: 48977 - DNA, 789 bp, Neisseria meningitidis; identical to SEQ ID NO: 39524

SEQ ID NO: 48978 - DNA, 678 bp, Neisseria meningitidis
atgagccgcgtattactcgtagatgacgatgccctgctaaccgaactgctgaccgaatacctgagcgccgaaggtctgaacgtccgcagcgttcccgacggggaagcaggcgtacaggaaatcctgagcgggcagtacgatgtagtcgtattggattccatgatgcccaaaatgaacggcttggatgtcttgaaaaacgtacgcgcccgaagcaccgtccccatcatcatgctgaccgccaaaggcgacgacatcgaccgaatcatcggcttggaaatgggcgcggacgactatgtccccaaaccctgcacaccacgcgaactcttggcacgcatcaatgccatcctgcgccgcgcacaacacagcggcgaacagaacaacgcacccaacagcatctccgtcagcgatgtcgtcctgtatcccgccaaacgccaggcatccgtcaaagacatgccgctcgaactgaccagcaccgaattcaacctgctcgaagtcctgatgcgccatgccggacaggtagtcagcaaagaaaccctgtccgtcgaagcactcgaccgcaagctggcaaaattcgaccgcagtatcgacgtacacatctccagcatccgccacaagttgggcgatgcctctctgattcaaaccgtacgcggcttgggctacctgtttgtcaaaaactga

SEQ ID NO: 48979 - DNA, 171 bp, Neisseria meningitidis; identical to SEQ ID NO: 39149

SEQ ID NO: 48980 - DNA, 1749 bp, Neisseria meningitidis
atgattcattataaaataaccccgtcccctctcgaccacgagtggcacatcctgctgacattcacacaagatgatgatcttcctatagaaataagcctgccgaattgggtaccgggcagctatctgattcgggatttttcccgccacatcacttctatccatgcatcctgtaacggcacgtccatgccgctcgaacaaattgcaaaaaaccgctggcacgctgccgccgtacgcggcgagtggcaaatccgctacaccgtatatgcattcgatttgtcggttcgaggttctttcctgacgacagaacgcggtttttttgacggatcgtgcctgtttttgaaagtcgaaggaacggaaacgctgccgcaccgcttggaattgacgggtattccgtccgaatggcgtattgccacaacgctgccggaaacagggaggtttgtctttcaggcggcatcttatgccgaattgattgaccgacctgtcgagatgggcttgattgaatttttagattttgaggcggcaggcattccgcacacaattgccttaagcggcatatatcccgatttcgaccgcaacaggctggtttcggatatcaaaaaaatctgcgaaacagaactggcggtgttttcctcccctgccccgtttcaaaaatatttgttcctgctccacgtcggcgaccatatttacggcggtttggaacacaccgacagcaccgccctgctcgccgaccgccacagccttccgccgtacggtatgaccgatgccgacgatacctacaccacattgctcggacttttctcccacgaatattttcacgcgtggaacgtcaaatccatcaaacctgccgcgttcgtcccttatgacctcgacaaagaaaactataccgaacaactatgggcattcgaaggtattacatcctattacgacgatttgtttttggcacgcagccgcaccatctcgcccgaatcttatttaaacctgctggcacaaggcattacgcgcgtacaacaaacccgcggccgtttgaggcagaccttggcggaatcgagttttaccgcgtggaacaaattttacaaaccggatgaaaacagccccaacgccatcgtcagctactaccagaaaggcgcgcttgccgcattgtgccttgatctgataatacgcaaccgaagcaacggcagacattctctcgatacgttaatggacaaactctatcgggagtggagggacacacactcgggtattccggaaaaacactggcaaatccgctgtcaggaaattaccggcttggatttggaagattttttccaaaaagcgttatacagtaccgaagatttgccgcttgccgaatgcctggcaaccgcaggcgtgggactgaccttcctgccgcttccccgacaacacggcggcggatacgcagaacacatctgccccgtcccgtcggcaggcgattttggcgcacgtttcaaacaaaacaccgaccacatcgtcctgacccatgtcttcaacggcggcagcgcggaatctgcggcactgtgcccgcaagacaaaatcattgctttagacggttatgcctgcaccgactttaccgcacaatgggcccgataccacgtcaatgcaaaaatcaatatccacttcttccgtgccggcatattgcgtcaaaccgtcttgacggttcaggcagcggcagcggatactgccatcctacatatcacagaccggaacctgttggacaactggttgttcggttaa

SEQ ID NO: 48981 - DNA, 612 bp, Neisseria meningitidis
atgaagaataatgattgcttccgcctgaaaaacccccagtccggtatggcgctgatagaagtcttggttgctatgctcgttctgaccatcggtattttggcgttactgtctgtgcagttgcggacagtcgcttccgtcagggaggcggagacacaaaccatcgtcagccaaatcacgcaaaacctgatggaaggaatgttgatgaatccgaccattgattcggacagcaacaagaaaaactataatctttacatgggaaaccatacactatcagctgtggatggcgattttcaggttgatgccataaaaactaagacgcagttggcagaggcacaattgaagagatttagttatgagctgaaaaatgccttgccggatgcggcagccatccattacgccgtctgcaaggattcgtcgggtgttgcgccgacattgtccgccggcagtactttttcttcaaattgcgatgctagtgcaaatggggatactttgattaaagtattgtgggtaaatgattcggcaggggattcggatatcaaccgtacggatcttgagacgaacggcaacaatatcgtatatacctatcaggcaagggtcggaggtcgggaatga

SEQ ID NO: 48982 - DNA, 960 bp, Neisseria meningitidis; identical to SEQ ID NO: 39070

SEQ ID NO: 48983 - DNA, 987 bp, Neisseria meningitidis; identical to SEQ ID NO: 38384

SEQ ID NO: 48984 - DNA, 1206 bp, Neisseria meningitidis; identical to SEQ ID NO: 38565

SEQ ID NO: 48985 - DNA, 1158 bp, Neisseria meningitidis; identical to SEQ ID NO: 39400

SEQ ID NO: 48986 - DNA, 1173 bp, Neisseria meningitidis
atgaacatcaccatagtcgccccttattgctcgctgccgtccgaaccgtatttcaaccgcttttggtatctggcagaacgattgtcgcaatcgcacgacgtgttgctgattaccagccgtttccgccactacgacaaatcattcagacggcatgaagatgctgccgccacttcaaacggcaggctgcgcgtcaagctgctggacgaacctggctaccgaaaaaacgtctccctcgcccgcgtcgccagccaccgcgtattcgtccgcaatttggcacgctggctgcacagcccgcaggcggcggaacaggacatcgtctattctgcctatccgctgatggcgaccaacctgctgttgggcaaacacaaagcgcgtttgggctacaaactgattgtcgatgtgcaggacgtatggccggagtctttctcctcggtcgtaccatttttgaaaaaagtaccgcacaagctgctgccctttgcccgtcgtgccgaccgtgcctaccgttgcgccgacgcactcgttgccgtctcgcaaacctacctcgaccgtaccaaagaagccaatcccgatgttcctgccgaagccgtctgtatcggcgcggatttcgccgccatagcatccgcacccgccaaagatttcggcaacagcacaacccgatttttctatttcggcacgctcagccacagctacgatgtcgatactgcctgcagggggatacaaaaacttctggacagcgggaaaaacgtcgaactgcacatcatgggcggcggccccgacctagaaaagctgaaacagcatgaaaaccgcgccatcaagttttacggctacctcccctacgccgacatgatttccatcgccaaaggctgcgacattgccgtcaacgccatccatagccacgccatgcagtcggttaccaacaaactctccgactatatggctttgcaaaaaccgattctgaacagccagaccaatgccgaagtccttagcctcttgaacctgctgccgcacgaaaactaccgttccggcgacgtggacagcttcgttcaagccgccaaagatattttgaaacgcaaaaacgaccccgttcagtccgatgaaatcgtccgccgcttcaggcgcgacatttcctatcggaaaatcgtcaacctgattgaaagattggcaaatgagtaa

SEQ ID NO: 48987 - DNA, 1155 bp, Neisseria meningitidis; identical to SEQ ID NO: 38923

SEQ ID NO: 48988 - DNA, 1356 bp, Neisseria meningitidis; identical to SEQ ID NO: 38945

SEQ ID NO: 48989 - DNA, 4365 bp, Neisseria meningitidis; identical to SEQ ID NO: 44666

SEQ ID NO: 48990 - DNA, 2838 bp, Neisseria meningitidis
atgttagacaaatactcccccgccgaaatcgaatccaagcactatcaaaactgggaaagccaaggctatttccaacctgatatggatttgaccaaaccgtctttttccatccaactgccgccgcccaatgtaaccggcacgctgcacatgggtcatgccttcaaccaaaccattatggacggcctgacccgctactaccgtatgaaaggctgcaacaccgcctggattcccggcaccgaccacgcgggcatcgccacgcaaatcgtggtcgagcgtcagcttgccgcgcaaaacgtgtcccgtcatgacttgggtcgtgaaaaattcttggaaaaagtgtgggaatggaaagaagtttccggcggcacgattacgcagcagatgcgccgtgtgggctgttctgccgactggacgcgcgagtatttcacaatggacgatgtacgcgccgaaaccgtaaccgaagtgttcgtacgcctgtatgaacagggcttgatttatcgcggcaaacgcttggtgaactgggatccggtgcttggcacggcggtgtctgatttggaagtagaaagcgtggaagaacaaggctctatgtggcatatccgctatccgctggcggacaatcctgccgaagccgttatcgtggcgaccacccgtcccgaaacgttgctgggcgacgttgccgtagccgtcaatcccgaagacgaacgttacacccacttaatcggcaaagaattaatcctgccgctgaccggccgtaccatccccgtgattgccgacgaatacgttgaaaaagacttcggcacaggctgcgtgaaaatcacgcctgcacacgacttcaacgactacgaagtcggcaaacgccacgacacgcgcctgattaatgtgttcgacttggaagccaaagtgctggcaaacgccgaagtgttcaacttcaaaggcgaagcgcaacaaggctttgccctgcctgaaaaatacgcaggtttagaccgctttgccgcgcgcaaacaaatggttgccgatttgcaggaacaaggcttgttggtcgaaatcaaagcacacacgctgatgacacccaaaggcgaccgaaccggctcagtgattgagccaatgctgaccagccaatggtttgtcgccatgtccgccacgccaaacggcggcgagcctgacagcgaattcaaaggcttaagccttgctgacaaagccaaaaaagccgtcgacagcggcgcggtacgctttatccctgaaaactgggtcaatacctacaaccaatggatgaacaacatccaagactggtgtatttcgcgccaactgtggtgggggcatcaaatccccgcgtggtacgacgaaacaggcaatgtgtacgtcgcccgcaatcaggctgaagccgaaaaacaagccggcaaaacaggcttgacccgcgaagaagacgtattggacacttggttctcctccgcgctcgtgccgttttccacgctcggctggccgtctgaaaccgacgaactcaaagccttcctgccgtccaacgtcttggtaaccggctacgaaatcatcttcttctgggtggcgcgcatgattatgatgaccacccactttaccggcaaagtaccgtttaaagacgtgtacatccacggcatcgtgcgcgaccacgaaggcaaaaaaatgtccaaatccgaaggcaacgtcatcgatcctgtggatttgattgacggcatcggcttggacaagctgctggtaaaacgtaccaccggcctgcgcaaacctgaaaccgcgccgaaagtggaagaagccaccaaaaaactctttcccgaaggcattccgagtatgggcgcggacgcattgcgtttcaccatggcgagctacgccagcttggggcgcagcgtgaacttcgacttcaaacgcgccgaaggctaccgcaacttctgcaataaaatctggaacgccaccaacttcgtcttgatgaataccgaaaaccaagactgcggttacggcgcaaccgctgccgaaccgcgcggctactccttccccgatatgtggattataggccgtctgaatcagaccatcgaacaggttacgcaagcctacgaaacctatcgctttgatttgtcagcggaaaccctgtacagcttcgtatggaacgactattgcgactggtatttggaactcgccaaagtgcagcttcaaaccggctgcgccagccgccagcgcgccacacgccataccttattgcgcgtactcgaagccgccctacgcctgctgcacccgattattccgttcattaccgaagaactgtggcaaaccgtcgctcctatgtgcgacgcgaaaaccgccgacagcatcatgctcgcccgcttccccgaagccgacagcggcgagattgttcagacggcattcgagcaaatgaccgtgttgcaggatttgattggcgcagtccgcaacctgcgcggcgaaatgggcatccagcccaacgtaaaagccccgctgtttgtcgaaagcacggacgacttggcggactacctcaaatacctgccgatgatgacccgcctgaccgaagcacagcaagtcgccgccctacccgaaagcgaagacgcgcccgtcgccgtctgcaacggcgcgcgcctgatgttgaaagtcgaaatcgacaaagccgccgaaaccgcccgtttgagcaaagaagccgagaagctgcaaaaagccttggacaaactcaacgccaaactctccaaacccggctacaccgaaaaagcccctgcgcatctggtggaaaaagacaaagccgatttggcggaattggaagacaaaatggcaaaagttcaaaatcagttggcgaagttgaaagactga

SEQ ID NO: 48991 - DNA, 948 bp, Neisseria meningitidis; identical to SEQ ID NO: 38988

SEQ ID NO: 48992 - DNA, 867 bp, Neisseria meningitidis
atgaaaggcatcatactggcaggcggcagcggcacgcgcctctaccccatcacgcgcggcgtatccaaacagctcctgcccgtgtacgacaaaccgatgatttattaccccttgtcggttttgatgctggcgggaatccgcgatattttggtgattaccgcgcctgaagacaacgcctctttcaaacgcctgcttggcgacggcagcgatttcggcatttccatcagttatgccgtgcaacccagtccggacggcttggcacaggcatttatcatcggcgaagaatttatcggcaacgacaatgtttgcttggttttgggcgacaatattttttacggtcagtcgtttacgcaaacattgaaacaggcggcagcgcaaacgcacggcgcaaccgtgtttgcttatcaggtcaaaaaccccgaacgtttcggcgtggttgaatttaacgaaaacttccgcgccgtttccatcgaagaaaaaccgcaacggcccaaatctgattgggcggtaaccggcttgtacttctacgacaaccgcgccgtcgagttcgccaaacagctcaaaccgtccgcacgcggcgaattggaaatttccgacctcaaccaaatgtatttggaagacggttcattgtccgtccaaatattaggacgcggtttcgcatggttggacaccggcacccacgagagcctgcacgaagccgcttcattcgtccaaaccgtgcaaaacatccaaaacctgcacatcgcctgcctggaagaaatcgcttggcgcaacggttggctttccgatgaaaaactggaagaattggcgcgcccgatggcgaaaaaccaatacggccaatatttgctgcgcctgttgaaaaaataa

SEQ ID NO: 48993 - DNA, 270 bp, Neisseria meningitidis
atgccgtctgaaacctttccgtttcagacggcatggttttacagcaatctaaacagggcggactggaatcaaaaacacaccttcgccattcccgcacaagcacttcccctatacgctcccaaccccaatccgccgcattccagacggcattgcctttccgacagccgaacaaaaccccgaatccgtctgcacggttcggggcatatctccaatacgggcatcgtgctccggaaaaccgtcaaatccgcatcggcatcacaatatatttga

SEQ ID NO: 48994 - DNA, 516 bp, Neisseria meningitidis; identical to SEQ ID NO: 38602

SEQ ID NO: 48995 - DNA, 1230 bp, Neisseria meningitidis; identical to SEQ ID NO: 38460

SEQ ID NO: 48996 - DNA, 516 bp, Neisseria meningitidis; identical to SEQ ID NO: 38919

SEQ ID NO: 48997 - DNA, 558 bp, Neisseria meningitidis
atggatgctttaaaattattgacgaaccgccgatcttccaaaaagctgaagcaccccgcccccgatgcggcggagttggaacaaatatttcaggcggcaacccaagttcccgatcacggcaatatgcgccccttccgttttaccgtgattcaaggcgaggtaggattgcaacgttttcgcgatgtgttgaagcaaacggttgccgaattgaatttcggcgacgatgcgatgaaaaaggcggaaaaagtgggcaatatggcgccgatggttatcggggtaacgtttgcgccgaaccgcgatgtgcctaagccgaaaccggaatgggagcagatgctgacggcgggttgtgcggcgtatgcgctgcaactggcggcaacggcgcaaggtttcgacaatgtctggattacggggatgtgggtcaacagccccttgttgcgggaggctttcggttgtgcggataaggataaaatcatcgggctgatgatggtcggcacgccgacagaggaagtgcataagcccaagaataccgatttggaagcgtttgtcagccattggtaa

SEQ ID NO: 48998 - DNA, 585 bp, Neisseria meningitidis; identical to SEQ ID NO: 39006

SEQ ID NO: 48999 - DNA, 2748 bp, Neisseria meningitidis
atgcaacagcaacatttgttccgattaaatattttatgcctgtctttaatgactgcgctgcccgtttatgcagaaaatgtgcaagccggacaagcacaggaaaaacagttggataccatacaggtaaaagccaaaaaacagaaaacccgccgcgataacgaagtaaccggtttgggcaaattggtcaaaaccgccgacaccctcagcaaggaacaggtactcgatatccgcgacctgactcgctacgaccccggcatcgccgtcgtcgaacaggggcgcggcgcaagctcgggttactcgatacgcggtatggacaaaaaccgcgtttccttgacggtggacggcttggcgcaaatacagtcctacaccgctcaggcggcattgggcgggacgaggacggcgggcagcagcggcgcaatcaatgaaatcgagtatgaaaacgtcaaggctgttgaaatcagcaaaggctcaaactcggtcgaacaaggcagcggcgcattggcgggttcggtcgcatttcaaaccaaaaccgccgacgatgttatcggggaaggcaggcagtgggggattcagagtaaaaccgcctattccggcaaaaaccgggggcttacccaatccatcgcgctggcggggcgcatcggcggtgcggaggctttgctgatccacacgggtcggcgcgcgggggaaatccgcgcccacgaagatgcaggacgcggcgttcagagctttaacaggctggtgccggttgaggataccaatcagtacgcaaatttcatcgttgaagaagaatgcgaaagcgggagttatgaaacgtgtaaagcgaatccgaaaaaagatgttgtcggcaaagacgaacgtcaaacggtctctacccgagactacacgggtcccaaccgcttccttgccgatccgctttcatacgaaagccgatcgtggctgttccgtccgggttttcgttttgaaaacaaacggcactacatcggcggcatactcgaacgcacgcaacaaactttcgacacgcgcgatatgacggttccggcattcctgaccaaggcggtttttgatgcaaataaaaaacaggcgggttctttgtccggcaacggcaaatacgcgggcaaccacaaatacggcggactgtttaccaacggcgaaaacggtgcgctggtgggcgcggaatacggtacgggcgtgttttacgacgagacgcacaccaaaagccgctacggtttggaatatgtctataccaatgccgataaagacacttgggcagattatgcccgcctctcttacgaccggcagggcatcggtttggacaatcattttcagcagacgcactgttctgccgacggttcggacaaaaattgccgcccgagtgccgacaagccgttttcctattacaaatccgaccgcgtgatttacggggaaagccacaggctcttgcaggcggcattcaaaaaatccttcgataccgccaaaatccgccacaacctgagcgtgaatctcgggtttgaccgctttggctctaatctccgccatcaggattattattttcaaaacgccaaacgcgcctattcgttgaaaacgccccctaaaaacggcaataaaaacatcagccccaacggcagcacaaacaatccctattgggtcagcataggcgggggaaatgtggttacggggcaaatctgccgcttgggcaacaatacttatacggactgcacgccgcgcagcatcaacggcaaaagctattacgcggcagttcgggacaatgtccgtttgggcaggtgggcggatgtcggcgcggggttgcgctacgactaccgcagcacgcattcggacgacggcagcgtttccaccggcacgcaccgcaccctgtcctggaacgcaggcatcgtcctcaaacctgccgactggctggatttgacttaccgcacttcaaccggcttccgcctgccctcgtttgcggaaatgtacggctggcgggcgggtgttcaaagcaaggcggtcaaaatcgatccggaaaaatcgttcaacaaagaagccggcatcgtgtttaaaggcgatttcggcaacttggaggcaagttggttcaacaatgcctaccgcgatttgattgtccggggttatgaagcgcaaattaaaaacggcaaagaagaagccaaaggcgacccggcttacctcaatgcccaaagcgcgcggattaccggcatcaatattttgggcaaaatcgattggaacggcgtatgggataaattgcccgaaggttggtattctacatttgcctataatcgtgtccgtgtccgcgacatcaaaaaacgcgcagaccgcaccgatattcaatcacatctgtttgatgccatccaaccctcgcgctatgtcgtcggcttgggctatgaccaaccggaaggcaaatggggtgtgaacggtatgctgacttattccaaagccaaggaaatcacagagttgttgggcagccgggctttgctcaacggcaacagccgcaatacaaaagccaccgcgcgccgtactcgcccttggtatattgtggatgtgtccggttattacacgattaaaaaacacttcaccctccgtgcgggcgtgtacaacctcctcaaccaccgctatgttacttgggaaaatgtgcggcaaactgccggcggcgcagtcaatcaacacaaaaatgtcggcgtttacaaccgatatgccgcccccggccgaaactacacatttagcttggaaatgaagttttaa

SEQ ID NO: 49000 - DNA, 696 bp, Neisseria meningitidis; identical to SEQ ID NO: 38171

SEQ ID NO: 49001 - DNA, 636 bp, Neisseria meningitidis
atgagtgaaaccgaaaatcaagcattgacatttgccaaacgcttgaaggcggataccacggcggttcacgacagcgtggataacctcgttatgtctgtccaaccgtttgtcagcaaagaaaactacatcaaatttttgaaactccaatccgttttccacaaggccgtcgaccacatctataaagatgccgaattaaacaaagccattcccgagctggaatacatggcgcgatacgatgccgtaacgcaagacttgaaagatttgggcgaagagccttacaaattcgacaaagaattgccatacgaaactggcaacaaagcaatcggctggctttattgcgccgaaggatccaatttgggcgcggcgtttttgttcaaacacgcccaaaaactcgattacaacggcgaacacggcgcgcgccacctcgctccgcatcccgacgggcgcggcaaacactggcgcgccttcgtcgagcatctgaacgcattgggcttaagccccgaagccgaagccgaagccatccaaggcgcgcgcgaagcctttgcattctacaaagtcgtgttgcgcgaaaccttcggcttggcagccgatgccgaagcaccggaaggaatgatgccgaagcaccggaaggaatga

SEQ ID NO: 49002 - DNA, 564 bp, Neisseria meningitidis; identical to SEQ ID NO: 39229

SEQ ID NO: 49003 - DNA, 171 bp, Neisseria meningitidis
atggcgcaatatatgtgcggcccctgcggctggatttacgatgaagaacacggcgaccccgaacacggcatcgcccccgggacaaagtttgaagacatccccgacgactggaaatgccccgaatgcggcgtggacaaagaagatttctacctgttggatttcgtgatatag

SEQ ID NO: 49004 - DNA, 2211 bp, Neisseria meningitidis
atgaagacagacattcaaaccgaattaacccaagccctgctatcacacgaaaaagtatgggcgaacgaagaaaaaaccattttagccaaaaacattctgttggatttggtggaaaaaaccgacccgaccattatcggtttgttattgaataatgatgagttaaaacgccatttctttgtggaagtgaatggtgttttggtgtttaaattgcaggatttacgttttttcttggacaaacacagcgtcaataattcctacacaaaatacgccaaccgcattggtttgacggacggcaaccgctttttgaaagacaattcggatattgtgttggattttccgtttaaagattgcgtattgaatggcggacaaagcaccgaagaaggcgaagagatttattttaaacgcagtaatagccagccagccagccagccagccagccagccagccagccagccagccagccagccagccagccagccagccagccaattatacactaaattaacccgaaaaagacaagaaatcttttttaatcaaacgcttgcttttgatgaaatcgatcggctttttgacgcaaaagcattctcaaaattctctcgccacaccgcagacggcaaacaagcggttggcgaaatcaaacgacattcagacggcacaccagccgaaaatctcattatcaaaggcaataatctgattgccctgcattcgcttgccacgcagtttaaaggtaaagtgaagctgatttatattgatccgccttattattttgttaaaaagaaacaacaagatagttttggttataacactaactttaaattatctacttggcttacatttatgaaaaatcgtttatcaattgccaaagaattattaactgatgatgggattattgttatttccattgatgatgacggaaatgcttatttaaagattttgttagatgaaatttttggatttgaaaattttatcggaaatttacccactattatgaatttaaaaggtaataatgatgaatatgcttttgcaggcactcacgaatacacactagtctttgctaaaaataaagataaatctactttttatgaatttccaatagatgaagataattttttagagaaatgggaagaagatgaaattgggttttataaaaaaggagctccaatgcgagcaacaggaaccgaagataaaagagaagatagacctgaaatgttctatccttttttggtaaaaaataacacagttagtacaattacagatgaagaattttctcaaatctataataaagatttagaagtattcaatgatgattttattcaaaaactaaaagagaaatacgaaaatcttggatacaattttattttacctattgctgataaacaatgggggcgttggcgttgggggtattcaataaagaataaggcaaggctgcagacggatattattgttagccaatctaaaaatggaatttccttgtataaaaaacaaagacctgaattagatgatttacctacaaaaaaacctaaaactattttttataaacctgaatacagtagtggtaatggaactgaacagatgaaaaatctttttggtgaaaaggcatttaaaaatcctaaaccagaagaacttatccaagattttattaccatcacaaccaacgaatccgacatcgtcttagactaccatcttggtagtggcacaaccgccgccgttgcccacaaaatgaaccgacaatatatcggtattgaacaaatggattatattgaaacgcttgccgttgaacgcttgaaaaaagtgattgatggcgagcaaggcggtatttccaaagccgtgaattggcaaggtggtggcgagtttgtttatgccgaacttgccccatttaacgaaaccgcaaaacaacaaattttggcttgcgaagattcagacggcatcaaaacgctgtttgaaggtttatgcgaacgctatttcttgaaatacaacgtcagcgtaaatgaatttagtcaaatcattcaagagcctgaatttcaatccttggcattagacgaacaaaaacaaatggtgcttgaaatgttggatttaaatcaaatgtatgtttcattatccgaaatggatgatgagcaatttgcaggttgcttaaatgatgacgataaagcgttaagccgtgaattctatcaatcagcaaaaaatcaagcggagaaaaaagatggcgaataa

SEQ ID NO: 49005 - DNA, 405 bp, Neisseria meningitidis
atggccgaagggcaggatgtcgatttggtagagatttccccaactgctaaaccgcctgtgtgcaaactgatggattacggtaaatacaaataccagcaggccaagaaacgcgacgaagccaagaaaaatcaaaagcaggtacaaatcaaggaaatcaaattccgtccgggtacagatgagggcgattatcaaatcaagatgcgcaacatcaaccgcttccttgccgacggcgataaagtcaaagtgacattgcgtttccgcggccgtgaaatggctcaccagcaactcggcgcgcaacttttggaacgtgtaaaagaagatttggctgaagtggcgcaaatcgagtcctttcccaaaatggaaggtcgccaaatggtgatgatgattgcgccgaagaaaaaataa

SEQ ID NO: 49006 - DNA, 447 bp, Neisseria meningitidis; identical to SEQ ID NO: 38196

SEQ ID NO: 49007 - DNA, 777 bp, Neisseria meningitidis; identical to SEQ ID NO: 39364

SEQ ID NO: 49008 - DNA, 1902 bp, Neisseria meningitidis
atgactacgccaaaaaaaaccgccaaaacttccggcaacgaagcgcgcgaacttgccgacttgagcgaagacatcggtatccgcttcaaatatccgaactcggaacgcgtgtatctgcaaggcagccgcgacgacatccgcgtgcctttgcgtgaaatccgtcaggacgacacctatacggcgcaaggcgcggaagccaacccgccgattcccgtctatgacaccagcggcgtgtacggcgatccagcggcacacatcgacctgaaacaaggtctgccgcacatccgcaccgcatggctgaacgaacgcggcgataccgaaatcctgcccaagctctccagcgaatacggcatcgaacgcgcacacgatccgaaaaccgcccatctgcgcttcaaccaaatcacccgcccgcgccgcgcgaaaagcggtagcaacgtaacccagcttcactacgcgcgccaaggcattatcacgcccgaaatggagtttgtcgccatacgcgaacgtttaaaattagacgaattgtcccaaaaatcggaatacgccaaactcttgaaacaacacgcagggcaaagtttcggcgcgaacatcccaacccgtcccgaccaaatcacgcccgaattcgtgcgccaagaaatcgccgccggacgcgcgattatccccgccaacatcaaccaccccgaactcgaaccgatgattatcggccgcaacttccgcgtcaaaatcaacggcaatttgggcaactccgccgtaacctccagcctgaccgaagaagtcgaaaaaatggtgtggtcgctgcgttggggcgcggacacgattatggatttgtccaccggcgcgcacatccatgaaacgcgcgaatggattatccgcaacgcgcccgtccccatcggcaccgtgccgatttaccaagcgttggaaaaaaccggcggcatcgccgaagatttgacttgggatttgttccgcgacaccctcatcgaacaggcggagcaaggcgtggactatttcaccatacacgcgggcgtgttgctgcgttatgtgccgatgaccgccaaccgcctcaccggcatcgtctcgcgcggcggttcgattatggcgaaatggtgtttggcacatcatcgggaaaatttcctctacacgcatttcgacgaaatctgcgaaattatgaaagcgtatgacgtgtcgttcagcctcggcgacggcctgcgccccggctgcattgccgatgccaacgacgaatcccaattcgccgagctgcacaccttgggcgaattgaccgataaagcgtggaaacatgacgtacaagtcatgatcgaaggccccggccatgtgccgctgcaacgcgtcaaagaaaatatgaccgaagagctgcaacactgttttgaagcgccgttttacacactcggcccgctcgttaccgacatcgctcccggctacgaccacatcacctcgggcataggcgcggccaatatcggctggtacggcacggcgatgctttgttacgttaccccgaaagagcatttggggctgcccgacaaagaagacgtgcgcaccggcatcatcacctataaactcgccgcccacgccgccgatctcgccaaaggctggccgggcgcacaattacgtgacaacgccctgagcaaagcgcgtttcgagttccgctggcgcgaccaattccgcttaagcctcgaccctgaacgtgccgagagcttccacgacgaaaccctgcctgccgaaggcgcgaaaatcgcccacttctgctcaatgtgcggccccaaattctgctcgatgaaaatcacgcaggaagtgcgcgactacgccgacaagcaaaaagcccaacggcagggcatggaggaaaaagcggtcgagttcgtcaaaaaaggcgcgaagatttacagttga

SEQ ID NO: 49009 - DNA, 2721 bp, Neisseria meningitidis
atgggtgttatgctatatcatcatagttatgccgaagatgcagggcgcgcgggcagcgaggcgcagatacaggttttggaagatgtgcacgtcaaggcgaagcgcgtaccgaaagacaaaaaagtgtttaccgatgcgcgtgccgtatcgacccgtcaggatatattcaaatccagcgaaaacctcgacaacatcgtacgcagcatacccggtgcgtttacacagcaagataaaagctcgggcattgtgtctttgaatattcgcggcgacagcgggttcgggcgggtcaatacgatggtggacggcatcacgcagaccttttattcaacttctaccgatgcgggcagggcaggcggttcatctcaattcggtgcatctgtcgacagcaattttattgccggactggatgtcgtcaaaggcagcttcagcggctcggcaggcatcaacagccttgccggttcggcgaatctgcggactttaggcgtggatgacgtcgttcagggcaataatacctacggcctgctgctaaaaggtctgaccggcaccaattcaaccaaaggtaatgcgatggcggcgataggtgcgcgcaaatggctggaaagcggagcatctgtcggtgtgctttacgggcacagcaggcgcagcgtggcgcaaaattaccgcgtgggcggcggcgggcagcacatcggaaattttggcgcggaatatttggaacggcgcaagcagcgatattttgtacaagagggtgctttgaaattcaattccgacagcggaaaatgggagcgggatttacaaaggcaacagtggaaatacaagccgtataaaaattacaacaaccaagaactacaaaaatacatcgaagagcatgacaaaagctggcgggaaaacctggcaccgcaatacgacattacccccatcgatccgtccagcctgaagcagcagtcggcaggcaatctgtttaaattggaatacgacggcgtattcaataaatacacggcgcaatttcgcgatttaaacaccaaaatcggcagccgcaaaatcatcaaccgcaattatcaattcaattacggtttatctttaaactcatatgccaacctcaatctgaccgcagcctacaattcgggcaggcagaaatatccgaaagggtcgaagtttacaggctggggacttttaaaggattttgaaacctacaacaacgcgaaaatcctcgacctcaacaacaccgccaccttccggctgccccgcgaaaccgagttgcaaaccactttgggcttcaattatttccacaacgaatacggcaaaaaccgctttcctgaagaattggggctgtttttcgacggtcctgatcaggacaacgggctttattcctatttggggcggtttaagggcgataaagggctgctgccccaaaaatcaaccattgtccaaccggccggcagccaatatttcaacacgttctacttcgatgccgcgctcaaaaaagacatttaccgcttaaactacagcaccaataccgtcggctaccgtttcggcggcgaatatacgggctattacggctcggatgacgaatttaagcgggcattcggagaaaactcgccgacatacaagaaacattgcaacccgagttgcgggctttatgaacccgtattgaaaaaatacggcaaaaagcgcgccaacaaccattcggtcagcattagtgcggacttcggcgattatttcatgccgttcgccggctattcgcgcacacaccgtatgcccaacatccaagaaatgtatttttcccaaatcggcgactccggcgttcacaccgccttaaaaccagagcgcgcaaacacttggcaatttggcttcaatacctataaaaaaggattgttaaaacaagatgatacattaggattaaaactggtcggctaccgcagccgcatcgacaactacatccacaacgtttacgggaaatggtgggatttgaacgggaatattccgagctgggtcagcagcaccggacttgcctacaccatccaacaccgcaatttcaaagacaaagtacacaaacacggttttgagttggagctgaattacgattatgggcgttttttcaccaacctttcttacgcctatcaaaaaagcacgcaaccgaccaacttcagcgatgcgagcgaatcgcccaacaatgcgtccaaagaagaccaactcaaacaaggttatgggttgagcagggtttccgccctgccgcgagattacggacgtttggaagtcggtacgcgctggttgggcaacaaactgactttgggcggcgcgatgcgctatttcggcaagagcatccgcgcgacggcagaagaacgctatatcgacggcaccaacgggggaaataccagcaatttccggcaactgggcaagcgttccatcaaacaaaccgaaactcttgcccgccagcctttgatttttgatttttacgccgcttacgagccgaagaaaaaccttattttccgcgccgaagtcaaaaatctgttcgacaggcgttatatcgatccgctcgatgcgggcaatgatgcggcaacgcagcgttattacagctcgttcgacccgaaagacaaggacgaagacgtaacgtgtaatgctgatggcttgtgcaacggcaaatacggcggcacaagcaaaagcgtattgaccaattttgcacgcggacgcacctttttgatgacgatgagctacaagttttaa

SEQ ID NO: 49010 - DNA, 2904 bp, Neisseria meningitidis
ttgggccaacaaaacaattttatctcattcgacaataccgatacccttgtttctcaacaaagcggtactgccgtttttggcacagccacctacctgccgccctacggcaaggtttccggttttgatgccgacgggctggaaaagcgcaacaatgccgtcgattggattcgtaccacccgcatcgcgctggcaggctacagatacgacaatgtcgtatgcagaagcaccacagactgtcccaaacttgtctataaaacccgattttccttcgataatcccgacttggcaaaaacaggagtcgggctggataagcacacagagccaagccgcgacaattcgcccatttacaaattgaaggatcatccatggttgggcgtgtctttcaatttgggtgccgagggtaccgccaaaaatggtaagacaatcaacaaattggtatcttcttttaatgaaaagaatagtaataacaacctcgtctataccacggaaggccgcgatatttccttgggcgactggcagcgcgaaacgaccgccatggcctattatctgaacgccaaactgcacctgctggacaaaaaagggattaaagatatcgcccaaggcaaaacagtggatttgggcaccttgagaccgcgcgtcgagacgacaggacgaagctggctaaatttttgggctaagtgggacattaaagataacgggcagattccggtcaagctcggcctgccggaagtcaaagcaggccgctgcatcaacaaagcgaaccccaatcccaaagcccaagccctttcccccgccttgaccgcccccgcgctgtggttcggagctgggcaagatggtaaggcggagatgtattccgcttcggtttccacctaccccgacagttcgagcagccgcatcttccttcaaaatctgaaaagaaaaaacgaccccaacaaacccggccgctattccctcgcagacttgagtgcgtcggatattcaaagtaaagagccgactttcacaagtcggcaaacaatcatccgattggatggcggcgtacagcagatcaaactggataaaagcaatgaggccaccggtttaaatggaaatgacggcaaaaacgacactttcggcattgttagtgaagggagcttcacgactgatgtcaacgagtggaaaaaagtgctgctgccttggacggttcggggttctgctgatgacggtcgatttaaatcaattaaccaagaatcaagcaaatacagccaaagataccgcatccgcgaaaacggcaacaatagcaagcgtgatttgggcgacatcgtcaacagccccatcgtggcggtcggcgagtatttggctacttccgccaacgacgggatggtgcatatcttcaaacaaagcggcagggacaagcgcagctacaatctgaagctcagctacatccccggcacgatgccgcgccaatattttgataacgacacttccgctctcaaagactccaccctcgccaaagagctgcgcacctttgccgaaaaaggctatgtgggcgaccgctacggcgtggacggcggctttgtcttgcgccgcattacagatgaccaagacaagcaaaaacatttctttatgtttggtgcgatgggcctgggcggcagaggcgcgtatgccttggatttgaccaaagccgacagcaataacccgaccgccgtttccctgtttgatgtcaaaaatggcaataatggcaagaatagcaataatagcaataatagcgtgcaattaggctacaccgtcggcacgccgcaaatcggcaaaacccacaacggcaaatacgccgccttcctcgcctccggttatgcgactaaagacattaacaacggcgacaataaaaccgcgctgtatgtgtatgatttggaaagcaacaacggtacgccgattgcaaaaatcgaagtacccaacggcaagggcgggctttcgtcccccacgctggtggataaagatttggacggcacggttgatatcgcctatgccggcgatcgcggcggcagtatgtaccgctttgatttaagcggcaacaacccgaccagttggtctgcacgcgccattttcagcggcaacaaaccgattacttccgcgcccgccatttcccaactgaaagacaaacgcgtggttatcttcggcacgggcagcgatttgagtgaagaggatgtggacagcaaagaaatccaacacgtttacggtatttttgacaatgacacagacacgggtacggcgcaagacgggcagggcaaagggctgctcgagcaaaagctggaaaaagacaaagacggcaaaacgctgtttttaagcgactacaaaaggtctgacggctcgggcgacaagggctgggtagtgaaattggaagccggacagcgcgttaccgtcaaaccgaccgtggtattgcgtaccgcctttgtaaccatccataaatatacgggtaatgacaaatgcggcgcggaaaccgccattttgggcatcaataccgccgacggcggcaagctgaccaagaaaagcgcgcgcccgattgtgccggccgacaatacggctgtcgcgcaatattccggtcataagcaaaccgccaaaggcaaatccatccctataggttgtatggaaaaaaacaatggaatcgtctgcccgaacggatatgtttacgacaaaccggttaatgtgcgttatctggatgaaaagaaaacagacggattttcaacaacggcagacggcgatgcgggcggcagcggaacattcaaagagggtaaaaaacccgcccgcaataaccggtgcttctccggaaaaggtgtgcgcaccctgctgatgaacgatttggacagcttggacattaccggcccgacgtgcggtatgaaacgaatcagctggcgtgaagtcttctactga

SEQ ID NO: 49011 - DNA, 291 bp, Neisseria meningitidis; identical to SEQ ID NO: 39451

SEQ ID NO: 49012 - DNA, 2064 bp, Neisseria meningitidis; identical to SEQ ID NO: 38417

SEQ ID NO: 49013 - DNA, 1857 bp, Neisseria meningitidis; identical to SEQ ID NO: 38136

SEQ ID NO: 49014 - DNA, 402 bp, Neisseria meningitidis; identical to SEQ ID NO: 38334

SEQ ID NO: 49015 - DNA, 651 bp, Neisseria meningitidis
atgatccgtttcgaacaagtttccaaaacctatcccggcggttttgaagccctgaaaaacgtcagcttccaaatcaacaaaggcgaaatgatatttatcgcgggacactccggttcgggcaaatccaccgtcctcaagctgatttcgggcattaccaaaccaagcaggggcaaaatcctgtttaacgggcaggacctcggcacattgtccgacaaccaaatcggctttatgcgccaacacatcggcatcgtgttccaagaccacaaaatcctctacgaccgcaacgtcctgcaaaacgtcatcctgccgcttcggattatcggctatccgccgcgcaaagccgaagagcgtgcccgcatcgccatcgaaaaagtcggcctgaaaggacgagaattggacgatcccgtaaccctctccggcggtgaacaacaacgcctgtgcatcgcccgcgccgtcgttcaccagcccggcctgctgattgccgacgaaccctccgccaacctcgaccgcgcctacgcgctcgatattatggaattgttcaaaaccttccacgaagcgggaacaaccgtcatcgtcgccgcacatgacgaaaccctgatggcggactacggacaccgcatcctgcgcctctcgaaaggacgactcgcatga

SEQ ID NO: 49016 - DNA, 663 bp, Neisseria meningitidis
atgatacaagccgtattgttcgacctcgacggcacgctcgccgacaccgccctagacctcggcggcgcactcaacaccctgctcgctcgccacggactacctgcaaaaagcatggacgagatccgcacccaagccagccacggcgcggcaggactgatcaaactcggcgcaggcatcacccccgaccaccccgactatgcccgatggcgcaccgaatatctggaggaatacgaccgccgctacgcccaagacaccgagctctttgacggcgtgaacgaactcattgccgaactcaaccaacgcggcatcaaatggggcatcatcaccaacaaacccatgcgcttcaccgacaaactcgtccccaaactcggcttcatcatcccacccgccgtcgtcgtcagcggcgacacctgcggcgaacccaagcccagcatcaaacccatgctgtatgcgtgcggacaaatccacgccgacccgcaacacacactctacgtcggtgatgccgaacgcgacatccaagcaggccgcaacgccggcatgaaaaccgtcctcgccgaatggggctacatctcagatgaagacgataccggctcatggcaggcggatttccacatccgcacgccactcgatctgctcgaatgtctggacaaaatacagccctga

SEQ ID NO: 49017 - DNA, 456 bp, Neisseria meningitidis; identical to SEQ ID NO: 40384

SEQ ID NO: 49018 - DNA, 318 bp, Neisseria meningitidis; identical to SEQ ID NO: 39119

SEQ ID NO: 49019 - DNA, 1980 bp, Neisseria meningitidis
atgcaccccatcgaaacccccgataagaccttccacgacggcgacggcgtgtccgaattgggcaccatcctgcccgcgtggtggctcaaccaagtgcaatccgagctgctggccgtgctgactgcggccggtatccagccggataagtcgcagcctaatcaattactggcagcactgaatagactggctgtagttaccaccggcaaccaagaaatcggcggccaaaaaacctttaccgcccaaacccaattccaaagcggcatccatttatccgccaaccagacgaactggaacggcggccacaaagcctacatcggcgcggatgccgacaacgcccacatcgtcttcggcgacgacaccctgcgcctgcacggcgcaaacaaccgcatttcctacaacaaccacgacatcttccacaaagccaacaaaccgcgttttgccgaagacatcgaaggcaaaccgaacacactgtccggatacggcatcggcaatttcaaagtcgaaacattccggggcgatttgaacaccctcaaaacagacggcatctattccctgtcgacggcggtcggcagctccaacctgcccgttgaaaacaccgcctgccatatccaagtcatcgccggcacgaaacacggctggtgcaggcagttgggttatcccgcctacacgtccgacgtgtacgaacgccaccaaacgagcagcgcaaacgacaactggtccgcatggaaaaaactcaattcggacggcatccccgtcggcgcgatcgtatcctttcccaaagccgtccgaaaccccgcaggctatctcaaagccaacggcacgacctttgcacaaaacaccttccccgacctctaccgcgccttgggcaacagcaaccgcctgcccgatttaagccgtaccgacatcggcatgaccgcgtggtttccgtccgaccaaatcccgaccggctggctggcgtttgacgacatccgcacgcgcgtaaccgaaaccgcttatcccgagctgtaccgtctgctgaccggaaaatacggcagcatccaaaacgtcccgcaggcggaagaccgctttatccgcaacgcgggcaacggcttggcagtcggaacgaagcaggaagacgaaatcaaacggcacgtccacaaagtattttcacactggacaaaccacacagacgcggcagccctcggttacgaagaccacaacgaaaggcagagaagcgcgctcgtatcgacttggacggacggcgatttaaacgacaacggctttttaaccccgcgcccggacagcaaaatggcgacaggcggcgacgaaaaccgccccaaagccctggttttaaaactgtgcatcaaagccgccgacaccttgggcgaagccgtgttttggataaagtcccacggcgaaaccatcaacgtcggcgcgctggacgcgggcacgctggcgcaaaacctccaagacaaagcagaccgcgcccacacccacaccgccgcccaaatccaagggctggacgaaaaaatcagcaccgccgttgccgcgcaattcacacgccaaaccatcggcggcgtggatattgtcagattccccgacggcacaatgatacagaccggcagctacaggttcacacgaagcggcggccccatagaaaacgaagtcgtcttccccgtcgcctttgccgacggcaacgtcaaatgcttcgtatccgaacgccattcgggacgcgttaccggcgatcgaaggcaacacaactggctgtttatccgcgcaaaaaaccacgccgccgccattattaccaactggtacgaaggcagttgcgactggatggccatcggcaaagccgcctcgggaaacgccgccagctccccgatagtccccgaaatacctgaaaccaacgaagaaccgcaaagagagagtggaagaacatcaaccggaccccgaaaccgccgccgccgccgccgagacggcttgctcgaggcactgcaagactag

SEQ ID NO: 49020 - DNA, 660 bp, Neisseria meningitidis; identical to SEQ ID NO: 39052

SEQ ID NO: 49021 - DNA, 1413 bp, Neisseria meningitidis
atgctgctgctgcctttattggcaagcgcggcatatgccgaagaaacaccgcgcgaaccggatttgagaagccgtcccgagttcaggcttcatgaagcggaggccaaaccgatcgacagggagaaggtaccggggcaggtgcgggaaaaaggaaaagttttgcagattgacggcgaaaccctgctgaaaaatcccgaattactgtcccgcgcgatgtattccgcagtggtttcaaacaatattgccggtatccgcgttattttgccaatttacctacaacaggcgcagcaggataagatgttggcactttatgcacaagggattttggcgcaggcagacggtagggtgaaggaggcgatttcccattaccgggaattgattgccgcccaacccgacgcgcccgccgtccgtatgcgtttggcggcggcattgtttgaaaacaggcagaacgaggcggcggcagaccagttcgaccgcctgaaggcggaaaacctgccgccgcagctgatggagcaggtcgagctgtaccgcaaggcattgcgcgaacgcgatgcgtggaaggtaaatggcggcttcagcgtcacccgcgaacacaatatcaaccaagccccgaaacggcagcagtacggcaaatggactttcccgaaacaggtggacggcacggcggtcaattaccggctcggcgcggagaaaaaatggtcgctgaaaaacggctggtacacgacggctggcggcgacgtgtccggcagggtttatccggggaataagaaattcaacgatatgacggcaggcgtttccggcggcatcggttttgccgaccggcgcaaagatgccgggctggcagtgttccacgaacgccgcacctacggcaacgacgcttattcttacaccaacggcgcacgcctttatttcaaccgttggcaaaccccgaaatggcaaacgttgtcttcggcggagtgggggcgtttgaagaatacgcgccgggcgcgttccgacaatacccatttgcaaatttccaattcgctggtgttttaccggaatgcgcgccaatattggatgggcggtttggatttttaccgcgagcgcaaccccgccgaccggggcgacaatttcaaccgttacggcctgcgctttgcctgggggcaggaatggggcggcagcggcctgtcttcgctgttgcgcctcggcgcggcgaaacggcattatgaaaaacccggctttttcagcggttttaaaggggaaaggcgcagggataaagaattgaacacatccttgagcctttggcaccgggcattgcatttcaaaggcatcacgccgcgcctgacgttgtcgcaccgcgaaacgcggagtaacgatgtgttcaacgaatacgagaaaaatcgggcgtttgtcgagtttaataaaacgttctga

SEQ ID NO: 49022 - DNA, 1245 bp, Neisseria meningitidis; identical to SEQ ID NO: 38206

SEQ ID NO: 49023 - DNA, 1170 bp, Neisseria meningitidis
atgccgcaaattaaaattcccgccgtttactaccgtggcggtacatcaaaaggcgtgtttttcaaacgttccgacctgcccgaggcggcgcgggaagcgggcagcgcacgcgacaaaatcctcttgcgcgtactcggcagcccggatccctacggcaagcagatagacggtttgggcaacgccagctcgtccaccagcaaggcggtgattttggacaagtccgaacgcgccgatcacgatgtcgattaccttttcgggcaagtttccatcgacaaaccttttgtcgattggagtggcaactgcggcaacctcaccgccgccgtgggcgcatttgccatcgagcaaggcttggtcgataaaggcaagattccttcagacggcatctgcacagtcaaaatctggcagaaaaacatcggcaaaaccattattgcccatgtaccgatgcaaaacggcgcagttttggaaacaggcgattttgagctcgacggcgtaacgttcccggcagccgaagtacaaatcgaatttcttgatccagccgacggcgaaggcagtatgttcccaaccggcaatttggtcgatgaaattgatgtgccgaatataggccgtttgaaagccacgctcatcaacgcgggcattccgaccgttttcctgaatgccgccgacttgggctacacgggccaagagttgcaagacgacatcaacaacgatgccgcggctctggaaaaatttgaaaccatccgcgcgtatggcgcgctgaaaatgggtttgatcagcgacgtttccgaagccgccacccgcgcccatactccgaaagtcgcttttgtcgcccccgcggccgattacaccgcctccagcggcaaaaccgtccaagctgccgacatagatttattggtacgcgcactgagcatgggcaaattgcaccacgccatgatgggtactgcttcagttgccatcgctaccgccgccgccgtgcccggaacgctggtcaaccttgcagccggaggcggagcgcgtaaagaagtccgtttcggccatccgtcaggtacgctgcgtgtcggtgccgccgccgaatgtcaggacggccaatggacggccaccaaagcggtcatgagccgtagcgcacgcgtgatgatggaaggttgggtcagggtgcctgaggattgtttttaa

SEQ ID NO: 49024 - DNA, 114 bp, Neisseria meningitidis
atggaatggaacatattttcagattggaaatgggattgggaaattcaagtcgggtattgtaacggtttttatccctgtctgcacagggcttgccgattgaagatgccgtcgtag

SEQ ID NO: 49025 - DNA, 195 bp, Neisseria meningitidis; identical to SEQ ID NO: 38181

SEQ ID NO: 49026 - DNA, 204 bp, Neisseria meningitidis; identical to SEQ ID NO: 47887

SEQ ID NO: 49027 - DNA, 651 bp, Neisseria meningitidis; identical to SEQ ID NO: 38886

SEQ ID NO: 49028 - DNA, 2262 bp, Neisseria meningitidis; identical to SEQ ID NO: 38996

SEQ ID NO: 49029 - DNA, 921 bp, Neisseria meningitidis; identical to SEQ ID NO: 40141

SEQ ID NO: 49030 - DNA, 990 bp, Neisseria meningitidis; identical to SEQ ID NO: 39222

SEQ ID NO: 49031 - DNA, 966 bp, Neisseria meningitidis; identical to SEQ ID NO: 38346

SEQ ID NO: 49032 - DNA, 570 bp, Neisseria meningitidis; identical to SEQ ID NO: 38341

SEQ ID NO: 49033 - DNA, 810 bp, Neisseria meningitidis
atgattcaagacacccgaccccttatccgcgtcgttgccggcatcctgctcgattcagacggcaactacctgctcagctcgcgccccgaaggcaaaccctatgccggatattgggaatttgccggcggcaaggtcgaagcgggcgaaaccgacttccaagccttgcaacgcgagtttgaagaagaactcggcatccgcatcctcgccgccacgccttggctgaccaaaatccattcctacgaacacgcccgcgtctgcctgaaattcctatgggtaaaccccggccaatggacgggcgaaccgcaatcgcgcgaaggacaggcatggtcgtggcagaaggcgggtgattttaccgttgcccccatgctgcctgccaacggcgcgcttttgcgttcgctgtccgtcccgcgccgtttgtacggcagcctgaaaacgggtttgcacggggagaacagtatgggcgcgtaccgcgtcctgcctttgggttcggcagaggaaagcggtgcgaacgttttgatggaggcggcgcaatggcaggacagacccgaacacgccgacagcgtgtggatgatggtgcagacccgcgaacaatggcggcaggcgcaggaaaagggcgcggatgttgtcgtgtggcgcgtgtgcaatgatgttcaggcacaagaggcggcagaagccctgcggcagggcgtatccgtgccgctcgtacttgcagcaaacggacagacggttgcacgttatggaaaactatggctcggattgggggcgcacgtggtggtaagggatgaaacaatagggaagaatcatgaataa

SEQ ID NO: 49034 - DNA, 807 bp, Neisseria meningitidis; identical to SEQ ID NO: 39499

SEQ ID NO: 49035 - DNA, 252 bp, Neisseria meningitidis; identical to SEQ ID NO: 37103

SEQ ID NO: 49036 - DNA, 834 bp, Neisseria meningitidis; identical to SEQ ID NO: 39098

SEQ ID NO: 49037 - DNA, 1578 bp, Neisseria meningitidis
atgagtaaagccgtcaaacgcctgttcgacatcatcgcatccgcatcggggctgattgtcctctcacccgttttcctgattttggcgtacctcatccgcaagaatctgggttcgcccgtcttcttcattcaagaacgccccggaaaggacggaaaaccttttaaaatggtcaaattccgttccatgcgcgacgcgcttgattcagacggcattccgctgcccgacagcgagcggctcacacccttcggcaaaaaactgcgtgccgctagtttggacgaactgcctgaattatggaatgtcttaaaaggcgacatgagcctggtcggcccgcgcccgctgctgatgcaatatctgccgctgtacgacaacttccaaaaccgccgccacgaaatgaaacccggcattaccggctgggcgcaggtcaacgggcgcaacgcgctttcgtgggacgaaaaattcgcctgcgatgtttggtatatcgaccattacagtttttggctggatatgaaaatcctgtttttgacagtcagaaaagtctttatcaaagaagggatttcggcggaaggggaagccactatgccttatttcactggaaatcaaactaatgaaaaaaataatatactgattctgtcggcaggtcgccgtgtcgaattggtgcaggacttccaaaccgaagccgcacgtttttcagacggcatcagcgtttttgccactgacctcaacccccgcatgtcttctgcctgccatgtttcggacggttcatttgaagtgccgccgattagtgccgattcatatatcgacagcattttcaatctggcggtacgcgaaaatatcggtttaatcatcccaaccatagacaccgaactgcaaaagctggcagacgagcgcgaacgctttgaagcggcaagtgtccacatcgtcgtttccgattcggacttcatcgcacaatgccgcgacaaacggaaaaccgccaccttgtttgcccgctacggcatacgctcacccgaaatttacgaccgcaagaagttggttttcccttgcttcgccaagccttatgacggcagccgcgccatcggtgcaaaacggattgacacacctgccgacctgacaccggaagtcttggcagacaccaaattaatgttctgtcagtttatcgacatcgaaaataaattttccgagtttaccgtcgatatgtattacgaccgtcaatgccgtctgaaatgcgccatcccgcgaaaacgcttggaagtgcgctccggcgaaatcagcaaaggcgttacctgcaaaaacagcctctaccaaacgctgctggaaaaaatggcggtattgcagggcgcgcgcggctgtatcacggcgcagttcttctacaacgaagaaaccggcgaattctacggcgtggaaatcaacccccgcttcggcggtggcttcccgctgacgtatgccgcaggcggcaattatccgagccggttgatgcgcgaatacctcggcgacgaagaaatcccgttttcagacgactgggaaaacaacctcattatgttgcgctacgatgccaaggtcttggttcatgaaaacgattaa

SEQ ID NO: 49038 - DNA, 423 bp, Neisseria meningitidis; identical to SEQ ID NO: 39410

SEQ ID NO: 49039 - DNA, 633 bp, Neisseria meningitidis; identical to SEQ ID NO: 39440

SEQ ID NO: 49040 - DNA, 540 bp, Neisseria meningitidis; identical to SEQ ID NO: 38904

SEQ ID NO: 49041 - DNA, 324 bp, Neisseria meningitidis; identical to SEQ ID NO: 38284

SEQ ID NO: 49042 - DNA, 2043 bp, Neisseria meningitidis; identical to SEQ ID NO: 39250

SEQ ID NO: 49043 - DNA, 633 bp, Neisseria meningitidis; identical to SEQ ID NO: 44637

SEQ ID NO: 49044 - DNA, 3102 bp, Neisseria meningitidis
gtgcagagtcaggggatgcgccgctacctcaatacctgcctcgcccgcgatttgggcgtggcggcgaatttgtcgttcagcctgcccgccggtctgacgtggaagctgatgaaaaaactgattcccggcattccggaactcagcccgtttgcgcctgaagtgatgcgctggcggctgttggatttgttccgcagcgaggcatttcggaatacggcagaatttgaagatgtgaggaatgtgctgcaagactatctgggcagcggcgaatcggcagattatcagcttgcgggacagcttgcggacatattcgaccaataccttgtctatcgtccgcagtggatagacgcgtggcagcagggcaggcggctcggtttgggcgacgatgaaatctggcagtccaaactgtggcgttacctcgacgatggcaggcagagcgcgccgcaccgtgtcgcgttgtgggaaaagctgttggaatctttaagcagtgataagctgcccgagcgttatttcgtgttcggcatttccacgatggcgccgatgtatttgcaacttttgcacaagctgtccgaacattgcgacgtgttcgtgttcgcactcaatccgagcgggatgtattggggcaatgtcatcgaagcggcgcaaatcctcaaaggcggcggcgatcccgatttaactcaggcagggcatccgctgctcgcctcattgggcaagcaggggcgggactttttcgactttttgaacgaaatggaaatagaagaagaaacgccggtgtttgaagaaggcagccgcgatacgcttttgcacgccctgcaaaccgatatccaaaacttggatatgccgtctgaaaaagcgggaaatattaatacggacgacggatcgatacgcatcgtctccgcacacagccctttgcgcgaattgcagatactcaaagacaaactgttgaaaattctgcatgaacatcccgattggcagccgcatgatatcgccgtattaaccccgaatatcgaatcctatacgccttttatcgaagccgtgttcggacaggcgcagcccggtgcgcaggcattgccgtattccgtttcagacgtgaaaatcagccgccgacaaccgctgtttcatgctttgtcatgcctgttcgacttgttggaaagccgatttgaagtcgataaagtgcttgtgcttttagaaaccgcacccgtgttgcgccgtttcggactgactgaggacgatttgccgcttttgcacgatatggttgccgatttgaacgttcactggggtttggacggagaaatgcgcggcggcacggatcagctgtttacctggaagcaggcggtagaacgcatgatattgggctggatgctgcccgaaggcggcaacccgatgtggcaggatgtcagcgcgtggtatgccgacgtgaatcaaaccgccctgttcggacgttttgccgccctcctcgaaaccctgtcggatattgtacggatatggcggcagcccgcaacgatcggcgaatgggtggcgcgttgccgggatttgcttgaaacattgttccaagctgaagccgatgaccaaaagtcagtccaaaaccttgaaaacgaatgggtcaaatggcaggcggaaacagaattggcgcaattttccagacagttgccgcaacaaaccgtcatccgccacatccgccgctttctcgacagcgaaagcgaggcaggctttttacgcggcggcatcaccttttgcagtatggtgccgatgcggagcctgccctttaaagtcatctgtctgttgggtttgaacgacggagattttccccgcaataccaaagccgccgtattcgacctgattgccaaacatcccgccaaaggcgaccgcgcccgccgcgacgacgaccgctacctcttcctcgaagccctcatcagcgcgcgtgaaatcctgtacctgtcctacatcgggcgcgacatccgcaaagacgaagaactggctccgtcttctttgttgggcgaactcatcgacacagttgccgccatgaccggcacaaacagccgccaacttgcacaaaactggatagaacagcatccgctgcaagccttctcgcgccgatattttcaagaaggcggacgttcagacggcatattcggcacgcgtaccgactacgccgccgcgctcggacaaacgcccgaaccgccgcaaccctttttcgatcaacccgtagaaaacgccgaacctgttgccgaaattggacaggacgaatttatccgcttctggcgcaaccctgtcaaagtatggcttcagcagcagcttgcgtggagcgaaccccatatcggcgaagcctgggagcctgccgaacccttcgagccgcaacacgccgatcaaatcgccaaaacctacatcgaagcacgccgcgaaggacgggatttttcccaaaccgccgcccgcatcggggcggaaagcctgctgccgtcgggagagttgggcagactttggcagcaagacttccaaaccgctgccaaacaaatcgacacggcggttttaaacagccccaaactgccaccgctttcatatgccataccgtcggacgggcaaatcctgaaaggcagcttgggcaatctgtaccgctgcggacaagtgttttacgcctacggcaaacccaacgcgccgcaacgtatcgcttttctgctggaacacctgatattttgcgccgttatgccgtctgaaaccgaaacgcggcaaacctttatcgtccaatccggagaaaccgaaatattggcggaaatcgcgcaagacagggcattgcagctattgtcggaatggatggcgtttttcaatatcgggcaaaaccgcccgctgccgttttttgccaaaacctcgcttgccgccgccgaagcgtttgcccaaaaacaagattgggaagccgccctgaaaaaagcccaaaccgcctaccacggcaacaaagtcagcaaagggcagaaagactataccgaagtcgccctcgtgttcggcaacgcaagccaaaacccgctcgaacagcccctgtttgaaaacctcgtccgcctgcttgccgacacgtttgccgcagcggaaaaaaaggaagaggccggagaagcctga

SEQ ID NO: 49045 - DNA, 1128 bp, Neisseria meningitidis
atgaacacctcgcaacgcaaccgcctcgtcagccgctggctcaactcctacgaacgctaccgctaccgccgcctcatccacgccgtccggctcggcggggccgtcctgttcgccaccgcctccgcccggctgctccacctccaacacggcgagtggatagggatgaccgtcttcgtcgtcctcggcatgctccagtttcaaggggcgatttactccaaggcggtggaacgtatgctcggcacggtcatcgggctgggcgcgggtttgggcgttttatggctgaaccagcattatttccacggcaacctcctcttctacctcaccgtcggcacggcaagcgcactagccggctgggcggcggtcggcaaaaacggctacgtccctatgctggcggggctgacgatgtgcatgctcatcggcgacaacggcagcgaatggttcgacagcggcctgatgcgcgcgatgaacgtcctcatcggcgcggccatcgccatcgccgccgccaaactgctgccgctgaaatccacactgatgtggcgtttcatgcttgccgataacctgaccgactgcagcaaaatgattgccgaaatcagcaacggcaggcgcatgacccgcgaacgcctcgaagagaacatggcgaaaatgcgccaaatcaacgcacgcatggtcaaaagccgcagccacctcgccgccacatcgggcgaaagccgcatcagccccgccatgatggaagccatgcagcacgcccaccgtaaaattgtcaacaccaccgagctgctcctgaccaccgccgccaagctgcaagccccgaaactcaacagcggcgaaatccggctgctcgaccgccacttcacccaactccaaaccgacctgcaacaaaccgtcgccctcatcaacggcaggcacgcacgccgcatccgcatcgacaccgccatcaaccccgaactggaagccctcgccgaacacctccactaccaatggcagggcttcctctggctcagcaccaatatgcgtcaggaaatttccgccctcgtcatcctgctgcaacgcacccgccgcaaatggctggatgcccacgaacgccaacacctgcgccaaagcctgcttgaaacacgggaacacggctga

SEQ ID NO: 49046 - DNA, 1197 bp, Neisseria meningitidis
atgcaaaactatctgacccccaatttcgcctttgccccgatgattcccgaacgcgcttcaggcagccgcgtttgggatacgaaagggcgtgaatatattgatttttcaggcggtatcgccgtcaatgcgctgggacactgccaccctgcccttgtcgatgctttaaacgcgcagatgcacaagctgtggcacatttccaatatctatacgacgcgtccggcgcaggaattggcgcaaaaattggttgcaaacagttttgccgacaaggtttttttctgcaactcgggctcggaagcgaatgaggcggcgttgaagctggcgaggaaatacgcccgcgaccgtttcggcggaggaaaaagcgaaatcgtcgcctgtatcaacagttttcacggacgcacgctgtttaccgtgtccgtcggcggtcagccgaaatacagcaaggattatgcacccctgccgcaaggcattacgcacgttccgttcaacgatattgccgcgctggaagctgccgtcggcgaacagacctgcgcggtcatcatcgagccgatacagggcgaaagcggcatcctgcccgccactgcggaatatttgcaaaccgcgcgccgtctgtgcgaccggcacaatgcgttgttgattttggacgaagttcaaaccgggatggggcatacgggcaggctgtttgcctatgaacattacggcgttgttcccgatattttgagttcggcaaaagccttgggctgcggctttccgatcggcgcgatgctggcgacagaaacgattgccgccgccttccaaccgggcacgcatggctcgactttcggcggcaacccgatggcgtgtgcggtcggcagccgcgccttcgacatcatcaatacgcccgaaactttaaaccatgtccgtgaacaggggcagaaacttcagacggcattgctggatttgggcaggaaaacaggcttgttctcacaggttcgcggcatgggactgctgctcggctgcgtgttggacgaagcctatcgcggacgcgcatccgaaatcaccgccgccgccttgaaacacggcgtgatgattttggttgcgggtgcggacgtattgcgtttcgcgccttcgctgctgttgaacgatgaagatatggcggaaggtttgcggcgtttggaacacgcgctgacggaatttgccgcgacatcagacaatccgtaa

SEQ ID NO: 49047 - DNA, 486 bp, Neisseria meningitidis; identical to SEQ ID NO: 37367

SEQ ID NO: 49048 - DNA, 1497 bp, Neisseria meningitidis
atgttttccaactacctactcagcttggcaatatggatacccatcgccgcaggtgtgctggttttgtcgaccggtaaggacagccgtgcgccgctggcgcgtgtgcttgcctttatgggtgcgcttgccggtttcttggtaacgctgcccctgtttaccggtttcgaccgtttgagcggcggctatcaatttaccgagttccacgagtggattccgctgctgaaaatcaactatgcattgggcgtggacggtatttcagtgctctttatcatcttgaatgcgtttattacgctgttggtggtgctggcgggttgggaagttattcagaaacgcccggcgcagtatatggcggcattcctgatgatgtcgggtttgattaacggtgcgtttgccgcgcaggatgcgattctgttttatgtgttcttcgagggtatgctgattccgctgtacctgattatcggtgtatggggtggcccgcgccgcgtttatgcgtcggtcaagctgttcctctatacgctgatgggttcgcttttgatgctggttgccatggtttacctgtactatcagacaggcagcttctctattgtcgatttccaaaacatcaagcagattccattgggcgtacaacagcttttgtttgtggcattcttcctgtcatttgccgtaaaagtgccgatgttccctgtgcacacttggttgccggatgcccacgttgaagcgccgaccggcggttcgatggtgttggcggcaattacgctgaaactgggtgcgtatggtttcttgcgttttatcctgccgattatgccggatgcggcacgctattttgcccctgtgatcatcgtattgagcctgattgccgtgatttatatcggtatggtggctttggtgcaaaccgatatgaaaaaactggtggcgtattcgtctatcagccatatgggttttgtaacgcttgggatgtttttgtttgttgacgggcagttggacgactgggcgttgaaaggcgcaatcattcaaatgatttcgcacggtttcgtgtcggcggcgatgtttatgtgtatcggcgtgatgtacgaccgcctgcatacccgcaatattgctgactatggcggcgtggtcaatgtgatgcctaagtttgcggcgtttatgatgttgttcggtatggccaatgccggtctgcctgcaacttccggcttcgtgggcgagtttatggtgattatgggcgcggttaaagtgaatttctgggtgggcgcgttggcggccatgaccctgatttacggtgcgtcttataccctgtggatgtacaagcgcgtgattttcggcgcgatccacaatccgcacgttgccgaaatgaaagacatcaactgccgcgaatttgcgattctggcgattttggcggttgtggtattgggtatgggtctgtatccgaacgcatttatcgaagtggtgcatcaggcggcaaacgatttgattgcccatgtggcacaaagcaagatttga

SEQ ID NO: 49049 - DNA, 1098 bp, Neisseria meningitidis; identical to SEQ ID NO: 38798

SEQ ID NO: 49050 - DNA, 246 bp, Neisseria meningitidis; identical to SEQ ID NO: 38743

SEQ ID NO: 49051 - DNA, 279 bp, Neisseria meningitidis; identical to SEQ ID NO: 36210

SEQ ID NO: 49052 - DNA, 1341 bp, Neisseria meningitidis
atgttgaatccatcccgaaaactggttgagctgatccgtattttggacgaaggcggttttattttcagcggcgatcccgtgcaggcgacggaggctttgcgccgcgtggacggcagtacggaggaaaaaatcatccgtcgggcggagatgatcgacaggaaccgtatgctgcgggacacattggaacgtgtgcgtgcggggtcgttctggttgtgggtggcggcggcgacgtttgcgttttttaccggtttttcaggcacttatcttctaatggacaatcagggtctgaatttctttttggttttggcgggcgtgttgggcatgaatacgctgatgctggcagtatggttggcaatgttgttcctgcgcgtgaaagtggggcgttttttcagcagtccggcgacgtggtttcggggcaaagaccctgtaaatcaggcggtgttgcggctgtatgcggacgagtggcggcaaccttcggtacgttggaaaataggcgcaacgtcgcacagcctgtggctctgcacgctgctcggaatgctggtgtcggtattgttgctgcttttggtgcggcaatatacgttcaactgggaaagcacgctgttgggcgattcgtcttcggtacggctggtggaaatgttggcatggctgcctgcgaaactgggttttcccgtgcctgatgcgcgggcggtcatcgaaggccgtctgaacggcaatattgccgatgcgcgggcttggtcggggctgctggtcggcagtatcgcctgctacggcatcctgccgcgcctcttggcttgggcggtatgcaaaatccttttgaaaacaagcgaaaacggattggatttggaaaaaccctattatcaggcggtcatccgccgctggcagaacaaaatcaccgatgcggatacgcgtcgggaaaccgtgtccgccgtttcgccgaaaatcgtcttgaacgatgcgccgaaatgggcggtcatgctggagaccgaatggcaggacggcgaatggttcgagggcaggctggcgcaggaatggctggataagggcgttgccgccaatcgggaacaggttgccgcgctggagacagagctgaagcagaaaccggcgcaactgcttatcggcgtgcgcgcccaaactgtgcccgaccgcggcgtgttgcggcagatcgtccgactttcggaagcggcgcagggcggcgcggtggtgcagcttttggcggaacaggggctttcagacgacctttcggaaaagctggaacattggcgtaacgcgctgaccgaatgcggcgcggcgtggcttgagcctgacagggcggcgcaggaaggccgtttgaaagaccaataa

SEQ ID NO: 49053 - DNA, 567 bp, Neisseria meningitidis; identical to SEQ ID NO: 38211

SEQ ID NO: 49054 - DNA, 642 bp, Neisseria meningitidis
atgaaactgtatatttacgaccattgcccgttttgtgtgcgtgcgcggatggctgccgggctgtttggcgcggacgttgaagaagccgtgctggcaaacgacgacgaggcaacgccgatcggtatgatcggtgcgaaacaagtgcccgtcctgcaaaaagaagatggttcgtttatgggcgagagtttggacattgtgcggcatttcgaccgcgaagaccgtctgaaagacgaagtccgccccgagatacgggcgtggctggacaaggtgggcggatacaacgacaaactggtgcagccgcgcgtgatcaaaatcgggctgcccgaatttgcaacgccggaagcggtaaaatattttacagacaaaaaagagaaaagcatcggcagcttttccgccaatttgaataaaaccgcccaatatctcgaacgcataaacgcagatttgcaagagttggagaatttgatggacggtgcttcagacggcatcaacggcggaatcggcatggaggatattttggttttccccgttttgaggaatctgaccgtggtgcgcggtatcgaatggcctcaaaaggtgatgggttatttgatgatgatgagtgaaaaatcgggcgtgccgctttattttgacagggcattgtaa

SEQ ID NO: 49055 - DNA, 591 bp, Neisseria meningitidis; identical to SEQ ID NO: 38840

SEQ ID NO: 49056 - DNA, 1620 bp, Neisseria meningitidis; identical to SEQ ID NO: 38327

SEQ ID NO: 49057 - DNA, 822 bp, Neisseria meningitidis; identical to SEQ ID NO: 38858

SEQ ID NO: 49058 - DNA, 1056 bp, Neisseria meningitidis; identical to SEQ ID NO: 39910

SEQ ID NO: 49059 - DNA, 1188 bp, Neisseria meningitidis
atgacagaggacgaacgtttcgcgtggttgcaactggcttttacgccctatatcggtgcggaaagtttcttgctgctgatgcgccgtttcggcagcgcgcaaaatgccttgtccgcaccggcggaacaggtcgccccggcggtgcggcacaagcaggcggccgaggcttggcgcaatgcggaaaaacgcgctttggcgcggcaggcggcagaagcggcgttggaatgggaaatgcgggacggatgccgcctgatgctgcttcaggatgaagatttccccgaaatgctgacgcaggggctgaccgcgccgccggttttgtttttgcgcggcaacgtgcggctgctgcacaagccttccgccgccatcgtcggcagccgccatgccacgccgcaggcgatgcggattgccaaagatttcggcaagtcgttgggcgggcaaaatatccccgttgtgtcgggtatggcttccggtatcgatactgccgcccatcagggcgcactggaggcagaaggcggcaccatcgccgtgtgggggacgggtatagaccgcatttacccgccgtccaataaaaaccttgcctatgaaatcgccgaaaaaggattgattgtcagcgagtttcccatcggtacgcgcccgtatgccggcaattttccgcgccgcaaccgcctgattgctgccctgtcgcaagtaacgctggtggttgaagccgccttggaatccggttcgctgattaccgccggcttggcggcagaaatggggcgcgaagtgatggcggtacccggttcgatagacaatccgcacagcaaaggctgccacaaactgattaaagacggcgcaaaattggtggaatgcctggacgacatcctgaacgaatgcccggggctattgcaaaatacgggtgcttcatcatattctataaataaggatacgcccgacacgggccgccgcgccgttcagacggcatacgccccgccgcctgccgcaaaaatgccgtctgaaggggcggcaggcggcacagccgtcggcggcatactggataaaatgggtttcgaccccatccatcccgacgtgcttgccggacagttggctatgcctgccgcagatttgtatgccgcactgttggaattggaattggacggcagcgttgccgcaatgcccggcggcagataccagcgtatccgaacttga

SEQ ID NO: 49060 - DNA, 513 bp, Neisseria meningitidis
atgttaccgaatacaccgcgccgcgccgtttatgccggcagtttcgatccgcccacattggggcatctgtggatgatacggcaggcgcaatctatgtttgacgaactcatcgtcgccatcggcattaaccccgacaaacgcagcacctataccgtcgctgaaaggcaggatatgttgtgcgatattactaaaatgtttcccaacgtcagaaccgatgtatttgaaaaccgatttctggtgcattacgcccgtgaggtagatgcaggattcatcgtgcgcggcatccgttctgcttcggattacgaatacgaacgttccatgcgccacatcaacagcgacctcgcccccgaaatatccaccgtattcctcatgccgccgcgcgaaatcgccgaagtgtcgtccactatggtcaaaggactggtcgggccggaaggctggacggaaacgatccaccgctacgtgccgcaagctgtgtacgaaaaaatccttgccgaacatcaacacgaaaattga

SEQ ID NO: 49061 - DNA, 684 bp, Neisseria meningitidis
atgtttgcccttttggaagccttttttgtcgaatacggctatgcggccgtgtttttcgttttggtcatctgcggtttcggcgtgccgattcccgaggatttgaccttggtaacaggcggcgtgatttcgggtatgggttataccaatccgcatattatgtttgcagtcggtatgctcggcgtgttggcgggcgacggcatcatgttcgccgccggacgcatctgggggcagaaaatcctcaagttcaaaccgattgcgcgcatcatgacgccgaaacgttacgcacaggttcaggaaaaattcgacaaatacggcaactgggttctgtttgtcgctcgtttcctgccgggtttgcggactgccgttttcgttaccgccggcatcagccgcaaagtatcgtatctgcgctttctgattatggacgggcttgccgcgctgatttccgtgcccgtttggatttacttgggcgagtacggcgcgcacaacatcgattggctgatggcgaaaatgcacagcctgcaatccggcatcttcatcgcattgggcgtgctggcggcggcgctggcgtggttctggtggcgcaaacgccgacattatcagctttaccgcgcacaattgagcgaaaaacgcgccaaacgcaaggcggaaaaggcagcgaaaaaagcggcacagaagcagcagtaa

SEQ ID NO: 49062 - DNA, 1170 bp, Neisseria meningitidis
atggacaacgaattgtggattatcctgctgccgattatccttttgcccgtcttcttcgcgatgggctggtttgccgcccgcgtggatatgaaaaccgtattgaagcaggcaaaaagcataccgtcgggattttataaaagtctggatgccttggttgaccgcaacagcggacgtgccgccagggaattggcagaggtcatcgatcagcagcctcagtcatacgacctgaacctcaccctaggcaagctttaccgtcagcgtggcgaaaacgacaaagccatcaatatgcaccaaacattgcttgactctcccgatacaaccggagccaagcgcgcgcgcgtcctgtttgaattggcgcaaaactaccaaagtgcggggttggtcgatcgtgccgaacagatttttttggggctgcaagacggtaaaatggcgcgtgaagccagacagcacctgctcaatatctaccaacaggacagggattgggaaaaagcggttgaaaccgcccggctgctcagccatgacgagcagacctatcagtttgagattgcacagttctattgcgaacttgcccaagccgcgctgttcaagtccaatttcgatgccgcgcgtttcaatgtcggcaaggcactcgaagccaacaaaaaatgcacccgcgccaacatgattttgggcgacatcgaacaccgacaaggcaatttccctgccgccgtcgaagcctatgccgccatcgagcagcaaaaccatgcatacttgagcatggtcggcgagaagctttacgaagcctatgccgcgcagggaaaacctgaagaaggcttgaaccgtctgacaggatatatgcagacgtttcccgaacttgacctgatcaatgtcgtgtacgagaaatccctgctgcttaagggcgagaaagaagccgcgcaaaccgccgtcgagcttgtccgccgcaagcccgaccttaacggcgtgtaccgcctgctcggtttgaaactcagcgatatgaatccggcttggaaagccgatgccgacatgatgcgttcggttatcggacggcagctacagcgcagcgtgatgtaccgttgccgcaactgccacttcaaatcccaagtctttttctggcactgccccgcctgcaacaaatggcagacgtttaccccgaataaaatcgaagtttaa

SEQ ID NO: 49063 - DNA, 279 bp, Neisseria meningitidis; identical to SEQ ID NO: 38900

SEQ ID NO: 49064 - DNA, 846 bp, Neisseria meningitidis; identical to SEQ ID NO: 44327

SEQ ID NO: 49065 - DNA, 540 bp, Neisseria meningitidis; identical to SEQ ID NO: 44661

SEQ ID NO: 49066 - DNA, 477 bp, Neisseria meningitidis; identical to SEQ ID NO: 46371

SEQ ID NO: 49067 - DNA, 828 bp, Neisseria meningitidis
atgccggaattgccggaagtggaaacgacgttgcgcggcatcgcgccgcatattgaagggaaaacggtggaagccgtggtattgcgccaattgaagctgcgctggcagatcaatcccgatttgggggagattttgtccggtcggcaggttttgtcctgcggcaggcgtgccaaatatctgattgtccgtttccaaacggggattttgctgattcacttggggatgtcgggcagcttgcggatttttacgccgtcggacggacgtatcggcaggccggacagacacgatcacgtcgatattgtgttttcagacggcacggtcatgcgttaccgcgatccgagaaagttcggcgcgatactttggtatgagggaatcgaagaacatcatccgctgttggaaaaactggggccggagcctttgtcggaggcattttgtgcggattatctgtatgtgaggctgaaggcgcagaaacgcgcggtcaaacttgccctgatggacaatgcggtcgtggtcggtgtgggcaacatttatgccaacgagagcctgttcagagcgggcatttcgccccaccgtcctgccaaccgtctgaaaaagaaagagtgtgcgcttttggttgaaaccgtcaaagcggtgttgcggcgcgccattgaaacgggcggcagtaccttgagggattttgtggacagcgacggcaaaagtggctacttccaacaggaatatacggtgtacgggcggcacaatcagccgtgcccccagtgcggcggtttggttgtgaaagaaactttggggcagcgcggcacgttttactgcccgaattgtcagaaatag

SEQ ID NO: 49068 - DNA, 360 bp, Neisseria meningitidis
ttggagttctcgatgaatcgaacaaaaacgtgtaaggagtgcggagagattaagccgataacggcgtttccgaaaaacggctttgacagaaaaaccgggctgcaaaaatacgcgccccgatgccgccgatgccacaacgtctatcagcaagatttgctgtacaagcgccgtgaaaaagaatttgagcaaaagcaggcagtcatggctgcattgatggacgccgagcgcgaaaaagaggaggcagctaaggcgcgaagcatcgcacaaagcctcgtgttggcgaaagcagcctgtccgatactgcacatcggcttgtggactgagccgttatttatccctcaagggatgttacagatttaa

SEQ ID NO: 49069 - DNA, 6081 bp, Neisseria meningitidis
atgaataaaggtttacatcgcattatctttagtaaaaagcacagcaccatggttgcagtagccgaaactgccaacagccagggcaaaggtaaacaggcaggcagttcggtttctgtttcactgaaaacttcaggcgacctttgcggcaaactcaaaaccacccttaaaaccttggtctgctctttggtttccctgagtatggtattgcctgcccatgcccaaatcaccaccgacaaatcagcacctaaaaaccagcaggtcgttatccttaaaaccaacactggtgcccccttggtgaatatccaaactccgaatggacgcggattgagccacaaccgctatacccagtttgatgtcgacgctaaaggtgctgtactgaacaacgatcgcaacaacaacccgtttctggccaaaggcagtgcgcagttgattttgaacgaggtgcgcggtgcggccagcaaactcaatggcatcgttaccgtaggtggtcaaaaggccgatgtgattattgccaaccccaacggcattaccgttaatggcggcggctttaaaaatgtcggtcggggcatcttaactaccggtgcgccccaaatcggcaaagacggtgcactgacaggatttgatgtgcgtcaaggcacattgaccgtaggagcagcaggttggaatgataaaggcggagccgactacaccgagatacttgctcgtgcagttgctttgcaggggaaattacagggtaaaaacctggcggtttctaccggtcctcagaaagtagattacgccagcggcgaaatcagtgcaggtacggcagcgggtacgaaaccgactattgcccttgatactgccgcactgggcggtatgtacgcagacagcatcacactgattgccaatgaaaaaggcgtaggcgtcaaaaatgccggcacactcgaagcggccaagcaattgattgtgacttcgtcaggccgcattgaaaacagcggccgcatcgccaccactgccgacggcaccgaagcttcaccgaattatctctccatcgaaaccaccgaaaaaggagcggcaggcacatttatctccaatggtggtcggatcgagagcaaaggcttattggttattgagacgggagaagatatcagcttgcgtaacggagccgtggtgcagaataacggcagtcgcccagctaccacggtattaaatgctggtcataatttggtgattgagagtaaaactaatgtgaacaatgccaaaggctcggctaatctgtcggccggcggtcgtactacgatcaatgatgctactattcaagcgggcagttccgtgtacagctccaccaaaggcgatactgaattgggtgaaaatacccgtattattgctgaaaacgtaaccgtattatctaacggtagtattggcagtgctgctgtaattgaggctaaagacactgcacacattgaatcgggcaaaccgctttctttagaaacctcgaccgttgcctccaacatccgtttgaacaacggtaacattaaaggcggaaagcaggtggtactgatggctgatggcgacattcaggcaaaagcctccaatctgaatgcatccggcaatctgtatattcatgcaggtaaggatctggatttgaatgccgataaagacttatcaacacaaagtatcagcctgagggcagacaacaccgccctcatcagtagcaacggtaacaccttgactgcagaaaagaatctggatattcaggcaggtagcttgagtgtgcgtcaaagtaatctgcaatccagtggcggtaatgtgcagatgagcgcgactaaaggcaacatcagcttgaatcagagttggataaatgccagtcagaatattgatacggcagcacttcaaggcaatattatttcagacggtctgactgctgttgccgaagttggacgcgtatctcttcttgccaacggcaatgttgatttcaacggtctaaataccttgattgcggaaggagacattaatgctggttcagtcggtaaaggccgtctgaaaatggacaataccgatatttatgcttctgcaggcgatgtgaaactggttgccggaggtcaattagatttaggcaacggcaccgttaacggcggtcatatcagcttagacagcaataaaggcagcatggtggtgcaggatgtacacctgaatgcccgcgcatcactgaaagtggatgcggatcaaactttaaccattaataacagcaagctcaattccggtcacaatacccagattaatacaaatcatggtcatatgacgcttaatcagcttgatgctcattcacgtcgtcatatgagtatcagtgcacagggtaaaggcaaaggaaaagacagcggtcaaattttacaaaacgaccagcaaaacagtaaaagtactttggcggcagatggtgtattgtcattgaacagcagcgcattacaggttttggacaatactaccctgcgcggtggcgcgataaacatcaaagctggcggaggcatcatcaaacggggctatatcgattgggaaacccaagatacggctactatgcgttcagcggaactgaaaccactgtctggtatgatgtcgatagaatcgggcggtgataaccctttaaccgttgaacccggtaaccgtatcgtttctgcaggtgatttggccgtgaaccacaacggcacattccaaatcagtgccagagcaggaaataacggcaatccgagtgcgcaaacagccagcgtttcagctaaaggcaatatcgggattgtggcgggagaggtggatattgatgcagcaaatattgccgcagggaaagatttggctttagtggcaactaaagggaatatttcactaaacagtattaggaatacgtttagtaactatcaattgaaaacagataaacacaatatcacacagcaacttactgatgtagagcaggagcttagtaagttaacgagcgatcctaaatatcgtaaagcacaggatcttccacaaatgttgaggcgtaaatataagaggcgtgacaaagtattcggtgatagtgaggccagattacgtggtttacgagcagagataaatgctgctgatgaggcttgggcagaactccaatccccagtaaaagcgttacttgaacgtaaacaattgttacaacaagcccttttaacagtttcccaaccgggtagtggtcacgaaaaccaaggtagcacccttagcggtcaaaatatcaaactgctcgctgcaggtggtatccgtatccagggctccaaagttgctgccacccaacaggcaaatatccaagctgcaggatttttacctgcaccagccgcagaggaactgcaagaaggtcgacttcaatcagccattgacatcagcggtgtatttgatacttttgaatatggtcagcaaggcagcgataaatacggctatgccattttcagcaggccatctgaaatttcaggaaaaacaggtgttaccctctctgcaccaaatgccaatgagaacagccgcatcagtctgagtgcggcaaacatcgaagctgaaaacggcaaaatcaaactgcaatcctacggcgaccaatcctattacgccgggcagggcgaactctataccttagaacgccgcagctacaaaaccggcaaatggtacaaccgcaaacacattaccgaagtcaaagaacacaaaaacgccaagcccgacgcagtaaacctcagcgcatcccaaggcatcgacatcaaatctggtggcaacatcgacgcctacgccaccgcattcgatgcccccaaaggcagcattaacatcgaagccgggcggaaattgacactctatgccgtagaagagctcaactacgacaaacttgacagccaaaaaaggcgcagatttctcggcatcagctacagcaaagcacacgacaccaccacccaagtcatgaaaaccgcgctgccctcaagggtagttgcagaatcagccaacctccaatcgggctgggataccaaactgcaaggcacacagtttgaaaccacactgggtggcgcaaccatacgcgcaggcgtaggcgagcaggcacgggcagatgccaagattatcctcgaagggatcaaaagcagcatccacacagaaaccgtgagcagcagcaaatctgctctatggcaaaaacaggcaggacggggcagtaacatcgaaaccttgcaattgccgagtttcaccggtcccgttgcgcccgtactgtccgctcccggcggctatatcgtcgacattccgaaaggcaatctgaaaaccgaaatcgaaaagctgtccaaacagcccgaatacgcctacctgaaacagcttcagacggccaagaacgtcgattggaaacaggtgcagctggcctacgacaaatgggactataaacaggaaggcttgaccggagccggtgcagcgattgtggtgattattgtaaccgctctaacttatggatacggagcggctgcagcgggtagcgtaactgccgcaggaagtagtacagccgcagctgcaacaacgacagcggcagcaactaccactgtttctactgcagctgccatgcaaaccgcagctttagcctccttgtatagccaagcagctgtagccatcatcaataataaaggcgatgtaggcaaagcattaaaagatctcggcaccagtgatacggtcaagcagattgttacttccgcactgacggcgggtgcattaaaccagatgggagcagatattgcccaattgaacagcaaggtaagaaccgaactgttcagcagtacgggcaatcaaaccattgccaaccttggaggcagattggccaccaacctcagcaatgcaggtatctcagctggtatcaataccgccgttaacggcggcagcttgaaagacaacttaggcaatgccgcattgggagcattggttaatagcttccaaggggaagccgccagcaaaatcaaaacaaccttcagcgacgattatgttgccaaacagttcgcccacgctttggcgggttgtgttagcggactggtacagggaaaatgtaaagatggggcaattggcgcagcagttggggaaatcgtagctgaatccatacttggcggcagaaaccctgctacactcagcgatgcagaaaagcataaagttatcagttactcgaagattattgcgggcagcgtggcggcactcaacggcggcgatgtgaatactgaggcgaatgcggctgaggtagctgtggtgaataatgctttgaattttgacagcacccctaccaatgcgaaaaagcatcaaccgcagaagcccgacaaaaccgcactggaaaaaatcatccaaagtattatgcctgcacatgcggcaggtgcgatgactaatccgcaggataaggatgctgccatttggataagcaatatccgtaatggcatcacaggcccgattgtgattaccagctatggagtttatgcagcaggttggacagctccgctgatcggtacagctggtaaagcagctatcagcacctgtatggctaatccttctggttgtactgtcatggttacgcaggctgctgaagcgggcgcgggaatcgccacgggtgcggtaacggtaggcaacgcttgggaagctccagtaggagcgttgtcgaaagcgaaggcggctaagcaggctataccaacccagacagttaaagaacttgatggcttactacaagaatcaaaaaatataggtgctgtaaatacacgaattaatatagcgaatagtactactcgatatacaccaatgagacaaacgggacaaccggtatctgctggctttgagcatgttcttgaggggcacttccataggcctattgcgaataaccgttcagtttttaccatctccccaaatgaattgaaggttatacttcaaagtaataaagtagtttcttctcccgtatcgatgactcctgatggccaatatatgcggactgtcgatgtaggaaaagttattggtactacttctattaaagaaggtggacaacccacaactacaattaaagtatttacagataagtcaggaaatttgattactacatacccagtaaaaggaaactaa

SEQ ID NO: 49070 - DNA, 936 bp, Neisseria meningitidis; identical to SEQ ID NO: 39398

SEQ ID NO: 49071 - DNA, 1218 bp, Neisseria meningitidis
atgaaacactttccatccaaagtactgaccacagccatccttgccactttctgtagcggcgcactggcagccacaaacgacgacgatgttaaaaaagctgccactgtggccattgctgctgcctacaacaatggccaagaaatcaacggtttcaaagctggagagaccatctacgacattgatgaagacggcacaattaccaaaaaagacgcaactgcagccgatgttgaagccgacgactttaaaggtctgggtctgaaaaaagtcgtgactaacctgaccaaaaccgtcaatgaaaacaaacaaaacgtcgatgccaaagtaaaagctgcagaatctgaaatagaaaagttaacaaccaagttagcagacactgatgccgctttagcagatactgatgccgctctggatgcaaccaccaacgccttgaataaattgggagaaaatataacgacatttgctgaagagactaagacaaatatcgtaaaaattgatgaaaaattagaagccgtggctgataccgtcgacaagcatgccgaagcattcaacgatatcgccgattcattggatgaaaccaacactaaggcagacgaagccgtcaaaaccgccaatgaagccaaacagacggccgaagaaaccaaacaaaacgtcgatgccaaagtaaaagctgcagaaactgcagcaggcaaagccgaagctgccgctggcacagctaatactgcagccgacaaggccgaagctgtcgctgcaaaagttaccgacatcaaagctgatatcgctacgaacaaagataatattgctaaaaaagcaaacagtgccgacgtgtacaccagagaagagtctgacagcaaatttgtcagaattgatggtctgaacgctactaccgaaaaattggacacacgcttggcttctgctgaaaaatccattgccgatcacgatactcgcctgaacggtttggataaaacagtgtcagacctgcgcaaagaaacccgccaaggccttgcagaacaagccgcgctctccggtctgttccaaccttacaacgtgggtcggttcaatgtaacggctgcagtcggcggctacaaatccgaatcggcagtcgccatcggtaccggcttccgctttaccgaaaactttgccgccaaagcaggcgtggcagtcggcacttcgtccggttcttccgcagcctaccatgtcggcgtcaattacgagtggtaa

SEQ ID NO: 49072 - DNA, 639 bp, Neisseria meningitidis; identical to SEQ ID NO: 38964

SEQ ID NO: 49073 - DNA, 1140 bp, Neisseria meningitidis
atgaaaaaaacactggtggcggcggcgatcctgagcctcgccttgactgcgtgcggcggcggaagcgataccgccgcccaaaccccctccgccaagcccgaagccggacaatcgggcaaactcaatatctacaactggtcggattatgtcgatcccgaaaccgtcgccgcctttgaaaaagaaaccggcatcaagacgcgttccgattattacgacagcaacgaaacactggaggcaaaagtcctgaccggcaaatccggctacgacctgaccgcgccgtccatcgccaacgtcggccggcaaatcaaagcgggtgcgtatcagaaaatcgacaaggcgcaaatcccccattacggcaacatcgataaagatttgctgaaaatgatggaagccgtcgatccgggcaacgaatatgccgtgccttatttctggggaatcaatactttggcaatcaatacccagcaggtgaaaaaggcattgggtacggacaagctacccgaaaacgagtgggatttggtgttcaaacccgaatacaccgccaaactcaaatcctgcggcatcagctatttcgacagcgcaatcgaacagattcccttggcgttgcactatttgggcaaagaccccaacagtgaaaatcctgaagacatcaaagccgccgtcgatatgatgaaagccgtccggggcgacgtgaaacgcttcagctcttccggctatatcgacgatatggcggcgggcaacctgtgtgccgccattggttacggcggcgatttgaacattgccaaaacccgtgccgaagaagccgcaaacggcgtggaaatcaaagtattgaccccgaaaaccggcgtgggcgtgtgggtggattcctttatgattccgcgcgacgcgcaaaacgttgccaacgcccaccgctatatcgactacacgctccggcccgaggtggcggcgaaaaacggcagcttcgttacctacgcgcccgccagccgtcccgcgcgcgagctgatggatgaaaaatacacctccgacgcatcgattttcccgaacaaagaactgatggaaaaaagtttcatcgtatcgcccaaatccgcagaatccgccaaattgggcgtgaagctgtggcaagggctcaaagcgggcaaataa

SEQ ID NO: 49074 - DNA, 546 bp, Neisseria meningitidis; identical to SEQ ID NO: 46007

SEQ ID NO: 49075 - DNA, 1107 bp, Neisseria meningitidis
atgtctctttatccgatttacaatttttccgccggccctgccgtattgcccgaagccgtgttggaaacggcgcggcaggaaatgttggactacaacggtacgggttttcccgtgatggcgatgagccaccgttcggaaatgtttttgagcatcctgcatcatgcggaacaggatttgaggcagcttttgaaagtgcctgacaactataagatattgtttctgcagggcggagcaacaacccaatttaatatggcagccatgaatctggcacacggtttccgcactgccgacgcggtggtaacgggcaactggagccgtatcgcttatgaacagatgagccgtttgaccgatacggaaatccgtttggcggcgcatggcggcgagcagttcgactatctcgacctgccgcctgtggaaacgtgggatgttgcacccgattcggcgtttgtccattttgccgtcaatgaaacggtcaacgggctgcaataccgtgaagtgccgcgcctttcagaaggcatgccgccgctggtgtgcgatatgtccagcgagattttgtcgcgcgagtttgatgttgccgactacggactgatttacgcaggcgcacagaaaaacatcggcccggcaggggttacggtggtgattgtgcgtgaggatttgctcgagcgttgtccgaacgatattcccgatgtgttcaactaccgttcgcatttgaaccgcgaaggtatgtacaacacgccgtcaacttacgcgatttatatgtcggggctggtgttccgctggctgcaggcgcagggcggtgtgaaaaaaattgaagcggtcaatcggctgaaggcgcaaaccttgtatgagacgatagatggcagcggcggtttctatatcaaccgtatccgtccgaatgcgcgttctaaaatgaatgtcgtgttccaaacgggggatgaggagcttgaccgccgttttgtgctggaagccgaattgcagggcttgtgcctgttgaagggctataagtctgtcggtgggatgcgcgccagcatttataatgcgatgccgcttgaaggcgtgcgggctttggcagattttatgcgcgatttccaacggcgttacggttga

SEQ ID NO: 49076 - DNA, 2121 bp, Neisseria meningitidis; identical to SEQ ID NO: 39829

SEQ ID NO: 49077 - DNA, 171 bp, Neisseria meningitidis; identical to SEQ ID NO: 38633

SEQ ID NO: 49078 - DNA, 1056 bp, Neisseria meningitidis; identical to SEQ ID NO: 38549

SEQ ID NO: 49079 - DNA, 225 bp, Neisseria meningitidis; identical to SEQ ID NO: 39134

SEQ ID NO: 49080 - DNA, 1008 bp, Neisseria meningitidis
atgagcaccttcttccggcaaaccgcccaagccatgattgccaaacacatcgaccgtttcccgctattgaaattggaccgggtgattgattggcagccgatcgaacaatacctgaatcgtcaaaaaacccgttaccttagagaccaccgcggccgtcccgcctacccgctgttgtccatgttcaaagccgtcctgctcggacaatggcacagcctctccgatcccgaactcgaacacagcctcatcacccgcatcgatttcaacctgttttgccgttttgacgaactgagcatccctgattacagcaccttatgccgctaccgcaattggctggcgcaagacgacaccctgtccgaattgctggaactgattaaccgacaactgaccgaaaaaggcttaaaagtagagaaagcatccgccgccgtcattgacgccaccattattcagaccgccggcagcacacagcgtcaggccatagaagttgacgaagaaggacaaatcagcggccaaaccacaccgagtaaggacagcgatgcccgttggataaagaaaaacggcctctacaaactcggttacaaacaacatacccgtaccgatgcggaaggctatatcgagaaactgcacattacccccgccaatgcccatgagtgcaaacacctgtcgccgttgttggaagggttacccgaaggtacgaccgtctatgccgacaaaggctacgacagtgcggaaaaccggcaacatctggaagaacatcagttgttggacggcattatgcgcaaagcctgccgcaaccgcccgctgtcggaagtgcaaaccaaacgcaaccgatatttgtcgaagacccgttatgtggtcgaacaaagcttcggtacgctgcaccgtaaattccgctatgcgcggtcaacctatttcggactgattaaagtgagtgcgcaaagccacctgaaggcgatgtgtttgaacctgttgaaagccgccaacaggctaagtgcgcccgctgccgcctaa

SEQ ID NO: 49081 - DNA, 498 bp, Neisseria meningitidis; identical to SEQ ID NO: 39310

SEQ ID NO: 49082 - DNA, 3435 bp, Neisseria meningitidis
atgaccgagccgacctacatccccctgcgcctgcataccgaattttcgattaccgacggtatggtgcggattaaaaaactgattgccaaagcgcaggaatacggtttgcctgctttgggcatcagcgatttgatgaacgaattcggtttggtgaaattttataaagcctgccgcagcgcggggattaagcccgtcggcgcggcggacgtatggataggcaatccggatgcgcccgacaagccgttccgtgctatgctgattatccgcaacgatgcgggctatctgcgcttgagcgagcttttgacggcggcttatgtcggcaaagaccgcaatgtccatcatgcggaactcaatcccgaatggctggaaaacggcgacaacagcggcttgatttgtttgagcggcgcgcattacggcgaagtgggcgtgaatctcttgaacggcaacgaagacgcggcgcgggcggcggcgttgaaatatgcggcgtggtttcccgatgcgttttatctggagttgcaacgcctgcccgagcgtcccgaatgggaggcttgcgtttcgggcagcgtgaagctggcggaggaactgggtttgccggtggtggcgacgcatccgacgcagtttatgagccgcgacgatttcaacgcgcacgaggcgcgggtgtgtatcgcaggcggctgggtattgacggacaagaaacgtccgcgcgatttcacaccgagccagtttttcattccgccggaaacgatggccgaacgtttcgccgatttacccgaagccctcgaaaacacggtggaaattgccaaacgctgcaatctgcacatcacattgggcaaaaacttcctgccccttttccccacgcccgacggtttatcactcgatgactatctcatcaaactctccaatgagggcttgcaggaacgcatggttcagctttatcccgacgaggcggagcgtgcggaaaaaatgccggaatatcaggaacgtttggattttgagctgaacatcatcatccagatgaaattccccggctatttccttatcgtacaagactttatcaactgggcgaaaacacacggctgcccggtcgggccgggacgcggttcgggcgcgggttcgctggtggcgtattcgctgaagattaccgacctcgatccgctgaaatacgcgctgctgttcgagcgtttcctaaaccccgaacgcgtttctatgcccgacttcgacgtggacttctgtcaggcaaaccgcggccgcgtgattgaatatgtacgcgaaaaatacggtgcggaagcagtcagccagattgttaccttcggcacgatgtcgtccaaagcagtgattcgcgacgtggggcgcgtactggaactgccgtttatgctgtgcgacaaactgtccaagctgattccgttggaagccaacaaacctttgggtttggacgacgcgatgaaggcggagccgcagattcaggaattaatcgaagcggaagaagcggacgaactgattacgctggcgaaaaagctggaagatttgacgcgcggtttgggtatgcacgcgggcggcgtgttgattgcgccgggcaagatttccgattacagccccgtgtatcaggcggacgaatccgcctcgcccgtatccatgtacgacaagggcgacgtggaagacgtgggtttggtgaaattcgactttttaggtctgcgcaacctgaccatcatcgaaatggcgcagaacaacatcaaaaacaccaccggcgacatcatcgatgtcggcaaaattccgcttgacgaccaggttgcctaccaaatcttccgcgatgcgaacaccaccgccgtgttccagttcgagtcgacaggcatgaagaaaatgctgaaaacggcgcatacgaccaagtttgaagaactgattgccttcgtatcgctctaccgacccggcccgatggacaatattcccgacttcgtcgcgcgtatgaaaggtcaggaattccaatacatccacccgctactcgaaggcatcctcgcaccaacctacgggattatggtgtatcaggaacaagtgatgcaggcggcgcagattatcggcggctactcgctcggcggcgcggacctgctgcgccgcgccatgggtaagaaaaagcccgaagaaatggtgaaacaccgcgaaatcttcgccgaaggcgcggcaaaacaaggcatttcgcgcgaaaaatccgacgaaatcttcaactacatggaaaaattcgccggctacggtttcaacaaatcccacgctgccgcctacgccctgatttcctaccagaccgcatggctcaaagcccactaccccgccgaatttatggcggcgaccatgtcgtctgaattggacaacaccgaccagctcaagcatttctacgacgactgccgtgccaacggcatcgagttcctgccgcctgacatcaacgaatcagactaccgcttcacgccgtatccgaacatgaaaatccgctacgcgctcggcgcgattaaaggcacgggcgaagccgccgtcgaatccatcaccgccgcgcggcaaagcggcggcaagtttaccggcctcttggacttctgtgagcgcgtcggcaaagaacacatgaaccgccgcaccctcgaagctctgatacgcggcggcgcattcgacagcatcgaacccaaccgcgccatgctcttggcgaacatcgacctcgctatggacaacgccgaccaaaaagccgccaacgccaatcagggcgggcttttcgacatgatggaagacgccatcgaaccggtgcggctcatcgacgcgccgatgtggagcgaatcggaaaaactcgccgaagaaaaaaccgtcatcggcttttacctgtccggccacccgttcggcccgtatgcccaagaagtccgccaaatcgccccgcagaaactgtcgaaactcaaaccgcaagacagcgtgcgcctcgccggattcgttaccgccgtacgcaccatgatgggcaagcgcggcaaaatcgccttcgtcagccttgaagatttgagcggacaggttgaaatcatggtcggcggtcagacgctggaaaactgcgccgactgcctcaaagccgaccaagtgctgattatcgaatccaaagtcagccgcgacgactacggcggcggcgacggactgcgtattctggcaaaccaagtcatgaccctgcaaacggcacgcgaacgctacgcccgcagcctcagcctcgccctcgccccgcatcacgacatcggcggactggtacaactgctcgccgcccaccaactgcccgacacgccgcgcatcccgctgcaactgtcgtatgccaacgaaaaagcgtcgggcaggcttcaagtgccgccgaaatggacggttacaccgagctccgcattgttcggcgaactggaaacattgctcggcagccggtcggtgcgcgtcaactggtaa

SEQ ID NO: 49083 - DNA, 141 bp, Neisseria meningitidis
gtggtattaggtataagcgaagaagatggtataatctatggctatactattttactttttgatataaaatattgtatatatatagataagaaatatattataccgactggaaaaaaattctctcgcgatgatttttattag

SEQ ID NO: 49084 - DNA, 582 bp, Neisseria meningitidis
atgaaacataccgtatccgcatcggtcatcctgcttttgaccgcttgcgcgcaattgcctcaaaataacgaaaacctgtggcagccgtccgaacacacccgcagtttcacggcggaagggcggttggcagtgaaagcggaagggaaaggttcgtatgcaaatttcgattggacataccaaccgcccgtggaaaccatcaatatcaatacccctttgggcagtacgctcgggcagttgtgtcaagacagggacggcgcattggcagtggacggcaaaggaaatgtctatcaggcggaaagtgcggaagaattgagcaggcagctggtcggtttcaaactgccaatccaatatctgcatatctgggcagatggcaggcgtgtggcgggcgcgccttaccgcatcctgccggacggcatattggaacaatacggttggactgtcggcagaaccgccgacagtggggggcaagtccgaacgttgcaactgaataacggaaatttgaacatcaggctggttttcaccgaaatcggtatgccgtctgaaactgaaaccccggaacgctgtgcggcgcgcacgagataa

SEQ ID NO: 49085 - DNA, 1185 bp, Neisseria meningitidis; identical to SEQ ID NO: 39170

SEQ ID NO: 49086 - DNA, 702 bp, Neisseria meningitidis; identical to SEQ ID NO: 38966

SEQ ID NO: 49087 - DNA, 288 bp, Neisseria meningitidis; identical to SEQ ID NO: 39206

SEQ ID NO: 49088 - DNA, 561 bp, Neisseria meningitidis; identical to SEQ ID NO: 39760

SEQ ID NO: 49089 - DNA, 1392 bp, Neisseria meningitidis
atgcttttggttatgcgtgcgaagcagggtaagaaaacaccgaagcgcaaatcccaaggtgtcggcaatacgcaggggcagacacccggaagcaatgattcggactgggtcgatcagattggacaatcggtttcagacggcacgcaacccgactggtcttggaacgaaagtgccgagaccgcatccgccgccgtatccgcgcaagaagtcgatccgcttacggagtatcaggtttataagcaattcggttatcagggcaaggctgccgaatctttggctgcctatctggacggcattccggatggtgaagcgaaacctgaaaaccttatccgcgagctgctcgatatcaatctcgaagtgggggatgtcgatgttttggcagacaatctgcaaaaatacggcaaactgattccttccgaacttttggcaaaatatatcgaacaggcattacagcgcgattcaaaccatttgcgtatccgcgtcttggcggaagaaggtttgggatggggtactcaggagattgaaaaacgtgcggaaggcggtcctgcgacggcagcttccgcatcgcccccgccggatgccggcggtaaggcttatgaagccgaagaaatcaagcgcatcccgattgtgcggggcaaaaaagacgtgtccggaatcagtcaagaggaaatcggtgcgattgccggtttggtccgtgccgatcaaggtgcgaaaatccttaaagacaaagtcagctatgaaacggcatcgaaacaatacgaccgtgccatccaaacttccgaaaaacctgcaaacctgattatcgatgcgttgaaactcgattaccaacacgcggacatagaccgttttgccggacatttgtggaaactttaccaaacgttgggcaactacggcaggcaggttaaagagcggatgctggggtgggggtacagcttgggttaccatgaagttttcgatgatttggaaaaagggccgaacgaccggcaaatcaaagacatcggtatggggcacgggtatctgccgaaaaatatacagaaattcaaatcgcaacatcgggatttggtgcttcaagattcttcgttgatcaacaccggttcgtctccggcagacgatgcggttaaagaagtagagtcgttgctgatgtatggtcagattgaagcggcaatggatgtgttggagcaggcggtattgaaatatcccgacgagtcccagctttatattacgttgatcgatatttatgaacgtactgaagattgggataggttggggcagtttttaagggtattgagggaacgtgcggacaggcttcctgaagaggtcgttatgctgatgagccggctgctgcagcgtatgaatcaaaatattaaaaaaataaaacggtacggaaaataa

SEQ ID NO: 49090 - DNA, 759 bp, Neisseria meningitidis; identical to SEQ ID NO: 39022

SEQ ID NO: 49091 - DNA, 966 bp, Neisseria meningitidis; identical to SEQ ID NO: 39761

SEQ ID NO: 49092 - DNA, 939 bp, Neisseria meningitidis; identical to SEQ ID NO: 38569

SEQ ID NO: 49093 - DNA, 423 bp, Neisseria meningitidis; identical to SEQ ID NO: 36840

SEQ ID NO: 49094 - DNA, 270 bp, Neisseria meningitidis; identical to SEQ ID NO: 37545

SEQ ID NO: 49095 - DNA, 429 bp, Neisseria meningitidis; identical to SEQ ID NO: 40578

SEQ ID NO: 49096 - DNA, 564 bp, Neisseria meningitidis; identical to SEQ ID NO: 36686

SEQ ID NO: 49097 - DNA, 2295 bp, Neisseria meningitidis
atgcgacgagaagccaaaatggcacaaactacactcaaacccattgttttatcaattcttttaatcagcacccccatcctcgcccaagcgcatgaaaccgagcagtctgttgacttggacgaggttaccgtcgtcggcaaaagccgtccgcgcgccacatccgggctgttgcacacttcgaccgcttccgacaaaatcctctccggcgataccttgcgccaaaaagccgtcaacttgggcgatgctttggacggcgtgccgggcattcacgcctcgcaatacggcggcggcgcgtccgctcccgttattcgcggtcaaacaggcaggcggattaaagtgttgaaccatcacggcgaaacgggcgatatggcggatttttcgcccgatcacgccattatggtagataccgccttgtcgcaacaggtcgaaatcctgcgcgggccggttacgctcttgtacagctcgggcaatgtggcggggctggtcgatgttgccgatggcaaaatccccgaaaaaatgcctgaaaacggcgtatcgggcgaactcggattgcgtttgagcagcggcaatctggaaaaactcacgtccggcggcatcaatatcggtttgggcaaaaactttgtattgcacacggaagggctgtaccgcaaatcgggggattacgccgtaccgcgttaccgcaatctgaaacgcctgcccgacagccacgccgattcgcaaacgggcagcatcgagctgtcttgggttggcgaaaaaggctttatcggcgcagcatacagcgaccgtcgcgaccaatatggtctgcctgcccacagccacgaatacgatgattgccacgccgacatcatctggcaaaagagtttgattaacaaacgctatttgcagctttatccgcacctgttgaccgaagaagacatcgattacgacaatccgggcttgagctgcggctttcacgacgacgatgatgcacacgcccatgcccacaacggcaaaccttggatagacctgcgcaacaaacgctacgaactccgcgccgaatggaagcaaccgttccccggttttgaagccctgcgcgtacacctgaaccgcaacgactaccgccacgacgaaaaagcaggcgatgcagtagaaaacttttttaacaaccaaacgcaaaacgcccgtatcgagttgcgccaccaacccataggccgtctgaaaggcagctggggcgtgcaatatttgggacaaaaatccagtgctttatctgccacatccgaagcggtcaaacaaccgatgctgcttgacaataaagtgcaacattacagctttttcggtgtagaacaggcaaactgggacaacttcacgcttgaaggcggcgtacgcgtggaaaaacaaaaagcctccatccgctacgacaaagcattgattgatcgggaaaactactacaaccatcccctgcccgacctcggcgcgcaccgccaaaccgcccgctcattcgcactttcgggcaactggtatttcacgccacaacacaaactcagcctgaccgcctcccatcaggaacgcctgccgtcaacgcaagagctgtacgcacacggcaaacacgtcgccaccaacacctttgaagtcggcaacaaacacctcaacaaagagcgttccaacaatatcgaactcgcgctgggctacgaaggcgaccgctggcaatacaatctggcactctaccgcaaccgcttcggcaactacatttacgcccaaaccttaaacgacggacgcggccccaaatccatcgaagacgacagcgaaatgaagctcgtgcgctacaaccaatccggtgcggacttctacggcgcggaaggcgaaatctacttcaaaccgacaccgcgctaccgcatcggcgtttccggcgactatgtacgaggccgtctgaaaaacctgccttccctacccggcagggaagacgcctacggcaaccgcccactcattgcccaagccgaccaaaacgcccctcgcgttccggctgcgcgcctcggcgtccacctgaaagcctcgctgaccgaccgcatcgatgccaatttggactactaccgcgtgttcgcccaaaacaaactcgcccgctacgaaacgcgcacgcccggacaccatatgctcaacctcggcgcaaactaccgccgcaatacgcgctatggcgagtggaattggtacgtcaaagccgacaacctgctcaaccaatccgtttacgcccacagcagcttcctctctgatacgccgcaaatgggccgcagctttaccggcggcgtgaacgtgaagttttaa

SEQ ID NO: 49098 - DNA, 198 bp, Neisseria meningitidis; identical to SEQ ID NO: 36305

SEQ ID NO: 49099 - DNA, 216 bp, Neisseria meningitidis; identical to SEQ ID NO: 39553

SEQ ID NO: 49100 - DNA, 2037 bp, Neisseria meningitidis
atgactgacaacgcactgctccatttgggcgaagaaccccgttttgatcaaatcaaaaccgaagacatcaaaccctccctgcaaaccgccattgccgaagcgcgcgaacaaatcgccgccatcaaagcccaaacgcacaccggctgggcaaacactgtcgaacccctgaccggcatcaccgaacgcgtcggcaggatttggggcgtggtgtcgcacctcaactccgtcgccgacacgcccgaactgcgcgccgtctataacgaactgatgcccgaaatcaccgtcttcttcaccgaaatcggacaagacatcgagctgtacaaccgcttcaaaaccatcaaaaactcccccgagttcgacaccctctcccccgcgcaaaaaaccaaactcaaccacgatctgcgcgatttcgtcctcagcggcgcggaactgccgcccgaacagcaggcagaactggcaaaactgcaaaccgaaggcgcgcaactttccgccaaattctcccaaaacgtcctagacgcgaccgacgcgttcggcatttactttgacgatgccgcaccgcttgccggcattcccgaagacgcgctcgccatgtttgccgctgccgcgcaaagcgaaggcaaaacaggctacaaaatcggtttgcagattccgcactacctcgccgtcatccaatacgccgacaaccgcgaactgcgcgaacaaatctaccgcgcctacgttacccgcgccagcgaactttcagacggcggcaaattcgacaacaccgccaacatcgaccgcacgctcgcaaacgccctgcaaaccgccaaactgctcggcttcaaaaactacgccgaattgtcgctggcaaccaaaatggcggacacgcccgaacaagttttaaacttcctgcacgacctcgcccgccgcgccaaaccctacgccgaaaaagacctcgccgaagtcaaagccttcgcccgcgaaagcctgaacctcgccgatttgcaaccgtgggacttgggctacgccagcgaaaaactgcgcgaagccaaatacgcgttcagcgaaaccgaagtcaaaaaatacttccccgtcggcaaagtattaaacggactgttcgcccaaatcaaaaaactctacggcatcggatttaccgaaaaaaccgtccccgtctggcacaaagacgtgcgctattttgaattgcagcaaaacggcgaaaccataggcggcgtctatatggacctctacgcccgcgaaggcaaacgcggcggcgcgtggatgaacgactacaaaggccgccgccgtttttcagacggcacgctgcaactgcccaccgcctacctcgtctgcaacttcgccccacccgtcggcggcagagaagcgcgtttgagccacgacgaaatcctcatcctcttccacgaaaccggacacgggctgcaccacctgcttacccaagtggacgaactgggcgtatccggcatcaacggcgtagaatgggacgcggtcgaactacccagccagtttatggaaaatttcgtctgggaatacgacgtcttggcacaaatgtcagcccacgaagaaaccggcgttcccctgccgaaagaactcttcgacaaaatgctcgccgccaaaaacttccaacgcggtatgttcctcgtccgccaaatggagttcgccctctttgatatgatgatttacagcgaagacgacgaaggccgtctgaaaaactggcaacaggttttagacagcgtgcgcaaaaaagtcgccgtcatccaaccgcccgaatacaaccgcttcgccttgagcttcggccacatcttcgcaggcggctattccgcaggctattacagctacgcgtgggcggaagtattgagcgcggacgcatacgccgcctttgaagaaagcgacgatgtcgccgccacaggcaaacgcttttggcaggaaatcctcgccgtcggcggatcgcgcagcgcggcagaatccttcaaagccttccgcggacgcgaaccgagcatagacgcactcttgcgccacagcggcttcgacaacgcggcttga

SEQ ID NO: 49101 - DNA, 336 bp, Neisseria meningitidis; identical to SEQ ID NO: 37051

SEQ ID NO: 49102 - DNA, 726 bp, Neisseria meningitidis; identical to SEQ ID NO: 39737

SEQ ID NO: 49103 - DNA, 1335 bp, Neisseria meningitidis; identical to SEQ ID NO: 38700

SEQ ID NO: 49104 - DNA, 525 bp, Neisseria meningitidis
atgaaaaaagcacttgccgcactgattgccctcgctctcccggccgccgcactggcggaaggcgcatccggcttttacgtccaagccgatgccgcacacgcaaaagcctcaagctctttaggttctgccaaaggcttcagcccgcgcatctccgcaggctaccgcatcaacgacctccgcttcgccgtcgattacacgcgctacaaaaactataaagccccatccaccgatttcaaactttacagcatcggcgcgtccgccatttacgacttcgacacccaatcgcccgtcaaaccgtatctcggcgcgcgcttgagcctcaaccgcgcctccgtcgacttgggcggcagcgacagcttcagccaaacctccaccggcctcggcgtattggcgggcgtaagctatgccgttaccccgaatgtcgatttggatgccggctaccgctacaactacatcggcaaagtcaacactgtcaaaaacgtccgttccggcgaactgtccgccggtatgcgcgtcaaattctga

SEQ ID NO: 49105 - DNA, 1338 bp, Neisseria meningitidis; identical to SEQ ID NO: 39168

SEQ ID NO: 49106 - DNA, 2019 bp, Neisseria meningitidis; identical to SEQ ID NO: 45303

SEQ ID NO: 49107 - DNA, 1488 bp, Neisseria meningitidis; identical to SEQ ID NO: 39015

SEQ ID NO: 49108 - DNA, 525 bp, Neisseria meningitidis; identical to SEQ ID NO: 39459

SEQ ID NO: 49109 - DNA, 729 bp, Neisseria meningitidis; identical to SEQ ID NO: 39209

SEQ ID NO: 49110 - DNA, 2028 bp, Neisseria meningitidis; identical to SEQ ID NO: 39197

SEQ ID NO: 49111 - DNA, 1542 bp, Neisseria meningitidis; identical to SEQ ID NO: 39823

SEQ ID NO: 49112 - DNA, 609 bp, Neisseria meningitidis; identical to SEQ ID NO: 39049

SEQ ID NO: 49113 - DNA, 1314 bp, Neisseria meningitidis
atgctgacgtttatcggactgctgattatcggggtcatcgtatggttgctgctgacggaaaaagtgtcgcccatcatcgcattaatcttggtgccgctgtttggggcgttgctggcggggtttgatgtatcccaattaaaagaattttattcgggcggcaccaaatcggtgatgcagattgtgattatgtttatgttttccattttgttttttggaatcatgaacgatgtggggctgttccgtccgatgataggcggtttgattaagctgactcggggtaatatcgtggcagtgagtgtggggacggtcttggtgtcggtggtggcgcagttggacggggcgggtgcgacgacgtttttattggtcgtccccgcccttttgccgctttacaagcgtctgcatatgaatccttacctgctgtttttgctgctgacttccagtgcgggattgattaaccttctgccgtggggcgggccgactgggcgggttgcaagcgtgttgggcgcagatgtgggcgaattgtataaacctttgttgacggtgcaaattatcggtgtagtgtttatccttgcgctgtccctgcttttgggtgtgcgtgaaaaaaggcggattgtccgggagttgggcgcgttgcccgccgtggcggatttgataaagccggtgcctttgtcggaagaagaacaaaaattggcgcgtccgaaactgttttggtggaatgtcctgctgtttttggcggcgatgagcctgcttttttcgggcatcttcccgccgggttatgtatttatgctggctgcaacggcggcgttgcttttgaattaccgcagcccgcaggaacagatggagcggatttatgcccacgccggcggcgcggtgatgatggcgtccattattttggcggcaggtacgtttttggggattttgaagggtgcggggatgttggacgcgatttccaaagacattgtgcatatcctgccggacgcgctgctgccttatctgcatattgccatcggtgtgttgggcattccgcttgagttggttttgagtacggacgcttattatttcggactgtttccgattgtggagcagattacctcgcaggcgggcgtggcgcctgaagcagcaggttatgcgatgttgatcggcagtatcgtcggcacttttgttacgccgctttcgccggctttgtggatgggcttgggtttggcgaaattgtcgatgggcaaacacatccgttattcgtttttctgggcgtggggtttgtcgctggcgatattggccagttcgatagcggcaggaatcgtgcctctgccgtaa

SEQ ID NO: 49114 - DNA, 216 bp, Neisseria meningitidis; identical to SEQ ID NO: 38155

SEQ ID NO: 49115 - DNA, 258 bp, Neisseria meningitidis; identical to SEQ ID NO: 38126

SEQ ID NO: 49116 - DNA, 1224 bp, Neisseria meningitidis
atgtctgcgcaatcacaaaacaatcatacgtccccattggtcgtcttgaccacgctgttcttcatgatgggttttattacctgcatgaacgacatccttatccctcatttgaaagaaattttcgacctgtcttacgttcaggcgatgctgatccaattctgtttctttaccgcctatgcggtgatgtccatcccgatgggggcttttgtcggcaaagtcggctacaaaaacggcgttatcggcggctttctgctgacggcggtcggatgcctgctgttttatcctgctgcgggtagccattcttacgcggtatttttgggcgcgttgtttattttggcttccggcgtaacgctgcttcaggtcgccggtaatccttatgttaccctgctggcgaaacccggcaaggaatcggcaacactgacgctggttcaggcgtttaacgctttgggtacgaccattgcgccgcaaatcggcgcgttcctgattctggcggacgcaacccaaaccgtcagcaaggcggaacagatttcttccgtacagattccctatttgggactggcggggctgctgattatccttgccgttttcgtgaaaatgatccggctgcccgacgcgcgcaaaattgccgccgaggaaagcgcgcacaaccacgacggcaaaaccagcgtatggcaatacaaacatctcgtgttcggtacggcaggcattttctgctatgtcggcgcggaggtgtctatcggttcgttgatggtcaacgtattgggttatctgaaagggctggatcatgcttctgccgcgcattacctgtcgttctattggggcggcgcgatggtcggacgtttcctcggttcggcggtgatggcgaaattcgcgcccaaccgttatttggcgtttaacgcatcggctgcggtcgtactgcttgccgtcgcgatggcgacgggtagcggcaatgcggatgtggcgatgtggtcgctgcttgccatcggttttttcaactcgattatgttcccgacgattttctctttggcaaccaaaggattgggaaaatttaccaacgcggcttccggtgtactgtgtaccgcgattgtcggcggtgcggtcgttcctgtcgtgcagggctgggtggcagatacttacaccctgatgtcttcgtttgtcgtttccgtcatctgttatctgtatatcgtgttttttgcggtgtacggatatagggcggacaaataa

SEQ ID NO: 49117 - DNA, 369 bp, Neisseria meningitidis; identical to SEQ ID NO: 39395

SEQ ID NO: 49118 - DNA, 1101 bp, Neisseria meningitidis; identical to SEQ ID NO: 45109

SEQ ID NO: 49119 - DNA, 279 bp, Neisseria meningitidis; identical to SEQ ID NO: 38216

SEQ ID NO: 49120 - DNA, 2433 bp, Neisseria meningitidis
atgcccatccccttcaaacccgtattggctgccgccgccatcgcccaagcgtttcccgcctttgcggcagaccccgcgccgcagtccgcccaaacgctgaacgaaatcaccgttaccggcacgcacaaaacccaaaaactcggcgaagaaaaaatccgccgcaaaactttagacaagctcttggtcaacgacgaacacgacctggtgcgctacgaccccggcatttccgtcgtcgaaggcggcagggcgggttctaacggctttaccatacgcggcgtggacaaagaccgcgtcgccatcaacgttgacgggctggcgcaggcggaaagccgctcttccgaagccttccaagagttgttcggcgcgtacggcaacttcaacgccaaccgcaacacctccgagccggaaaacttttccgaagtaaccatcaccaaaggcgcggactcgcttaaatccggcagcggcgcattgggcggcgcagtcaattaccaaaccaaatccgcaagcgattatgtttccgaagacaagccctaccatttggggataaagggcggcagcgtcggcaaaaacagccaaaaattcagcagcatcaccgccgccggcaggctctttggtttggatgccttattggtttatacccgccgcttcggcaaagaaaccaaaaaccgctcgactgagggcgatgtcgaaattaaaaacgacggatatgtctataacccgaccgatacaggcggacccagcaagtacctgacctatgtagccacaggggttgcgcgctcccaacccgacccacaggaatgggtaaacaaaagcaccctgttcaagctgggctacaacttcaacgatcaaaaccgtatcggctggatttttgaagactcgcgcaccgaccgttttaccaacgagctgtctaatttgtggacgggtacgaccacgtctgccgcaacgggcgactaccgccaccgccaagacgtgagctaccgccgccgctccggtgtcgaatacaaaaacgaattggaacacggcccgtgggacagccttaagctgcgctacgacaagcagcgcatcgatatgaacacttggacttgggacatcccgaaaaattacgataaaagaggcatcaacggcgaggtttaccattcgttccggcatatccgccaaaacaccgcgcaatggactgccgattttgaaaaacaactcgacttttccaaagccgtttgggcggcgcaatacggcttgggcggcggcaaaggggacaatgccaactcggattacagctatttcgcaaaactgtacgaccccaaaatcctcgcttccaaccaagccaaaatcacaatgctgatcgaaaaccggtcgaaatataaatttgcctattggaacaatgcgtttcacttgggcggcaacgaccgcttccgcctgaatgcgggcatacgctacgacaaaaacagcagcagcgcgaaagacgatccgaaatacaccaccgccatccgggggcagattccccatttgggttcggaacgcgcgcacgcgggcttcagctacggcacggggttcgactggcggtttaccaagcatctgcacttgttggcaaaatacagcaccggcttccgcgcaccgacttcggacgaaacttggctactgttcccacaccccgatttctacctgaaagccaacccaaacctgaaagccgaaaaagccaaaaactgggaattgggtctggcgggcagcggcaaagcgggcaacttcaagctctcgggcttcaaaaccaaataccgcgactttatcgaattgacgtatatgggcgtttcgtcagacgataaaaacaaccccagatacgccccgctttcagacggtacggcattggtcagctcgcccgtttggcaaaaccaaaaccgctccgccgcctgggtgaaaggcatagagtttaacggcacgtggaacctcgacagtatcggtttgcccaaagggctgcacaccggcctcaacgtcagctacatcaagggcaaggcaacgcaaaacaacggcaaagaaacgcccatcaacgcgctttcgccgtggacggcggtttacagcctgggctatgacgcgccttccaaacgctggggcatcaacgcctacgccacgcgcaccgccgccaaaaagccgtccgacaccgtccacagcaacgacgacttgaacaacccgtggccttatgccaaacacagcaaggcctatacgctgttcgacctttccgcctacctcaacatcggcaaacaggttacgctccgcgccgccgcgtacaacattaccaacaagcagtactacacttgggaatctttacgcagcatccgcgagttcggcacggtcaaccgcgttgacaacaaaacccacgccggcatccaacgctttacctcgccgggcaggagctacaatttcaccatcgaagcgaagttctaa

SEQ ID NO: 49121 - DNA, 432 bp, Neisseria meningitidis; identical to SEQ ID NO: 38610

SEQ ID NO: 49122 - DNA, 1179 bp, Neisseria meningitidis
atggaatttgtttacgacgtggcagaatcggcagtcagccctgcggtgattaaagtaatcggcttgggcggcggcggttgcaatgcaatcaataacatggttgccaacaatgtgcgcggtgtggagtttatcagtgccaatacggatgcgcagtctctggcaaaaaaccatgcggcgaagagaatccagttgggtacgaatctgacacgcggtttgggcgcgggcgcgaatcccgatatcggccgtgcggcagcccaggaagaccgggaagccattgaagaagccattcgcggtgcgaatatgctgtttatcacgaccggtatgggcggcggtaccggtaccggttccgcgccggttgttgctgagattgccaagtctttgggcattctgaccgttgccgtggttacccgaccgttcgcatatgaaggtaagcgcgtccatgtcgcacaggcagggttggaacagttgaaagaacacgtcgattcgctgattatcatcccgaacgacaaactgatgactgcattgggtgaagacgtaacgatgcgcgaagccttccgtgccgccgacaatgtattgcgcgatgcggtcgcaggcatttccgaagtggtaacttgcccgagcgaaatcatcaacctcgactttgccgacgtgaaaaccgtgatgagcaaccgcggtatcgctatgatgggttcgggttatgcccaaggtatcgaccgtgcgcgtatggcgaccgaccaggccatttccagtccgctgctggacgatgtaaccttggacggagcgcgcggtgtgctggtcaatattacgactgctccgggttgcttgaaaatgtccgagttgtccgaagtcatgaaaatcgtcaaccaaagcgcgcatcccgatttggaatgcaaattcggtgctgctgaagacgagaccatgagcgaagatgccatccggattaccattatcgctaccggtctgaaagaaaaaggcgcggtcgattttgttccggcaagggaggtagaagcggttgccccgtccaaacaggagcaaagccacaatgtcgaaggtatgatccgcaccaatcgcggtatccgcacgatgaaccttaccgctgcggatttcgacaatcagtccgtacttgacgactttgaaatccctgcgattttgcgtcgtcaacacaattcagacaaataa

SEQ ID NO: 49123 - DNA, 651 bp, Neisseria meningitidis
atgacaggatttgaacatacggttacatttgattttcagggcatcaaaatggttatcccttatggctatcttgcacggtatacgcaagacaatgccacaaaatggctttccgacacgcccgggcaggatgcttactccattaatttgatagagattagcgtctattacaaaaaaaccgaccaaggctgggttcttgagccatacaaccagcaaaacaaagcgcactttatccaatttctacgcgacggtttggatagcgtggacgatattgttatccgaaaagatgcgtgtagtttaagcacgactatgggagaaagattgcttacttacggggttaaaaaaatgccatctgcctatcctgaatacgaggcttatgaagataaaagacatattcctgaaaatccatattttcatgaattttactatattaaaaaaggagaaaatccggcgattattactcatcggaactatcataggtatggagagaacgattacagcactagcgtaggttcctgtattaacggtttcacggtacggtattacccgtttattcgggaaaagcagcagctcacacagcaggagttggtaggttatcaccaacaagtagagcaattggtacagagttttgtaaacaatccaagtaaaaaataa

SEQ ID NO: 49124 - DNA, 483 bp, Neisseria meningitidis; identical to SEQ ID NO: 39280

SEQ ID NO: 49125 - DNA, 735 bp, Neisseria meningitidis; identical to SEQ ID NO: 39442

SEQ ID NO: 49126 - DNA, 171 bp, Neisseria meningitidis; identical to SEQ ID NO: 38528

SEQ ID NO: 49127 - DNA, 306 bp, Neisseria meningitidis
atgaacatcgaacaagtccacatcgaagtcatgaacgcccggctgaccgttaacacgccggcagaagaaaaagacacactgttgcaggcagtcggaatgctcaacggcaaagccgaagccatccgcgaaggcggacgcgtcgcggacagcgaaaaaatcgtcattatggccgcgctcaacgtcgtccacgacctgttgaaaacctccctgaacggcggcgatttggcaatcggcgattttgcgcgtaaaatagccgatatggacaacgcctgccaaaaagcactatcccgcttggcgcaggaataa

SEQ ID NO: 49128 - DNA, 282 bp, Neisseria meningitidis
gtgctttgtcatcaggcgcgggacttattcagtgcgggcagcgttgccaactcggcggaagactaccgtggcggaaactatgtagaaaaatctttaaaattgattgagcatgaaattgaaaaagctgctttggaaatggatgatgctctaattgtcgaatattggggagaaagcgtcccgacagaaaaacgcctagagtattggattaagatgttggatgatttggcagatggctggataccttctgaatcgctattcaatggtaggtataaagccaaataa

SEQ ID NO: 49129 - DNA, 282 bp, Neisseria meningitidis; identical to SEQ ID NO: 39155

SEQ ID NO: 49130 - DNA, 534 bp, Neisseria meningitidis; identical to SEQ ID NO: 38370

SEQ ID NO: 49131 - DNA, 1563 bp, Neisseria meningitidis
ttgtttgaagtgatgaaaaaacctttgatttcggttgcggcagcattgctcggcgttgctttgggtacaccttattatttgggtgtcaaagccgaagaaagcctgacgcagcagcaaaaaatattgcaggaaacgggcttcttgaccgtcgaatcgcaccaatatgagcgcggctggtttacctctatggaaacgacggtcatccgtctgaaacccgagttgctgaataatgcccgaaaatacctgccggataacctgaaaacagtgttggaacagtcggttacgctggttaaccatatcacgcacggcccttttgccggcggatttggcacgcaggcgcacattgaaaccgagttcaaatacgcgcctgaaacggaaaaagttttggaacgcttttttgggaaacaagctccggtttcccttgccaataccgtttattttaacggcagcggtaaaatggaagtcagtgttcccgccttcgattatgaagagctgtcgggcatcaggctgcattgggaaggattgacgggaaaaacggtttatcaaaaaggtttcaaaagctaccgcaacagctatgatgcgcccttgttcaaaatcaagctggcagacaaaggcgatgccgcgtttgaaaaagcgcatttcgattcggaaacttcagacggtatcaatccgcttgctttgggcagcagcaatctgaccttggaaaaattctccctagaatggaaagagggtgtcgattacaacgtcaagttaaacgaactggtcaatcttgttaccgatttgcagattggcgcgtttatcaatcccaacggcagcatcgcaccttccaaaatcgaagtcggcaaactggctttttcaaccaagaccggggaatcaggctcatttatcaacagtgaagggcagttccgttttgacacgctggtgtacggcaatgaaaaatacggcccgctggacatccatatcgccgccgaacatctcgatgcttctgccttaaccgtattgaaacgtaagtttgcacaaatttccgccaaaaaaatgaccgaggaacaaatccgcaatgatttgattgccgccgtcaaaggcgaggcttccggactgttcaccaacaatcccgtattggacattaaaacttttcgtttcacacagccgtcgggaaaaatcgatgtgggtggaaaaatcatgtttaaagacatgaagaaggaagatttgaaccaattgggtttgatgctgaagaaaaccgaggcagacatcagaatgagtattcctcaaaaaatgttggaagacttggcggtcagtcaggcaggcaatattttcagcgtcaatgccgaagatgaggcggaaggcagggcaagtcttgacgacatcaacgagaccttgcgcctgatggtggacagtacggttcagagtatggcaagggaaaaatatctgactttgaacggcgaccagattgatactgccatttctctgaaaaacaatcagttgaaattgaacggtaaaacgttgcaaaacgaaccggagccggattttgatgaaggcggtatggtttcagagccgcagcagtaa

SEQ ID NO: 49132 - DNA, 225 bp, Neisseria meningitidis; identical to SEQ ID NO: 46168

SEQ ID NO: 49133 - DNA, 225 bp, Neisseria meningitidis; identical to SEQ ID NO: 36622

SEQ ID NO: 49134 - DNA, 492 bp, Neisseria meningitidis
atgagtaccgaaaccaaaaactacattacgcccgccggatggcaggcattgaaagacgagctttatcaactggtcaacaaagaacgccccgaaatcgtccaaatcgtcaactgggcggcaggcaacggcgaccgcagcgaaaacggcaactatctttacggcaaacgccgtatgcgcgaaatcgaccgccgcatccgtttcctgaccaagcgtttggagtccgccgtcgtcgtcgatcccgaattgcgcgaagcgaccgaccaagtatttttcggcgcgaccgtcggcctgttgcgcggcgacgggcgcgagcaaaccgtcaaaatcgtcggcatcgatgaaatcgataccgcgcaaaacaaaatttcttggatttcgccgttggcgcgttgcctgattaaagcgcgcgaaggcgacgaagtggttttgaacacgccggaagggcgtgaggaaattgaaatcctttctgtcgaatacatcaaaatcgactga

SEQ ID NO: 49135 - DNA, 798 bp, Neisseria meningitidis
atgaaagccttgcataaaacatcattttgggaatctttagccattcaaaggcgcgtaatcggtgcgcttttgatgcgggaaattatcacccgttacggtcgcaataatattggctttttatggctgtttgttgagccgttgctgatgacattcgttatcgtcttgatgtggaaatttttaaaggcagaccgatattcaactttgaatattgtcgcatttgcgattactggctatccgatgttgatgatgtggcgtaatgcctcaaaacgggcagttgggtcgatttcttcaaatgccagcttgctttatcaccgcaatgtaagagttttggataccatcttggcgcgcatgattttggaaattgctggtgcaaccattgcgcagattgtgattatggcggtattgattgcgattggctggattgaaatgccggcagatatgttttatatgctgatggcttggcttttgatggctttttttgcgattggtttgggtttggtgatttgttcgattgcctttaatttcgagccgtttggcaagatttggggcacattgacttttgtgatgatgccgttatccggtgcgttcttttttgtgcataatttgccgcccaaggtacaagaatatgcattaatgattccgatggtgcatggcacagaaatgttccgtgccggatattttggcagcgatgtaattacctatgaaaatccttggtatatcgtattgtgcaatctggtgttgttgttgtttggcttggcgatggtcagtaaattcagtaaaggagtcgagccgcaatga

SEQ ID NO: 49136 - DNA, 633 bp, Neisseria meningitidis; identical to SEQ ID NO: 38658

SEQ ID NO: 49137 - DNA, 654 bp, Neisseria meningitidis
atgaagataacacactgcaaattaaagaaaaaagtacagaaagaactgctccgcttttttgcgctggaaattaccgcccgttctgccgccgatattttgggtatccatcccaattcggcagcactgttctaccgtaaaatccgcacggttatcaaccatcatttggccttggctgccgatgaggtttttgagggccctgtcgagcaggacgaaagcgatttcggcggacggcgtaaaggtagacgtggtcgcggtgcagcaggaaaagtggttgttttcggcattctgaaacgcaacagacgggtctataccgttgtggtggataatgccaagtctgaaacgttactccctgtcatcaaaaagaaaatcatgccggacagtattgtttataccgatagtctgagcagctatgacaagctggacgtaagcggtttgatccatcaccgcatcaaccattctaaggagtttgcagaccgccagaaccacattaacggcattgagaacttttggaatcaggcaaaacgtgtcttgcgaaaatacaatggaatcgatcgcaaatctttcccgctgttcttgaaagaatgcgaatttcgatttaacttcggcacaccgtctcaacagcttaaaatcctgcgggattggtgtggaatttag

SEQ ID NO: 49138 - DNA, 1239 bp, Neisseria meningitidis
atggctttttatgcttttaaggcgatgcgtgcggccgcgttggctgccgccgttgcattggtactgtcgtcttgcggtaaaggcggagacgcggcgcagggcgggcagcctgcgggtcgggaagcaccggctcccgtcgtcggtgtcgtaaccgtccatccgcaaaccgttgcgttgaccgtcgagttgccgggacgtttggaatcgctgcgtaccgccgatgtccgtgcgcaagttggcggcattatccaaaaacgcctgttccaagaaggcagttatgtccgtgccggacagccgctgtatcagatcgacagttccacttatgaagcaaatctggaaagcgcgcgcgcgcaactggcaacggctcaggcaacgcttgccaaagcggatgcggatttggcgcgatacaagcctttggttgccgccgaagccgtcagtcggcaggaatacgatgctgcggtaacggcgaaacgttctgccgaggcaggtgtcaaagcagcacaggcggcgatcaaatctgccggcatcaatctgaaccgttcgcgcattaccgcgccgatttccggctttatcggtcagtccaaagtttccgaaggtacgctgttgaatgcgggcgatacgaccgtgctggcaaccatccgccaaaccaatccgatgtatgtgaacgttacccagtctgcatccgaagtgatgaaattgcgccgtcagatagccgaaggcaaactgctggcggcggatggtgtgattgcggtcggcatcaaatttgacgacggcacagtttaccctgaaaaaggccgcctgctgtttgccgatccggtcgtcaacgaatcgaccggtcagattaccctgcgcgccgccgtaccgaacgatcagaatatcctgatgcccggtctgtatgtgcgcgtgctgatggaccaagtggcggtggataacgcatttgttgtgccgcagcaggcggtaacgcgcggtgcgaaagataccgtgatgattgtgaatgcccaaggcggtatggaaccccgcgaggtaacggttgcgcaacagcagggtacgaattggattgttacgtcgggtctgaaggacggggacaaggtggttgtggaaggcatcagtatcgccagtataacgggtgcgaaaaaggtaacgcccaaagaatgggcgccgtctgaaaaccaagccgccgcgcctcaatccggcgttcagacggcatctgaagccaaaactgcttctgaagcggaataa

SEQ ID NO: 49139 - DNA, 1923 bp, Neisseria meningitidis; identical to SEQ ID NO: 38251

SEQ ID NO: 49140 - DNA, 186 bp, Neisseria meningitidis; identical to SEQ ID NO: 38247

SEQ ID NO: 49141 - DNA, 441 bp, Neisseria meningitidis
ttggacaaacaaatcgacgaccacacccacacgcattttgacggcaaagcccaagtggcggagcaaatcaaaggcatcggttcgataacgacggctacgctgatggcgatgctgcccgaattggggcggctgtcgcacaaacggatagcgagtttggccggcattgccccgcacccgagggagagcggggaaaccaaattcaaaagccgctgcttcggcggaaggtctgcggtgcgtaaggcactgtatatggctaccgtggcagcgacacgttttgaaccgcttattcgggatttctaccaacgcctgccgtccgagggtaagccgtataaggttgccgttacggcatgtatgcgtaaactgctgacgatatcgaatgcccggatgcgtgattattttgccgaaaacgataccgccgaaaacggtatccggacggcttga

SEQ ID NO: 49142 - DNA, 504 bp, Neisseria meningitidis; identical to SEQ ID NO: 38374

SEQ ID NO: 49143 - DNA, 1188 bp, Neisseria meningitidis; identical to SEQ ID NO: 38360

SEQ ID NO: 49144 - DNA, 828 bp, Neisseria meningitidis
atgcaaaaccacgttatcagcttagcttccgccgcagaacgcagggcgcacattgccgataccttcggcaggcacggcatcccgtttcagtttttcgacgcactgatgccgtctgaaaggctggagcaggcaatggcggaactcgtacccggcttgtcggcgcatccttatttgagtagtgtggaaaaagcctgctttatgagccacgtcgtattgtggaagcaggcgttggacgaaggcgtaccgtatgttgccgtatttgaggatgatgtcttactcggcgaaggggcggagaaattccttgacgaagacgcttggctgcaagagcgttttgacaaggattccgcctttatcgtccgcttggaaacgatgtttatgcacgtcctgacctcgccctccggtgtggcggactactgcgggcgtgcctttccgctgttggaaagcgaacactgggggacggcgggctatatcatttcccgaaaggcaatgcggttttttttggacaggtttgccgttttgccgtccgaagggctgcaccccgtcgatctgatgatgttcagcgattttttcgacagggaaggagtgccggtttgccagctcaatcccgccttgtgcgcccaagagctgcattatgccaagtttcacgaccaaaacagcgcattgggcagcctgatcgaacacgaccgcctcctgaaccgcaaacagcaaaggcgcgattcccccgccaacacattcaaacaccgcctgatccgcgccttgaccaaaatcagcagggaaagggaaaaacgccggcaaaggcgcgaacagttcattgtgcctttccaataa

SEQ ID NO: 49145 - DNA, 933 bp, Neisseria meningitidis; identical to SEQ ID NO: 38763

SEQ ID NO: 49146 - DNA, 411 bp, Neisseria meningitidis; identical to SEQ ID NO: 39808

SEQ ID NO: 49147 - DNA, 795 bp, Neisseria meningitidis; identical to SEQ ID NO: 39726

SEQ ID NO: 49148 - DNA, 2274 bp, Neisseria meningitidis
atgaacattactcaaattctttcccaagaactttccgcgactaccgcgcaaatcaatgccgctatcgagcttttggacgacggcgcaaccgtgccctttatcgcccgctaccgcaaggaagccacgggcgggttggacgatacgcagctgcgccggcttgccgagcggctgcaatacctgcgcgagttggaagagcgcaaagccgttgttttaaaaagcattgaagagcaaggcaagctttcagacgacctcagggcgcaaatcgaagccgccgataacaaaaccgcgctggaagacctgtatctgccctacaaacccaaacgccgcaccaaagcgcaaatcgcgcgcgaacacggtttgcagccgctggcggacgtgttgcttgccgagcagtcgcaggacgtggaagccgccgcacaaggctacctgaacgaaaacgtccccgatgccaaagccgcgttggacggcgcgcgtgcgattctgatggagcagtttgccgaagacgcggaactcatcggcacgctgcgcgacaagctgtggaacgaagccgaaatccacgcgcaagttgttggaggcaaagaaaccgaaggcgaaaaattcagcgattatttcgaccaccgcgaacccgtccgcactatgcccggccaccgcgcgttggcggttttgcgcggccgcaacgaaggcgtgttgaacatcgcgctcaaataccggcccgacgacacgccgattacgcagcaaagcgaatacgagcaaatcatcgcccgccgtttcaaggtttcagacggccacaaatggctgcgcgacaccgtgcgtctgacttggcgcgcaaaaatctttttgtcgttggaactcgaagctctcaatcgtttgaaagaagccgccgacaccgacgcgattaccgtgtttgcccgaaatctcaaagacttgctgctcgccgcacccgccggacggctgaccactttgggtctagaccctggatacaagaacggcgtgaaatgtgccgtggtggacgacacgggcaagctgctggataccgtcatcgtctatttgcatcaagaaaacaatatgttggcaacgctgtcgcgcctgattaaacagcacggcgtgaagctcatcgccatcggtaacggcaccgccagccgtgaaaccgacaaaatcgcgggcgaactggtgcgtgaaatgtcgaaaatggggctgcataaaatcgtcgtgtccgaagccggcgcgtcgatttattccgcgtccgaactggcggcgcgcgagttccccgacttggacgtttccctgcgcggcgcggtgtccatcgcccgcaggctgcaagacccgcttgccgagttggtcaaaatcgaccctaaatccatcggcgtgggccagtatcagcacgatgtgaaccaaaaccagctcgccaaatcgctggacgcagtggtcgaagactgcgtgaacgccgtcggcgtggacgtgaataccgcctccgccccgctcttggcgcggatttccggcttgaatcaaacccttgcccaaaacattgtcgcctaccgcgatgaaaacggcgcgttcgacagccgcaaaaaattgctgaaagtaccgcgtttgggcgaaaaaaccttcgagcaggcggcaggctttttgcggattaacggcggtaaagagccgttggacgcgagcgccgtccaccccgaagcctatcccgtcgtcgccaaaatgctggcgcaacaaggcattagcgccgccgaactcatcggcaaccgcgagcgcgtgaagcaaatcaaagcgtccgacttcaccgacgaacgcttcggcctgccgaccattttggacatcctgtccgaactggaaaaacccggccgtgatccgcgcggcgagtttcagacggcatcgtttgccgaaggtatccacgaaatcagcgacttgcaagtcggtatgatactcgaaggcgtggtttccaacgtcgccaacttcggcgcgttcgtggacatcggcgtccatcaggacggcttggtgcacatctccgccctgtccaacaagttcgtccaagacccgcgcgaagtggtgaaagctggcgacgtggtgaaagtgaaagtgctggaagtcgatgctgcacgcaaacgcatcgcgctgaccatgcgcttggatgacgaaccgggcggcgcaaaacataaaatgccgtctgaaaaccgcagccgcgaacggacagccggccgcaaaccccaacgcaacgaccgcgccccagccaattcggcgatggcggatgcgtttgcgaagctgaagcggtaa

SEQ ID NO: 49149 - DNA, 426 bp, Neisseria meningitidis
atgacacaagaaaccgctttgggcgcggcactgaaatccgccgtccaaactatgagcaaaaagaaacagaccgaaatgatcgccgaccacatctacggcaaatacgatgtattcaaacgcttcaaaccgttggcgctcggcatcgatcaggatttgattgccgctttgccgcaatacgatgccgcactgattgcacgcgtcctcgccaaccactgccgccgtccgcgctatctgaaagccttggcgcgcggcggcaaacgtttcgatttgaacaaccgtttcaaaggcgaagttacccccgaagaacaggcgatcgcgcaaaaccatcctttcgtgcagcaggctttgcaacagcagtccgcccaagctgccgccgaaacgccgtctgttgaagccgaagcagccgaatcttccgcagcagaataa

SEQ ID NO: 49150 - DNA, 1110 bp, Neisseria meningitidis
atgagcaactggaaacccgatattccctataacgatttaccacccctgccgccaaaacaggatattgaaagcaaaaccatcctgaaacgttgtatagccgcccgtgcatcccttgcccgtttaaagcaggcggcagaactgataccgaatcaagccatgctgattaacacccttcctgttatggaagcccgtgcaagttcggaaattgaaaacatcgtaaccacaacggataagctgtttcaatccctgcaaatggatacggaacggcaagaccctgccacgaaagaagccctgcaataccgcaccgccctgtttgcaggctatgaatcactgacgagccgccctttatgcacacaaaccgccatcatggtctgcaacgccatcaagcacccctacgaaatggccatccgcaaaacaggcggcacagccctaaaaggaggcaacagcggaaatgttgtctataccccgcccgaaggagaagaaaccatacgcggcaagctggcaaattgggagcggtttattcacgaaagcggcgatttagacccgcttatcatcatggcggcggcacattaccaatttgaagccatccatccgtttacggacggcaacgggcggacggggcgcatattgaacagcctgctattgattgaaaaagggcttttggatttgcctattttgtatttgagccgctacatcatcgaaaacagggcggactattaccgcctgcttttaggcgtaaccgaacggcaggattgggaaagctggataatctacatcttagacggcgtagccgacaccgccgattggacggtatcgaaaatagatgcgatacgccgcctgttcgagcagacacgtcaacacatacggacacacgcacaaggaatctacacgcacgaactggtaaatcttctgtttgagcagccatatacacgcattgccaacctagaagcggcagggatagccaaacggcagacggcctctaagtacctgaaagagcttttagacataggtgtgctgcaagaaatcgtcatcggcagggacaaactattcattcatccgcgcctaatggaactattgcggggagagggcaacagctttacttcattctaa

SEQ ID NO: 49151 - DNA, 387 bp, Neisseria meningitidis; identical to SEQ ID NO: 37252

SEQ ID NO: 49152 - DNA, 840 bp, Neisseria meningitidis; identical to SEQ ID NO: 39493

SEQ ID NO: 49153 - DNA, 1518 bp, Neisseria meningitidis
atgtctcctaaaaaaatacccatttggcttaccggcctcatcctactgattgccctaccgcttaccctgccttttttatatgtcgctatgcgttcgtggcaggtcggcatcaaccgcgccgtcgaactgttgttccgcccgcgtatgtgggatttgctctccaacaccttgacgatgatggcgggcgttaccctgatttccattgttttgggcattgcctgcgcccttttgttccaacgttaccgcttcttcggcaaaaccttttttcagacggcaatcaccctgcctttgtgcatccccgcatttgtcagctgtttcacctggatcagcctgaccttccgtgtcgaaggcttttgggggacagtgatgattatgagcctgtcctcgttcccgctcgcctacctgcccgtcgaggcggcactcaaacgcatcagcctgtcttacgaagaagtcagcctgtccttgggcaaaagccgcctgcaaacctttttttccgccatcctcccccagctcaaacccgccatcggcagcagcgtgttactgattgccctgcatatgttggtcgaatttggcgcggtatccattttgaactaccccacttttaccaccgccattttccaagaatacgaaatgtcctacaacaacaataccgccgccctgctttccgctgttttaatggcggtgtgcggcatcgtcgtatttggagaaagcatatttcgcggcaaagccaagatttaccacagcggcaaaggcgttgcccgtccttatcccgtcaaaaccctcaaactgcccggtcagattggcgcgattgtttttttaagcagcttgttgactttgggcattattatcccctttggcgtattgatacattggatgatggtcggcacttccggcacattcgcgctcgtatccgtatttgatgcctttatccgttccttaagcgtatcggctttaggtgcgattttgactatattatgtgccttgccccttgtttgggcatcggttcgctatcgcaattttttaaccgtttggatagacaggctgccgtttttactgcacgccgtccccggtttggttatcgccctatccttggtttatttcagcatcaactacacccctgccgtttaccaaacctttatcgtcgtcatccttgcctatttcatgctttacctgccgatggcgcaaaccaccctgaggacttccttggaacaactcccaaaagggatggaacaggtcggcgcaacattggggcgcggacacttctttattttcaggacgttggtactgccgtccatcctgcccggcattaccgccgcattcgcactcgtcttcctcaaactgatgaaagagctgaccgccaccctgctgctgaccaccgacgatgtccacacactctccaccgccgtttgggaatacacatcagacgcacaatacgccgccgccaccccttacgcgctgatgctggtattattttccggcatccccgtattcctgctgaagaaatacgccttcaaataa

SEQ ID NO: 49154 - DNA, 978 bp, Neisseria meningitidis; identical to SEQ ID NO: 39742

SEQ ID NO: 49155 - DNA, 4128 bp, Neisseria meningitidis; identical to SEQ ID NO: 39820

SEQ ID NO: 49156 - DNA, 498 bp, Neisseria meningitidis; identical to SEQ ID NO: 45274

SEQ ID NO: 49157 - DNA, 780 bp, Neisseria meningitidis; identical to SEQ ID NO: 38866

SEQ ID NO: 49158 - DNA, 1254 bp, Neisseria meningitidis
atgtccgaacaacatatttcgacttggaaaagtaaaatcaacgcattgggtccggggatcatgatggcttcggcggcggtcggcggttcgcacctgattgcctcgacgcaggcgggcgcgctttacggctggcagatcgcgctcatcatcatcctgaccaacctcttcaaatacccgtttttccgcttcagcgcgcattacacgctggacacgggcaagagcctgattgaaggttatgccgagaaaagccgtgtttatttgtgggttttcctgattttgtgcatcatttccgccacgattaacgctggcgcggtcgccatcgtaaccgccgccatcgtcaaaatggcgattccctcgctgatgtttgatgccggcacggttgccgccttgattatggcatcctgcctgattattttggtgagcggacgttaccgcgctttggatcgcgtttccaaaatcatcatcgttactttgagtatcgccacgcttgccgccgccggcatcgctatgtcgcgcggtatgcagatgcagccggactttatcgagccgacaccgtggacgcttgccggtttgggcttcctgatcgcgctgatgggctggatgcccgcgccgattgaaatttccgccatcaattctttgtgggtaaccgaaaaacaacgcatcaatccttccgaataccgcgacgggatttttgatttcaacgtcggttatatcgccagtgcggttttggctttggttttccttgcactgggcgcgtttgtgcaatacggcaacggcgaagcagtgcagatggcgggcggcaaatatatcgggcaattgatcaatatgtacgccgttaccatcggcggctggtcgcgcccgctggtggcgtttatcgcttttgcctgcatgtacggcacgacgattaccgttgtggacggctatgcccgtgccattgccgaacccgtgcgcctgctgcgcggaaaagacaaaacgggcaacgccgaattctttgcctggaatatttgggtggcgggcagcggtttggcggtgattttttggtttgacggcgtaatggcgaatctgctcaaatttgcgatgattgccgcttttgtgtccgcccctgtgtttgcctggctgaattaccgtttggtcaaaggtgatgaaaaacacaaactcacatcaggtatgaatgcccttgcattggcaggcttgatttatctgaccggctttaccgttttgttcctattgaatttggcgggaatgttcaaatga

SEQ ID NO: 49159 - DNA, 813 bp, Neisseria meningitidis
atgtcggttgggcattatgagaattttcccgtcggttcgctgattttgccgcgcaggttgaggaagccgattcatgcggtgtacgcgtttgcacggacggcggacgatatggcggacgagggcagtatgccgtctgaagccaggttggcggggttggagggtttgcagcgcgagttggacgtgttggcatcgggcggccggtcggcgcatcctttgattgcacgattggatgccgaggcggttgtgccgttcggtttggatttgcagccgttttatgatttgctttctgcattttctcaggatgtggttaaaacaaggtatggaaatttcggcgagctggccgattattgtcggcgttccgccaaccctgtcggacgcattatgctggctttgtacgggaaaacggatgcggtgtgcgtggcgcaaagcgacggcatctgtacggctttgcaactggtgaatttttggcaggatgtggctgtggattggcaaaagggcagggtttatattccgcaggacgatttgttgaaattcggtgtttccgaaggacagattgcggagggtagggcggatgcggcgtttcagcggctgatggcgtatgagtgccggcgcgcattccgtatgctgaaggcgggttcgcctttggcgcgcgaattgaaagggcgtatcggtttggaactccgtatgattgtgttgggggcgcagttgattttgcagaaactggacgcgtgccgatacgatgtgtttgcacaacgtccggttttggataagaaggattggttgattatgttgaaacgcgcgttgtggaaatga

SEQ ID NO: 49160 - DNA, 210 bp, Neisseria meningitidis; identical to SEQ ID NO: 41321

SEQ ID NO: 49161 - DNA, 1263 bp, Neisseria meningitidis
atgtcaaacacacaaaaacagcttgcccttgccaaagcggcaaaaaaatccgtcaacacggcggatacggaagaaaaaaaccgcgcgctgcttgctatggcggacagtctggaagcggcggcggcagatattttggcggcaaaccgtcaagacttggaagccgcggcaggcaaaattcccgaaagcatgaccgaccgccttttgttggacggcaaacgcatttgcgcgatggcggacggcattagggcggttgccgcactgcccgaccccgtgggcgaaatactggaaacctcgactctgcccaacggcttggaaatcgtcaaaaagcgtgtggcgatgggcgttatcggcattatttacgaaagccgcccgaacgttacgtccgatgcggcggctttggcactgaaaagcggcagcgcggtcgtactccgcagcggcaaagatgcattccaatccgcacgcgccatcgttgccgccctgaaaacggggttggcacaaacccgcatcgaccccgacgcgctccagttgattgaagacaccgggcgtgagggcagttacgaaatgatgagggcgaaagattatctagacctgctgattccgcgcggcggggcggggctgatacgggcggtggttgagaatgccgtcgtgccggtcattgaaacggggacgggcattgtccacatctacgtcgataaagatgcggacttagaaaaggcaatccgcattgtccgcaacgccaaaaccagccgtccgtccgtgtgcaactcgatggaagtgctgctggtgcatgaagacattgctgccgacttcctgcccaagctcgaacggctgttggttcgcgaccgtatagaagccggactgccgcccgtccgcttccgtttggatccgcaggcggcgcggcatatcggcggcgaagcggcgggtgcagacgatttcgataccgagtttttagactacatcctcgccgtgaaaaccgtcgcttcggtcgaagaggcggtcgggcacatcgaaacgcacggcacgcaccattcagacggcatcgttaccgaaaaccgccacgctgcggactatttcacgacccatatcgattctgccgccgtgtatatcaacgcgtccacgcgctttaccgacggcggcgaattcggcttgggttgcgaaatgggcatctccacgcaaaaactccacgcccggggcccgatgggtttaaaagagctgacgagttacaaatacatcgtacaaggcacgggacaggttagggaataa

SEQ ID NO: 49162 - DNA, 642 bp, Neisseria meningitidis; identical to SEQ ID NO: 38780

SEQ ID NO: 49163 - DNA, 186 bp, Neisseria meningitidis; identical to SEQ ID NO: 38793

SEQ ID NO: 49164 - DNA, 1536 bp, Neisseria meningitidis
gtgtctgattccaagacgaaagaacgcgccacattcggcacgcgccgcgcgtttatgattgccgccatcgggtccgccgtcggcttgggcaatatttggcgtttcccctatattgcttttgaaaacggcggcggcgcgttcatcctgccctatctggtcgcgcttctgacggcgggcatcccgctgctgctgctcgattatgccatcggccaccgttaccgtggttctgcgcccttggctttccgccgcctcggacgatggtttgagccggtcggctggtggaacgtgatgaccaatatcgtcatctgcatctattacgcggtaattatcggttgggcggcaagctatacctattattcggtcaacgccgcctggggtgcggatccgcagggttttttctttaaggacttcctgcaaatggcgggcccggaagccttgggtttggattttgtcggcaaagtcgccggtcctttggcgggcgtgtgggtttttaccgccgccattatggcgttgggcgtgcaaaagggcgtggcgcgcgcctcgtcgttctttatgccgctgcttttggtgatgtttttgattatggtcggcatttcactaaccctgccgggtgcggcaaagggcttggacgcattgtttacgcccgactggtcgaaactcgccgattccaaggtctgggtggcggcatacgggcagattttcttttcgctttccatctgcttcggcattatggttacctattcttcttatttgaagaaaaaaaccgacttgggcggaacggggctggtggtcggttttgccaacagcagctttgaactgctcgcgggcatcggcgtgtttgccgcattgggctttatggcgcaggcgggcggtaaggcggtcaacgaggttgcctcaggcggcatcggtttggcgtttatcgcctttccgaccattatcaaccaggcaccgatgggctggctgatcggcatattgtttttcggttcgctggtattcgccggcgttacgtcgatgatttccatccttgaagtgattgtggcggcgattcaggacaagctgaacatcgggcgcgtcaacgccacgctgctggtctgcattccgatgggcattgtttccacgctgctgttcggtacagcgacggggctgccggttttggacgtgatggacaaattcgtcaacacctacggcattgttgccgccggctttgtttatgttgccgccatcatcatcagcggcaggctgccggaattacgcaagcacctgaacgctttgtcctccatccgcatcggcggcttgtggacggtctgcgtcgtggttaccgtcgtgatgctcggctatatgctgtttaaagataccagcggcctgatggagaaaaattacgaaggttatccggatggtttcctcagtattttcggctgggggatgtcggcggcgttggtcgtgttcgggctgctgctgtcgttgctgccttggaaacacggtcaggatttcaacgtcaaagacgaacacgaacatgaacaaggagaagaaaaatga

SEQ ID NO: 49165 - DNA, 2514 bp, Neisseria meningitidis
ttgaaaaacaacagacaaatcaaactgattgccgcctccgtcgcagttgccgcatcctttcaggcacatgctggactgggcggactgaatatccagtccaaccttgacgaacccttttccggcagcattaccgtaaccggcgaagaagccaaagccctgctaggcggcggcagcgttaccgtttccgaaaaaggcctgaccgccaaagtccacaagttgggcgacaaagccgtcattgccgtttcttccgaacaggcagtccgcgatcccgtcctggtattccgcatcggcgcaggcgcacaggtacgcgaatacaccgccatcctcgatcctgtcggctactcgcccaaaaccaaatctgcactttcagacggcaagacacaccgcaaaaccgctccgacagcagagtcccaagaaaatcaaaacgccaaagccctccgcaaaaccgataaaaaagacagcgcgaacgcagccgtcaaaccggcgtacaacggcaaaacccataccgtccgcaaaggcgaaacggtcaaacagattgccgccgccatccgtccgaaacacctgacgctcgaacaggttgccgatgcgctgctgaaggcaaacccaaatgtttccgcacacggcagactgcgtgcgggcagcgtgcttcacattccgaatctgaacaggatcaaagcggaacaacccaaaccgcaaacggcgaaacccaaagccgaaaccgcatccatgccgtccgaaccgtccaaacaggcaacggtagagaaaccggttgaaaaacctgaagcaaaagttgccgcgcccgaagcaaaagcggaaaaaccggccgttcgacccgaacctgtacccgctgcaaatactgccgcatcggaaaccgctgccgaatccgccccccaagaagccgccgcttctgccatcgacacgccgaccgacgaaaccggtaacgccgtttccgaacctgtcgaacaggtttctgccgaagaagaaaccgaaagcggactgttcggcggttcgtacaccttgctgcttgccggcggaggcgcggcattgatcgccctgctgctgcttttgcgccttgcccaatccaaacgcgcgcgccgtaccgaagaatccgtccctgaggaagagcctgaccttgacgacgcggcagacgacggcatagaaatcacctttgccgaagtcgaaactccggcaacgcccgaacccgctccgaaaaacgatgtaaacgacacacttgccttagatggggaatctgaagaagagttgtcggcaaaacaaacgttcgatgtcgaaaccgatacgccttccaaccgcatcgacttggatttcgacagcctggcagccgcgcaaaacggcattttatccggcgcacttacgcaggatgaagaaacccaaaaacgcgcggatgccgattggaacgccatcgaatccacagacagcgtgtacgagcccgagaccttcaacccgtacaaccctgtcgaaatcgtcatcgacacgcccgaaccggaatctgtcgcccaaactgccgaaaacaaaccggaaaccgtcgataccgatttctccgacaacctgccctcaaacaaccatatcggcacagaagaaacagcttccgcaaaacctgcctcaccctccggactggcaggcttcctgaaggcttcctcgcccgaaaccatcttggaaaaaacagttgccgaagtccaaacaccggaagagttgcacgatttcctgaaagtgtacgaaaccgatgccgtcgcggaaactgcgcctgaaacgcccgatttcaacgccgccgcagacgatttgtccgcattgcttcaacctgccgaagcaccgtccgttgaggaaaatataacggaaaccgttgccgaaacacccgacttcaacgccaccgcagacgatttgtccgcattacttcaaccttctgaagtacctgccgttgaggaaaatgcagcggaaatcgttgccgatgatttgtccgcactgttgcaacctgctgaagcaccggctgttgaggaaaatgtaacggaaactgttgccgaaacacccgatttcaacgccaccgcagacgatttgtccgcattacttcaaccttctgaagtacctgccgttgaggaaaatgcagcggaaaccgttgccgatgatttgtccgcactgttgcaacctgctgaagcaccggccgttgaggaaaatgcagcggaaatcactttggaaacgcctgattccaacacctctgaggcagacgctttgcccgacttcctgaaagacggcgaggaggaaacggtagattggagcatctacctctcggaagaaaatatcccaaataatgcagataccagtttcccttcggaatctgtaggttctgacgcgccttccgaagcgaaatacgaccttgccgaaatgtatctcgaaatcggcgaccgcgatgccgctgccgagacagtgcagaaattgctggaagaagcggaaggcgacgtactcaaacgtgcccaagcattggcgcaggaattgggtatttga

SEQ ID NO: 49166 - DNA, 240 bp, Neisseria meningitidis; identical to SEQ ID NO: 44857

SEQ ID NO: 49167 - DNA, 813 bp, Neisseria meningitidis
atggacaaaatcagagttgccgccgtgcagatggtgtcgggcgtgtcgccggaaaccaacgtcgctgccatgaaacgcctggtcgcacgggcggcggagcagggggcggattgggtgctgctgcccgaatattgggtgctgatgggcgcaaacgataccgacaaactcgcgcttgccgagcctttgggcggcggacgctttcagacggcattgagcgaaacggcgaaagaatgcggcgtggtgctgtttggcggaactgtgccgctgcaaagcagtgaggcaggcaaggtgatgaatacactgttggtgtacggacgggacggcgtaagaacgggtctgtaccacaaaatgcacctcttcggtttttctggtttgggcgaacgctatgccgaagccgataccatcagcgcagggcgggaagtgccgcacttgtcggcagaaggcgtgtcggtggcggcgggcatttgttacgatgtccgctttcccgaatttttccgccgccagctgccgtttgacgtattgatgctgcccgctgcgtttacgcacacgacgggcaaggcgcattgggagctgctgctgcgcgcgcgtgccgtcgaaaaccaatgttacgtcgtggcggcggcacagggcggtttgcacgaaaacggacggcgcacgttcggacacagcatgattgtcgatccgtggggcgacgtgttggacgtattgcccgaaggcgaaggcgttgttacggcagacatcgatgccaaccgcctgaacagcgtccgcaaccgcctgcccgccttgaaataccgggttttggatgccgtctga

SEQ ID NO: 49168 - DNA, 987 bp, Neisseria meningitidis; identical to SEQ ID NO: 38304

SEQ ID NO: 49169 - DNA, 540 bp, Neisseria meningitidis; identical to SEQ ID NO: 44661

SEQ ID NO: 49170 - DNA, 711 bp, Neisseria meningitidis; identical to SEQ ID NO: 38308

SEQ ID NO: 49171 - DNA, 735 bp, Neisseria meningitidis; identical to SEQ ID NO: 39598

SEQ ID NO: 49172 - DNA, 528 bp, Neisseria meningitidis; identical to SEQ ID NO: 39057

SEQ ID NO: 49173 - DNA, 900 bp, Neisseria meningitidis; identical to SEQ ID NO: 39788

SEQ ID NO: 49174 - DNA, 2169 bp, Neisseria meningitidis
atgggacagtttatgtcagttttccgcatcaatatgaccgccgccacggttttggcagcactttcgtcttcggtttttgccgcacaaacggcggatttggaaaccgtccatattaagggtcagcgttcgtacaacgcgattgccaccgagaaaaacggcgattacagctcgtttgccgccaccgtcggcacaaaaatccccgcttctttgcgcgaaattccgcaatctgtcagcatcatcaccaatcaacaggtcaaagaccgcaatgttgatacgtttgaccagttggcacgcaaaacgcccggcctgcgcgtgttgagcaacgacgacggacgctcttcggtttacgcgcgcggttacgaatacagcgaatacaacatcgacggcctgcccgcgcagatgcagagtatcaacggcacgctgcccaatctgtttgccttcgaccgtgtggaagtgatgcgcgggccgagcggcttgttcgacagcagcggcgagatgggcggcatcgtaaatctggtgtgcaaacgcccggccaaagcgttccaaggtcatgctgcggcagggttcggtacgcacaaacaatataaagccgaggcggacgtatcgggcagcctcaattcagacggcagcgtgcgcggccgcgtgatggcgcagaccgtcggcgcgtctccgcgtcccgccgagaaaaacaaccggcacgaaaccttctacgcggcggcggattgggacatcaaccccgatacggttttgggcgcgggctatctttaccagcaacgccacctcgcgccgtacaacggcttgccagccgatgccaataacaaattaccgtccctgccgcaacacgtatttgtcggcgcggattggaacaaatttaaaatgaacagccacgacgtgtttgccgatttgaaacattacttcggcaacggcggctacggcaaagtcggtatgcgctattccgaccgcgatgccgactccaactatgcctttgccggcagcaagctgggcatgaaaaccctggcaggccgcccgggctgcaatacggctgacgacaaagcctgcgcggtgggtttgggtacagaaatcaaacaaaaagccctcgcgtttgacgccagctacagcaggcctttccgcttgggcaatacggccaacgaatttgtcatcggcgccgattacaaccgcttccgcagcaccaacgaacaaggccgtactactttatatgcacgcggcggcctggctttaaacgagttccgcagcataccgcaggttgatttgattgccaacgcgcgcaaaggcgtgcgcggttacagccataccgtcgctaccgaaaacctcgacgaattcggcatttacggcaaatccaccttccatcctgccgacgggctgtcgcttatcggcggcggacgtttgggacactataaaatcgagtcgggcgaaggcaaaaccctgcacaaagccagcaaaaccaagttcaccggctacgcaggcgcggtttacgacttgaacgacaacaacagcctctacctgagcctgtcccagctctacacaccgcaaaccaacctcgatgccgacggcaagctgctcaaaccgcgccaaggcaaccagtttgaagtcggttacaaaggcagctacatggacgaccgcctcaatgcccgagtttcgttctaccgcatgaaagacaaaaacgccgccgcaccgttgaacccgaacaacaaaaaaacccgttacgccgcattgggcaaacgcgtgatggaaggcgttgagaccgaaatcagcggcgcggttacaccgaaatggcaaatccatgcaggttacagctatctgcacagccaaatcaaaaccgcctccaattcacgcgacgacggcatcttcctattgatgcccaaacacagcgcaaacctgtggacgacttaccaagttacgcccgagctgaccatcggcggcggcgtgaacgcgatgagcggcattacttcatctgcagggatgcatgcaggcggttatgccacgttcgatgcgatggcggcataccgcttcacgcccaagctgaagctgcaaatcaacgccgacaacatcttcaaccgccattactacgcccgcgtcggcggcgcgaacacctttaacattcccggttcggagcgcagcctgacggcaaacctgcgttacagtttttaa

SEQ ID NO: 49175 - DNA, 921 bp, Neisseria meningitidis; identical to SEQ ID NO: 38256

SEQ ID NO: 49176 - DNA, 1641 bp, Neisseria meningitidis; identical to SEQ ID NO: 38814

SEQ ID NO: 49177 - DNA, 201 bp, Neisseria meningitidis; identical to SEQ ID NO: 39739

SEQ ID NO: 49178 - DNA, 606 bp, Neisseria meningitidis; identical to SEQ ID NO: 38608

SEQ ID NO: 49179 - DNA, 1422 bp, Neisseria meningitidis; identical to SEQ ID NO: 45268

SEQ ID NO: 49180 - DNA, 1410 bp, Neisseria meningitidis; identical to SEQ ID NO: 39651

SEQ ID NO: 49181 - DNA, 216 bp, Neisseria meningitidis; identical to SEQ ID NO: 42829

SEQ ID NO: 49182 - DNA, 807 bp, Neisseria meningitidis; identical to SEQ ID NO: 45050

SEQ ID NO: 49183 - DNA, 918 bp, Neisseria meningitidis; identical to SEQ ID NO: 38434

SEQ ID NO: 49184 - DNA, 372 bp, Neisseria meningitidis; identical to SEQ ID NO: 36308

SEQ ID NO: 49185 - DNA, 1242 bp, Neisseria meningitidis; identical to SEQ ID NO: 47155

SEQ ID NO: 49186 - DNA, 534 bp, Neisseria meningitidis; identical to SEQ ID NO: 41750

SEQ ID NO: 49187 - DNA, 417 bp, Neisseria meningitidis; identical to SEQ ID NO: 38383

SEQ ID NO: 49188 - DNA, 267 bp, Neisseria meningitidis; identical to SEQ ID NO: 37278

SEQ ID NO: 49189 - DNA, 1128 bp, Neisseria meningitidis
atgaatacacggaatatgcgctatattcttttgacaggactgttgccgacggtatccgcttttggagagaccgcgctgcaatgcgccgctttgacggacaatgttacgcgtttggcgtgttacgacaggatttttgcggcacagcttccgtcttcggcagggcaggaagggcaggagtcgaaagccgtactcaatctgacggaaaccgtccgcagcagcctggataagggcgaggcggtcattgttgttgaaaaaggcggggatgcgcttcctgccgacagtgcgggcgaaaccgccgacatctatacgcctttgagcctgatgtacgacttggacaaaaacgatttgcgcgggctgttgggcgtacgcgaacacaatccgatgtaccttatgccgctctggtacaacaattcgcccaactatgccccgggttcgccgacgcgcggtacgactgtacaggaaaaattcggacagcagaaacgtgcggaaaccaaattgcaggtttcgttcaaaagcaaaattgccgaagatttgtttaaaacccgcgcggatctgtggttcggctacacccaaagatccgattggcagatttacaaccaaggcaggaaatccgcgccgttccgcaatacggattacaaacctgaaattttcctgacccagcctgtgaaggcggatttgccgttcggcggcaggctgcgtatgctcggtgcgggttttgtccaccagtccaacggacagagccgtcccgaatcgcgttcgtggaacaggatttacgccatggcaggcatggaatggggcaaattgacggtgattccgcgcgtgtgggtgcgtgcgttcgatcagagcggcgataaaaacgacaatcccgatattgccgactatatggggtatggcgacgtgaagctgcagtaccgcctgaacgacaggcagaatgtgtattccgtattgcgctacaaccccaaaacgggctacggcgcgattgaagccgcctacacgtttccgattaagggcaaactcaaaggcgtggtacgcggattccacggttacggcgagagcctgatcgactacaaccacaagcagaacggtatcggtatcgggttgatgtttaacgacttggacggcatctga

SEQ ID NO: 49190 - DNA, 723 bp, Neisseria meningitidis; identical to SEQ ID NO: 38147

SEQ ID NO: 49191 - DNA, 1986 bp, Neisseria meningitidis
atggctaaaaacaaccaatacagcgaatccagcatcaccgtcctcaaaggtttggaaccggtcaaagaacgtcccggtatgtacacccgcaccgacagcccgacccatatctgccaagaagtcatcgacaacgcggcggacgaggcgttgggcggtttcgctacggcaatcgacgtgcaaattcatgaagacggttcgctttccgtacgcgacaacggccgcggtattcccgtcggtctgcaccctgaagaaggcgtacccgtagtcgaactcgtgttcacccgtctgcacgcgggcggcaagttcaacaaaaaagacggcggcagcgcgtatgccttttcaggcggcctgcacggcgtgggcgtatccgtgaccaacgccctttccacccgccttgaggtaacggtcaaacgcgaaggcaaaatccaccgcatcgtgtttgccggcggcgacgtggtcgaaccgttggcacaagtgggcaaatgcgccgtcaaagacagcggcaccgaagtgcgcgtctggccggacggcaaatattttgaaagcccgaattacagcatccccgaactcgaacgcctgctgcgcgccaaagccgtgctgctgccgggcgtgcgcgtttccctgacccgtccggtcaaaggcgaagacgaagcgcacacccaaacctggcattaccccgacggtctgaaaagctatctgaccgacctgattgccgacgcgcaggaagccgtgcctatcttctcttgcgaaaactacatttcagacggccacaacggcgatttcagcatcggcgaaggcgccgcgtttgccctgacctggctggaagaaggctcgtgcgccaacgaaagctacgtcaacctcatccccaccccgctgggcggcacgcacgaagcgggcttgaaacaagccgtgttcaacgccgtcagcaacttcatcaatctgcacaaccttttaccacgcggcgtgaaagtgcaaagcgacgacgtgttcggcaaaaccgcctttgtcctctctgcccgtgtcctcgacccgcagtttcaaggtcagaccaaagacaaactgaccaaccgcgacgcgctgaaactcgttgctaccgtatcgggcgaccctttggaattgtggctgaaccaaaacgtggacttcggcaaaaaaatcgccgaactcgccatccgtcaggcacaggcgcggatgcgttcggttaaaaagattgaaaagaaaaaaggcagcggcgtcgccgtcctgcccggtaagctgaccgactgcgaaagcgaagacatccgcgaaaacgaactcttcctcgtcgaaggcgattccgccggcggctccgccaaactcgcccgcgacaaagccacccaagccatcctgcccctgcgcggcaaagtgctcaacagctttgaagtccaccccgaccagctcttcggcaacgccgaaatccacgacatttcagttgccatcggcgtcgatccgcacggcatcaacgaccatcccgatttaagcggcctgcgttacggcaaaatcgccatcctgtccgatgccgacgtggacggctcgcatattcaagttttgctgctgaccctgttctaccgccacttcccgaaactggtcgctgacggacacatctacgtcgcccagccgccgctgttccgcgtagatgtcaacgcacaaggtaaaagcaaacccgcccgcaaattctacgccctcgaccaaaacgaacttgacggcattttagagcggctgcaaaaagaaggcgttaaagaaactgcttattccatcagccgtttcaaaggtttgggtgagatgaacccagaccagctcaaagatactaccatgcaccccgacacccgccgcctgttgcaggtacaaatccccgaaggcgcggatgacgagacgcgcgacatcttcgtcaaactgatgggcaaaggcgaagccgccgcccgccgtgcctggatggagcgcgaaggcgatacggcggaactcgatatttga

SEQ ID NO: 49192 - DNA, 357 bp, Neisseria meningitidis
atggataaaatctttttgcacggcatcaaggcggatacgcttatcggcgtgtacggctgggaacgcgaacggttgcagaccctgattgtcgatttggacatcggcgttcccgagaaagcgggttcggacgacgatattgccaatacggtacattatgccgaggtatgcgaaacactgcgccgacatctgaaagaacaggatttcctgcttttggaagcgttggcagaatatattgccgatttggttttgggatatttcggcgcggtgtgggtacgcgtgaaaatcgtcaagccgggtattttggaaggcgtgcgcgaggttggcgtggaaatcgagcgcggtaagcgtgaagattga

SEQ ID NO: 49193 - DNA, 876 bp, Neisseria meningitidis
atgagtcaacactctgccggagcacgtttccgccaagccgtgaaagaatcgaatccgcttgccgtcgccggttgcgtcaatgcttattttgcacgattggccacccaaagcggtttcaaagccatctatctgtctggcggcggcgtggcagcctgttcttgcggtatccctgatttgggcattaccacaatggaagatgtgctgatcgacgcacgacgcattacggacaacgtggatacgcctctgctggtggacatcgatgtgggttggggcggtgcattcaatattgcccgtaccattcgcaactttgaacgcgccggtgttgcagcggttcacatcgaagatcaggtagcgcaaaaacgctgcggtcaccgtccgaacaaagccattgtatctaaagatgaaatggtcgaccgtatcaaagctgccgtagatgcgcgcgttgatgagaacttcgtgattatggcgcgtaccgatgcgctggcggtagaaggtttggatgccgctatcgaacgcgcccaagcttgtgtcgaagccggtgcggacatgattttccctgaagccatgaccgatttgaacatgtaccgccaatttgcagatgcggtgaaagtgcccgtgttggcgaacattaccgagtttggttccactccgctttatacccaaagcgagctggctgaaaacggcgtgtcgctggtgctgtatccgctgtcatcgttccgtgcagcaagcaaagccgctctgaatgtttacgaagcgattatgcgcgatggcactcaggcggcggtggtggacagtatgcaaacccgtgccgagctgtacgagcatctgaactatcatgccttcgagcaaaaactggataaattgtttcaaaaatga

SEQ ID NO: 49194 - DNA, 294 bp, Neisseria meningitidis
ttgcggcaaaaaaccgtggcattgtgggttcaagtgtttgaaaccgatgttttaaaaccccctaatgccttatccgataacgaatggagttttcccatgcctaaaatgaaaaccaagtctagcgcgaaaaaacgctttaaagtactgggtaacggcggtgtgaaacgcgctcatgcgttcaaacgccacatcttgactaaaaagaccaccaaaaacaaacgccaattgcgcggtacctctatggtaaatgatcgcgatttggcttctgttgctaaaatgttaccctacgcttaa

SEQ ID NO: 49195 - DNA, 840 bp, Neisseria meningitidis; identical to SEQ ID NO: 36521

SEQ ID NO: 49196 - DNA, 2847 bp, Neisseria meningitidis
atgtgcaaccatcatcccaaacattcgcacggcaacgacaccatccgcatccgcggcgcgcgcacgcataatttgaaaaacgtcgatttggacattccgcgccacaagctcgtggtggtaacaggattgtcgggcagcggcaaatcgtcgctagcgtttgatactttatatgccgaaggccaacgccgttatgtcgagagcctgtccgcctatgcgcggcagtttttgcagatgatggacaaacccgatgtcgatttgatcgaaggcctgtcgcccgcgatttccatcgagcagaaatccaccagccacaatccgcgttccaccgtcggcacggttacggaaatccacgactatctgcgccttttgtacgcacgcgtcggcacaccctactgccccgaacacaagctgccgctatccagccaaaccgtatctcaaatggttgatgccgtcttaaaactgccggaagacacgcgcgtgatgattctggcgccggcggtacgagagcgtaagggcgagtttgtcgatttctttgccgacttgcaggcgcagggttttgcgcgcgtgcgcgtggacggcgaagtctatcagttggacgaagtgccgaagctggaaaaaaacatcaagcacaatatcgacgtggtcatcgaccgtgtaaaagtgaaggcggacatcaagcagcggctggcggaaagttttgaaaccgcgttacgccacggcaacgagcgcgcgctggcgatggagatggacagcggcgaagaacattggttttccgcgcgtttcgcctgccccgtatgttcgtacagcctgccagaattagagccgcgcctgttttccttcaacaacccgatgggttcctgcccgacttgcgacggcttgggcaacaccaatttcttcgaccccgaaaaagtggtcgcccaccccgaattgtcgctggcttcgggcgcgattgacggctgggacaaacgcaaccagttctatttccaaatgattcagtcgctggcacggcattacggttttgatgtgcaggctgcttgggaaaccctacctgcaaaaatcaaaaaagtcgtgttgcacggttcgggcaaggaagtcattgatttcacctacctatccgaacgcggcaccaccttcaaccgcagccacgccttcgaaggcatcattcccaatctcgaacgccgctaccgcgaaaccgacagcgaaaccgtgcgcgaaaaattgcgcgaataccaaaaccaccgcgcctgcccgagctgcggcggtgcacgtttgcgcaaagaagcgcgctacgtttacgtcagcggcgaaccgttgcacgaagtctccgcctggccgctgaccaaaacccaccgattctttgaaacgctggatttggacggcaacaaaaaacaaatcgccgaaaaaatcctcaaagaaatcaccgagcggctcggctttttgattaacgtcgggctggattacctaaatttaagccgctccgccgaaaccctttccggcggcgaagcccagcgcatccgcctcgccagccaaatcggcagcggtctgaccggcgtgatgtacgttttggacgaaccctccatcggcctgcaccagcgcgacaacgaccgcctgcttgccaccctcaaacgcctgcgcgatttgggcaacagcgtgattgtggtcgaacacgacgaagacgccatccgcgaagccgatttcgtcgtcgatatgggccccggcgcaggcgaacacggcggcaacgtactgattgccgacacgcccgaaaacgtcgccaaatgcgaaaactccgttaccggacaatacctcagcggcaaaaaatccattgccgtgccgtctgaacgcacgcccgtcaatcccggccgaatgctcgtcctcaaaggcgcgcgcggcaacaacctcaaaaacgttaccctcgaactgccgctcggtttgattacctgcatcaccggcgtatccggcagcggcaaatccaccctgattaacgacaccctcgccaaaatcaccgcccgcgaactcaaccgagcccaagaagaacccgccccatacgacgacatccgcggcctcgaacacctcgacaaagtcatcaacgtcgaccaatcccccatcggccgcaccccacgctccaatcccgccacctacaccggcctgttcacccccatccgcgaactcttcgccagcgtacccctctcgcgtgaacgaggctacaacgtcggcagattctccttcaacgtcaaaggcggccgctgcgaagcctgccaaggcgacggcgtgattaaagtcgaaatgcacttcctgcccgacgtgtacgtcccctgcgaagtctgccacggcaaacgctacaaccgcgaaaccctcgaaatccaatacaaaggcaaaaacatcagccaagtcctcgacatgaccgtcgaagaagcctgcgaatttttcgacgccgtccccaccgtatcgcgcaaactgcaaaccctgatggacgtaggtctcggctacatccgcctcggccaatccgccaccaccctctccggcggcgaagcccagcgcgtcaaactcgccttggaactctccaaacgcgacaccggcagaacgctctacatcctcgacgaacccaccaccggcctgcacttcgccgacatcgccctgctgctggaagtgataggccgtctgaaaggcaaaggcaactcgattgtgattattgagcataatctggatgtgattaaaactgcagattggattgtggatttagggcccgaggggggcgatggcggagggaggattattgcttcaggtagcccggaggaagtggcgaaggttaaggggagttatactgggaagtatttgaagaatatactttaa

SEQ ID NO: 49197 - DNA, 750 bp, Neisseria meningitidis; identical to SEQ ID NO: 38184

SEQ ID NO: 49198 - DNA, 252 bp, Neisseria meningitidis; identical to SEQ ID NO: 41525

SEQ ID NO: 49199 - DNA, 234 bp, Neisseria meningitidis
atggaagcaacagtctatcttgaagataatgaatacatcgctttatgcgacctgttgaaactggccggtcttgctgaaagcggcggacaggcaaaagcgtttatcgccgaagggctggtgttgcgcaacggcgaaaccgaaacccgtaaaaccgccaaaatacgcggcggcgaagtgattgaatttgacggcgcacgcttggaaattgccgatggatacgaccctgaagaataa

SEQ ID NO: 49200 - DNA, 1134 bp, Neisseria meningitidis
atgaaaagaattctttgcattacaggtaccagagccgacttcggcaagctaaaacctttattagcctatattgaaaatcacccagaccttgaattgcatttgattgtaactggtatgcatatgatgaaaacatatggcagaacctacaaggaagtaactcgagaaaactatcaacatacatatctgttttcaaatcaaatccaaggtgaaccaatgggtgccgttttaggcaataccattacgtttatctctcgtctatctgatgaaattgaacctgatatggtcatgattcacggcgaccgtttagaagcactagcaggcgcagctgtaggtgcattaagcagccgtttagtttgccatatcgaaggtggtgaactatctggtacagtagatgactccattcgtcattctattagtaaactttctcatatccacttggtagcaaatgaacaagctgtcactcgcctagtgcaaatgggagaaaaaagaaagcatattcacatcatcggctcccccgatttagatgttatggcctcttccaccctcccatccttagaagaagtcaaagaatattacggtttaccatacgaaaattatggtatttctatgtttcaccccgtgactacagaagcacatttaatgccacaatatgcggcccaatatttcaaagcattagaattaagtggccaaaatatcattagcatctaccctaataatgacactggcactgaaagtattctgcaagaattattaaaatatcaatctgataaatttattgcatttccttccattcgatttgaatattttttagtcttattgaaacatgctaaatttatggtcggcaactcaagtgcaggtattagagaagctcctctctacggtgtcccttcaattgatgttggtacacgccaaagtaaccgccatatgggaaaatctattattcatacagattatgaaactaaaaatatctttgatgcgattcaacaagcatgcagtttaggcaaatttgaagcagatgatacctttaatggcggagatactcgcaccagcacagaaagatttgctgaagtaatcaacaatcctgaaacgtggaatgtttctgctcaaaaacgttttatcgatttgaatctttaa

SEQ ID NO: 49201 - DNA, 201 bp, Neisseria meningitidis; identical to SEQ ID NO: 39543

SEQ ID NO: 49202 - DNA, 1116 bp, Neisseria meningitidis; identical to SEQ ID NO: 38517

SEQ ID NO: 49203 - DNA, 942 bp, Neisseria meningitidis
atgaaaatcctgctcctcctcatccccctcgtcctaaccgcctgcggcacactgaccggcatacccgcccacggcggcggcaaacgctttgccgtcgaacaagaactcgtcgccgcatcgtcccgcgccgccgtcaaagaaatggatttgtccgccctgaaaggacgcaaagccgccctttacgtctccgttatgggcgaccaaggttcgggcaacataagcggcggacgctactctatcgacgcactgatacgcggtggctaccacaacaaccccgaaagtgccacccaatacagctaccccgcctacgacactaccgccaccaccaaatccgacgcgctctccagcgtaaccacttccacatcgcttttgaacgcccccgccgccgccctgactagaaacagcggacgcaaaggcgaacgctccgccggactgtccgtcaacggcatgggcgactaccgcaacgaaaccctgctcgccaacccccgcgacgtttccttcctgaccaacctcatccaaaccgtcttctacctgcgcggcatcgaagtcgtaccgcccgaatacgccgacaccgacgtattcgtaaccgtcgacgtattcggcaccgtccgcagccgtaccgaactacacctctacaacgccgaaacccttaaagcccaaaccaagctcgaatatttcgccgtcgaccgcgacagccggaaactgctgattgcccctaaaaccgccgcctacgaatcccaataccaagaacaatacgccctctggatgggaccttacagcgtcggcaaaaccgtcaaagcctcagaccgcctgatggtcgatttctccgacatcaccccctacggtgacacaaccgcccaaaaccgtcccgacttcaaacaaaacaacggtaaaaaccccgatgtcggcaacgaagtcatccgccgccgcaaaggaggataa

SEQ ID NO: 49204 - DNA, 762 bp, Neisseria meningitidis; identical to SEQ ID NO: 39551

SEQ ID NO: 49205 - DNA, 897 bp, Neisseria meningitidis; identical to SEQ ID NO: 39762

SEQ ID NO: 49206 - DNA, 498 bp, Neisseria meningitidis; identical to SEQ ID NO: 39756

SEQ ID NO: 49207 - DNA, 318 bp, Neisseria meningitidis; identical to SEQ ID NO: 39139

SEQ ID NO: 49208 - DNA, 612 bp, Neisseria meningitidis; identical to SEQ ID NO: 40039

SEQ ID NO: 49209 - DNA, 282 bp, Neisseria meningitidis; identical to SEQ ID NO: 44485

SEQ ID NO: 49210 - DNA, 876 bp, Neisseria meningitidis; identical to SEQ ID NO: 46257

SEQ ID NO: 49211 - DNA, 1092 bp, Neisseria meningitidis
atgagtttgaaatgcggcatcgtcggtttgcccaacgtcggcaaatccaccctctttaacgcgctgacccagtcgggtatcgaagcggcaaactatcctttctgtaccatcgaacccaacgtcggcatcgtcgaagtgcccgatccgcgtatggccgaattggcaaaaatcgtcaatccgcaaaaaatgcagcctgccatcgtcgaatttgtcgatattgccggtttggttgcaggcgcgagcaaaggcgagggcttgggcaaccagttccttgccaacatccgcgagactgacgcgattgttaacgtcgtacgctgctttgacgacgacaacatcgtccacgttgcaggccgcgtcgatccgattgccgacattgaaaccatcggcacagagttggcacttgccgacctggcaagtgtcgaaaaagccatcgtccgcgaagaaaaacgcgcccgctcaggcgacaaagacgcgcaaaagctggtcgatttgtgcaaaaaactgctgccgcatctggacgaaggcaaacccgtgcgttccttcggtttggacgcggaagaacgcgcgatgctcaaaccgctgttcctgctgaccgccaaaccggcgatgtatgtgggcaacgtcgccgaagacggttttgaaaacaatccgcacctcgaccgcctgaaagaattggcggcaaaagaaaacgcccccgtcgtcgccgtttgcgccgcaatggaaagcgaaatcgccgaattggaagacgacgaaaaagccgagttcctcgccgaaatgggcttggaagaaccgggcctgaaccgcctgatccgtgccggctacgaccttttggggctgcaaacctactttaccgccggcgtgaaagaagtccgcgcttggacgatacacaaaggcgacaccgccccgcaagccgccggcgtgattcacaccgactttgagcgcggcttcatccgcgcccaagtcatttcttacgacgactttgtctcgctcggcggcgaagccaaagccaaagaagccggcaaaatgcgtgtggaaggtaaggaatacgtcgtgcaggatggggatgtgatgcactttttgtttaacgtgtaa

SEQ ID NO: 49212 - DNA, 603 bp, Neisseria meningitidis; identical to SEQ ID NO: 38953

SEQ ID NO: 49213 - DNA, 1479 bp, Neisseria meningitidis
atgaaatacaaagacctgcgcgacttcatcgtcatgctcgagcagcaaggcaaactcaagcgcgtcgcccaccccgtttccccgcatttggaaatgaccgaaatcgccgaccgcgtgctgcgtgccgaagggtcggcgttgttgtttgaaaacccgattaagcccgacggtacgcgctacgattatcccgtgttggcaaacctgttcggcacgcccgaacgtgtggcgatgggcatgggcgcggacagcgtgtccaagctgcgtgaaatcgggcagacgctggcgtatttgaaagaacccgaaccgcccaaaggcatcaaagatgcgttttccaaactgccgctactgaaagacatttggagcatggcgccgaacgtggtgaaaaacgcgccgtgtcaggaaatcgtgtgggaaggcgaaaacgttgatttgtataaacttccgattcagcattgctggccggaagacgttgcgccgctggtaacatggggcttgaccgtaacgcgcgggccgcacaaaaaacgccaaaatctcggcatttaccgccaacaactcatcggcaaaaacaagctgattatgcgctggctgtcgcatcgcggcggcgcgttggattatcaggaattccgcaaactcaatcctgatacgtcgtatcccgtctccgttgtgctcggctgcgaccccgccaccattttgggcgcggtaacgcctgttcccgataccttgagcgaataccagtttgccggactgctgcgcggttcgcggacggaactggtgaaatgtatcggcaacgatttgcaagtgcccgcacgtgccgaaatcgtactggaaggcgtcattcatccgaacgaaaccgcgttggaaggcccatacggcgaccacacgggctattacaacgagcaggattatttccctgtgtttacggtcgaacgcattaccatgcgcgaaaacccgatttaccattcgacctacacgggcaaacctcccgatgaacccgctgttttgggcgtggcgttgaacgaagtgttcgtaccgcttttgcaaaagcagttccccgaaatcaccgatttctacctgccgcccgaaggctgctcctaccgcatggcggtggtgagcatgaaaaaacagtacgccggacacgccaagcgcgtgatgatgggctgctggtcgttcctgcgccagtttatgtacaccaaattcatcatcgtggtggatgacgatgtgaacgtgcgcgactggaaagaagtcatctgggcggtaaccacgcgcatggaccccgtgcgcgacaccgttttggtggaaaacacgcccatcgactatctcgacttcgccagcccggtcagcggactcggcggcaaaatgggcttggacgcaaccaacaaatggccgggagaaaccgaccgcgaatggggacgcgtcatcaaaaaagaccctgcggttacggctaagattgatgggatttgggaggaattggggttgtag

SEQ ID NO: 49214 - DNA, 1311 bp, Neisseria meningitidis
atgaccgatttgtttgcccgagaacccgacgcgccgcttgccgaacgattgcgtccgcatacgcttgacgacgtggtggggcaggaacacctcatcggcgaaggtaaacctttgcgcgtggcggtagaaggcggcaagccgcattctatgttgctgtgggggccgccgggcgtgggcaagacgacgttggcgcggattttggcgcagagtttcaacgcccagtttttgcctgtttccgccgtattttccggcgtgaaggacatacgcggggcaatcgataaagccgaaatcgctttgcagcagggacgcgcgacgattttgtttgtcgatgaagtccaccgcttcaacaaggcgcagcaggacgcgtttttgccgcatgtcgaaagcggtttgctaacctttattggtgcgacgacggaaaatccgtcgtttgaagtcaatcccgcgctgttgagccgcgctcaggtgtatgttttgcaacccttgtcttcagacgacctgaaaaagctgattgccaaggtattggctttgcctgaataccaagagtttacgattgaaacggatgcgcaaaaattactcgtgaataccgccgacggtgatgcgcgcagattgttgaatttgttggaacaacttttacgcgccgccgatacacgtcgtctgaaaaacttaaccgccgaatttctcgccgacagtctcggggcgcaaatccgccgtttcgacaaaggcggcgagagtttctacaaccaaatctccgccctgcacaaatccgtgcgcggttcgcatccgaacgccgcgctgtattggttctgccgtatgctcgacggcggcaccgacccgcgctacctcgcccgccgcatcgtgcgtatcgcttgggaagacatcgggcttgccgacccgcgcgccttccaaatcgccaacgatgccgccgccaccttcgaacgcttaggctcgcccgaaggcgaactggctttggcgcaagcggtattgtaccttgctgccgccgcgaaatccaacgcgggctacaaagcgtataaacaaatgcgccgatttgttgcagaaaacagcagcgacgaagtgcctgtccatcttcgcaacgccccgaccaagttaatgaaggaattgggctacggacgcgaataccgctacgcccacgacgaaccgaacgcctacgccgccggcgaaagctatatgcccgacggcttggacgaaccggacttctaccaacccgtcccgcgcgggttggaaatcaaaatcggcgaaaagctggaatggttgaaatcgctggacgaagaagtattaaaggcaaaatga

SEQ ID NO: 49215 - DNA, 840 bp, Neisseria meningitidis; identical to SEQ ID NO: 39025

SEQ ID NO: 49216 - DNA, 492 bp, Neisseria meningitidis; identical to SEQ ID NO: 45654

SEQ ID NO: 49217 - DNA, 726 bp, Neisseria meningitidis
ttgttagatcacgataatggtttttttgataacagcaatcaaaggccgaaatctgaaacgatcggtacggcttggcggaatgaggacgggagcggcaagacattttatgtaggtcgcaagaaaaattctcgttttgttcgtgtttatgagaaaggcaggcagcttggagataaagaaagcaaatgggtaaggttcgagatccagtttaattatggagatatagaaatacccttggatattttaataaatcagggttcgtatttctgtggagcttttccaatttgtagaaaatttaaaaatatgccggttcccgaaaggtttgatcagagaaagaaaacgcttaatttaactttcgagcataaattgcattacgcgaaaaacgcggttggaaaactggtcaatttcatgattgaaatgggttttgataatagcgaaattgtggaatctttaaaggcagattcgggatttcccaaaggattagaacctgaaaaatatgctctggaaatgttaagggacggtttgaaacacggttttattcatgaacagccggatattgatttggaaattgaacttgatgaattgggggttattgcttttaaaaattctgacaaattcgatagggaaaaaaggctttttagtcctgattatgatgtcgagaaagaaaggaaatatcaggaatatttaagtaaagtttatcatcaaaatgtagattatgattatttttaa

SEQ ID NO: 49218 - DNA, 702 bp, Neisseria meningitidis
atgacggaacctgcggccgaaggcggtaaagctgccaaggcgttaaaaaaatatctgattacgggcattttggtctggctgccgattgcggtaacggtttgggtggtttcctatatcgtttccgcgtccgatcagctcgtcaacctgctgccgaagcaatggcggccgcaatatgttttggggtttaatatcccggggctgggcgttatcgttgccattgctgtattgtttgtaaccggattatttgccgcaaacgtattgggccggcagattcttgccgcgtgggacagcttgttggggcggattccggttgtgaagtccatctattcgagtgtgaaaaaagtatccgaatcgctgctgtccgacagcagccgttcgtttaaaacaccagtactcgtgccgtttccccaatcgggtatttggacaatcgcattcgtgtccggtcaggtgtcgaatgcggttaaggccgcattgccgaaggacggcgattatctttccgtgtatgttccgaccacgccgaatccgaccggcggttactatattatggtaaagaaaagcgatgtgcgcgaactcgatatgagcgtggacgaagcattgaaatatgtgatttcgctgggtatggtcatccctgacgacctacacgtcaaaacattggcaggacctatgccgtctgaaaaggcggagttgcccgaacaacaataa

SEQ ID NO: 49219 - DNA, 1152 bp, Neisseria meningitidis; identical to SEQ ID NO: 38259

SEQ ID NO: 49220 - DNA, 696 bp, Neisseria meningitidis; identical to SEQ ID NO: 44720

SEQ ID NO: 49221 - DNA, 855 bp, Neisseria meningitidis; identical to SEQ ID NO: 39385

SEQ ID NO: 49222 - DNA, 969 bp, Neisseria meningitidis; identical to SEQ ID NO: 38593

SEQ ID NO: 49223 - DNA, 1065 bp, Neisseria meningitidis; identical to SEQ ID NO: 39464

SEQ ID NO: 49224 - DNA, 321 bp, Neisseria meningitidis; identical to SEQ ID NO: 39509

SEQ ID NO: 49225 - DNA, 1455 bp, Neisseria meningitidis; identical to SEQ ID NO: 44854

SEQ ID NO: 49226 - DNA, 807 bp, Neisseria meningitidis; identical to SEQ ID NO: 45045

SEQ ID NO: 49227 - DNA, 2847 bp, Neisseria meningitidis
atgaataaaaaatatgcaacaaaagccgaaattaatgccgccgcgcatgaccggtggcgtgaggttttagaagcgtgcggcataccgtccgaaattttagataaaaaacatcacccctgtccgtcatgcggcggttccgaccgattcaggtttacggacggtagcggttcaagtcgcgggagtggtgtttggatttgcaatcaatgcaagccggaaggcggcagtccgtttgatttgttgatggatgtttgcgggtatagttttaacgaggctagagacaaagttgcctccttgcttgggttggcgcatggggatttggtagataaggctccgaagctgttacctcctcctgctccagtaaaggaggaggagcgtgatttgtggaagccaatcgttcctgtgcctgaatatgcgctgaattctatgagctttgggaatggatttagaaaatcagacgacctgatttttaaatctgttttccgcgatagctccagcgcggttttgggcggtgttgcccgatttagaaaatcagacggcggaaaaatcgatctgccttatacgttttgcgagcataagaaaacaggcgaaaagatgtggcgttggcgttgttgggataacccgcgcccattgtacggtcttgattctttggttgctgacccatcattaccggttttggttgtcgagggggagaaatgtaagaacgcggcagatgctcagggttataactatgccgtcctgacgtggcatggcggttgtaataactgggataagtcggattggtcggcggtcgttgatcgtgatgtcgtcttgtggcctgattgcgattcgctgcgccaaaagctaacaaagaaagatcgcgatgatggtgttgaccctgaatccaaaccgtttctgccgcgcaatgagcagggcggaatgaaggcgatgcttggtattgctgaggtactgacaaagcagaattgccgtgtttggttggtcaatattcctgctccagggatatggcctcatggtttcgatattgccgatgcgattgcagacggcgggcgcatctgcgacccttccgaagtgttgagctggatgggcgcggcggattggttggttgagtatgtgccggaagcggaaatgccgtctgaaaactctcccgcacccattcaagatatggagccggaatctgagcagttgcatgaatctctcgaagcaacaggcaatcaagggggtgcgggggatgtggatgacgaatatttggccaaattgcaaaagctgaaatcagaatttgggctggttgaaggtaaagaccacggcgtgaacagaaaaacaggggttacatatacccgaaaggcaatgactgttcatttcggcaaagacgttgtcgatgcttggtatgaatggggccgtgcgccggtgctgactatgtacgaaatcaaccgtctgaaaaaagactacgcattgattcaggcggtaaaagatgatgacacgcaagatatgatggagcgtttcatttatcttgatggttcggcatcgatttgggacaacaaactatggcgcgttgtccctgaaaaggcggctcgtctgtcgatgacgcctgatggttttaaaatttgggtcaatagcccgagccgaattgtaaaacggttcgaccgattggtctttgagcctggtcgggtgttgtctgacgactatatcaacatcttccgaggcatgccgattgaaccgaaattcccgattcccaaagaggatatgcccgaaacaaactacgaattgtatagattattccctgaaatcaagccgattctgaatttgattaatcacttatgtaatggggattaccaacaggtcgaatacattttgaattggctggcttatccgttacaaaacgtaggcgcgaagatgacgaccgccgttgtcatgcacggtcatatacacggtgcgggtaaatctttctttttcgaggaaatcgtgaagccgatgtacggcgaatacggcgcaacatatggtcaagaggacttggaaagcaactatacggcaaaccgatcaggcaaaatgttcggtatttttgaagaggtttacacaaatcagcaaaaatacaataaaacaggcagccaaaaacatatgattaccggcaagacgatgcgcgtcgagcggaaattccaggatgcttacgaagaagcaaaccatatgaattgtgtgtttttgcgtaatgaatctcatcctttcaaaattgaggaaaacgaccggcgttatttcgttgtatggcctgagaaaaagttggacaaaaaattgcgcgatgaagttttagactgtatcggcaacgatggtgtccgtttgttttacagtttcctgctgtgttggaatttttatctgacttacgggcaacagggagcagaaaacgaaaaaggatacgaggtaatcaaactggaagagcctgtaagattcgatccaaacacgccgccgccgatgactgccgcgaaacaaaacgtcatttcctatggccgatatgcttggcaaaccttttattcggagtgggctggcggtggtattaaagacctgccgttttgctgttgcattacagacgacctttggttggtttacaaagagtggtgcaggcaaaacggcgagcgggaaactggtaaaacaaagtttctccaacacattgctgagaagatgccgcgggcgcggcgctggtggcggacgaaaaataaagatggcgacgtatcgtgtcaaaactggatttttaagccggctggctggcaagcggcggacggattgccggaaatggatgccctgggcaatgaggttttacgattccgcagcgctggttggaggtatcgcggcggtgaagaagtttga

SEQ ID NO: 49228 - DNA, 723 bp, Neisseria meningitidis
atgaaacccgcctatttcatttccgacctgcatttgagcgaaaagcaccccgaactgaccgcgctgctgctgcgttttttacgttcttccgccgccgggcaggcgcgggcgatttatattttgggcgatttgtttgatttttgggtgggcgatgacgaagtttccgagttgaatacttcggttgcgcgggaaatcaggaaattgtccgacaaaggcgttgccgtgttcttcgtcaggggcaaccgcgatttcctgattgggcgggatttttgccgacaggcgggtatgacgctgctgccggattactcggttttggacttgttcggctgcaaaaccctcatctgccacggcgacactctgtgtacggatgacagggcataccaacgtttccgcaaaatcgtgcatcggaagcggctgcaaaaactgttcctaatgctgcccctgaagtggcgcacgcgccttgccaccaaaatcaggcgtgtcagcaaaatggaaaaacaggtcaagcccgccgatattatggatgtcaatgccgcctttaccgcgcggcaggtacgcgccttcggtgcggaaaggctgatacacggacacacccaccgcgagcatatccatcacgaaaacggctttacccgcatcgttttgggcgactggcataacgactatgcttcaatcctccgcgtggacggggacggcgcggtattcgtgccgctggaaaaatactga

SEQ ID NO: 49229 - DNA, 990 bp, Neisseria meningitidis; identical to SEQ ID NO: 38513

SEQ ID NO: 49230 - DNA, 714 bp, Neisseria meningitidis
ttgagactgtatgaaagcgggcaggtcaacattcctgcggactttttacttgctgctgtccaattaggggtggatattcaatttgtctttacaggcattcattcggcaaatttaaatgctgtttcagacgaccttaataaaaaattggacgacgctattggcaaatcaaacgttgagaatcagattaacggcaacgtcagtaacgctgttatcgcctcatctggttcggttgttcatcaaattaatacccaaaatcacgtcatcagaacccgtgtcgattcaaaacccggcaaggaacatataacgcttgagcaagcttcaaagctgcaacaacttgttaaacaagttgccgcagcagaagagattgccaaacggtcgccaaaatcaatccgtgcaatttgggctagtctgaatgctcactgtaaagttccaagttacaaactaatcgcattgagcgattacgacaaagcagaaacttatctcagaaaatggctgggtaggttgagcaatacagcaacatcaaagaacaacgatcccgactggcgaaaaaagaaatacgcttatatcaaattaaatgtaaaacagcttgagcttgaagattggttgaaaagttacctcgaaaaaaatttctcagtagaaagcctgactgaattaagtgatgaagatttgcaaaaaacatatgcagcagtatcgactaaaaaacggaaaaaatag

SEQ ID NO: 49231 - DNA, 843 bp, Neisseria meningitidis; identical to SEQ ID NO: 39600

SEQ ID NO: 49232 - DNA, 450 bp, Neisseria meningitidis
atgagtatttatgccgtcgcgcacatcgttcatctgtattgcgctattgcctttgtcggcggcgtgttttttgaagtgctggttttgtccgtcctgcatacgggactggtgtcgtgcgaggcgcggcgcgaagtggaaaatgcaatgtcttaccgcgccgtcagggtgatgccgtttgtggtcggactgctgttcgccagcggcatcgtgatggcggcaaaccgctatctttctatattgggcgaaccgtttgccacttccttcggtacgatgctgacgctgaaaatcctgttggcgttcagcgtgttggcgcacttcgccatcgccgtcgtcaaaatggcgcgttccacactgaccgtcggctggtcgaaatacatacacaccgtcgtctttacccatatgctgctgattgtctttttggcaaaagcgatgttttatatcagctggtaa

SEQ ID NO: 49233 - DNA, 459 bp, Neisseria meningitidis; identical to SEQ ID NO: 39773

SEQ ID NO: 49234 - DNA, 171 bp, Neisseria meningitidis; identical to SEQ ID NO: 39012

SEQ ID NO: 49235 - DNA, 786 bp, Neisseria meningitidis
atgagcagaatccggcaggcttttgccgctttggatggcggaaaggcattgattccctatattacggtgggcgaccccgatattcggacaactttggcattgatgcacggcatggttgcaaacggtgcggatattttggagttgggcgtgccgttttccgatccgatggcggatgggccggttattcagcgtgcggcggagcgggcgttggcaaacgggatttcgctgcgcgatgtcttggatgtcgtcagaaaattccgtgaaaccgacacgcaaacgccggttgttttgatgggatatttgaaccctgtacataagatgggttatcgggagtttgctcaggaagccgcaaaggcgggtgtggacggcgtgttgacggtggattcccctgtcgaaaccatcgatccgctctatcgcgagctgaaggataacggggtcgactgtattttcctgattgcgccgacgacgacggaagaccgtattaaaaccattgccgagctggcaggcggatttgtctattatgtttcgctcaagggcgtaacgggcgcggcaagtttggatacggatgaggtttcgcgtaaaatagagtatttgcatcagtatatcgatattcccatcggtgtcggtttcggcatcagcaatgcggaaagtgcacgcaaaatcggccgggttgccgacgcagttattgtcggcagccggattgtgaaagaaatcgaaaacaatacaggcaacgaggctgccgccgtcggtgctttggtaaaagagttgaaggatgccgtgcgctga

SEQ ID NO: 49236 - DNA, 1143 bp, Neisseria meningitidis; identical to SEQ ID NO: 39375

SEQ ID NO: 49237 - DNA, 279 bp, Neisseria meningitidis; identical to SEQ ID NO: 38377

SEQ ID NO: 49238 - DNA, 1734 bp, Neisseria meningitidis
ttgaggacacgccctaacatcattctttctgaaatacagaacggttctttttctttccgggatttttatacccgcaggattaagcggatttaccctgcttttattgcggccgtgtccctggcttcggtgattgcctctcaaatcttcctttatgaagatttcaaccaaatgaggaaaaccatagagctttctacggtttttttgtccaatatttatttggggttccgattggggtatttcgatttgagtgccaacgagaaccccgtactgcatatttggtctttggcagtagaggaacagtattacctcctgtatcctcttttgctgatattctgctacaaaaaaacaaaatcgctacgggtgctgcgtaacatcagcatcatcctgtttctgattttgactgccacatcgtttttaccaagcaggttttataccgatattctcaaccaacccaatacttattacctttcgacactgaggtttcccgagctgttggcaggttcgctgctggcggtttacgggcaaacgcaaaacggcagacggcaaacagcaagcggaaaacggcagttgctttcattactctgcttcggcgcattgcttgcctgcctgttcgtgattgacaaacacaatccgtttatcccgggaatgaccctgctccttccctgcctgctgacggcactgcttatccggagtatgcaatacgggacacttccgacccgcatcctgtcggcaagccccatcgtatttgtcggcaaaatctcttattccctatacctgtaccattggatttttattgccttcgcccattacattacaggcgacaaacagctcggactgcctgccgtatcggcggttgccgcattgacggccggattttccctgttgagctattatttgattgaacagccgcttagaaaacggaagatgaccttcaaaaaggcatttttctgcctctatctcgccccgtccctgatacttgtcggttacaacctgtacgcaagggggatattgaaacaggaacacctccgcccgttgcccggcgcgccccttgctgcggaaaatcattttccggaaaccgtcctgaccctcggcgactcgcacgccggacacctgcggggttttctggattatgtcggcagccgggaagggtggaaagccaaaatcctgtccctcgattcggagtgtttggtttgggtggatacgacactggcagacaacccgttatgtcgaaaataccgggatgaagttgaaaaagccgaagccgttttcattgcccaattctatgatttgaggatgggcggccagcccgtgccgagatttgaagcgcaatccttcctaatacccgggttccaagcccgattcagggaaaccgtcaaaaggatagccgccgtcaaacccgtctatgtttttgcaaacaacacatcaatcagccgttcgcccctgagggaggaaaaattgaaaagatttgccgcaaaccaatatctccgccccattcaggctatgggcgacatcggcaagagcaatcaggcggtctttgatttggttaaagatatccccaatgtgcattgggtggacgcacagaaatacctgcctaaaaacacggtcgaaatacacggccgctatctttacggcgaccaagaccacctgacctatttcggttcttattatatggggcgggaatttcacaaacacgaacgcctgcttaaatcttctcgcgacggcgcattgcagtag

SEQ ID NO: 49239 - DNA, 300 bp, Neisseria meningitidis; identical to SEQ ID NO: 39584

SEQ ID NO: 49240 - DNA, 420 bp, Neisseria meningitidis
atgaatctcgtgaaactgctggcgaataactggcaaccaattgccatcatcgcgcttgtcggcacgctcttggcggtgtcgcaccatcaaggctacaagtcggcttttgcgaagcagcaggcggtcattgacaagatggaaaaagacaaagcgcaagccctgctgttgtcggctcaaaactatgcacgcgagctggaacaggcgcgtgcggaagctaaaaaatatgaagtcaaggcgcacgccgtcggcatggctttggcgaaaaaacaggcggaagtcagccgtctgaaaacggaaaataaaaaggaaatcgaaaatgtccttactcaagaccgtaaaaatgcaggcggcggttgtattgacggctttggccatcacggcttgcagctctacaagcgcgccctcggctacggaaattaa

SEQ ID NO: 49241 - DNA, 798 bp, Neisseria meningitidis
atggataccgcacaaaaacaacgctgggcaataaccctatcctatgacggcagccgcttttacggctggcagaaacaggctgacggcgtaccgaccgttcaggcggcattggaaaccgcgctcgcccaaatagcaggggaagcggtttccaccaccgttgccggcaggaccgacaccggcgtgcacgccaccgcccaagtcgtccactttgacacaactgccgtccgtccccaacaggcatggatacgcggcgtaaatgcccacctgcccgaaggcattgccgttttgcacgcccgacaggtcgccctcgaatttcacgcccgcttcgacgcatacggacggcactaccgctatctgcttgaatcttcccctgtccgttcccccctgctcaaaaacagggcaggctggacacacctcaaactcgacatcgggccgatgcggcaggctgccacctatttgattggcgaacaagacttctccagcttccgcgccgccgagtgccaagcaaaatcccccatcaaaaccatctaccgcgccaatcttacccaaagcgcaggactcgtccgcctcgatttgcacggcaacgcctttttgcaccatatggtacgcaacatcatgggcgcgctcgtctatgtcggcagcggcagactcagcgtcgaaggcttcgccgcactgattcaagaacgcagccgcctcaaagccccgccgaccttcatgcccgacgggctttacctgaccggcgtcgactatcccgaggcatacggcatcatccgcccccaaatccccgaatggctttaa

SEQ ID NO: 49242 - DNA, 195 bp, Neisseria meningitidis; identical to SEQ ID NO: 39661

SEQ ID NO: 49243 - DNA, 627 bp, Neisseria meningitidis; identical to SEQ ID NO: 39338

SEQ ID NO: 49244 - DNA, 468 bp, Neisseria meningitidis; identical to SEQ ID NO: 38530

SEQ ID NO: 49245 - DNA, 582 bp, Neisseria meningitidis; identical to SEQ ID NO: 38841

SEQ ID NO: 49246 - DNA, 942 bp, Neisseria meningitidis; identical to SEQ ID NO: 44332

SEQ ID NO: 49247 - DNA, 1302 bp, Neisseria meningitidis; identical to SEQ ID NO: 46328

SEQ ID NO: 49248 - DNA, 465 bp, Neisseria meningitidis
atgtacaaacatttggttgttgccgttgacggcagtgaaacgtccatcaatgccctgaaacatgccgccgagcttgccggggtcaacggtgcgcgtctgactttggtacacgttgccaatcctgccgaatatatggcgctcgcccccgaatttttgcaacacgaaagctacgaagccgccgccgtcgcgcaaggcaacgaagttttggatgccgccgagcgcaccgcccgggaactgggtgtggaaaataccgtcaaacacctgctggttgccaataagggtgcgcgtgaaatggcgcaggatttggttgattatgccgatgaaaacggtgccgacctgctggtgttgggtacgcacggacgtaccggactgatgcaccttttaatgggtagttttgccgaaacggtaatgcgccaaagccacctgccgcttttgattatccgcagcaaagccgaagaggcgtag

SEQ ID NO: 49249 - DNA, 624 bp, Neisseria meningitidis
atgaaaatcatacacaaaggtttggtcgaatatctgccgacttttgaagcgatgaaaacctttaatgccggacggaatgctgacaccgaagacgaactgtgggtcgtcgaacacccgcccgtgttcacacaaggactggcgggaaaacccgaacacctgctgattcgcgacgacattcccgtcgtccaaatcgaccggggcgggcagattacctatcacgggcccgggcaattggtcgtttatacgatgattgatttcaaacggcgcaaaaccagcgtccgcaacatcgtttccgcgcttgaaaacagcatcatcgccacattggcagaatacggcatcgaagcggcggcagaccccaaacgccccggcgtttatgtcggagaacgcaaaatcgcctcactggggctgcgtatcaaaaacggctccgtctatcacgggcttgcgctcaacgtcaatatggatttaagcccgtttacccacatcaacccctgcggctacgccggtatggaaatgacgcaaatcgcggattttgtccaaccctgccccacgccggacgaagtcgccgccaaacttaccgcacaccttgaaacacaattcacaccgaaagcagacaacaatgagtga

SEQ ID NO: 49250 - DNA, 852 bp, Neisseria meningitidis; identical to SEQ ID NO: 39680

SEQ ID NO: 49251 - DNA, 672 bp, Neisseria meningitidis; identical to SEQ ID NO: 38563

SEQ ID NO: 49252 - DNA, 732 bp, Neisseria meningitidis
ttgcaagatcgtaccggtcaaaaagtaccttccgtagtattccgcacccgcgtcggcgacacttggaaagatgtgtctaccgatgatttgttcaaaggcaaaaaagtagtcgtattctccctgcccggtgcatttaccccgacttgttcttcttcacacctgccgcgttacaacgaattgttcggcgcgttcaaagaaaacggcgttgacgcaatctactgcgtatctgtaaacgatacgttcgtaatgaacgcttgggctgccgaagaagaatccgacaacatctacatgattcctgatggcaacggcgaatttaccgaaggtatgggtatgctggtcggtaaagaagacttgggcttcggtaaacgctcttggcgttactccatgctggttaacgacggcgtggttgaaaaaatgttcatcgagcctgaagaaccaggcgatccgttcaaagtatccgatgcagatactatgctgaaattcgttgctcctgattggaaagctcaagagtctgtggcaattttcactaaaccaggttgccaattctgcgccaaagccaaacaagctttgcaagacaaaggtttgtcttacgaagaaatcgtattgggcaaagatgcaaccgttacttccgttcgcgccattaccggaaagatgactgcccctcaagtcttcatcggcggcaaatacatcggcggcagcgaagatttggaagcttacttggctaaaaactga

SEQ ID NO: 49253 - DNA, 777 bp, Neisseria meningitidis; identical to SEQ ID NO: 39763

SEQ ID NO: 49254 - DNA, 1086 bp, Neisseria meningitidis
atgaaaaaatccctgattgccctgacactggctgccctgcctgttgcagcaatggctgacgttaccttgtacggtacaattaaagcaggcgtagaagtttctcgcgtaaaagatgctggtacatataaagctcaaggcggaaaatctaaaactgcaacccaaattgccgacttcggttctaaaatcggtttcaaaggtcaagaagacctcggcaacggcatgaaagccatttggcagttggaacaaaaagcctccatcgccggcactaacagcggctggggtaaccgccagtccttcatcggcttgaaaggcggcttcggtaccgtccgcgtcggtaatctgaacaccgtattgaaagacagcggcgacaacgtcaatgcatgggaatctggttctaacaccgaagatgtactgggactgggtactatcggtcgtgtagaaagccgtgaaatctccgtacgctacgactctcccgtatttgcaggcttcagcggcagcgtacaatacgttccgcgcgataatgcgaatgatgtggataaatacaaacatatgaagtccagccgtgagtcttaccacgccggtctgaaatacgaaaatgccggtttcttcggtcaatacgcaggctcttttgccaaatatgctgatttgaaagataatgcagaacgtgttgcagtaaatactgcaaatgcccatcctgttaaggattaccaagtacaccgcgtagttgccggttacgatgctaatgacctgtacgtttctgttgccggtcagtatgaagctgctaaaaataacactggtactgtcggcaaacaaggtaaaaaacacgagcaaactcaagttgccgctactgccgcttaccgttttggcaacgtaacgcctcgcgtttcttacgctcacggcttcaaagctaaagtgaatggcgtgaaagacgcaaattaccaatacgaccaagttatcgttggtgccgactacgacttctccaaacgcacttccgctctggtttctgccggttggttgaaacaaggtaaaggcgcgggaaaagtcgaacaaactgccagcatggttggcttgagtcacaaattctaa

SEQ ID NO: 49255 - DNA, 1185 bp, Neisseria meningitidis
atgaccgaaccgacctcccgccgtcgttttctgaaaacctgcaccgccgccgccggcgcgggactgcttcaggcttgcggcacatccgccacatccgttccgccccttccctcttcccattctgttgtgaaagcccgaaccgtgcctctccaaacgccacgccgtcaaagttcggacggcaaccttctgcgcgttgtcgcttcgtcaggctttgccgaagacaccaaccgcgtcaacacagccttaacccgcctttacaatgccggttttaccgtaaccaaccaacaggcgggcagccgccgcttccaacggtttgctggtacggacgcacaacgtgtcgccgatttccaagaggtcgcttccggccgcgtcgccacgcctaaagtgctgatgggcttgcgcggcggttacggtgcggcgcggattctgccgcatatcgattttgcttcgctcggcgcaaggatgcgcgaacacggcacgctgtttttcggattcagcgacgtatgcgccgtccagctggcattgttggcaaaaggcaatatgatgagttttgccggcccgatggcttatagcgattttggcaaacccgcccctggtgcgtttacgatggatgcctttatcaagggtgcaacccaaaaccgcctgaccgttgatgttccttatatccaacgcgccgatgtcgaaaccgaaggcatattgtggggcggcaacttaagcgtcctcgcctcgctcgccggcacgccttatatgcccgacatcgacggcggcattttgttcctcgaagatgtcggcgaacagccctaccgcatcgaacgtatgctcaatacgctgtatctttcgggtattttgaagaaacagcgcgccatcgtgttcggcaatttccgtatggaaaaaattcgagatgtctatgatccgtcttatgatttttccgccgttgccaaccatgtttcgcgcacggcgaaaatccccgtgctgacgggctttcccttcgggcacattgccgacaaaatcactttccctctgggcgcgcacgcccgaatccgtatgaacggaaacagcggttattcggtcgcgtttgaaggctaccccacactcgatgcgtccgccctgactttggataccctgctcccaccgccggatttgcccatcttccccgaaagcggtgttgccgatatttcggaataa

SEQ ID NO: 49256 - DNA, 669 bp, Neisseria meningitidis
atgttaccctcgaaatatgaagataacgcactgcaaattaaagaaaaaagtacagaaagaactgctccattttttgtactggaagttaccgcccgttctgccgccgatattttgggtatccatcccaattcggcagcactgttttaccgtaaaatccgcacggttatcaaccatcatttggtcttggctgccgatgaggtttttgagggccctgtcgagccggacgaaagcgatttcggcggacggcgtaaaggcagacgtggtcgcggtgcggcaggaaaagtggttgtcttcggcattctgaaacgcaacggacgggtctataccgttgtcgtagataatgccaagtctgaaacgttactccctgtcatcaaaaagaaaatcatgccggacagtattgtttataccgatagtctgagcagctgcgacaagttggacgtgagcggttttatccattaccgcatcaaccattccaaggaatttgcagaccgtcaaaaccacattaacggcattgagaacttttggaatcaggcaaaacgcgtcttgcgaaaatacaacggaatcgatcgtaaatctttcccgctgttcttgaaagaatgcgaatttcgatttaacttcggcacaccgtcccggcagctaaaaatcctacaggattggtgtgggatttag

SEQ ID NO: 49257 - DNA, 1218 bp, Neisseria meningitidis; identical to SEQ ID NO: 39425

SEQ ID NO: 49258 - DNA, 774 bp, Neisseria meningitidis; identical to SEQ ID NO: 39101

SEQ ID NO: 49259 - DNA, 1011 bp, Neisseria meningitidis; identical to SEQ ID NO: 47849

SEQ ID NO: 49260 - DNA, 183 bp, Neisseria meningitidis; identical to SEQ ID NO: 38466

SEQ ID NO: 49261 - DNA, 969 bp, Neisseria meningitidis
atgactgccaaacctttttccctcaacctgactaacctcctgctgctggcggtgttgtttgccgtcagcctgtcggtgggcgttgccgatttccgctggtcggatgtgttttcgctgtcggacagccagcaggttatgttcatcagccgcctgccgcgcacgtttgcgattgtgttgacgggcgcgtcgatggcggtggcggggatgattatgcagattctgatgcgtaaccgttttgtcgagccttctatggcgggcgcgggtcagagtgcggctttgggtttgcttctgatgtccctgctgctgcctgccgcgccgctgccggtcaaaatgtcggttgccgccgttgccgcgttaatcgggatgttggtgtttatgatgcttatccgccgcctgccgccgacggcgcaactgatggtgcctttggtcgggattattttcggcggcgtggttgaggcggtggccacctttattgcgtatgaaaacgaaatgctgcaaatgctgggcgtgtggcaacagggcgatttttcgagcgtgctgctggggcggtacgagctgctttggattacgggcggtttggcggtgtttgcctatctgattgccgaccggctgacgattttggggctgggcgaaacggtcagcgtgaatttgggtttgaaccggacggcggtgttgtggtcggggctgattattgtggctttgattacgtcgctggttatcgttacggtcggcaatattccgtttgtcgggctggtcgtgccgaacatcatcagccgcctgataggcgacaggctgcgccaaagcctgcctgcggtggctttgttgggcgcgtctttggtgttgctgtgcgacattgtcggacgcgtgattgtgtttccgtttgaaattccggtctctacggtttttggtgtgttggggacggcgttgtttttgtggcttttattaaggaaacctgctcatgccgtctga

SEQ ID NO: 49262 - DNA, 474 bp, Neisseria meningitidis
atgaaaaaacaaattaccgcagccgtaatgatgctgtctatgattgcccccgcaatggcaaacggattggacaatcaggcatttgaaaaatacgtattccacacgcaggcagatgcgccgatgcagttggcggagctttctcaaaaggagatgaaggagactgagggggcgtttcttcctattgtggcaggtgctttgatgggaggggcaattagtgcttgggctaatcacggcatttctaaaattaaaacagggcaatttgcttcaacaagaagtaccttggctgcaaccgctggtggtatgataggcggcggatatagcagtgcgatgttgcgcggtgcagggattactactagtgtttttgcccgttctgcttggaaagggggaaatgctattcctaatgcagttattcgtgcaaatggtgcagcattaaatcagtcttctagcgccgcaatgggaaaacatagaagataa

SEQ ID NO: 49263 - DNA, 228 bp, Neisseria meningitidis; identical to SEQ ID NO: 39542

SEQ ID NO: 49264 - DNA, 1629 bp, Neisseria meningitidis
atgatttctaccaacggcatcaccatgcagttcggcgcgaagccgctgtttgaaaacgtatccgtaaaattcggagaaggcaaccgttacggcctgatcggcgcgaacggttcaggcaaatccaccttcatgaaaatcctcggcggcgatttggaacagacggccggcgaagtggcgattgaaaacggcgtgcgtttgggtaaattgcgccaagaccagtttgcctacgaagacatgcgcgtgctggacgtggtgatgatggggcataccgaaatgtgggcggcgatgaccgaacgtgatgcgatttacgccaatcccgaagccaccgaagacgactacatgaaagccgccgaactggaagccaagttcgccgaatacgacggctacaccgccgaagcgcgtgccgccgaactgttgagcggcgtgggcatttccgaagatttgcacaatgcgaaaatggcggaagtcgccccgggcttcaaactgcgcgtattgctggcgcaggcgctgttctccaagccggatgtattgctcttggacgaaccgaccaataacttggacattaataccatccgctggttggaaggcgtgttgaaccaatacgactccacgatgattatcatcagccacgaccgccactttttgaacgaagtctgcacacacatggcggatttggactacaacaccatcaccatctatccgggcaactacgacgactacatgctcgcttctgcccaatcgcgtgagcgcgccctgaaagacaatgccaaggcaaaagaaaaattgcaggaattgcaagaatttgtggcgcggttcagtgccaacaaatccaaagcccgtcaggcaaccagtcgtctgaagcaggcagacaaaatcaaatcggaaatggtcgaagtcaaaccctctacccgtcaaaacccgtatatccgttttgaagccgatgaaaaagccaagctgcaccgtcaggctgtggaagttgaaaaactggcgaaacgctttgaaacccagttgtttaaaaacctgaacttcatccttgaagcgggacaacgcctcgccatcatcggcccgaacggcgcgggcaaatccaccctgctgaaactcttggccggcgcgtacaaccccgaatattcagacggtctgctgccggacgaaggcagcatcaaatgggcggaaaaagccagcgtcggctactatccgcaagatcacgaaaacgacttcgatgtcgatatggatttgagcgaatggatgcgccaatgggggcaggacggcgacgacgaacaagtcatccgcggcactttggggcgtttgctcttcggcagtaacgatgtcgtgaaaaaagtgaaggttctctccggcggcgaaaaaggccgtatgctttacggcaaactgttgctgttgaaacccaatgtcttagtcatggacgaaccgaccaaccacatggatatggaaagcatcgaatccttgaacatggcgctggaaaaatacaacggcacgctgattttcgtctcccacgaccgtcagttcgtttcttccctggcaacccaaatcatcgaactggacggcaaaggcggatatgaacactacttgggcgattacgaaagttacttggagaaaaaaggcgtagcataa

SEQ ID NO: 49265 - DNA, 1377 bp, Neisseria meningitidis; identical to SEQ ID NO: 38856

SEQ ID NO: 49266 - DNA, 183 bp, Neisseria meningitidis; identical to SEQ ID NO: 38667

SEQ ID NO: 49267 - DNA, 510 bp, Neisseria meningitidis
atgaatccgtttgaaaccaaaagcgttacctttgccgaaccgattgaaatgctgtatgcctgccatggcaaagtacgccgtttttgcggacaagtcgccatgctgtcggactatatcgccgaaaacggctgcaatcagattgttttgcaaaccatccgccaaatcgcccggtatttcaacgttgccgcgccgctgcaccatgaagacgaagaagaaaacttctttccgctgctgctgcaatacgcgccgcaagcccaagaaagcgtggacgagcttttgcgtcagcatgtgagcctgtatggcaactgggatgccgtggctgccgaatttgccaaactcgaagcagacaacgcttatgtccccgatgaggaagcgttcaaacgttttgtggcaggttacgatgtgcatctggcgattgaagagccgctgtttgatatgggcaacacctttatcccaaaagaaaaactgaccgaaatcggcgaaattatggcggcgcgccggcgcaaataa

SEQ ID NO: 49268 - DNA, 324 bp, Neisseria meningitidis; identical to SEQ ID NO: 38492

SEQ ID NO: 49269 - DNA, 657 bp, Neisseria meningitidis; identical to SEQ ID NO: 39727

SEQ ID NO: 49270 - DNA, 1032 bp, Neisseria meningitidis; identical to SEQ ID NO: 36792

SEQ ID NO: 49271 - DNA, 270 bp, Neisseria meningitidis; identical to SEQ ID NO: 36672

SEQ ID NO: 49272 - DNA, 1311 bp, Neisseria meningitidis; identical to SEQ ID NO: 39855

SEQ ID NO: 49273 - DNA, 141 bp, Neisseria meningitidis
atggacaccctattaaaaatcatcatcgcgctgtcattttccggcgctgaggcattggcggtatggcttttcatcacggccgccgatgccgtattacgccgcttcccgaaaccgagtcattacaggagagtaaaaaaatga

SEQ ID NO: 49274 - DNA, 465 bp, Neisseria meningitidis
atgaaatgcccgttttgcgcccaccccgacacccgcgttgccgattcgcgtctgatggacgaacgcaacgccgtccgccgccgccgatactgccccaactgcggcaaacgcttcggcacgctcgaaaccgccgaactcaaaatgcccgccgtcatcggtccggacaaaaaacgctcgccctttaatgcacaacgcctccgcaacgacctgaccgccgccgcccgaaaatccgccctgacacccgaacagatcgacgaaaccgtccgcctgacggaacacaggctctacacttcgggtcagcgcgacatcccctctgccgcacttgccgacatggtgctaaaagaactgctccgacaagatacggaagccgccgtccgtttcgccgccctgcacaaacgcttcgacaatccggcagactttgcctcgtggctggcgcaagccgtcaaaacaggcggcaaagcctga

SEQ ID NO: 49275 - DNA, 924 bp, Neisseria meningitidis
atgaaaaaacgcaataatcctcttccgctgttgaacggtgtcaaacccagttatttggtgctgccgcatgaaaagcagttttacgggctgccgctgctgcattttctgtgcatccgctttccttttgtgggcgaggacgattggcgcaggcggttgaacagcggttttgtggtcggttcggatggtgcggcgttggacgaacattctttgttcgagccgggtaaggtggtgttttattaccgtgaaaccagccgtgagagcgagccgcgtattccgtttgaagaaaagattttgcatattgatgagcatttgattgtggtggacaaaccgcattttctgcccgtcatccccagcggcaggtttttgcgggaaaccctgctcacgcgcctgcgtttgcggcctgaattgcagcatttgaatgttgaggacattacgccgctgcaccgcttggacaaggatacggcaggcgtgatgctgctgtcgcataatcctgccacgcgcggagcctatcagacgatgtttcaaaacaaaacggtatggaaaacgtatgaggcgcttgcgccgacaaggacggatttgccgtatccgattgatgtggtttcgcgtttggtaaggggtgagaaattttttacgacgcaagaggcggaaggcgaaccaaacgcacatacgacggtcgaactgattgaaaacaggggggaattcagcctttaccgccttacgccgcataccggcaagaaacaccagttgcgcgtgcatatgatgggtttgggtatgccgctgttgaatgacgcgctctatcccgtgccgtctgaagcgggcagcgaggattatcggaaacctttgaagttattggcaaaaaagattgcgtttgcagatcctttgtcgggtcgggaaagggtgttttgcagtaggttttgcctataa

SEQ ID NO: 49276 - DNA, 999 bp, Neisseria meningitidis; identical to SEQ ID NO: 38349

SEQ ID NO: 49277 - DNA, 729 bp, Neisseria meningitidis; identical to SEQ ID NO: 39718

SEQ ID NO: 49278 - DNA, 1470 bp, Neisseria meningitidis; identical to SEQ ID NO: 38653

SEQ ID NO: 49279 - DNA, 1134 bp, Neisseria meningitidis; identical to SEQ ID NO: 38708

SEQ ID NO: 49280 - DNA, 927 bp, Neisseria meningitidis
atgtcagaaatgaaaaaaaccaaagtccacctgatttcaggttttctgggaacaggcaaaaccactgcgctcaaaagcctgatggcgcaaaaagacccgaacgaaaaatgggtcatcatcgtcaacgagttcggcgaaatcggcattgacggcgcggtattgagcgacaacggtatccctgtggcagaaatcgccggcggctgtttgtgttgcaccgccggcccgcaaatgggcgtaaccgtgcagaaaatgctgcgcgacgccaagcccgaccgcctgatgattgaagcaagcggactggctcacgcagccagcgtcatcgacgaactcaaagccaaaccgctggacagccttttggaaatcggcgccgtctttaccgtcgtcaatccgcgccagttcatcaaccccgattacgcgcaacaggcgttgtataaagaccaaatcggcatctgcgacgtattggtcgccagcaaaaccgatttatgcacccccgaacagcttgccgaatttcacgacaaagcggcaaaactgttcccgcccaaagccaaagtggttgaagtccaaaacgcacaactcgacatccggtggctcgatattcccgtcatcgaaaaatcacgctaccgcctcaaagccctgccggataataccatgggcttccagtcgcaaggtttcacattccccgccggacgcgatttcgacggcgaaaagctgaccaactttttcaacgacctgcccaaaatgaccgaaggactcgtccgcgccaaaggcgtgtttcaagtattgggaacgtgggtgtggctcaactgggtagacggacagtggggcgcgaaccaagtctcatggcggcgcgattcgcgttttgaattgattgccaaatcgtttgatgcggatttaatcgaacaaaagctcaaagacgcattggaatag

SEQ ID NO: 49281 - DNA, 1302 bp, Neisseria meningitidis; identical to SEQ ID NO: 39130

SEQ ID NO: 49282 - DNA, 855 bp, Neisseria meningitidis; identical to SEQ ID NO: 38186

SEQ ID NO: 49283 - DNA, 1083 bp, Neisseria meningitidis; identical to SEQ ID NO: 38655

SEQ ID NO: 49284 - DNA, 1170 bp, Neisseria meningitidis; identical to SEQ ID NO: 38861

SEQ ID NO: 49285 - DNA, 738 bp, Neisseria meningitidis
atgctgctgatacccgccatcgatttgaaagaaggacgctgcgtccgcctgagacaagggctgatggaagaggcgaccgtcttttccgattcgcccgccgaaaccgcgctgcactggttcaaacaaggcgcgcgccgcctgcatctggtagatttgaacggcgcgtttgccggtgttccgcaaaacctgcccgccatcaaagacatccttgccgccgtcgccaaagacatccccgtacagctcggcggcggcatacgcgatttgaaaaccatcggacaatatttggatttgggcttaaacgacgtgattatcggcacggcggcggtcaaaaaccccgacttcgtgcgcgaggcgtgcaaagccttccccggcaggattattgtcgggctggatgccaaagacggtatggccgccatcgacggctgggcaaccgtaaccgggcatcatgtaattgatttggcaaaacgctttgaagacgacggcgtcaacagcatcatctacaccgacatcgggcgcgacggtatgatgagcggcgtgaacatcgacgcgacggtcaaactcgcccaagccgtccgcattcccgtcatcgcctccggcggactgaccggcttggacgacatccgcgccctgtgtgccgccgaaaaacatggcgtagcaggcgcgattaccggccgcgcgatttacgagggcagcatcgattttgcccaagcgcagcaactggcagattccctcgactaa

SEQ ID NO: 49286 - DNA, 819 bp, Neisseria meningitidis; identical to SEQ ID NO: 37573

SEQ ID NO: 49287 - DNA, 786 bp, Neisseria meningitidis; identical to SEQ ID NO: 38174

SEQ ID NO: 49288 - DNA, 360 bp, Neisseria meningitidis; identical to SEQ ID NO: 39367

SEQ ID NO: 49289 - DNA, 2307 bp, Neisseria meningitidis
atggcgaaaaacctattaatcgtcgaatccccgtccaaagccaaaaccctgaaaaaatatttgggcggcgattttgaaatccttgcatcctacggacacgtccgcgacctcgtccccaaaagcggcgcggtcgatcccgacaacggctttgcgatgaaataccaactcatcagccgcaacggcaaacacgtcgatgccatcgtcgccggtgccaaagaagctgaaaacatctacctcgccaccgacccggatagggaaggcgaagccatttcctggcatcttttggaaatcctcaaatccaaacgcggcttgaaaaacatcaagccgcagcgtgtcgtgttccacgaaatcaccaaaaacgccgtgctcgatgccgttgcccatccgcgcgaaatcgaaatggacttggtcgatgcgcaacaagcccgccgtgctttggactatttggtcggctttaacctttcgccattgttatggaaaaaaatccgccgaggtttgagcgcggggcgtgtgcaaagccctgctttgcgcctgatttgtgagcgcgaaaacgaaatccgcgcgtttgaagcgcaggaatattggacggtgcatctcgacagccacaaaggccgcagcaagttcaccgccaaactcgcccaatacaacggcgcgaaactcgaacaattcgacctgtcgaacgaagccgcgcaagccgacgtattgaaagaactcgaaggcaaagaagccgtcgttaccgccattgaaaagaaaaagcgcagccgcaatcctgccgcgccgttcaccacttctaccatgcagcaggatgccgtgcgcaaactcggcttcaccaccgaccgcaccatgcgtaccgcccaacagctttatgaaggtatagacgtagggcagggcgcgatcggtctgattacctatatgcgtaccgacagcgtgaatttggcggatgaagcgttaaccgaaatccgccattacattgaaaacaaaatcggcaaagaatatctgccgagtgccgccaaacaatacaaaaccaaatccaaaaacgcccaagaagcccacgaagccatccgtccgacttccgtgtaccgcacgcccgaaagcgtcaaacccttcctgagcgcagaccagttcaaactctatcaaatgatttggcagcgtaccgtcgcctgtcagatgacgcctgccaaattcgaccaaaccaccgtcgatattaccgtcggcaaaggcgtattccgcgtaaccggacaagtgcaaaccttcgcaggcttcttgagcgtttatgaagaaagcagcgacgatgaagaaggcgaagacagcaaaaaactgcccgaaatgagcgaaggcgataaattgcccgtggacaaactctacggcgaacaacactttaccactccgccgccgcgctacaacgaagccacgctggttaaagccctcgaagaatacggcatcggccgcccctcgacctacgccagcatcatctccacgctcaaagaccgcgaatacgttacccttgagcaaaaacgcttcatgcccaccgacacaggcgacatcgtcaacaaattcctgaccgaacacttcgcccaatacgtcgattaccacttcaccgccaaactcgaagaccagcttgacgaaattgccgacggcaaacgccaatggattcccttgatggacaaattctggaaaccgttcatcaaacaagtggaagaaaaagaaggcatcgaacgcgccaaatttaccacgcaggaacttgatgaaacctgcccgaaatgcggcgaacacaaactgcaaatcaaattcggcaaaatgggtcgttttgttgcgtgtgccggttatcccgagtgcagctacacgcgcaacgtcaacgaaactgccgaagaagccgccgagcgcatcgccaaagccgaggctgaacaagccgaactcgacggacgcgaatgtcctaaatgtggtggtcgcctagtgtacaaatacagccgaaccggcagcaaattcatcggctgcgccaactaccccaaatgcaaacacgtcgagccgctggaaaaaccgaaagataccggcgtccagtgtccgcaatgcaaaaaaggcaacctcgtcgagcgcaaatcccgctacggcaaactgttttacagttgcagcacctatcccgactgtaactacgccacatggaacccacccgttgcagaaagctgtccaaaatgcgcatggccggttttgaccatcaaaaccaccaaacgctggggtgtagaaaaagtctgcccacaaaaagaatgcggctggaaagaacagattgaaccgcccgcgccgaaggagtaa

SEQ ID NO: 49290 - DNA, 966 bp, Neisseria meningitidis; identical to SEQ ID NO: 39091

SEQ ID NO: 49291 - DNA, 393 bp, Neisseria meningitidis
atgcccacctcaaccaaaccctacatcctccgcgcactttgcgaatggtgcagcgacaacagcctcacaccgcacatccttgtttgggtcaacgaacacacgcgcgtccccatgcagtacgtccgcgacaacgaaattatgctcaacatcggcgcgaccgccacgcaaaaccttcaaatcgacaacgattggatcagtttttccgcccgtttcagcggacaggcgcacgatatatggatacctgtcggacacgtcctcagccttttcgcacgggagaccggcgaaggtatggggtttgaattggaagcgtaccgccccgacacgccgcctgaaaacacctctgccgaaaccgcgccccgacccgccaaaaaaggcttgaaattggtcaaataa

SEQ ID NO: 49292 - DNA, 1161 bp, Neisseria meningitidis; identical to SEQ ID NO: 39079

SEQ ID NO: 49293 - DNA, 1005 bp, Neisseria meningitidis; identical to SEQ ID NO: 48520

SEQ ID NO: 49294 - DNA, 354 bp, Neisseria meningitidis; identical to SEQ ID NO: 39564

SEQ ID NO: 49295 - DNA, 198 bp, Neisseria meningitidis; identical to SEQ ID NO: 36305

SEQ ID NO: 49296 - DNA, 447 bp, Neisseria meningitidis; identical to SEQ ID NO: 38678

SEQ ID NO: 49297 - DNA, 780 bp, Neisseria meningitidis; identical to SEQ ID NO: 39421

SEQ ID NO: 49298 - DNA, 606 bp, Neisseria meningitidis
ttgaataccctctatttaggttcgaacagcccacgcagaatggaaatcctgacacagttgggctattgggtcgtcaagctgcctgccgacatcgacgaaacggtcagacagaacgaagaccctgcccgttacgttcaaaggatggcagaagaaaaaaaccgaaccgccctgcccctcttttgcgaaaccaacggcgcaatgcctaactttcccttgattacagcggatacctgcgttgtttcagacggcattatattaggcaaaccccgctcccaagccgaagcgatcgaatttttaaaccgattgtccggcaaacaacataccgtcctgactgccgtctgcatccgttatcgcggcaaaacgtcaagccgcgtccaaaccaaccgcgtcgttttcaagcccctgagttcggaagaaatttccgcctatgtccaaagcggcgaaccgatggacaaagccggcgcctacgccgtacaaggcataggcggcatctttatccaatctatcgaaggcagcttcagcggcattatggggctgcccgtttatgaaaccgtttcgatgttgcaggatttgggataccgtaccccacctttcatccgagcctaa

SEQ ID NO: 49299 - DNA, 1605 bp, Neisseria meningitidis
gtgccttcagacaaacaaaatatgccgaacaaaaagaaaaaagccgcctttgcgcgtgctgcaacggagaacggtgtgccggacgtgtccaacatcaaaaattcatatgatgatttgatgtatgaatccaaagcattttcccaaaccgccatcaacgccttggaggctcgcgcccgcatgatgggtttgcagcccgcgcccgccgccaatgccaaggtcttggagctgggctgttcgatgggcggcaacatcatcacgcaggctctttattacccggatgcggaatttgtcggtatcgacttgtccggcaggcaggttgcgcagggcaacgccatcattgaaaaaatgggcttgaaaaatgtgcgtctggaagaaaaagatattttgaccgtcgatgagtcattcgggaagtttgactatatcatcgtccacggcatttggtcgtgggtgcctgacgcagttaaagacaaaattttttcgatttgccggaacaacttgaccgaacacggcattgcctatatttcatacaatgtttaccccggctggaaacggcaggagcagttgcgcgaaattatgtactttgccggcagggatgtgcttgaagaacccttggaagcacggacgcggaaaggcttggacgcgctcaaggcgctggcggaaattttagaaaacgacaagggcttggacggcggcggcaaacttccggcgattcaaaaaatattgaatcataatttttattacatcgcacacgaatatatggaggcgtttaacgacccgatttacgtcaacggcttcatcgaatgggcaaaccgccaccggctggcgtatatcggggatgccgatttgcacgcgtcttttgtttcttggatggcggagcatacgcgggagcggattctggcattggcagggggcgattatattgccaaagaattttacagcgatattttatccgaccgccaattccgccgttcgcttttatgccgtgaggaagtcggggatactgtcaggcgtgacgagtcggttgccgtcgaagtgatagaaagtttgaatttccgcccggcaagaggggaaacaatcaactttgatgaaaacgataccctgctttcgggcatacgcgatgtgatgaaaaccggagagccgtttaaaacggaagatgttgcggaaaatctcgcccgccgatttcccggtttgacattcgaccgtatgaaaatcaattcccagcttttattgcaaaccattctcgggcgtttttctgtttcatcagacaatgcgggcaaacaattttttgaagaccataaaacctatgtgccggcgcgttttacagattatgccgccgcctttgtggaacacggcgcggaagcgtttgtccggcctgccaaccgttacaacgaaagcaccccctcattcggatatgggcatttgtacattatgcggcaattgtcgcggccgacgagcaaacaggcattgattgaaacggttgccgaaaacttgaacatcgtcagcaccacgcccgacggtttgacattccatccgcctgccgaagtgtatgtggaagaaatattggcagacttggcagacaggcattttctcgtttcggcggattga

SEQ ID NO: 49300 - DNA, 687 bp, Neisseria meningitidis
atgtttgatttcggtttgggcgagctggtttttgtcggcattatcgccctgattgtcctcggccccgaacgcctgcccgaggccgcccgcaccgccggacggctcatcggcaggctgcaacgctttgtcggcagcgtcaaacaggaatttgacacgcaaatcgaactggaagaactaaggaaggcaaagcaggaatttgaagctgccgctgctcaggttcgagacagcctcaaagaaaccggtacggatatgcagaacagtctgcacgacatttccgacggtctgaagccttgggaaaaactgcccgaacagcgcacgcctgctgatttcggtgtcgatgaaaacggcaatccctttcccgatgcggcaaacaccctatcagacggcatttccgacgttatgccgtccgaacgttcctacgcttccgccgaaacccttgggaacgacgggcaaaccggcagtacagccgaacccgcggaaaccgaccaagaccgcgcatggcgggaatacctgactgcttctgccgccgcacccgtcgtacagaccgtcgaagtcagctatatcgatactgctgttgaaacgcctgttccgcacaccacttccctgcgcaaacaggcaataagccgcaaacgcggtttgcgtccgaaacaccgcgccaaacctaaattgcgcgtccgtaaatcataa

SEQ ID NO: 49301 - DNA, 777 bp, Neisseria meningitidis; identical to SEQ ID NO: 37612

SEQ ID NO: 49302 - DNA, 789 bp, Neisseria meningitidis; identical to SEQ ID NO: 39927

SEQ ID NO: 49303 - DNA, 1254 bp, Neisseria meningitidis
gtggacaaactgaaaatctccgcaaacggcccgctcaacggggaaataacggtctcgggcgcgaaaaacgcggcattgccgctgatgtgcgcgggtttgctgacatcgggtacgttgcgcctgaaaaatgtgcctatgctggcagatgtgaaaaccacacaaaagctgcttcaggggatgggcgcgcgcgtcctgaccgacaatatcagtgaatttgaaatcaacggtggtacggtaaacaacacctgcgccccttacgaattggttcggacgatgcgggcctcgattttggtgctggggccgacgctggcgcgtttcggcgaggcgcaagtcagcctgccgggcggctgcgccatcggttcgcgccccgtcgatcagcatttgaaaggcttggaagcgatgggtgctgagattgttatcgaacacggttacgtcaaagccaaaggcaaactcaaaggtacgcgcgtggcgatggatgtcgttaccgtcggcggcacggaaaacctgctgatggcggcgacgctggcggaaggtacgacggttttggaaaactgcgccattgagcctgaagtggtcgatttggcggaatgcctggtcaaaatgggcgcgaaaatcagcggcatcggtacgtccacaatgattgtggaaggtgcggacgagctgcacggctgcgaacacagcgtcgtccccgaccggattgaggcggggacgttcctgtgcgcggtggcgataaccggcggcagggtggttttgcggaatgccgcgccgaaaacgatggaagtggtgttggacaaactggttgaggcaggtgcggtgattgaagcgggcgacgattggatcgccatcgatatgcggcagcgtccgaaggcggtggacatccgcacggtcgtccaccccggcttccccacggatatgcaggcgcagtttatggcattgaatgccgtggcggagggaagctgccgcgtggtggaaacgatttttgaaaaccgctttatgcacgtccccgagttgaatcgaatgggggcgaacattacaaccgagggcaatacggcatttgtgcagggtgtggaacagctttccggcgcggtcgttaaggcgacggatttgcgtgcgtccgccagcctcgttatcgccggtttggcggcgcgaggcgaaaccgtggtcgaacagatttaccacttggatcgcggttatgaaaatattgaaaaaaaactcggcagcgtcggcgcgaaaatcgagcgcgtatccggctga

SEQ ID NO: 49304 - DNA, 474 bp, Neisseria meningitidis; identical to SEQ ID NO: 45148

SEQ ID NO: 49305 - DNA, 1680 bp, Neisseria meningitidis; identical to SEQ ID NO: 44913

SEQ ID NO: 49306 - DNA, 936 bp, Neisseria meningitidis; identical to SEQ ID NO: 44359

SEQ ID NO: 49307 - DNA, 207 bp, Neisseria meningitidis
atggatgaagcggtttttgccgattgggcgttgaaaatctgcctgaccggcttgattatttttttgggttttatcgtttggaatttgggcaaggagtccaaagcaggcaaattcggcatcgccattttgtttttggttttgggcttgggcgtgttcggttttgtattcaaagaactgctgattaagtttttggtattgccgaaatag

SEQ ID NO: 49308 - DNA, 507 bp, Neisseria meningitidis
atgacagcccttttttacctgccttttccgtggttcgcggaggaaacgattaatctcaccgccgccgtcatttttgccgttgccgccttaaccgactggtttgacggatttttggcaagactgtggaaacagacttccgatttcggcgccttcctcgatcccgtcgccgacaagctgatggttgccgtatcgctacttttactggtcaaactcgaccggacctatgttttgtttgccatgatcattatcggcagggaaattaccatttccgcattgcgcgaatggatggcgcaaatgggcaaaaggaacagcgttgccgtcgccaccgtcggtaagttcaaaaccgccgcgcaaatgctggcaattttcctgctgctgctgaatattcccgatttttacggatttaatcttgttgttatcggcaatgtattgatgtttatcgcatctttgctgacagtctggtcgatgctgtattatctgaaaatggcgtggaaagaaatcgcctga

SEQ ID NO: 49309 - DNA, 822 bp, Neisseria meningitidis; identical to SEQ ID NO: 44998

SEQ ID NO: 49310 - DNA, 459 bp, Neisseria meningitidis
atgaaagcaatccaaaaaggtttcaccctgatcgagctgatgatcgtcatcgccatcgtcggtatcttggcagccgtcgccctgcccgcataccaagactacaccgcgcgcgcccaaatgtccgaagccctgactttggcggaaggtcaaaaatccgcagtggtcgagtattattccgacaacggtacgttccctgccaacaatacttccgcaggtattgctgcttctagtacaattacaggtaaatatgtgagttctgtagcagttacagcggaagcatctggcaatgcatctattgccaagattaccgccaaaatgaaaaaaaatggtgtgaacaaagatatttcagaaaaaactttggtgctggtgggtaaacaaaacagtggttcgttctcttggacttgtcaaaaaggcgatgtggacgaaaaattcctgccgtcttcctgccgcgccaaataa

SEQ ID NO: 49311 - DNA, 306 bp, Neisseria meningitidis; identical to SEQ ID NO: 38577

SEQ ID NO: 49312 - DNA, 891 bp, Neisseria meningitidis; identical to SEQ ID NO: 38441

SEQ ID NO: 49313 - DNA, 168 bp, Neisseria meningitidis; identical to SEQ ID NO: 38073

SEQ ID NO: 49314 - DNA, 210 bp, Neisseria meningitidis; identical to SEQ ID NO: 39235

SEQ ID NO: 49315 - DNA, 1047 bp, Neisseria meningitidis; identical to SEQ ID NO: 43592

SEQ ID NO: 49316 - DNA, 1275 bp, Neisseria meningitidis; identical to SEQ ID NO: 38707

SEQ ID NO: 49317 - DNA, 1881 bp, Neisseria meningitidis; identical to SEQ ID NO: 38456

SEQ ID NO: 49318 - DNA, 381 bp, Neisseria meningitidis
atgaaacagacagtcaaatggcttgccgccgccctgattgccttgggcttgaaccaagcggtgtgggcggatgacgtatcggattttcgggaaaacttgcaggcggcagcacagggaaatgcagcagcccaatacaatttgggcgcaatgtatgccgaaggacaaggcgtgcgccaagattatgtcgaagcggtcagatggtttcgtaaggcggcggatcaggggttagcacaagcccaatttaatttgggcgcaatgtattacaaagggcacggcgtgcgccaagaccgcgcccttgcacaagaatggcttggcaaggcgtgtcaaaacggaaaccaagacggctgcgacaatgaccaacgcctgaaagcgggttattga

SEQ ID NO: 49319 - DNA, 333 bp, Neisseria meningitidis; identical to SEQ ID NO: 43845

SEQ ID NO: 49320 - DNA, 1797 bp, Neisseria meningitidis
atgaacaaaatataccgcatcatttggaatagtgccctcaatgcctgggtcgtcgtatccgagctcacacgcaaccacaccaaacgcgcctccgcaaccgtggcgaccgccgtattggcgacactgttgtttgcaacggttcaggcgaatgctaccgatgacgacgatttatatttagaacccgtacaacgcactgctgtcgtgttgagcttccgttccgataaagaaggcacgggagaaaaagaaggtacagaagattcaaattgggcagtatatttcgacgagaaaagagtactaaaagccggagcaatcaccctcaaagccggcgacaacctgaaaatcaaacaaaacaccaatgaaaacaccaatgaaaacaccaatgacagtagcttcacctactccctgaaaaaagacctcacagatctgaccagtgttgaaactgaaaaattatcgtttggcgcaaacggtaataaagtcaacatcacaagcgacaccaaaggcttgaattttgcgaaagaaacggctgggacgaacggcgaccccacggttcatctgaacggtatcggttcgactttgaccgatacgctgctgaataccggagcgaccacaaacgtaaccaacgacaacgttaccgatgacgagaaaaaacgtgcggcaagcgttaaagacgtattaaacgcaggctggaacattaaaggcgttaaacccggtacaacagcttccgataacgtcgatttcgtccgcacttacgacacagtcgagttcttgagcgcagatacgaaaacaacgactgttaatgtggaaagcaaagacaacggcaagagaaccgaagttaaaatcggtgcgaagacttctgttattaaagaaaaagacggtaagttggttactggtaaaggcaaaggcgagaatggttcttctacagacgaaggcgaaggcttagtgactgcaaaagaagtgattgatgcagtaaacaaggctggttggagaatgaaaacaacaaccgctaatggtcaaacaggtcaagctgacaagtttgaaaccgttacatcaggcacaaaagtaacctttgctagtggtaatggtacaactgcgactgtaagtaaagatgatcaaggcaacatcactgttaagtatgatgtaaatgtcggcgatgccctaaacgtcaatcagctgcaaaacagcggttggaatttggattccaaagcggttgcaggttcttcgggcaaagtcatcagcggcaatgtttcgccgagcaagggaaagatggatgaaaccgtcaacattaatgccggcaacaacatcgagattacccgcaacggcaaaaatatcgacatcgccacttcgatgaccccgcaattttccagcgtttcgctcggcgcgggggcggatgcgcccactttaagcgtggatgacgagggcgcgttgaatgtcggcagcaaggatgccaacaaacccgtccgcattaccaatgtcgccccgggcgttaaagagggggatgttacaaacgtcgcacaacttaaaggtgtggcgcaaaacttgaacaaccgcatcgacaatgtggacggcaacgcgcgcgcgggtatcgcccaagcgattgcaaccgcaggtttggctcaggcctatttgcccggcaagagtatgatggcgatcggcggcggtacttatcgcggcgaagccggttacgccatcggctactcgagcatttctgacactgggaattgggttatcaagggcacggcttccggcaattcgcgcggtcatttcggtacttccgcatctgtcggttatcagtggtaa

SEQ ID NO: 49321 - DNA, 2691 bp, Neisseria meningitidis
atgtccgacaaccgcctcgacaccgcccgccgccattccctcttcctcgcccgccagctcgacaacggcaaactcaagcccgaaattttcctgcctatgctggacaaggttttgaccgaagcggatttccaagcctttgccgactgggacaaaatccgtgcggaagaaaacgaggaagaattggcgcggcagttgcgcgggttgcgccgttatgtggtgtcgcagattatcgtgcgcgatatcaaccgcatcagcgatttgaacgaagtaacccgcacgattacgctgtttgccgattttgccgtcaataccgcgctggattttgcctacgcctattatcgggacatgtacggcacgccgatcgggcgttataccaaatcgccgcagcatttgagcgtggtggcgatgggcaaggcgggcggccatgagttgaacgtgtcttccgacatcgatttgattttcacctatcccgaatcgggcgacaccgacggcaggcgcgaacggggcaatcaagagtttttcaccaaagtcgggcagaaactgattgcgctgctgaacgacatcaccgccgacggacaggtgttccgcgtcgatatgcggctgcggccggacggtgattcgggcgcgttggtattgagcgaaaccgcgctggagcaatatttgattacgcaggggcgcgaatgggaacgctacgcgtggtgcaaaggccgcgtggttacgccgtatccgaacggaatcaaatcgctggtgcgccctttcgtgttccgcaaatatttggattacagcgcgtatgaggcgatgcgtaagctgcaccgccaaatcagcagcgaagtcagcaaaaaaggcatggcggacaacatcaaactcggcgcgggcggcatccgcgaagtcgaatttatcgcccagattttccagatgatacgcggcggacaaatgcgcgcgctgcaactgaaaggcacgcaggaaacgctgaagaagcttgccgaaaccgggatcatgccgtctgaaaacgtcgaaaccctgcttgccgcctaccgcttcctgcgcgatgttgaacaccgcctgcaatactgggatgaccagcaaacccaaaccctgccgacctcgcccgaacagcggcaactgctcgccgaaagcatgggtttcgacagttattccgctttttcagacggtctcaacattcatcggaacaaagtcaatcagttgttcaacgaaattttgagcgaacccgaagagcaaacgcaagacaacagcgaatggcaatgggcatggcaggaaaagcctgatgaagaagaacggctaggccgtctgaaagaatatgggtttgatgccgaaaccatcgccacgcggctcgaccaaatccgcaacggccataaataccgccacctttccgcccacgcccagccgcgttttgacgccattgtgccgttgttcgtacaagcggcggcagagcaaaacaacccgaccgatacattgatgcggctgttggattttctcgaaaacatcagccgccgatccgcctatctcgccttcctcaacgaacatccgcaaaccttggcgcaactggcgcagattatgggccaaagttcttgggtggcggcgtatctgaacaaatatccgattttgttggacgaactcatcagcgcgcagcttttggataccgcgtttgattggcaggcgctcgccgccgccctttcagacgacctcaaagcctgcggcggcgatactgaagcgcaaatggacaccctgcgccgcttccagcacgcccaagtcttccgtctcgccgtccaagacctcgccggactgtggacggtagaatccctctccgaccaactctccgccctcgccgacaccatcctcgccgccgccctgctgtgcgcatgggcggacatgccaaaaaaacaccgcgacacaccgcaattcgccatcgtcggctacggcaaactcggcggcaaagaactcggctacgcctccgacctcgacttggtctatctttatgacgacccgcatcccgatgcaggcgacgtgtacagccgccttgcccgccgcctgaccaactggctttccaccgccaccggcgcaggcagcctctacgaaaccgacctgcgcctgcgccccaatggcgatgcaggtttcctcgcccacagcatcgccgcctttgaaaaataccagcgcgaaaacgcctggacgtgggaacaccaatcccttacccgcgcccgcttcatctgcggcacgtccgaaattcagacggccttcgaccgcatccgcaccgaaatcctcaccgccgaacgcgaccaaaccgccttggcaggcgaaatcatcgaaatgcgcgaaaaaatgttccccacccacccgcctgccgacagcaacgtcaaatacgcgcgcggtggcgtggtcgatgtcgaatttatcgtccaatatctgatacttgcccatgcccgccagtatccgcaactcttggacaactacggcaacatcgccctcttaaacatctccgccgactgcggtttgattgacaaaaccctcgccggacaaagccgcaccgcctatcgcttctaccgccggcagcagcacaacaccaaactgcgcgacgcggcaaaaaccgaagtaaccggcgaactgttggcacattacggcaatgtcaggaaattgtggcgggaagtgttcggcgaagaagcggcaaccgtctga

SEQ ID NO: 49322 - DNA, 2439 bp, Neisseria meningitidis; identical to SEQ ID NO: 44804

SEQ ID NO: 49323 - DNA, 507 bp, Neisseria meningitidis; identical to SEQ ID NO: 38558

SEQ ID NO: 49324 - DNA, 1791 bp, Neisseria meningitidis; identical to SEQ ID NO: 39331

SEQ ID NO: 49325 - DNA, 1011 bp, Neisseria meningitidis
atgcttccattccttccagaaccctccctttcctatacgcaacaaaaccgtaccgccgttttgctgttgaacctcggcacgcccgacgcgccgaccgcgcaggcggtacgaccttatctgaagtcctttctgaccgaccggcgcgtcgtcgaactgcccaaatggctgtggtatcccattctgcatggtctggtactgacgctccgccccaaaaaaagcgcgcacgcctatgaaaaaatctggtttaaggaaggttcgcccttagaagtttacacagcacgccaagctgccgcgcttgccgaacgtatgcccgacctcatcgtccgccacgccatgacctacggcaatccttcggtggcagacgtattgtcggaactgaaggcgcaaggcgcgggcaggctgctggttatcccgatgtacccgcaatatgccgcttccagcagcggcgcggcagtagataaggtgtgcgaacaattactgctgcaacggaaccaaatgagcgtccgcaccgtttcgcgcttttatgacgataccggctacattgatgcgatgaaaaaccacatcctccgatattgggcggaacacggacgtgggaaaaaactgatgttgagttttcacggcgtaccgcagaagcactacgacctcggcgacccctatcccgacgagtgccgccacaccgccaaactgcttgccgaagcactggaactgaccgaagaccaatatgtcgtatcgttccaaagccaattcggcagggcaaaatgggttacaccgagtacgcaggatttgttcggcaaactgcccaaacagggggtaaccgagctggacgtattctgcccgggctttttggcagactgtttggaaacactggaagaaatcgccctgatggggcgggaacagttttatgaagcaggcggcaaaagctaccgctatatcccctgcctcaacgacaatcccgactggatagacgcactcgtcgcacttgccgaagaaaaccttggcggctggcgttga

SEQ ID NO: 49326 - DNA, 2427 bp, Neisseria meningitidis
atgtcggcacaaaccgatcccggctacttcttcatgcccaaccacattatcctgataggcgcgagcgaacgtccgtacagcctgggcgaacgcgtactcagcaacctgctgagtacgccctttcaaggaaaaatcacccccgtaaacccgcgccaccacaccatagccgggcttcccgcctacaccagcctcaacaaaatccccggcaatgcagacctgattattgccgttaccctacccgacagttacgacaccctcttcaaaacctgccgcaaaaagcagctccgacacatcatcctcatacaggactgggacagcctgtctgccgcagaactgcacaccgccgaaactgccatccgcaaacaccacggcaacggactcaacatcaccgcctgcaccaccgcaggcatccaactgccctcactcggacttaacatcagtacccaagacggatacgccgcaggccataccgccatactgaccggcaatgccgccgtcagccgccaaatcgacaacatcctgaacaaactccgtcaaggcacatcccgccacatcagcctgcatcccggcatcagccccatcacatccgccgattggctcaaccgcttcggacacagcctgcacaccaaaaccgccgtcctacaccacaaccctgaagagaatcagcgcaaactgttcagcgcaatccgccaatttacccgccatacgccgctgattctccacatcacctgccgcacgacagaaaccgaccgtgccgtactgcactgcctcgcccgacactgcaacttcctcatcagtttcaacgccgacgacctcgaagccgcactgcgcgcccaactgtccgaccttccacccctgtcccgactcgacatcctgtccgacacgcctgccgaatggctgaacgcgcacgcgccaaaaaccctcgccctccactttcccaaccttccccaccacatccgcaacggacacctgaccggcacacccacaccctcaatctgccacgacatcgcctcacgtcagcttgcccgccccgacacccaagccgtcctgaccatcctcagcccctccggacacgaggattacaaaaaaacagcacgcgcccttatccgcctgtccgaacagagcgccaaacccctgctcgtcagcagccccttttcagacggcataacacatttcgacacccccactcaggcaatccgcaccctttcctaccgcaacaccgccgccgccctgaaacaggcacagctcgacattgcaccgccgcagccatgccgtctgaaaacaccgcaaccccaaaacatcaaaaaagccctcgaagccgccgaccccgccctaatcgccgaagccctgcacctccccccctaccggcacaccacccataacgccgtccaattccaattcggcagccactccctctatggcgacatcctgaccgcacgctgcaacggacaaaccactgccgtactcccgccgtttaccacgctcgacagccgccaccttgcccgctttgccgaactcgacggcacacaaaccctcgaccagttcctgcacacactgaccatcattcccgaataccgccaacacattctcggcatcaccctcaacctaaacggcggacaatacagcagcgatttcatcttaaagacacccgaaacacacgacacgcccaaacgcaagaacacaggcaaagccgcccaaaccctcgaacatgccgccgcaaaaatgcagagtgccgccgcatacctgaaacacaaaaacccgacagccgccgaatttctccgccacacaagcgaagccgccgcagaactgctcggcagcaaaaccgaaaccggagcagccgtacccaacgtacttgccccctatcccgcagcataccccaaaacactgtccctaagaaacaacacgaccgttaccattacccccattttgcccgaagacgcagaagccaaacagcagttcgtccgcagcctcggtcccgaagcacggtacacacgcttcatgacccacaccaacgaactgcccgcagccacgttggcacgcctgtgcaaccccgattaccactgtgaagccgcatggacggcaaaggatgccgacagcaacatcgtcgccgtcgtccgccacagccgcctgaaccgcaacgaatgcgaattcggcatcacactggcggaacatatgcgcggcagcggactggcacagaaaatgatggaactcatcatccaaaccgccgcacagcaaggctaccggactatgagtgccgacattctcaaaaccaatacccccatgatcaaacttgctgaaaaatcaggatttaccctcaaggaatcggacaccgaaaaaaacctgtaccgcgcatatctgaaccttgcggcagacaaaacaacagaaaaaacaaataaaaacttgcgcaccgaccacaaaataacctaa

SEQ ID NO: 49327 - DNA, 975 bp, Neisseria meningitidis; identical to SEQ ID NO: 38189

SEQ ID NO: 49328 - DNA, 1866 bp, Neisseria meningitidis; identical to SEQ ID NO: 39323

SEQ ID NO: 49329 - DNA, 822 bp, Neisseria meningitidis
atgagcagtccgcgccatgtgttttacatttccgaccgtaccggtctgactgccgagaatatcggcgaggctttgctgaaccagtttggcaatctgtcgttcaaacgccatacgcatccgtttgtcgatacgccggaaaaggcgcgcgcggtggtggagaaggtcaatcggagccggcaggaaaacggtcagcgtccgattgcgtttgtcagtgtggttgatgacgaaatccgtcggattatcaaaggggcggatgcttttcagattaatttctttgagacttttttgggactgttggagaaagaactcaataccgaagccacggcatccgagcaggggcatcacagtatcggtaatacgaagcgttacgatgcgcgtatggaggcggtgaatttctcattgaaccacgatgacggggtcagcgataagaaccttcaggaagcggatgtaatcttgatgggtgtatcgcgttcgggcaaaacgccgacctgcctttacctcgccctgcaatacggcatccgtgcggcaaactatccgctgattcccgacgatttggaatcggccgatctgccgcgtatggtcaagccttatagggataagctgttcgggttgaccatccagccggaacgtttgcaggccatccgccaagagcgccgcccgaattcaacttatgccaaaatcgatacatgccgcagcgaggtggcggacgcgcagagtatgttcagacggcatggcattccgtttgcgaatacgacggataaatcggttgaggaattggcggtacacatccttcaggcgtgcaagctcaaacgcaggttttga

SEQ ID NO: 49330 - DNA, 1260 bp, Neisseria meningitidis; identical to SEQ ID NO: 38128

SEQ ID NO: 49331 - DNA, 1302 bp, Neisseria meningitidis; identical to SEQ ID NO: 45009

SEQ ID NO: 49332 - DNA, 1326 bp, Neisseria meningitidis
atgaaaaaatacctattccgcgccgccctgtacggcatcgccgccgccatcctcgccgcctgccaaagcaagagcatccaaacctttccgcaacccgacacatccgtcatcaacggcccggaccggccggtcggcatccccgaccccgccggaacgacggtcggcggcggcggggccgtctataccgttgtaccgcacctgtccctgccccactgggcggcgcaggatttcgccaaaagcctgcaatccttccgcctcggctgcgccaatttgaaaaaccgccaaggctggcaggatgtgtgcgcccaagcctttcaaacccccgtccattcctttcaggcaaaacagttttttgaacgctatttcacgccgtggcaggttgcaggcaacggaagccttgccggtacggttaccggctattacgagtcggtgctgaagggcgacgacaggcggacggcacaagcccgcttcccgatttacggtattcccgacgattttatctccgtccccctgcctgccggtttgcggagcggaaaagcccttgtccgcatcaggcagacgggaaaaaacagcggcacaatcgacaataccggcggcacacataccgccgacctctcccgattccccatcaccgcgcgcacaacggcaatcaaaggcaggtttgaaggaagccgcttcctcccctaccacacgcgcaaccaaatcaacggcggcgcgcttgacggcaaagccccgatactcggttacgccgaagaccccgtcgaacttttttttatgcacatccaaggctcgggccgtctgaaaaccccgtccggcaaatacatccgcatcggctatgccgacaaaaacgaacatccctacgtttccatcggacgctatatggcggacaaaggctacctcaagctcgggcagacctcgatgcagggcatcaaagcctatatgcggcaaaatccgcaacgcctcgccgaagttttgggtcaaaaccccagctatatctttttccgcgagcttgccggaagcagcaatgacggtcccgtcggcgcactgggcacgccgttgatgggggaatatgccggcgcagtcgaccggcactacattaccttgggcgcgcccttatttgtcgccaccgcccatccggttacccgcaaagccctcaaccgcctgattatggcgcaggataccggcagcgcgattaaaggcgcggtgcgcgtggattatttttggggatacggcgacgaagccggcgaacttgccggcaaacagaaaaccacgggttacgtctggcagctcctacccaacggtatgaagcccgaataccgcccgtaa

SEQ ID NO: 49333 - DNA, 1269 bp, Neisseria meningitidis
atgtcgtctgaagcccttgcaaaagaaaccctcaatccgtttgaaatcgcgcgcaaacaggtcaaaaccgcctgcgaccggctgaaaaccgatccggccgtttatgaaatcctgaagagtccgacccgcgtgttggaagtcaatttccccgtcaaactcgacgacggcacggtcaaaaccttcacgggctaccgttcgcaacacaacaacgccgtcggcccctataaaggcggcgtgcgcttccatcccggagtgaatctggacgaagtcaaagccctgtcgatttggatgaccatcaaatgctgcgttgcgggtattccttacggcggcggcaaaggcggtattaccttggatccgcgcgattattccgaggcggaactggaacgcatcgctcgcgcttattccgaagccatttctccgctgattggcgagaaaatcgatattcccgcccccgatgtgaataccaacggcaaaatcatgtcttggatggtggatgcttatgaaaacgtggtgaaacattccgcgccgggcgtatttaccggaaaaccggttgagttcggcggctctttggcgcgtaccgaggctaccggttacggcgtgaacctcgccgccgtccaagctttggaaaaactgggcaaggacgtgaagggtgccacttacgccattcaaggtttcggtaatgtgggttaccacacaggttattacgcgcatcaatccggcgcgaaagttgttgcggtttctactgtcgatgttgccatttacaacgaaaacggcttggatatggaagctttgtttaaagagttccaagaaaaaggcttcatcaccaacgaagccggttacggcaaagaaattaccaacgccgaacttttggctttggatgtggacgtactcgccccttgcgcgctggaaaaccaactgacttccgaaaacgccggtaaagtccgcgcgaaaatcgtggtcgaaggcgcgaacggcccgactacgcccgaagccgacgttatcctgcgtcaaaacggcgtattggtcgtgcctgatattttggcgaactgcggcggcgtggtggtatcttattttgaatgggtacaaaacctgcaaggctattattgggagtttgacgaagttcaagagaaagaaaccgtcgtcctgcgacgcgcgttccgcgatatatggaacttggctcaagaatacgatgtcgatttgcgaaccgcgtcttacatgatgagtatccgccgtgttgaaaaagcgatgaagctgcgcggttggtattga

SEQ ID NO: 49334 - DNA, 1047 bp, Neisseria meningitidis
atgattccggccacctacaccctgtcccaaatcaccgcgcggctcggcggcgaatggcgcggcgaggacatttccgttaccaccgtgcgcccgctcgcagacgcgcaggcggaacacatcagcttcctcgccaatccgaaatacaaagccgaagtccacgacagcagcgcgggcgcggtcatcgtttccgccaaagcggcagacggatttgaagggcgcaacctgattgtcgccgacgacccctatctctatttcgccaaagtcgcccgcctgttttcacccgtcgtcaaagcgcgcggcggcatccatccgaccgccgtcgtcgaaccgggcgcgaccgttcccgccagctgcgaaatcggcgcgaacgtctacatcggcgcaaacaccgtgctcggcgaaggctgccgcatcttggcaaacgccgtcgtccaacacgattgcaaactgggcgacgaagtcgtcctgcatcccaacgccgtcgtttattacggctgtacactgggcagacgcgtcgaaatccacagcggcgcggtcatcggcgcggacggtttcggactcgcttttgccggcgattcatggtttaaaatcccgcaaaccggcgcggtaacgctgggcgacgacgtggaaatcggctcgaacaccaacatcgaccgcggcgcgatgagcgacaccaccgtcggcaacggcaccaaaatcgacaaccaagtccaaatcggacacaactgcaaaatcggttcgcacaccgtcatcgccgccaaaaccggcatctcaggcagcgtaaccataggcagctactgcatcatcggcggcggcgtcggtacggtcggacacatcgaaatcgccgacaaaaccaccatcggcggcggcacgtccgtcacccacagcattaccgaaagcggcaaacacctcgccggcatcttcccgatgtccacccataaagaatgggcgcgcaacgctgtttacatccaccgcttaagcgaaatgaacaaacggctcaaaacactagagcagcagctttcagataccggtcaagacagcaaataa

SEQ ID NO: 49335 - DNA, 813 bp, Neisseria meningitidis; identical to SEQ ID NO: 39121

SEQ ID NO: 49336 - DNA, 120 bp, Neisseria meningitidis; identical to SEQ ID NO: 38239

SEQ ID NO: 49337 - DNA, 873 bp, Neisseria meningitidis; identical to SEQ ID NO: 38596

SEQ ID NO: 49338 - DNA, 546 bp, Neisseria meningitidis
ttgatattggcggttgccttgggcggtctgtcggcatggttgggacgcatcagcgaagtcgagattgaagaagtcaggctcaatcccgacgaaccgcaatacacaatggacggcttggatggcaggcggtttgacgaacagggatacttaaaagaacatttgagcgcgaaaggcgcgaaacagtttcccgaaagcagcgacatccattttgattcgccgcatctcgtgttcttccaagaaggcaggttgttgtacgaagtcggcagcgatgaagccgtttaccataccgaaaacaaacaggttctttttaaaaacaacgttgtgctgaccaaaaccgctgacggcaaacggcaggcgggtaaagttgaagccgaaaagctgcacgtcgataccgaatctcaatatgcccaaaccgatacgcctgtcagtttccaatatggtgcatcgcacggtcaggcgggcggcatgacttacgaccacaaaacaggcatgttgaacttctcatctaaagtgaaagccacgatttatgatacaaaagatatgtaa

SEQ ID NO: 49339 - DNA, 300 bp, Neisseria meningitidis; identical to SEQ ID NO: 38838

SEQ ID NO: 49340 - DNA, 936 bp, Neisseria meningitidis
atggaactctttaaaatcaaacgcgatattccgtttatgagctacggcaaactgacgacctttatttcgttggttacctttattgccgccgtattctttttggttaccagaggtctgaatttctctgtcgaatttaccggcggcacggtaatggaagtccaatatcagcagggtgcggatgtcaataagatgcgcgaacgcctcgatacgctgaaaataggtgatgtacaggttcaggcattgggtacgaacaaacacatcatgatccgcctgccgaacaaagaaggtgttacttccgcacagttgtccaatcaggttatggatttgctgaaaaaagacagtcccgacgttaccttgcgccaagtcgaatttatcggcccgcaagtcggtgaggaattggtaagtaatggattgatggctttaggttttgtcgttatcggcatcattatttacctgtcgatgcgttttgaatggcgttttgccgtatctgccattatcgccaatatgcacgacatcgtgattattctcggctgctttgccttcttccaatgggaattttcgctgaccgtcttggcgggtatccttgccgtattgggctattctgtgaacgaatccgtcgtcgtcttcgaccgtatccgtgaaaacttccgcaagccggcgatgcgcggacatgccgtgccggaagtcatcgacaacgcgattaccgcaacgatgagccgcaccatcattacccacggttcgaccgaggcgatggttgtttctatgctggtgttcggcggtgcggccttgcacggcttttctatggcgttgaccattggcatcgtgttcggcatttattcttccgtattggttgccagcccgcttctgctaatgttcggtttgagccgcgacaatatcggtaaagaaccgaagaagaaagaagaaatcgtggtttga

SEQ ID NO: 49341 - DNA, 696 bp, Neisseria meningitidis; identical to SEQ ID NO: 38698

SEQ ID NO: 49342 - DNA, 600 bp, Neisseria meningitidis; identical to SEQ ID NO: 38180

SEQ ID NO: 49343 - DNA, 1728 bp, Neisseria meningitidis; identical to SEQ ID NO: 39129

SEQ ID NO: 49344 - DNA, 1443 bp, Neisseria meningitidis; identical to SEQ ID NO: 39738

SEQ ID NO: 49345 - DNA, 1458 bp, Neisseria meningitidis; identical to SEQ ID NO: 39537

SEQ ID NO: 49346 - DNA, 945 bp, Neisseria meningitidis; identical to SEQ ID NO: 39666

SEQ ID NO: 49347 - DNA, 1296 bp, Neisseria meningitidis; identical to SEQ ID NO: 44273

SEQ ID NO: 49348 - DNA, 678 bp, Neisseria meningitidis; identical to SEQ ID NO: 39504

SEQ ID NO: 49349 - DNA, 336 bp, Neisseria meningitidis; identical to SEQ ID NO: 38968

SEQ ID NO: 49350 - DNA, 645 bp, Neisseria meningitidis; identical to SEQ ID NO: 41316

SEQ ID NO: 49351 - DNA, 753 bp, Neisseria meningitidis
atgattaccctgctttccttaaacaatctgccgtcaaaatgggatgaaatccgctattggctcgaaacccaagtttttgagtgcgaagttatgccgtatcccaatctgacggaacacgaagccaagcagttcgagcgggatttttgggacaatatcggctgcgcgcctgaagaatatgtccgcatccgccgcgccatccgtttgttggaagcgcgttatcccgacagcttgaacgagctggtgtgtgccgccattgccacgcctttgggcgagatgctggcggtgttcggaaataagggattgtgtctgctggagtttgtcggacagaagcatttggaacaggaaattgccgccgtccaaaaagccttgcgcggacggtttgtgtttcgggaggatgagcggacgcaacttttgcggcaggaattggacttatacttcaagggtcgtctgaaaacctttgccacgcctttggagcagattggcaccgagtttcaaaagcaggcatgggacgcgctcttggcgattccttacggcgaaacgcgcagctacaaggagcaggcgcagcgtttgggcaaccccaaagccgtccgcgccgttgccgccgccaacgggcagaacaaagtatctatcctgattccctgccaccgcgtcatcggcagcgacggcaaactgaccggctacgcgggcgggttgaaccgcaaacagtttttactggctttggaacgcggcgaagttcagacggcattgttttaa

SEQ ID NO: 49352 - DNA, 816 bp, Neisseria meningitidis; identical to SEQ ID NO: 44574

SEQ ID NO: 49353 - DNA, 279 bp, Neisseria meningitidis; identical to SEQ ID NO: 38315

SEQ ID NO: 49354 - DNA, 390 bp, Neisseria meningitidis; identical to SEQ ID NO: 39791

SEQ ID NO: 49355 - DNA, 693 bp, Neisseria meningitidis; identical to SEQ ID NO: 37236

SEQ ID NO: 49356 - DNA, 864 bp, Neisseria meningitidis; identical to SEQ ID NO: 39125

SEQ ID NO: 49357 - DNA, 2595 bp, Neisseria meningitidis; identical to SEQ ID NO: 39681

SEQ ID NO: 49358 - DNA, 333 bp, Neisseria meningitidis; identical to SEQ ID NO: 39597

SEQ ID NO: 49359 - DNA, 447 bp, Neisseria meningitidis; identical to SEQ ID NO: 37478

SEQ ID NO: 49360 - DNA, 948 bp, Neisseria meningitidis
atggaatttttcattatcttgttggcagccgttgccgttttcggtttcaaatcctttgttgtcatcccacaacaggaagtccacgttgtcgaaaggctcgggcgtttccatcgcgccctgacggccggtttgaatattttgattccctttatcgaccgcgttgcctaccgccattcgctgaaagaaatccctttagacgtacccagccaggtctgcatcacgcgcgacaatacgcagctgactgttgacggcatcatctatttccaagtaaccgaccccaaactcgcctcatacggttcgagcaactacatcatggcaattacccagcttgcccaaacgacgctgcgttccgttatcgggcgtatggagttggacaaaacgtttgaagaacgcgacgaaatcaacagtactgttgttgcggctttggacgaggcggccggggcttggggtgtgaaggttttgcgttatgagattaaagacttggttccgccgcaagaaatccttcgctcaatgcaggcgcaaattactgccgaacgcgaaaaacgcgcccgtatcgccgaatccgaaggtcgtaaaatcgaacaaatcaaccttgccagtggtcagcgcgaagccgaaatccaacaatccgaaggcgaggctcaggctgcggtcaatgcgtcaaatgccgagaaaatcgcccgcatcaaccgcgccaaaggtgaagcggaatccttgcgccttgttgccgaagccaatgccgaagccatccgtcaaattgccgccgcccttcaaacccaaggcggcgcggatgcggtcaatctgaagattgcggaacaatacgtcgccgcgttcaacaatcttgccaaagaaagcaatacgctgattatgcccgccaatgttgccgacatcggcagcctgatttctgccggtatgaaaattatcgacagcagcaaaaccgccaaataa

SEQ ID NO: 49361 - DNA, 579 bp, Neisseria meningitidis; identical to SEQ ID NO: 39087

SEQ ID NO: 49362 - DNA, 456 bp, Neisseria meningitidis
atggatttgcgcaaattaaaaaaactgattgatttggttgaagaatcgggtatcgccgaaatcgaagtaaccgaaggcgaggaaaaagtccgcatcacccgaaccatcgccgccgcacccgtttacgccgcgcccgtacctgccgccgcgccggccgtaacgcctgccgccgcacccgttgcggcatccgcgcccgccgccgcacctgccgcccgcgatttgtccgacgcgcaaaaatcgcctatggtcggcacgttctaccgcgcacccggcccgaatgccgcgccttttgtcgaagtcggccaacaggttaaagccggcgacacgctgtgcatcatcgaagcgatgaagctgatgaacgaaatcgaagccgaaaaatccggcacggtcaaagaaattttggtcgaaaacggtacgcccgtcgaattcggcgaaccgctcttcatcatcggataa

SEQ ID NO: 49363 - DNA, 1311 bp, Neisseria meningitidis; identical to SEQ ID NO: 39852

SEQ ID NO: 49364 - DNA, 138 bp, Neisseria meningitidis; identical to SEQ ID NO: 39131

SEQ ID NO: 49365 - DNA, 438 bp, Neisseria meningitidis; identical to SEQ ID NO: 39000

SEQ ID NO: 49366 - DNA, 276 bp, Neisseria meningitidis
atgaccgaacaaaaaaacaaaacatccctcatcgaatttccctgcaccttcccattgaaagtaatgggcgcggtgcatcccgagttcgagcaggcggttttagacaccgtccgcctccacgcccccgacacgcaggcgcaccacatcaccacgcgtccgagcagcaaaggcaactataccggcgccaccgttcaggtaaaggttgaaaaccaagaacaattggacaacatctaccgcgcgctgacttcgcacgaactggtcaaagtggtactttga

SEQ ID NO: 49367 - DNA, 1134 bp, Neisseria meningitidis; identical to SEQ ID NO: 38450

SEQ ID NO: 49368 - DNA, 354 bp, Neisseria meningitidis; identical to SEQ ID NO: 41639

SEQ ID NO: 49369 - DNA, 627 bp, Neisseria meningitidis; identical to SEQ ID NO: 38906

SEQ ID NO: 49370 - DNA, 684 bp, Neisseria meningitidis
atgctgacaaaaaaggagtttgagaagtttttagacgaggtttgcaccgtattgaggcaagaggcaaaaaacgcacctttcaaatcccaagatatttttgaaaacagagttcgtgcgctgtgcattgcaaaaattcccgcttatgctgacatagttatcaatcctgaacctgtgccgcaaattttccccgatgttccaataggggaatatggtgtagaagtcaaattcacgctaaaagatacttggcgcagcgtagcaaacagtatccaagagaaaaacaaagctgacggtgtacagcatatctatgtggtattcggaaaaatggggggcattcccgatgtgaaatggcaactttacgaagatagcgtaattcatgtccgcacatcgcatgttccgcgctttgaggtagaaatagaatctgatcgaccgtctctgtttgagggtttcggtatttcctatgctgaatttgccgatttggatatgcatgaaaaaatggaatatatccgaaaatatgcccgtaacaggctgaaagaaggcgagcggttatggtggatagaagacattgacgcagtagacagccatgatctgcctttggaagtgcgcctttacacttccctgccgcaggaagaaaaaatccgcctccgagctgaagcagcattagggcgtgtcctcaatttaacttag

SEQ ID NO: 49371 - DNA, 444 bp, Neisseria meningitidis; identical to SEQ ID NO: 38885

SEQ ID NO: 49372 - DNA, 444 bp, Neisseria meningitidis; identical to SEQ ID NO: 38367

SEQ ID NO: 49373 - DNA, 996 bp, Neisseria meningitidis; identical to SEQ ID NO: 38514

SEQ ID NO: 49374 - DNA, 1059 bp, Neisseria meningitidis; identical to SEQ ID NO: 38958

SEQ ID NO: 49375 - DNA, 474 bp, Neisseria meningitidis; identical to SEQ ID NO: 38562

SEQ ID NO: 49376 - DNA, 801 bp, Neisseria meningitidis; identical to SEQ ID NO: 44476

SEQ ID NO: 49377 - DNA, 1071 bp, Neisseria meningitidis
atgtatcggaggaaagggcggggcatcaagccgtggatgggtgccggtgcggcgtttgccgccttggtctggctggttttcgcgctcggcgatactttgactccgtttgcggttgcggcggtgctggcgtatgtattggaccctttggtcgaatggttgcagaaaaagggtttgaaccgtgcatccgcttcgatgtctgtgatggtgttttccttgattttgttgttggcattattgttgattatcgtccctatgctggtcgggcagttcaacaatttggcatcgcgcctgccccaattaatcggttttatgcagaacacgctgctgccgtggttgaaaaatacaatcggcggatatgtggaaatcgatcaggcatctattattgcgtggcttcaggcgcatacgggagagttgagcaacgcgcttaaggcgtggtttcccgttttgatgaggcagggcggcaatattgtcagcagtatcggcaacctgctgctgcttcccttgctgctttactatttcctgctggattggcagcggtggtcgtgcggcattgccaaactggttccgaggcgttttgccggtgcttatacgcgcattacaggcaatttgaacgaggtattgggcgaatttttgcgcgggcagcttctggtgatgctgattatgggtttggtttacggcttggggttggtgctggtcgggctggattcggggtttgccatcggtatgcttgccggcattttggtttttgttccctatttgggcgcgtttacaggactgctgctggcaaccgtcgccgccttgctccagttcggttcgtggaacggcatcctatcggtttgggcggtttttgccgtaggacagtttctcgaaagttttttcattacgccgaaaatcgtgggagaccgtatcgggctgtcgccgttttgggttatcttttcgctgatggcgttcgggcagctgatgggctttgtcggaatgttggccggattgcctttggccgccgtaaccttggtcttgcttcgcgagggcgtgcagaaatattttgccggcagtttttaccggggcaggtag

SEQ ID NO: 49378 - DNA, 192 bp, Neisseria meningitidis; identical to SEQ ID NO: 37615

SEQ ID NO: 49379 - DNA, 522 bp, Neisseria meningitidis; identical to SEQ ID NO: 38752

SEQ ID NO: 49380 - DNA, 426 bp, Neisseria meningitidis
ttgtggctgctgcgcgccctgactgccaaactgccccaacagcgttatgcggctttgtttattacactgttttttgccgcagtattggtgttcgggcggcatgattcgatgtattggtatcccgtcctcgtcaatctgatgatgttggcggtgttcggcggcagcctgtttgccggacagacggtcatagaaaggctcgcgcggctgcaacagcccgacctgcctgaaaaagctgtgcgctatacccgccgggtaacgcaggtttggtgcgtattctttattgccaacgggacgcttgccgctttgttggcccggttggggcgatatgattggtgggcggtttatacaggcgtgattgcctatgtattgatggggatgctgtttgccggcgaatggctttaccgcaaactcgttttgaaagtctga

SEQ ID NO: 49381 - DNA, 3963 bp, Neisseria meningitidis
atgtctgtcgttttgcccttgcgcggcgttaccgccctttccgatttccgtgttgaaaaactcttgcaaaaagccgccgcactcgatctgcccgaagtcaaattaagcagcgaattttggtatttcgtcggcagcgagaaagcacttgatgccgcgactgtcgaaaaactgcaagccttgttggcggcgcaaagcgttgaacaaacgcccaaagcgcgcgagggcttgcatttatttttggtcacgccccgtttgggtacgatttcgccttgggcttccaaggcaaccaatatcgcggaaaactgcggtttggcaggcatcgagcgcatcgagcgcagcatggcggtgtggctggaaggtgcgcttaccgatgaacagaaacagcaatgggcggctttgctgcacgaccgcatgactgaatccgtgctgcccgattttcagacggcatccaaattattccaccatctcgaatccgaaactttctccggcgtcgatgttttgggcggcggtaaagaggctttggtcaaagccaataccgaaatgggtttggcactctccgccgacgaaatcgattatctggttgaaaactatcaggctttgcagcgcaatccgtccgatgttgaattgatgatgttcgcgcaggcaaacagcgaacactgccgccacaaaatcttcaacgccgatttcatcctcaacggcgaaaaacaaccgaaatccctgttcggcatgatacgcgacacgcacaacgcgcatcccgaaggtacggtcgtcgcttataaagacaattcgtccgtaatcgaaggcgcgaaaatcgagcgtttctatccggatgcggcggaaaaccaaggctaccgtttccacgaggaagacacgcatatcatcatgaaagtggaaacgcacaaccacccgaccgccatcgcgccgtttgcgggcgcggcgacgggcgcgggcggcgaaatccgcgacgaaggtgcgacgggcaaaggttcgcgtccgaaagcgggcttgaccggctttaccgtgtccaacctcaacatccccggcctcaaacagccgtgggaacaagattacggcaagccggaacatatttcctcgccgctggacattatgattgaaggccccatcggcggcgcggcgttcaacaacgaattcggccgccccaacctcttgggctacttccgcacctttgaagaaaaatttgacggtcaggttcgcggctaccacaaaccgattatgattgccggcggtctgggcagcattcaggcgcagcagacgcataaagacgaaatccccgaaggcgcattgctgattcaactgggcggcccgggcatgcttatcggcttgggcggcggcgcggcttcttcgatggataccggcacgaacgacgcgtctttagacttcaattccgtacaacgcggcaaccccgaaatcgaacgccgcgcgcaggaagtcatcgaccgctgctggcagctcggcggcaaaaacccgattatctccatccacgacgtgggcgcgggcggtttgtccaacgccttccccgaactcgtcaacgatgccggacgcggcgcggtattcaagctgcgcgaagtgccgttggaagaacacggtttaacgcctttgcaaatctggtgtaacgaatcgcaagagcgttatgtgttgtcgattttggaaaaagatttggacaccttccgcgccatctgcgaacgcgaacgctgcccgtttgccgtggtcggcacggcgaccgacgacggccatttgaaagtgcgcgacgatttgttcgccaacaaccccgtcgatttgccgctgaacgtcttgctcggcaaaccgcccaaaaccacgcgtaccgacaaaacggttacgccgtccaaaaaaccgtttcacgccgacgatatcgacatcaccgaagccgcctaccgcgttttgcgcctgcctgccgtagccgccaaaaacttcctgattaccatcggcgaccgcagcgtcggcggcatgacccaccgcgaccaaatggtcggcaaataccaaacccccgtagccgactgcgccgttaccatgatgggcttcaatacctatcgcggcgaagcaatgtctatgggcgaaaaaccgaccgttgccctgtttgacgcgcctgcttcaggcagaatgtgcgtcggcgaagccatcaccaacatcgcggcggtcaacatcggcgacatcggcaacatcaagctctccgccaactggatggcggcgtgcggcaacgagggcgaagacgaaaaactctaccgcaccgtcgaagcggtttccaaagcctgtcaggcattggatttgagcattcccgtgggcaaagacagcctgtcgatgaaaactgtgtggcaggacggcgaagagaaaaaatccgtcgtctcgccattgagcctgattatctctgcgttcgcgccggtcaaagacgtgcgcaaaaccgttacgcccgaattgaaaaacgtcgaagacagcgtattgttatttatcgatttgggcttcggcaaagcgcgtatgggcggctctgcattcggtcaggtatacaacaacatgagcggcgacgcgcccgatttggacgatacaagtcgtctgaaagcgttttacaacgtgattcaacagcttgtcgccgaagacaaactcttggcataccacgaccgcagcgacggcggtttgtttgccgttttggtagaaatggcgtttgcggggcggtgcggcttggatatagatttaaatttattgcttgcacaaacatttattaccaaccataccgctctgtctcaatcattgcggactgaagaggtaaaagcgttggctgaatggcaagaaaccattgcccgcacattatttaatgaagagttgggtgctgttatccaagttagaaaacaagatgttgccgatattatcaatttattctatcaacaacagctgcatcataatgtctttgaaatcggtacgttaactgatgagaacacgttaatcatccgcgacgggcaaacgcaccttatttctgacaacctaatcaaactgcaacaaacctggcaagaaaccagccatcaaatccaacgcctgcgcgacaaccccgcctgcgccgacagcgagttcgcattgattggcgacaacggacgcagcgcattgtttgccaacctgaaattcgacgtgaacgaagacatcgccgcgccgtttatcaacagcggcgcgaaacccaaaatcgccatcctgcgcgaacagggcgtaaacgggcaaatcgaaatggccgccgcctttacccgcgccggattcgatgcttacgacgtgcatatgtccgacctgatggcaggccgcatccacctcgccgacttcaaaatgctggcggcgtgcggcggcttcagctacggcgacgtactcggcgcgggcgaaggctgggcgaaatcgattctgttccaccctgctctgcgcgaccagtttgccgccttcttcgccgacccggacacgctgacattgggcgtgtgcaacggctgccaaatggtcagcaaccttgccgaaatcatccccggcacggcaggctggccgaagttcaaacgcaacctgagcgaacagtttgaagcgcgcctaagcatggttcacgtccccaaatccgcgtcgctgattctgaacgaaatgcaaggctccagcctgcccgtcgtcgtcagccacggcgaaggccgcgccgacttcgcacttcacggcggcaacatttctgccgatttgggcattgcgctgcaatatgtggacggtcaaaaccaagttacccaaacctatccgctcaaccccaacggctcgccgcaaggcatcgccggcattaccaacgccgacggccgcgtgaccatcatgatgccccaccccgaacgcgtgtaccgcgccgcacaaatgagctggaaaccggaaggctggacggaactgtccggctggtaccgcctctttgccggcgcacgtaaagccttgggctaa

SEQ ID NO: 49382 - DNA, 1527 bp, Neisseria meningitidis
atgaatcccatgtacattacttttgcaatctatctggttgcagtccttctcatcgggcttgccgcctatttttccacgcgcaatttcgacgattatattttgggcgggcgcagcctaggcccgtttgttaccgcgatgtcggcaggcgcgtccgatatgtccggctggctgctgatgggtctgccgggcgcgatttacctgagcggtttgaatgaggcttggattgccatcggcctcttggtcggcgcgtatttcaactggctcttggtggcgggccgcctgcgcgtgcataccgaatacgccaacaatgcgctgacgctgccggattatttcttccaccgcttcggcgcgggcggacacttgatgaaagtggtttccgcactgattatcctgttcttcttcacgatttattgcgcctcgggcattgtggcgggcgcaaccctgttccaaagcctgtttgaaggtatgacttacaatcaggcaatgtggctgggcgcgggcgcgaccatcgcctataccttcttgggcggtttcttggcggtcagctggacggatacgctgcaggcttctttgatgattttcgccctgattttaacgccggtgatggtctatctgggcttgggcggcgcggaacagatgtctgccgcgattcaaagcgtcgccgcaggcacgggcaaagaatacggcagcctgtttgccggtacgaccgtcatcggcatcatttccaccgccgcatggggcttgggctatttcggacagccgcacattttggcgcgctttatggcggccgaaagcgcgaaatcgctggtatccgcacgccgcatcggcatgacttggatggcgttgtgccttgcgggcgcggtggcggtcggttatttcggcattgcgtatttcggtgcaaatcccgacaaagtttcttctatgagcggcaaccacgaacgcatcttcatcgcgctttccaccctgctgttcaacccttggatcgccggcatcattttgagcgcgattttggcggcggtgatgtccaccctgtcctgccagcttttggtttgctccagcgcgattaccgaagacttctacaaaggctttttgcgtaaaaatgcgcaacagtcggaattggtatgggtcggccgcctgatggtcttggcgattgccgtgatttccatcctgattgcttccgatccgaacagcaaagtattgggactggtttcttatgcgtgggcaggtttcggtgcggcgttcggcccgattgtgattctgtccgtattgtggaaacgcatcactgcctacggcgcgttgtcgggtatggttgcaggtgccttaaccgtagtcgtatgggcggaatgggtgaaaaaaccggctcaagcggcaggagaaagcggcttgttgacgatgtacgaaatcgtcccgggctttattgtttgcttaatcattgccgtgttggtttccctgttcaacaaagaaccttcgcgcgaaatccaagaacgctttgaaaaagccgacgcagattaccgcgccgcccgataa

SEQ ID NO: 49383 - DNA, 561 bp, Neisseria meningitidis; identical to SEQ ID NO: 38271

SEQ ID NO: 49384 - DNA, 852 bp, Neisseria meningitidis
atgaccttactcggaataaagctcaaacagacccagcagctcaaccagcggctgcaacaatctttgcgcgtattgcagatgtcgggtatcgaacttgaacgcgaggtcgaaaactggctgtcggacaaccccctgctcgaacgcaaagacacggatgaattttccgatgccgagttcagccattacactgcgcctgcccgtcaaatcggcggagacgaaggcgaagatatgctgtccaacatcgccggcgagcaggatttcaagcaatacctgcacgcgcaagtatgcgaacacccgctttccgaccaagaagccgcctgtgtccacatccttatcgatttccttgacgagcagggttatctgaccgacagcatcgaagacatcctcgaccatacgcccttagagtggatgttggatgaagcaatgctgcaacacgcgctgaccgcattgaaaaaattcgacccggcaggcgtggccgccgccgatttgaacgaatcgctgatactgcagatagaaagatcgggcgaatgtgctgccaaacccgccgccctgcatatcgtccgaaacgccctcgacagcattgacggcaaccgcagccaaaccctcgcacgaataaaaaaacacctgccccaaaccgacagcggcacactcgaagccgcactcgacctcattgcttcgctcaatccctttcccgccgccggttttgcctcgtccacacccacgccgtattctgacgaggcactcgccaacctgctggctttccgcggcatggaggtttctcgccgcaccattgccaaatacagagaatcccttgagattccggcagcacacaaacgcaaaaccgcagaataa

SEQ ID NO: 49385 - DNA, 303 bp, Neisseria meningitidis; identical to SEQ ID NO: 39699

SEQ ID NO: 49386 - DNA, 360 bp, Neisseria meningitidis; identical to SEQ ID NO: 38354

SEQ ID NO: 49387 - DNA, 1578 bp, Neisseria meningitidis; identical to SEQ ID NO: 44304

SEQ ID NO: 49388 - DNA, 993 bp, Neisseria meningitidis; identical to SEQ ID NO: 45188

SEQ ID NO: 49389 - DNA, 888 bp, Neisseria meningitidis
atgtacacaggacgtttcgcccccagcccgaccgggctgctccacatcggctcgctgctgaccgccgccgcttcctatgccgatgcacgctcaaacggcggcaaatggctggtccgcatggaagacctcgatccgccgcgcgaaatgccgggggcggcaagccatatcctgcacacgcttgaggcattcggattcgagtgggacggagaagtcgcctatcagagccgccgttacgccctgtatgaagaaaccctatgccgtctgaaaaccgccggactggtctatccctgccattgcagccgcaaagactggcaggctgcggcagtccacggcgcagacggattcgtctataacggacgttgccgcaatccgcagcaacgccctgcaccgcaaggcaaacagcctgcgtggcgcatccgcgtccccgaccgcgacatcggcttttcagacggcatcgtcggcggttacgcccaaaacctcgcccgcgacatcggcgatttcgtcctgcttcgtgcagacggttactgggcataccagctcgccgtcgttgccgacgatgccgaacagggcgttacccacatcgtccgcggacaagacctgcttgtttctacgccgcgccaaatctatttgcagcagtgtttgggcgttccgacaccgcaatatgcccacctgccgctgctgaccaacgcacaagggcagaagtggtcgaaacagacgctcgcccccgcattagatttaaaccgccgcgaacaactcctccgccaagtgttccgttacctcaagctgcccgaagcaccggaagccgaccgccctgccgaactgctcgactgggcggtggcacactgggatatggacaaagtgccgaaacacgccattaccaccccctaa

SEQ ID NO: 49390 - DNA, 1407 bp, Neisseria meningitidis
gtggaatttagcacaaaaaccgaaatcttgcaggaacagcaggcaggcgcacagttatttgtctgcaccgaagaggcgcaattaaaccatccgaccgcccttgcccttttgtcttcgcttgaagaaggtcaaaattttgccgacacaaaaatcccgacaggcaacggtttgcaggctgttgccgtatgctgtctgaaaagcaccggccgcgccgcattgaacaaggccgccgccgaagccgccaaatgggcgcaaaatcaggaaacggtcaatgtggacatccatgccttcgatgaagcgcaagccgccgccgtagccgaagcgtttgcgattgcgttcggcaacgccgcctaccgtttcgaccgctacaaaaaagaagccaagcccgccaaatttgaaaccgccgtgttccacagcgcacacgaagccgtcgttaaagaagccttgcgcgtcgccgaagcgcaagtttacggacaaagcctctgccgcgacttgggcaacgccgcgcccaacgaatgcacgcccgaatttttagcgcgcaccgccaaagccgaagccgaaaaactgggcgcgcacgccaaaatcatcgaaaaagactacatcaaagaaaacatgggttcgttttggtcggtcgccaaaggcagtgtcgaagatccctatttggtcgaactgagctatttcggtgcggcggacaaagaagccgcgcctgtggtattggtcggcaaaggcattaccttcgacaccggcggcatttccctcaaacccggcctgaacatggacgaaatgaagtttgatatgtgcggcgcggcaaccgtcatcagcaccttctgcgccgccgtcaaactgcaactgccgattaacctgattgccgtcgtcgccacttgtgaaaatatgccttccggcgcggcaaacaaaccgggcgatgtcgtgaaaagtatgaaaggtctgaccatcgaagtgttgaacaccgatgccgaaggccgtctgattttgtgcgacgcgctcacttacgccgaacagttcaaacccaaagccgtcatcgacgtcgccaccctgaccggcgcgtgtattgtcgccttggggcacgatgtcagcggcgtgatgggcaacaatcaagatttggtcgacagcctgcttgccgcttcctacaacgtggacgacaaagcgtggcaactgccgctctttgaaacctacaaagaccagctcaaatccaactttgccgacatccccaatatcggcacgcccggcgcgggcacgattaccgccgcaacattcctgtcttacttcaccgaaggctacccgtgggcgcaccttgacatcgcgggtacggcgtggaaatccggagcggaaaaaggtgcgaccggccgtcccgttcccttgctgctgaactatctgcggaatctttaa

SEQ ID NO: 49391 - DNA, 453 bp, Neisseria meningitidis; identical to SEQ ID NO: 38407

SEQ ID NO: 49392 - DNA, 216 bp, Neisseria meningitidis; identical to SEQ ID NO: 42383

SEQ ID NO: 49393 - DNA, 504 bp, Neisseria meningitidis; identical to SEQ ID NO: 38260

SEQ ID NO: 49394 - DNA, 1167 bp, Neisseria meningitidis; identical to SEQ ID NO: 39270

SEQ ID NO: 49395 - DNA, 309 bp, Neisseria meningitidis; identical to SEQ ID NO: 36432

SEQ ID NO: 49396 - DNA, 219 bp, Neisseria meningitidis; identical to SEQ ID NO: 36380

SEQ ID NO: 49397 - DNA, 657 bp, Neisseria meningitidis; identical to SEQ ID NO: 42090

SEQ ID NO: 49398 - DNA, 969 bp, Neisseria meningitidis
atgaaactcaccctcgccctcccctcgctcaatttggatgaagacgaaatccgaatacctctatgcctgcccgccttcaacaaaatcctgcaatacggctcgctgcaccgccaaagctgcacggcttcggcattttacgcgcgttatttgtggtgcggcagactggcggaacgcgcggcgcaaagcctgaatatgccgtctgaaaccgtcgcgctcgccacgcccgtctggcaaaagatggggatgcatcaggcaaatgtgctaacggcggaatatctgaacgtcggtacggatgaagcggaacggctctgccgcgacctgtcggcgttttacggcgacattccatggcgtttcgttcccgtcctgcccgaattatggctggtttcccttccttgcgcgtaccgctggggcgcgaagcccgttttggacttgggcggattgttgggcgcggacgatcagccggacggggaagacgcgttggaatggctgcgcgtccaaaccgaaatccaaatgtggctggcggcgcaccccgtcaaccataaccgcaagaaacgcgggctgcccgagttgaacggcttatggctttgggacagtctgcacggaagcagtcaaggcggcacgcttttcgccgatacggtttggagccgtttccaccccgaccgccgcgcattgcccgacaacttccgcgcctatgaagaaacggcggcatacctacccgacacgcaccatatcctgtttatggacgatttgcgcctgaccgccctgacaggggacagggagcggtatgcggcaatattgcagcagtgggaagaacgctggttcgcaccgctttacgaagccgtccgcatcggcaaaatcaaacggctggacatcgccacggacggacaacacggcggtacgctgactttcaaacccgccgacaggtggaaattttggcgcggcgcgaaaacctttgacggaatctggtga

SEQ ID NO: 49399 - DNA, 867 bp, Neisseria meningitidis; identical to SEQ ID NO: 48992

SEQ ID NO: 49400 - DNA, 270 bp, Neisseria meningitidis; identical to SEQ ID NO: 38590

SEQ ID NO: 49401 - DNA, 1077 bp, Neisseria meningitidis
atgaagccgtctattttagaaaaactgcaacaactcggcgaccggttggaagaagttacccaccttttagggcaacccgaagccacatccgatatggacaactaccgcaagctcacgcgcgaacacgccgaactgacccccgtcgtcgaagtattccaaaactatcggcttgcccaaagcgacttggcagatgccgaagaaatgctgtccgaccccgaaatgaaagattttgccgccgaagaaatcgaagcggccaaagccaaaatcggcgaactcgataccgaactgcaaaaactgctgctgcccaaagatgccgacgacgacaaaaacatcttcatcgaaatacgcgccggaacgggcggcgacgaagccgcgctgtttgccggcgatttgctgcgtatgtacagccgctacgccgagcgcaaccgttggcaggttgaaatcgtgtccgccaacgaaagcgaattgggcggctataaagaagtcatcgcccgtattgtcggactcggggcgtacagccgtttgaaatttgaatcgggcggacaccgcgtgcagcgcgtccccgccaccgaaagccaaggccgcatccacacctccgcctgcaccgttgccgtcatgcccgaagcggacgaactggaagacatcgaactgaacccagccgaccttcgcatcgacacctttcgcgcatccggcgcgggcgggcagcacatcaataaaaccgattccgccgtccgcatcacccacctgcccacaggcatggtggtcgaatgccaagacggacgcagccaacacgccaacaaagcgcaggcgatgaaagtcctcgccgcccgcctgaacgacgcgcaaaaacgcgaagcccaagccaaagaagccgccgaacgcaaatccctcatcggcagcggcgaccgcagcgaacgcatccgcacctacaactatccccaaggcagggtaacagaccaccgcatcaacctcaccctgcacaagctggattttgtgatggacggcgatttggcagaaatcaccgatgccctgattgccgaacatcaggcggagcttttggcggcaatgggcgattga

SEQ ID NO: 49402 - DNA, 618 bp, Neisseria meningitidis
atgtttacaggcattgttcaaggattgggaaaactgacggcaatccaccgcccgtcggaggcatttcacacttatgtcgtcgagcttccgcaagaggcggcggacaatctgcaacgcggcgcatcggtcgccaataacggctgctgcctgacgattaccgaaatcgaaggaaaccgcgttagtttcgatttaatggcggaaactttggcaaaaaccaatttggggctgctgaaggaaggcgattgcgtcaacatcgaacgggcggcgcgtttcggagacgaaatcggcggacacgtcatgagcggacacattatggcaaccgtgcctattgtcgaaatcgaacgggacgggtacaaccgcacggtttggttttcgctcccgcacgaactcaaaccctatatcctgaccaaagggttcgtcggcttggacggttgcagcctgaccataggcaaagtcgaagacagccgtttcaatgtccatttgattcccgaaactttggaacggacgctgttcggcagcagaaaggtcggcgacagaatcaacatcgaaatcgatccgaatacgcaggcaatcgtcgataccgtcgaacggctgatggcgcaaagatatgcaaagtga

SEQ ID NO: 49403 - DNA, 1512 bp, Neisseria meningitidis
atgagcgaacaaaaccatccgcaaaccgagccgcagttggacgaaaaccaaatcatcgccctgcgccgcgaaaaactgcacaacatccgccaacagcgcaacgcctaccctaacgatttcaaacgcgacagctttgccgccgacctgcatacccaatacggtgaaatcggcaaagaagaactcgacccgcaaggcattcccgtcaaaattgccggccgcatgatgctcaaacggcaaatgggcaaggcgagctttgccaccattcaagacgtgtccgggcaaatccagctttatctgaacaacaaaggcgtgagccaagaaattttggacgacttcaaccattgggacttgggcgacatcgtcggtgcggaaggcactttgttcaaaaccaaccacggcgaactgaccgtacgcgtgtccggcatccgcctgctgtccaaatccctgcgtccgctgcccgacaaacacaaaggtttgagcgatcaggaaaccaaataccgccaacgctatgttgatttgattgccaacggagaatcgcgcaataccttcatcaaacgcagccaaatcatccaatccgtgcgtaattttatggtgggcgagcattatctcgaagtcgaaaccccgatgatgcacccgattcccggcggcgcgacggcaaaacccttcgttacccaccacaatgccttggacattccgctctacctgcgcatcgcccccgagctgtatctgaaacgcttggttgtcggcggtttggagcgcgtgtttgaaatcaatcgcagcttccgcaacgaaggtatgtccgtgcgccacaatcccgaattcaccatgatcgaattctacgaagccttctccgactacgaacgtatgatgcagatggcagaagacatcatccgcaacgcatcgcgcacagtaaacggtacggcaaacatcacttacaatggcaaagaagtcgatttggaaagcccgttcgagcgtctgaccatcctcgaagccatcaaaaaatacaatccgcactacaccgacgagcagttgaacgatgcggaatggctgaaaaaagaaatcgtcaaacacggtgaaagcctgccgccgtccccgggcatcggcagcctgcaactcgcgctgtttgaaggttgcgccgagggcaagctgtggaacccgaccttcatcatcgattacccggtcgaagtttccccgttggcgcgcgcttcggataccaaacaaggtctgaccgaacgtttcgaattgttcgttgtcggccgcgaactggcaaacggctattcagaattgaatgaccctgaagaccaagccgaacgcttcaaatcgcaagtcgcacaaaaagacgcgggcgacgacgaagccatgcattacgatgccgactacatccgcgcgatggaatttggtttgccgccgaccggcggttgcggcatcggtatcgaccgcttggtgatgttgctgaccgattcgcaaaccatccgcgatgtgattctgtttccgcagatgcgccccgagtag

SEQ ID NO: 49404 - DNA, 1635 bp, Neisseria meningitidis
atgataaaaccgaacctgaggccgaagctcggctcttccgcgctgattgccttcctttccctgtattcctcgctggtattgaattacgccttttttgccaaagttgtcgagcttcatccttttaacggcaccggggcggatatcttcctctatacgatgccggtggtgctgttttttttaagtaatttcgtttttcacgtcattgccctgcctttcgtgcataaggtattgattccgttgatattggttatcagtgcggcggtgtcttaccaagaaatatttttcaatatctatttcaacaagtcgatgttgaataatgtcttgcaaactacggctgccgaaagcgcgcgcctgattacgccgggctatgtgctgtggattgtatgtttgggcgtattgcccgcgctggcgtatatcgccgtcaaggttaaataccgcgtttggtataaggagtttttgacgcgccttgtgcttgccgccgtttcctttttgtgcgcgttgggcatcgcaatgttgcaatatcaggattacgcctcgtttttccgcaacaataaatcagtaacccatctgattgtgccgtctaatttcatcggcgcgggcgtgtcgaaatacaaagattggaagcgttccaatattccttatacgcaattggatatggcggtcgtgcaaaaccggccggccggcagcctgcgccgtttcgtggtgctggtcgtgggcgagaccacgcgtgccgccaactggggtttgaacggttacagccgccaaactacgccgctgcttgccgcgcgcggcgatgaaattgtcaatttcccgcaggtcagaagctgcggcacatcgaccgcgcactccctgccgtgtatgttctcaaccttcgaccgcacggattatgacgaaatcaaagccgaacaccaagacaacctgctggacatcgtgcagcgcgccggcgtggaagttacctggttggaaaacgattccggctgcaagggcgtgtgcggcaaagtgccgaataccgacgttacctcgctcaacctgcccgaatactgccgcaacggcgagtgcctcgacaatatcctgctgactaagttcgacgaagtcctcaacaaaaacgataaagacgcggttttaatcctgcataccatcggcagccacgggccgacgtattacgaacgctataccgaagccgaacgcaaattcacgccgacctgcgacaccaacgaaatcaacaaatgcacccgcgccacgctggtcaacacttacgacaatacggttttgtatgtggaccagtttatcgacaaggttatccgcaaacttgaaaaccgcgacgatttggaaagcgtggtgcattatgtttccgaccacggcgaaagtttgggcgaaaacgggatgtacctgcacgccgcgccttacgccatcgcgccttccgggcagacgcatatcccgatggttatgtggttttccaaagccttccgccaacacgggggcatagatttccaatgcctcaaacaaaaagcggcggaaaacgaatattcgcacgaccactatttcagcacggtattggggctgatggacatttccaatagccaaacctatcggaaggaaatggatatattggcagcctgccgccgtccgcgctga

SEQ ID NO: 49405 - DNA, 489 bp, Neisseria meningitidis; identical to SEQ ID NO: 39045

SEQ ID NO: 49406 - DNA, 657 bp, Neisseria meningitidis; identical to SEQ ID NO: 42491

SEQ ID NO: 49407 - DNA, 723 bp, Neisseria meningitidis; identical to SEQ ID NO: 38771

SEQ ID NO: 49408 - DNA, 1071 bp, Neisseria meningitidis
atgaccaaacatatcgccatcctccgaggtgacggcatcggtcccgaaatcgtcgccgaaaccgtccgcgtactcgacaaactcatcgcccaaggtttggatgccggctacgaatacgccccattgggcggcgaagcctatgacgaatacggtcatccttatcccgaatttacgcaaaacctctgccgcaaagccgatgccgtcctgcttggtgcagtcggttctcctcaatacgacaacctcgaccgtccgttgcgccctgagcgcggcctgttggcaatccgtaaggatttgaacctgtttgccaatttgcgtcctgctgttttatatcccgaattagccaacgcctccacgctgaagcctgaaatcgttgccggtttggatattttgattgtgcgcgaactcaccggcgacatctatttcggcgaaccgcgcggcatccgcgttctggaaaacggcgaacgcgaaggctacaacaccatgaaatacagcgaaagcgaaatccgccgcatcgcccacgtcgctttccaatccgcccaaaaacgcagcaaaaaagtctgctccgtaggcaaagccaacgttttggaaaccaccgaactgtggcgcgaaatctttgaagaaatcggcaaacaatatcccgatgtcgaactttcccatatgtatgtggacaacgccgctatgcagctcgtgcgcgcgcccaaacagtttgacgtgattgccaccggcaacatcttcggcgacatcctctccgacgaagcctccatgctgaccggctccatcggtatgctgccttccgcttctttggacgaaaacggcaaaggcctgtacgaaccgtcccacggctccgctcccgacatcgccggacaaaacaaagccaacccgctggccaccatcctctcgctcgcaatgttgctgcgttacagcctgaacgacgaagcgcgcgcgcaacaagttgaaaacgccgtccaaaaagtgctgcaacaaggcttgcgtaccagcgacatttacgaagaaggcacaaaactcgtttcctgctccgaaatgggcgatgcggtactcgccgccttgtaa

SEQ ID NO: 49409 - DNA, 1074 bp, Neisseria meningitidis; identical to SEQ ID NO: 39216

SEQ ID NO: 49410 - DNA, 297 bp, Neisseria meningitidis; identical to SEQ ID NO: 38749

SEQ ID NO: 49411 - DNA, 1116 bp, Neisseria meningitidis; identical to SEQ ID NO: 38757

SEQ ID NO: 49412 - DNA, 864 bp, Neisseria meningitidis; identical to SEQ ID NO: 39488

SEQ ID NO: 49413 - DNA, 483 bp, Neisseria meningitidis; identical to SEQ ID NO: 45182

SEQ ID NO: 49414 - DNA, 507 bp, Neisseria meningitidis; identical to SEQ ID NO: 38697

SEQ ID NO: 49415 - DNA, 390 bp, Neisseria meningitidis; identical to SEQ ID NO: 39510

SEQ ID NO: 49416 - DNA, 510 bp, Neisseria meningitidis
atgaaaaagaaactgctttcgggcatcaaatttgccgttcagacggcattggtgtttttattggtgtcgctgtttttggattggatacgcaagcccgaagagccggccggtgcggcagggcggcctttgaccctgctgtcggggcagcggctgactttgggacagtttagccgggataaggcggttttggtgtatttttgggggagctggtgcggcgtgtgccgttatcagtcgccgataatcgatgatttggcggcggacggcgtgccggtcgtcggcgtggcggtacgttccggcagcgcgtccgaagtggcggcgtatatggcaaagcggggcttgggctttccgactgccaacgatgaggacgggggtttggcaaggtcttggcggattgtcgcaacgcctgccgtcgttttggtcaaaaatgggaaaatggttcactatacgacgggaatcagcagttattggggcttgcgcgcacgaatttttcaggcggatgttttcggttaa

SEQ ID NO: 49417 - DNA, 723 bp, Neisseria meningitidis; identical to SEQ ID NO: 39380

SEQ ID NO: 49418 - DNA, 762 bp, Neisseria meningitidis; identical to SEQ ID NO: 38716

SEQ ID NO: 49419 - DNA, 771 bp, Neisseria meningitidis
gtgtccgaaacacaaaacgaacaacccgtccaaccgcttgtagagcatctcatcgagctgcgccgccgcctgatgtggacggttgtcggcatcttagtctgctttttcggcatgatgccgtttgcccaacaactctatacttttatcgccgacccgctgatggcaaacctgcccaaagacaccagcatgattgccaccgatgtcatcgcaccatttttcgtgccggtcaaagttaccctgatggcggcatttttaatttcgctgccgcatacgctctaccaaatctgggcatttgtcgcgcccgcactctaccaaaacgaaaaacgcctgattacgccgctcgtcctctcaagcgtcagcctgtttttcatcggcatggcatttgcctactttctggttttccccgtcattttcaaattccttgccagcgttacccctgtcggtgtcaatatggcgacagacatcgacaaatacctatcttttatcttaggcatgtttgttgcgttcggcacaacgtttgaagttcccatcgtcgttatcctgttaaccaaaatcagcgtggtaacaaccggacagctcaaacgcgcccgcccctatgtgattgtcggcgcgtttgtcattgccgccatcatcacgccgcccgatgtgatttcacaaaccctgcttgccattccgctgattctcttatacgaagcaggtatttggttcggacgctttttcacgccacgttcagaacaggatggcgacatacagccgcctgcaacaacctga

SEQ ID NO: 49420 - DNA, 693 bp, Neisseria meningitidis; identical to SEQ ID NO: 39213

SEQ ID NO: 49421 - DNA, 804 bp, Neisseria meningitidis
atgaatccagcccccaaaaaccttctcttctcttctcttctcttctcttctcttctcttctcttccgcagcgcaggcggcaagtgaagacagcgggcgcggcccgtattatgtgcaggcggatttagcctacgccgccgaacgcattacccacgattatccgaaaccaaccggtacagacaaagacaaaataagcacggtaagcgattatttcagaaacatccgtgcgcattccatccacccccgggtgtcggtcggctacgatttcggcggctggaggatagcggcagattatgccagttacagaaaatggaacaacaataaatattccgtcaacacaaaagtgttgcaagaaaaaaatggcaacaggaaagaactgaagacggaaaatcaggaaaacggtacattccacgccgcttcttctctcggcttatccgccatttacgatttcaaactcaacgataaattcgataaattcaaaccctatatcggcgcgcgcgtcgcctacggacacgttaaacatcaggttcattcagtgaaaaaagaaaccacgactgttttcactgcaccaacgcaaggtgctcaaaagggaggcgttatcccagaagctacgattagcaaacctgcctatcacgaaagccacagcatcagcagcttgggtcttggtgtcatcgccggtgtcggtttcgacatcacgcccaagctgaccttggacaccggataccgctaccacaactggggacgcttgaaaaacacccgcttcaaaacccacgaagtctcattgggcatgcgctaccgcttctga

SEQ ID NO: 49422 - DNA, 699 bp, Neisseria meningitidis
atgagttttgaaatttaccgttacaacccggatgttgatgccaagccttatatgcagcgttacgagttggaattggaaccgaccgacgtgaaacttttggatgctttggtacgcctgaaagcacaagacgataccttgtctttccgccgctcctgccgcgaaggcatttgcggatcggacggtatgaacatcaacggcaaaaacggcttggcgtgtttgaccgatctgcgtggcttgaaacagccagttaaaatccgtcctctgccaggtctgcctgttatccgcgacctgattgtggatatgacccagttcttcaaacaataccattccgtcaaaccttatgttgtcaacgataatccgattgatgcggacaaagagcgtctgcaaactcaggaagagcgtaaagagttggacggtttgtacgagtgtattttgtgcgcctgctgttcgactgcctgcccgtcattttggtggaaccctgataaattcgttggtccgtccggtttgctgaatgcttaccgtttcattgcggacagccgtgataccatcactaatgagcgtttggataatctgaacgacccataccgtttgttccgttgccacaccattatgaactgcgtagacgtatgtcctaaacacttgaatccgacccgagccatcggtaagattaaagagattatgttgaaacgggccgtttaa

SEQ ID NO: 49423 - DNA, 1092 bp, Neisseria meningitidis; identical to SEQ ID NO: 38959

SEQ ID NO: 49424 - DNA, 324 bp, Neisseria meningitidis; identical to SEQ ID NO: 37971

SEQ ID NO: 49425 - DNA, 1497 bp, Neisseria meningitidis
atgtcgcttgccttggtttacagccgcgccttgagcggtatgaatgcgccgttggtcgaagtggaagcccaccttgccaacggcctgccgcatttcaacatcgtcgggctgcccgatacggaagtaaaggaaagtcgcgaccgcgtccgtgccgccattattcaaagcggttttgaattccccgccaaaaaaattaccgtcaacctcgcccccgccgacctgcccaaagagtcggggcgtttcgatttgccgattgcaatcggcatccttgccgcatcggggcaggttgcgcccgaaaaactggcggaatacgagtttgcgggggaattggcactgtcggggctgttgcgccccgtgcgcggcgcgttggcgatggcgtggcagggtatgcaggcaaaacgtgcatttgttttgcctgaagaaaacgcaggacaagccgccgtgatgcgcggcattaccgtttacggcgcgcgctctttgggcgaagtcgccgcccatttgaacggcatcgaacctttggcgcaaaccgaatgccaagttcctcagatgccgtctgaaaacaccaaattgcccgacctcgtcgatgtcaagggtcagcacactgcccgccttgctttggaaatcgctgccgcaggcggacacagcctcttgatgatgggtccgccaggaacgggcaagtctatgctctcccaacggctgccaggcatcctgccgccgctgaccgaagacgaattggttgaagtttgggcattgcgttcgctcctgcccaaccaccagcaacaactcgacagcaaccgtcctttccgcagtccgcatcacagcgccagcgcggcggctatggtcggcggcggttcggatccgcgtccgggcgaaatttcattggcgcatcacggcgttttatttttggatgaattgcccgagttcgaccgcaaagttttagaagttttgcgcgaaccgttggaaaacggcgaaatccacatttcccgcgcggcgcgccaagccgtctatcccgccaaattccaacttgtcgccgccatgaacccctgcccgtgcggctatctcgggcatcccgtcaaaccctgccgctgcacacccgaaagcgtcgcgcgttaccgcagcaaaatttccggcccgttgcttgaccgcatcgatttgaccatcgaagtcccgagcctgtccgccgccgaactgatgcagcaggaagcaggggaaagcagcgcgtccgttttggaacgcgttatcgccgccagagacaaacaatacgcacggcaaggcaaagtgaatgccgctttgagcgtcagcgaactcgattcccaagcccgcatccaaaaagaagcgcaggaagccttgggcaacctgttggaaaaactttccctctctgcccgcagcttccaccgcatcatgcgcgtggcgcgtacgttggcggatttggcaggcgacgaagaagtcggcagaagccatgttatgaaagccgtgggcttccgtcgtgctttatag

SEQ ID NO: 49426 - DNA, 561 bp, Neisseria meningitidis; identical to SEQ ID NO: 38782

SEQ ID NO: 49427 - DNA, 288 bp, Neisseria meningitidis
ttggaaaagaaaatagagccgcaggatttgatggatgatgtttaccgtgcttttgattcggttggaaatattctgaatttccgtatagtagaaaaagagcaaaaagggttttgggtaagtaccaaaatcaaaacagttgtatttgattcggcagatatgtcttctgatgatctttttctgaaatgcttacagtcttcatataaggcttattttgaaactgaacctgccggtttagataaacggcagctgatgaaaacgttaattcaaaaatgcggattcagttgttga

SEQ ID NO: 49428 - DNA, 1281 bp, Neisseria meningitidis
atggaaaactcattgaaagaagccgccctcaagttccacgaattacccgttccgggcaaaatttccgttaccccgaccaaatctttggcgaccgacaaagatttggcgttggcgtactctccgggcgtagccgctccttgtatggaaatccatgccgatccgcaaaatgcctacaaatacaccgccaaaggcaacttggtcgccgtcatttccaacggtacggccgttttgggcttgggcgacatcggcgcgctggcgggcaaacccgtgatggaaggcaaaggcgtattgttcaaaaaattcgccggtgtggacgtgttcgacatcgaaatcgatgaaaaagacccgcaaaaactcgtggacatcatcgccgctttagagccgaccttcggcggcatcaacctcgaagacatcaaagcacccgagtgtttctacatcgaacgcgaattacgcaaacgctgcaaaatccccgtattccacgacgaccagcacggcacggccatcattaccgccgctgccgtattgaacgccctgcgttttaccggccgtaaaatcgaagaagcgactttggtgtgttccggcgcaggtgcggccgcgattgcctgcttgaaccaattgctggatttgggcttgaaacgcgaaaacgtgaccgtttgcgactccaaaggcgtgatttaccaaacccgcgaagacaaagatcgcatggacgaatccaaaaaattctacgccgttgaagacaatggccagcgcgtacttgccgatgccgtcaaaggtaaagacatcttcttgggcctctccggcgcgaacctgctgacccccgaaatgttgaacacgatgaacgaaaaacccatcgtgttcgccatggccaacccgaatccggaaatcctgccgccgctggcaaaagaaacccgtccggacgtggttatcggtaccggccgttccgacttcccgaaccaagtgaacaacgtattgtgcttcccattcatcttccgtggcgcgttggatgtcggcgcgacgaccatcaacgaagaaatgaaacgcgcctgcgtgtatgctttggcggatttggcgatggaagaagtaaccgaagaagtggttgccgcttacggtaagaaatttgaattcggcgcggaatacctgattccgactccgttcgattcccgcctgctgccgcgcgttgctacggctgccgccaaagcagcgatggaaagcggcgtggcaacccgtccgattgcagatttggaagcttacgctgccaagctgagcgaatggaagctgtaa

SEQ ID NO: 49429 - DNA, 789 bp, Neisseria meningitidis; identical to SEQ ID NO: 38376

SEQ ID NO: 49430 - DNA, 258 bp, Neisseria meningitidis
atggtattgttattaattgtaaataaatattggaaggtaaatgatatgaaaaatgaaattcaaaaaattatggacaaatatgatccatggcatgaagatgattttgagtcgtatgaagacattgccaaagatgtatcgctgatgacagataaaacgttcattgaacattatttgttagaagtttattcagaagaaaacggacattttgaccaagagaatgtccatgcaatgatagaagaaattaaaaatgcaatttag

SEQ ID NO: 49431 - DNA, 696 bp, Neisseria meningitidis
atgaaagcgatgatactggcggcaggacgcggcgagcgtatgcgccctttgaccgataccactccgaagccgctgctcgatgtggcgggtaagcctctaatcggttggcacctatgccgtctgaagcaggcggggtttaccgaaatcgtcatcaaccacgcttggctgggccggcagatagaagatgctttgggcgacggctcggcttatggcgtgaacatcgcctattcgcccgaacccgcaggcggtttggaaacggcaggcggcatcgcgcaggcattgccgctgttgggtgggcagccgtttttggtggtcaacggcgacgtgctgaccgacatcgattttaccgccgcgtttcagacggcatcgtccctgccggaacatatttccgcccatctgtggctggtggaaaatccgccgcacaaccccgacggcgatttttccctgctgcccgacggcagcgtgcggccggaagtaaatggcggcaacggattgacattcagcggcgtgggtatttaccgtcctgaaatgtttgacggaatcgaagcgggcagtgtggcgaaactcgcgcccgtattgcgtggcgaaatgcggcaaaaccgcgtgagcggtcagaagcatacgggcttgtggctggatgtcggcacggtatgccgtctgaaagaggctcaagcccttgcaggggcttggaagtga

SEQ ID NO: 49432 - DNA, 747 bp, Neisseria meningitidis; identical to SEQ ID NO: 38630

SEQ ID NO: 49433 - DNA, 438 bp, Neisseria meningitidis; identical to SEQ ID NO: 38907

SEQ ID NO: 49434 - DNA, 444 bp, Neisseria meningitidis; identical to SEQ ID NO: 46756

SEQ ID NO: 49435 - DNA, 426 bp, Neisseria meningitidis; identical to SEQ ID NO: 38777

SEQ ID NO: 49436 - DNA, 786 bp, Neisseria meningitidis; identical to SEQ ID NO: 39422

SEQ ID NO: 49437 - DNA, 1839 bp, Neisseria meningitidis; identical to SEQ ID NO: 39805

SEQ ID NO: 49438 - DNA, 1335 bp, Neisseria meningitidis
atggcaaaaaaatatttcggcacggacggcgtgcgcggcgaagtggggcaatttccgattacgcccgatttcgtattgaaactcggctatgcggcggggcaggttttggtgcagcacgacaccgaccagaaaccgaccgtcctcatcggcaaagacacgcgcatttccggctatatgctggaagccgctttggtggccggttttacggcggcgggtgtgaatgtggtacagaccggaccgctgcccacgcccggcgtggcttatctgacccgcgcgttgcgcctgtccgccggcgtgatgatttccgcgtcgcacaacgcctattccgacaacggcatcaaattctttgccgagggcggcgtgaaactgagcgatgaaatcgagttggaaatcgaagccaaaatcgacgaagaaatgaaaacccagccttctgcacgcctcggtcgcgcacgccgcatcagtggtgcggacgaccgctatatcgaattttgcaaatctacctttcccagccattccgaccttcggggtttgaagttggttatcgatactgccaacggcgcggggtacggtgtcgcacccaaggtgtttcacgaactgggcgcacaagtcgtcagcatcggcgacgaacccaacggctacaatatcaatgaaaaatgcggtgcgacttataccaagacactccaggcagccgttttacagcatgaagccgactacggcatcgccttagacggcgacggagaccgcctgatgatggtcgataaaaacggtaaggtttacgacggcgacagcctgatttacgtcattgctaaagcccgcgcccgagaaggtatcaacatcggcggcgtggtcggcacggtcatgaccaatatggcgatggaaatcgccctgaaagagcagggcgtggatttctgccgcgccaaagtcggcgaccgctatgtgttggcacagctgaaccaacgcagctggctcatcggcggcgaagccagcggccatattttgtgcatggacaaacacaacaccggcgacggcattatttccgcgctgcaagttttggcggcactgcaaacgctgaaccaagacctcgccaccgtttgcgccgattggcagccgtatccgcaaacgatgattaacgtgcgcatccaaaaaggtcagaaatggcaggaagcctcaaaagacgtgttggcggaagtggaaaaagaactcgaaggcaaagggcgtgtcgtgttgcgcgcttcgggaaccgaacccgtcgtgcgagtgatggttgaggcgcggcaggcggattgggcgcgcgacggtgcggaacgtattgcttccgccatcggcagcctttag

SEQ ID NO: 49439 - DNA, 345 bp, Neisseria meningitidis; identical to SEQ ID NO: 39608

SEQ ID NO: 49440 - DNA, 1248 bp, Neisseria meningitidis; identical to SEQ ID NO: 40445

SEQ ID NO: 49441 - DNA, 891 bp, Neisseria meningitidis; identical to SEQ ID NO: 38432

SEQ ID NO: 49442 - DNA, 660 bp, Neisseria meningitidis; identical to SEQ ID NO: 38595

SEQ ID NO: 49443 - DNA, 333 bp, Neisseria meningitidis; identical to SEQ ID NO: 44638

SEQ ID NO: 49444 - DNA, 1827 bp, Neisseria meningitidis; identical to SEQ ID NO: 38505

SEQ ID NO: 49445 - DNA, 1380 bp, Neisseria meningitidis; identical to SEQ ID NO: 38665

SEQ ID NO: 49446 - DNA, 726 bp, Neisseria meningitidis; identical to SEQ ID NO: 38399

SEQ ID NO: 49447 - DNA, 1038 bp, Neisseria meningitidis; identical to SEQ ID NO: 39064

SEQ ID NO: 49448 - DNA, 162 bp, Neisseria meningitidis
atggcatattttggcggctttgttcgcgctttgttcgatcttggcgtgtttgaacgcggcggcgtgaaaggaagggagaaatggttttcccgcgtttggtggcggtcggaggtgctgtgcctgatgtgcggcggcatattttcggtgaaattgattttatag

SEQ ID NO: 49449 - DNA, 633 bp, Neisseria meningitidis; identical to SEQ ID NO: 38220

SEQ ID NO: 49450 - DNA, 213 bp, Neisseria meningitidis; identical to SEQ ID NO: 36410

SEQ ID NO: 49451 - DNA, 876 bp, Neisseria meningitidis; identical to SEQ ID NO: 38422

SEQ ID NO: 49452 - DNA, 738 bp, Neisseria meningitidis; identical to SEQ ID NO: 39629

SEQ ID NO: 49453 - DNA, 2082 bp, Neisseria meningitidis
atgatttacggctcaatgccgtctgaaaagctcacaatttttcagacggcatttgttatgcaagtaaatattcagattccctgtatgctgtacagacgcgggagtgttaagccccccttgtttgaagctccgcggctcctgccgagcttcaccgaccccgttgtgcccaagctctctgctcccggcggctacattgtcgacattccgaaaggcaatctgaaaaccgaaatcgaaaagctgtccaaacagcccgaatacgcctacctgaaacagcttcagacggccaagaacgtcgattggaaacaggtgcagctggcctacgacaaatgggactataaacaggaaggcttgaccggagccggtgcagcgattgtggtgattattgtaaccgctctaacttatggatacggagcggctgcagcgggtagcgtaactgccgcaggaagtagtacagccgcagctgcaacaacgacagcggcagcaactaccactgtttctactgcagctgccatgcaaaccgcagctttagcctccttgtatagccaagcagctgtagccatcatcaataataaaggcgatgtaggcaaagcattaaaagatctcggcaccagtgatacggtcaagcagattgttacttccgcactgacggcgggtgcattaaaccagatgggagcagatattgcccaattgaacagcaaggtaagaaccgaactgttcagcagtacgggcaatcaaaccattgccaaccttggaggcagattggccaccaacctcagcaatgcaggtatctcagctggtatcaataccgccgttaacggcggcagcttgaaagacaacttaggcaatgccgcattgggagcattggttaatagcttccaaggggaagccgccagcaaaatcaaaacaaccttcagcgacgattatgttgccaaacagttcgcccacgctttggcgggttgtgttagcggactggtacagggaaaatgtaaagatggggcaattggcgcagcagttggggaaatcgtagctgaatccatacttggcggcagaaaccctgctacactcagcgatgcagaaaagcataaagttatcagttactcgaagattattgcgggcagcgtggcggcactcaacggcggcgatgtgaatactgaggcgaatgcggctgaggtagctgtggtgaataatgctttgaattttgacagcacccctaccaatgcgaaaaagcatcaaccgcagaagcccgacaaaaccgcactggaaaaaatcatccaaagtattatgcctgcacatgcggcaggtgcgatgactaatccgcaggataaggatgctgccatttggataagcaatatccgtaatggcatcacaggcccgattgtgattaccagctatggagtttatgcagcaggttggacagctccgctgatcggtacagctggtaaagcagctatcagcacctgcatggctaatccttctggttgtactgtcatggttacgcaggctgctgaagcgggcgcgggaatcgccacgggtgcggtaacggtaggcaacgcttgggaagctccagtaggagcgttgtcgaaagcgaaggcggctaagcaagctgctcctaaagaaacaataaacaatttggcaaatttagccaaagcagaacagcagattttattccgtattgcccaacgcgatacgcaactggatgcatggaagacgggatttaacaatagagtaaggaaaggagcaggcttgcttgatgcaagtaatattccgataaccattaacggaaaaaccatcaaacctgtacaagccataagcttaaagggagcacccgtttacagcggcgtaagcgaacaggagatttttgcgctttatcggcagatgactggccagaatccgaattttagagttttgcctgacggaagattagcaaatggcattatcagtactggagaatgggcaggaacaaaaattgcattaagaaatttttcaaaaacagagaattcaactcaagcacgatggacattagatttgcagaatcctccatcatttattaaaggtactaaattggagcttaaattccaataa

SEQ ID NO: 49454 - DNA, 201 bp, Neisseria meningitidis; identical to SEQ ID NO: 46518

SEQ ID NO: 49455 - DNA, 870 bp, Neisseria meningitidis; identical to SEQ ID NO: 38859

SEQ ID NO: 49456 - DNA, 2589 bp, Neisseria meningitidis
atgaaaaatcaatatagtaaatcattgcatggcgtgttttaccttgccttctatgataaaatacacgcattttttgcagagcagttgtttcaactcatcataaatatgaacaaaaaacccacctacatcagtttatttagcagtgcaggcgttggttgctatggttttaaaaccaatggttttgaatgcgtagcaaccaacgaacttttagaaaaacgcctaaaaatccaaaaatataatcaaaaatgccgctttgattcaggttatattgctggcgatattaccctgcctgaaacccaagccaaactgtttgccgaaattcgacgctggaatactgaaattgatgttgtgattgctacaccgccttgccaaggaatgtcggttgccaaccataaaaaaaataatgaaatggcaagaaattctttggtcgtggaatcaatcaaaatcgttcgggaagttcagcccaagttttttatttttgaaaacgtcaaagcctttttaaatacaccctgcaccgataccgatcatcaagaaaagccgattgaggaagccatttggtcaaatttgggcggacattacaacattctatccaatgtactaaattttaaagattatggtgcaaattccagtcgtaccagaacgctggtgattggcgtgcgaaaagatattcatcacattacgccgtacgatattttccccaagcaaacaccgccaaaaaccttgcgtacattgctggctgatctgccgcctttaatgcaaatgggcgaaattagcgatgatgatatttaccatagctatcgtgaatttgatcgccgtatgttgccgtggattgcacagcttaaagaaggcgagtcagctttccaaaatactgatcctgcacgcattccccatcaaattaaaaatggtgaaattatctacaatcaaaacaaaaatggagacaaatacgcccgttggtttttagatcgtgagggtccgtgcatccatacccgtaatgacattttagccagccaaaacaccatccatcccactgaaaaccgtgtattttccgtgcgtgaactcatgcgtatgatgtcaattccgccatcatttaaatggacggcacaagatgaaaaacagcttaatgcactgtcatttgatgagaaaaaaacctttttgaaaaaagaagagctgaatatccgccattgtatcggtgaatctgtgccaaccgctgttttggccaatgtcgcacaaaacattcaggcagccttgcaacagtccgaactgtcaatgacggaaattcaaaatttaatcaaacgagaaaatttatcccttgccgataatctctaccgatttattgagcaacattttgacacatatccattcagtcggcttttgcaaattgctgaatacgctaatgctgcccgtagcgaaacggctgcttattttacccgtattgatattgctttcggactggttaatgctcttcctgatttcaaaaagaaaaaaaacttacggattttagaaccctctgtcggcattggtaatttcattccactactggcaaaaaaatatgcagacaaagaaaaagttatttttgatttggtggatattgactcaaacagtttaaatctcctgtcattgctgctgaaaaaattaaatttaggcagtaaatttgagttcaatattattcatcaggattttttaaccgcaacgctgcctgaaaactatgatctagtcatcggcaatccaccatacggcaaagttaaggcaagtgataaaaatttggcactataccgtaaaaatgctaccaataaagatacgcaaaatattttttcattttttattgataaggctctgacgctcagtaaaaccgtggctttggttgttcccaaaagtgtgattaacgcccccgagtttcaaataacccgacaacaacttatcacagccaatatcaaccgcattattgattacggcgagaaagcatttaaaggcgtaaaaatagagacgattgcctttattgccgatcaaaccgacaaagacaatcaacatattacgatagaaagccatatccaagaaacgttgatacaaaactgtaaaaactattttttttctgataattttccctattggttgatttatcgtaatagtgaatttgatcaaattgcacaaaaattggaatttaatgtatttcaatcattccgagatcgccaaattaccaaagcgcatacacagaatagtggcaatgttcgggttttaaaatcccgtaatatcggtaacaacgagattattgatattgagggttatgatagttatgtggattcagttgcccctttttctgtcggcaaatttattaaccgtaaaaatgtcgtgatgattcccaatctgacttacaaacctcgggcagcatttttgcctgaaaacagtattgctgatggctcggttgccctactgacaatgaaaaaacacgaaaaaatcctaacccaacgagatctcgcatactatgcaactcccgaatttgagcagttttaccgtgttgcccgtaattatggttctcgttcaatgaatatagacaatcattctgtgttttttttcggattgctaaaagattag

SEQ ID NO: 49457 - DNA, 891 bp, Neisseria meningitidis; identical to SEQ ID NO: 38158

SEQ ID NO: 49458 - DNA, 378 bp, Neisseria meningitidis; identical to SEQ ID NO: 38701

SEQ ID NO: 49459 - DNA, 1389 bp, Neisseria meningitidis
atgagcacccgtaccgaacacgacaccatgggcaatgtcgaagtcccgtccgaagcctattggggcgcgcagacccagcgcagccgcaacaatttcaaaatcggcggcgaaaccctgccgcagccgttgatttatgctttggcgctggtgaaaaaagccgccgccgcgaccaatgtttccctcggcaggattaagccggaacaggcggatttgattacgcaggcggcggatgatgtgttgaacggcaagctcgacggacagtttcctttagtggtttggcagaccggctccggcacgcagtccaatatgaacatgaacgaagtgctggcgaaccgcgccaacgaaatcgccggtacgggtttggcggcgtatcagcccgtccatcccaacgaccatgtgaaccacgcgcaatcgaccaacgacgcattcccgaccgccatccacgttgccgccgcgattgaaatcaaccgccacctcatccccgccgtaaaagccctgcgcgacaccttggacaaaaaagcccaagccttcgcccctatcgtcaaaatcggccgcacccacttgcaggacgcgacgccgctgactttaggccaagaattttccggctacgtttcccagctcgaccacggcttaggccgtctgaacgacgcgcttaaagacttgtatgaacttgctttgggcggtacggcggtcggcacgggtttgaacagccatcccgaatacgccgaaaaagccgccgccaaactcgccgaattgtccggcttgccgtttgtcagcgcgccgaacaaatttgaagccttgggcggacgcgatgccgccgttgccgcttcgggcgcattgaaaacgctggcggcaagcctgaataaaatcgccaacgacatccgctggctggcaagcggcccgcgctgcggtttgggcgaaatcaaaatccccgaaaacgagccgggttcgtccatcatgccgggcaaagtcaacccgacccaatgcgaagcgatgaccatggtgtgctgccaagtgttcggcaacgacgttaccatcggcatggcgggcgcgtcgggcaatttcgagctgaacgtctatatgcccgttatcgcctacaacctcttgcaatccatccgcctcttgggcgacgcgtgcaacagcttcaacgaacactgcgccatcggcatcgaacccgtaccggaaaaaatcgactatttcctgcaccattccctgatgctcgttaccgcgttaaaccgcaaaatcggttacgaaaacgccgccaaagtcgccaaaaccgcctacaaaaacaacaaatcgttgcgcgaaaccgccgttgagttgggcttgctgacgggcgaagaatttgacgaactagtcgttcctgccgatatggttcatccgcgctaa

SEQ ID NO: 49460 - DNA, 1257 bp, Neisseria meningitidis; identical to SEQ ID NO: 38254

SEQ ID NO: 49461 - DNA, 1044 bp, Neisseria meningitidis
atgcagattaccgacttactcgccttcggcgctaaaaacaaagcatccgaccttcacctgagttcgggcatatcccctatgattcgggttcacggcgatatgcggcgcatcaaccttcccgaaatgagcgcggaagaggtcggtaatatggtaacttcggtgatgaacgaccaccagcggaaaatctaccagcaaaacttggaagtcgacttctcgttcgaactgcccaacgtcgcccgattccgcgtcaacgccttcaacatcggccgcggtcccgccgccgtattccgcaccattcccagcaccgtcttatcgctggaagaattgaaagccccgagcattttccaaaaaatcgcagaatcgccgcgcggcatggtattggttaccggccctaccggttcgggcaaatcgaccacgcttgccgcgatgatcaactacatcaacgaaacccagccggcacacatcctgaccatcgaagacccgatcgaattcgtccaccaaagcaaaaaatccctgattaaccagcgcgagctgcaccagcacaccctcagcttcgccaacgcgctgcgttccgcattgcgcgaagaccccgacgttatccttgtcggcgagatgcgcgaccccgaaaccatcggcttggcactgaccgccgccgaaaccggacacttggttttcggcacgctgcacacgaccggcgcagcaaaaaccgtcgaccgtatcgtggacgtattcccggtgggagaaaaagaaatggtgcgctctatgctgtccgaatcgctgaccgccgtcatctcccaaaacctgctgaaaacgcacgacggcaacggccgtgtcgcctcgcacgaaatcctgattgccaaccccgccgtccgcaacctcatccgcgaaaacaaaatcacgcagattaactccgtcctgcaaaccgggcaggcgagcggtatgcagacaatggaccaatcgctgcaatcgctggtgcgccaagggctgatcgcaccggaagtcgcacgcagacgcgcgcaaaacagcgaaagtatgagtttctga

SEQ ID NO: 49462 - DNA, 1389 bp, Neisseria meningitidis; identical to SEQ ID NO: 38735

SEQ ID NO: 49463 - DNA, 162 bp, Neisseria meningitidis
ttgcggatagcgggcaaatacggcggcatacggatttcaggcggtgcaaaaggcaacgcgcggtattccacaaagccgccgattgcggcggatgccgcatttcgcaccgcgccccttgcgccgctttcccacttaccctatttgttcggaacatatttatga

SEQ ID NO: 49464 - DNA, 996 bp, Neisseria meningitidis; identical to SEQ ID NO: 38860

SEQ ID NO: 49465 - DNA, 435 bp, Neisseria meningitidis; identical to SEQ ID NO: 45778

SEQ ID NO: 49466 - DNA, 930 bp, Neisseria meningitidis; identical to SEQ ID NO: 39592

SEQ ID NO: 49467 - DNA, 1065 bp, Neisseria meningitidis; identical to SEQ ID NO: 38431

SEQ ID NO: 49468 - DNA, 1035 bp, Neisseria meningitidis; identical to SEQ ID NO: 38282

SEQ ID NO: 49469 - DNA, 2016 bp, Neisseria meningitidis
atgatgaaactcaatccccaacagctcgaagccgtccgctacctcggcggcccactgctcgtccttgccggtgcaggcagcggcaaaaccggcgtgattactcaaaaaatcaagtatttgattgtcaatgtcggctatctgccgcataccgttgccgcgattacctttaccaataaagccgccgcggaaatgcaggagcgcgtcgccaaaatgctgcacaaatcgcaaacgcgcgggctgacgatttgcacgttccactctttgggcatgaagattctgcgcgaagaggcgaaccatatcggttacaaaaaaaacttctccattctcgattctaccgacagcgcgaaaatcatcggcgaactcttaggcggtacgggcaaagaagccgtattcaaggcgcagcaccagatttccttgtggaaaaacgatttaaaaacgcctgaagatgtcgttcagacggcatcgaacatttgggaacaacaaaccgcacgcgtgtatgcgagctatcaggaaaccttacaaagctatcaggcagtggacttcgacgacttgatccgcctgcctgccgtgctgttgcagcaaaacagcgaagtgcgcaacaaatggcagcggcggctgcgttatctgctggttgacgaatgccaagatacgaatacctgccaatttacgttgatgaaacttctgaccggcgcggaaggtatgtttaccaccgtcggcgacgacgaccagtccatctacgcatggcgcggcgcgaacatggaaaacctgcgcaaaatgcaggaaaactatccgcagatgaaggtcatcaaactggagcaaaactaccgctccaccgcgcggattctcaaaatcgccaacaaagtcatcgagaacaaccccaagctgttcaccaaaaaactttggtcgaaattgggcgaaggcgagcccgtcaaagtcgttgcctgccaaaacgagcagcacgaagccgactgggtcgtcagccaaatcgtcaaacaaaaactcatcggcggcgacaaaacccaatatgccgatttcgccgtgttgtaccgcggaaagcatcaggcgaggattttcgaggaagcattgcgcggcgcgcgcatcccctaccgtctctccggcggacaaagctttttcgacaaagccgaaatcaaagacgtgttgtcttatgtgcggctgcttgccaaccccaatgacgatcccgcctttctgcgtgccgttaccacgcccaaacgcggcatcggcgatgtcacgctgggcaagctcaacacttacgcgcacgaacacgaatgcagcctgtatgaagccgcacaaaacgaagaagcccttgccacgctgaacaataccaaccgccaacacctgcaagcctttatggatatgttcggcagctaccgcgccaaagcggaaaccggcgaagcaggcgagttcatcaacagcctgctcgaagaaatcgactatgaaaaccatttgatgcaaaacgaagaaggcaaggccggcgaaatcaaatggcgcaatgtcagcgatttggtatcatggtttgcgcgaaaaggcggggaagacggcaaaaacatcatcgaactcgcccaaaccgtcgccttgatgacgcttttggaaggaaaagacgaagaagaaaccgatgccgtctcgctatccacgctacacgccgccaaaggtttggagtatccgtatgttttccttgtcggttgcgaagaaggcgttttgccgcacaacgacagtatcgaagagggcaacgtcgaagaagaacgccgcctgatgtacgtcggcatcacccgcgccaaacgccaactcacgctgacccactgcgtcaaacgcaaaaaacaaggcacatggcagttccccgaacccagccgattcatagacgaaatgccgcaggaagatttgaaaatcctggggcgcaaaggcggcgagccgattgtcagcaaggaagaaggcagacgcaaccttgccgatataatcggaaggctcgacagcatgaaaaaaggcaatccgtcggattaa

SEQ ID NO: 49470 - DNA, 540 bp, Neisseria meningitidis; identical to SEQ ID NO: 44661

SEQ ID NO: 49471 - DNA, 1083 bp, Neisseria meningitidis
atgtttttatggctcgcacatttcagcaactggttaaccggtctgaatatttttcaatacaccacattccgcgccgtcatggcggcgttgaccgccttggcgttttccctgatgttcggcccgtggacgatacgcaggctgaccgcgctcaaatgcgggcaggcagtgcgtaccgacggcccgcaaacccacctcgtcaaaaacggcacgccgacgatgggcggttcgctgattctgaccgccattacagtgtccaccctgttgtggggcaactgggcaaacccgtatatctggattctcttgggcgtattgctcgctaccggcgcactcggtttttacgacgactggcgcaaagtcgtctataaagaccccaacggcgtgtccgccaaattcaaaatggtgtggcagtcaagcgttgccattatcgccggtttggcattgttttaccttgccgccaattccgccaacaatattttgattgtcccgttcttcaaacaaatcgccctgccgctgggcgtggtcggctttttggtgttgtcttacctgaccatcgtcggcacatccaatgccgtcaacctcaccgacggcttggacggccttgcgaccttccccgtcgtcctcgttgccgccggcctcgccatcttcgcctacgtcagcggacactaccaattttcccaatacctccagcttccctatgtcgccggtgcgaacgaagtcgctatattctgtaccgccatgtgcggcgcgtgcctcggtttcttgtggtttaacgcctatcccgcgcaagtctttatgggcgatgtcggtgcattggcattgggtgccgcgctcggtaccgtcgccgtcatcgtccgccaagagtttgtcctcgtcattatgggcggattatttgtcgtagaagccgtatccgttatgcttcaggtcggctggtataagaaaaccaaaaaacgcatcttcctgatggcgcccatccatcaccactacgaacaaaaaggctggaaagaaacccaagtcgtcgtccgcttttggattatcaccatcgtcttggtgttgatcggtttgagtaccctcaaaatccgctga

SEQ ID NO: 49472 - DNA, 807 bp, Neisseria meningitidis
atgcaaaaccacgttatcagcttagcttccgccgcagaacgcagggcgcacattgccgataccttcggcaggcacggcatcccgtttcagtttttcgacgcactgatgccgtctgaaaggctggagcaggcaatggcggaactcgtacccggcttgtcggcgcatccttatttgagtagtgtggaaaaagcctgctttatgagccacgtcgtattgtggaagcaggcgttggacgaaggcgtaccgtatgttgccgtatttgaggatgatgtcttactcggcgaaggggcggagaaattccttgacgaagacgcttggctgcaagagcgttttgacaaggattccgcctttatcgtccgcttggaaacgatgtttatgcacgtcctgacctcgccctccggtgtggcggactactgcgggcgtgcctttccgctgttggaaagcgaacactgggggacggcgggctatatcatttcccgaaaggcaatgcggttttttttggacaggtttgccgttttgccgtctgaacgcctgaaggcggtggattggatgctcttcagcagttttctcgacaaaggggggatgacggtttgccaactgacccccgccttgtgcgtccaaagcgaaaccctgcccagccaactgaaaaacggcaggcaggaatcgtaccgcaaccgccgctccccgaaggttttgttgaaacgcgctttgggaaaaatcggcagggaaatcgaaagggcgagggaacggaaacgtcagaaaaaattggaaaaacacctcgggcggcacgtcgtcccatttgaatag

SEQ ID NO: 49473 - DNA, 1110 bp, Neisseria meningitidis
atgaaatacaaaagaatcgtatttaaagtcggcacatcttcgattacccattcggacggcagtctctcgcgcggcaaaatccaaaccatcacccgccagcttgccgcattgcatcatgcgggacacgagctggtcttggtgtcttccggcgcggttgcggcagggtttggtgcgctgggtttcaaaaaacgtccggtcaaaatcgccgacaaacaggcttccgccgccgtcgggcaggggctgctgatggaagaatatacggcaaacctgtcttcagacggcatcgtgtccgcacaaatcctgctcagccgcgccgactttgccgacaaacgccgctaccaaaatgccggcggcgcactttccgtgctgctgcaacgccgcgccgtccccatcatcaatgaaaacgatacggtttcggttgaggaattgaaaatcggcgacaacgacacattgagtgcgcaagtggcggcgatgatacaggcagacctcttggtgctgctgaccgacatagacggtctttacacgggcaacccgaacagcaatcccgatgccgtacggctggacaaaatcgaacacatcaaccatgaaatcatcgaaatggcgggcggatcgggttcggcaaacggcacgggcggtatgctgaccaaaatcaaagcggcaaccatcgccgccgaatccggcgtaccggtgtatatctgttcctcgctcaaacccgatgcacttgccgaagctgccgaacatcaggcggacggctcgtttttcgtcccccgtgccaaaggtttgcggacgcagaagcaatggctggcgttctattccgaaagccggggcagcgtttatgtggacgaaggtgcggaacacgctttgtccgaacaggggaaaagcctgctgatgtcgggcattgccggaatcgaagggcatttttcccgtatggacaccgtaaccgtgtacagcaaggcaaccaaacagcccctgggcaaagggcgcgtcctgttcggttctgccgccgccgaagacctgctcaaatcgcgtaaggcgaaaggcgtgttcatccatcgggacgactggatttccatcacgcccgaaatacgcctgcttctgaccgaattttag

SEQ ID NO: 49474 - DNA, 474 bp, Neisseria meningitidis; identical to SEQ ID NO: 38731

SEQ ID NO: 49475 - DNA, 705 bp, Neisseria meningitidis; identical to SEQ ID NO: 42711

SEQ ID NO: 49476 - DNA, 918 bp, Neisseria meningitidis
atgagcatcatccactacctctcgctgcacgtcgaatccgcgcgcaccgcgctcaaacagcttctgcgccaacctttcggcacactgcttaccctcataatgctcgccgtcgccatgaccctgccgctgtttatgtatttgggcatccaaagcgggcaaagcgtgttgggcaaactcaacgagtcgccgcaaatcacaatctatatggaaaccgccgccgcacaaagcgacagcgataccgtgcgcagcctgctggcgcgcgacaaacggctcgacaacatccgcttcatcggcaaagaagacggtctggaagaattacagtccaatctcgaccaaaatctgatttccatgcttgacggcaaccccctgccggatgtctttatcgttacccccgacccggcaaccacgcccgcccaaatgcaggcaatctaccgagacattaccaaactgcctatggtcgaatccgcgtctatggataccgaatgggtgcaaacgctgtaccaaatcaacgagttcatccgcaaaattttatggtttctttccctgacgctggggatggcgttcgtccttgtcgcgcacaacaccatccgcctacaaatcctcagccgaaaagaagaaatcgaaatcaccaaactcttgggcgcgcccgcgtcgtttatccgccgccccttcctttatcaggcaatgtggcagagcatcctttccgccgccgtcagcttggggctttgcggttggctgctctctgccgtgcgcccattggtcgatgccattttcaaaccctacggcttgaacatcggctggcgtttcttttaccctgaagaaatcgtgctggtgttcggcttcgtcatcgcgttgggcgtattcggcgcgtggcttgccaccacccagcacctgctcggcttcaaagccaaaaaataa

SEQ ID NO: 49477 - DNA, 411 bp, Neisseria meningitidis; identical to SEQ ID NO: 44362

SEQ ID NO: 49478 - DNA, 807 bp, Neisseria meningitidis; identical to SEQ ID NO: 39734

SEQ ID NO: 49479 - DNA, 339 bp, Neisseria meningitidis; identical to SEQ ID NO: 39659

SEQ ID NO: 49480 - DNA, 261 bp, Neisseria meningitidis; identical to SEQ ID NO: 43315

SEQ ID NO: 49481 - DNA, 2262 bp, Neisseria meningitidis; identical to SEQ ID NO: 39273

SEQ ID NO: 49482 - DNA, 1527 bp, Neisseria meningitidis; identical to SEQ ID NO: 39669

SEQ ID NO: 49483 - DNA, 870 bp, Neisseria meningitidis; identical to SEQ ID NO: 47802

SEQ ID NO: 49484 - DNA, 546 bp, Neisseria meningitidis; identical to SEQ ID NO: 38361

SEQ ID NO: 49485 - DNA, 1428 bp, Neisseria meningitidis; identical to SEQ ID NO: 39605

SEQ ID NO: 49486 - DNA, 915 bp, Neisseria meningitidis; identical to SEQ ID NO: 39317

SEQ ID NO: 49487 - DNA, 1035 bp, Neisseria meningitidis; identical to SEQ ID NO: 39677

SEQ ID NO: 49488 - DNA, 1398 bp, Neisseria meningitidis; identical to SEQ ID NO: 39650

SEQ ID NO: 49489 - DNA, 1179 bp, Neisseria meningitidis; identical to SEQ ID NO: 39516

SEQ ID NO: 49490 - DNA, 540 bp, Neisseria meningitidis; identical to SEQ ID NO: 44661

SEQ ID NO: 49491 - DNA, 948 bp, Neisseria meningitidis
atgaatatcctcagtaaaatcagcagctttatcggaaaaacattttccctctgggccgcgctctttgccgccgccgcttttttcgcgcccgacaccttcaaatgggcggggccttatattccttggctgttgggcattattatgttcggtatgggtttgacgctcaaaccttccgacttcgatattttgttcaaacatcccaaagccgtcattatcggcgtgattgcccaattcgccatcatgccggcaaccgcctggctgctgtccaaactgttgaacctgcctgccgaaatcgcggtcggcgtgattttggtcggctgctgcccgggcggtacggcttccaatgtgatgacctatctggcgcgcggcaatgtggctttgtcggttgccgttacgtctgtttccaccctgatttccccattgctgactcccgccatcttcctgatgcttgccggtgaaatgctggaaatccaagcgggcagtatgttgatgtccatcgtcaaaatggttttgctccccattgttttgggtttgattgtccataaggttttgggcagtaaaaccgaaaagctgaccgatgcgctgccgctggtttccgttgccgccatcgtgctgattatcggcgcggttgtcggggcaagcaaaggcaagattatggaaagcggcctgctgatttttgccgttgtcgcactccacaacggcatcggctacctgctcggcttctttgccgccaaatggaccggcctgccttatgatgcacaaaaaacgctggccatcaaagtcggtatgcaaaactcggggctggccgccgcgcttgccgccgcacactttgccgctgcgccggtcgttgccgttccgggcgcattgttcaacgtgtggcacaatatctccggctcgctgctggcaacttattgggcggccaaagccggtaaacataaaaaaccctaa

SEQ ID NO: 49492 - DNA, 477 bp, Neisseria meningitidis; identical to SEQ ID NO: 39694

SEQ ID NO: 49493 - DNA, 657 bp, Neisseria meningitidis; identical to SEQ ID NO: 39384

SEQ ID NO: 49494 - DNA, 204 bp, Neisseria meningitidis
atgctggacaaagtcgaagccctgctgaccgtcggcggcaaacattggaactatgcacacgcaatggcgcggcggatgtttggtaaggataaggtcgaatatttagacgatacgcagctacataaactggttgctgcgttgcagattgcggaaaacaggaaaacggaaaaagcgggtggggatgatggggttcgaaaaagttga

SEQ ID NO: 49495 - DNA, 477 bp, Neisseria meningitidis; identical to SEQ ID NO: 37049

SEQ ID NO: 49496 - DNA, 942 bp, Neisseria meningitidis; identical to SEQ ID NO: 40047

SEQ ID NO: 49497 - DNA, 1188 bp, Neisseria meningitidis
atggcagagatctgtttgataaccggcacgcccggttcagggaaaacattaaaaatggtttccatgatggcaaacgatgaaatgtttaagccggatgaaaacggcatacgccgtaaagtatttacgaacatcaaaggcttgaagataccgcacacctacatagaaacggacgcgaaaaagctgccgaaatcgacagatgagcagctttcggcgcatgatatgtacgaatggataaagaagcccgaaaatatcgggtctattgtcattgtagatgaagctcaagacgtatggccggcacgctcggcaggttcaaaaatccctgaaaatgtccaatggctgaatacgcacagacatcagggcattgatatatttgttttgactcaaggctctaagcttctagatcaaaatcttagaacgcttgtacggaaacattaccacatcgcttcaaacaagatgggtatgcgtacgcttttagaatggaaaatatgcgcggacgatcccgtaaaaatggcatcaagcgcattctccagtatctatacactggataaaaaagtttatgacttgtacgaatcagcggaagttcataccgtaaataaggtcaagcggtcaaaatggttttatactctgccagtaataatattgctgattcccgtttttgtcggcctgtcctataaaatgttaagtagttatggaaaaaaacaggaagaacccgcagcacaagaatcggcggcaacagaacatcaggcagtatttcaggataaaacagaaggcgagccggtaaacaacggtaaccttaccgcagatatgtttgttccgacattgtccgaaaaacccgaaagcaagccgatttataacggtgtaaggcaggtaagaacctttgaatatatagcaggctgtgtagaaggcggaagaaccggatgcacatgctattcgcatcaagggacggcattgaaagaaattacaaaggaaatgtgcaaggattacgcaagaaacggattgccgtttaacccatataaagaagaaagccaagggcgggatgtccagcaaagtgagcagcaccattcggacagaccgcaagttgccacgttgggcggaaagccgtggcaaaatcttatgtatgataattggcaggagcgcggaaaaccgtttgaaggaatcggcgggggcgtggtcggatcggcaaactga

SEQ ID NO: 49498 - DNA, 1503 bp, Neisseria meningitidis; identical to SEQ ID NO: 39782

SEQ ID NO: 49499 - DNA, 477 bp, Neisseria meningitidis; identical to SEQ ID NO: 38649

SEQ ID NO: 49500 - DNA, 642 bp, Neisseria meningitidis; identical to SEQ ID NO: 39060

SEQ ID NO: 49501 - DNA, 240 bp, Neisseria meningitidis; identical to SEQ ID NO: 39921

SEQ ID NO: 49502 - DNA, 879 bp, Neisseria meningitidis
ttgaaccgccacaaaagcaccatcagccgcgaaatcagacggcaccgcacccaagggcagcaatacagcgccgaaaaagcccagcggcaaagccagactatcaaacagcgtaagcgacaaccctataagctcgattcgcagctgattcagcacatcgacacccttatccgccgcaaactcagtcccgaacaagtatgcgcctacctgtgcaaacaccaccggatcactctccaccacagcaccatttaccgctaccttcgccaagacaaaagcaacggcagcacgttgtggcaacatctcagaatatgcagcaaaccctaccgcaaacgctacggcagcacatggaccagaggcaaagtccccaaccgtgtcggcatagaaaaccgacccgctatcgtcgaccagaaatcccgtatcggcgattgggaagccgacaccattgtcggcaaaggacagaaaagcgcattattgaccttggtcgaacgcgttacccgctacaccatcatctgcaaattggatagcctcaaagccgaagacactgcccgggcagctgttagggcattaaaggcacataaagacagggtgcacaccattaccatggataacggcaaagagttctaccaacacaccaaaataaccaaagcattgaaagcggagacttatttttgtcgcccttaccattcttgggagaaagggctgaatgagaacaccaacggactcatccggcaatacttccccaaacaaaccgatttccgtaacatcagtgatcgggagatacgcagggttcaagatgagttgaaccaccgaccaagaaaaacacttggctacgaaacgccaagtgttttattcttgaatctgttccaaccactaatacactag

SEQ ID NO: 49503 - DNA, 2118 bp, Neisseria meningitidis
atgcgccgttttctaccgatcgcagccatatgcgccgtcgtcctgttgtacggactgacggcggcaaccggcagcaccagttcgctggcggattatttctggtggatagttgcgttcagcgcaatgctgctgctggtgttgtccgccgttttggcacgttatgtcatattgctgttgaaagacaggcgcgacggcgtattcggttcgcagattgccaaacgcctttctgggatgtttacgctggttgccgtactgcccggcgtgtttctgttcggcgtttccgcacagttcatcaacggtacgattaattcgtggttcggcaacgatacccacgaggcgcttgaacgcagcctcaatttgagcaagtccgcattgaatctggcggcagacaacgcccttggcaacgccatccccgtgcagatagacctcatcagcaccgcctccctatccggcaatatgggcagggtgctggaacattatgccaacgggtttacacagttgtccctttacaatgccgcaagcggcaaaatcgaaaaaagcatcaacccgcacaagctcgatcagccgtttccggataaggcgcgttgggaaaaaatccaacaggcgggttcggtcagggatttggaaagcataggcggcgtattgtacgcgcagggctggctgtcggcgggtacgcacaacgggcgcgattacgccttgtttttccgtcagccggttcccaaaggcgtggcagaggatgccgtcttaatcgaaaaggcaagggcgaaatatgctgagttgagttacagcaaaaaaggtttgcagacctttttcctggcaaccctgctgattgcctcgctgctgtcgatttttcttgcactggtcatggcactgtatttcgcccgccgtttcgtcgaacccgtcctatcgcttgccgagggggcgaaggcggtggcgcaaggcgatttcagccaaacccgtcctgttttacgcaatgacgagttcgggcgtttgaccaagttgttcaaccacatgaccgagcagctttccatcgccaaagaagcagacgagcgcaaccgccggcgcgaggaagccgccagacattatcttgaatgcgtgttggaggggctgaccacgggcgtggtggtgtttgacgaacaaggctgtctgaaaaccttcaacaaagcggcggaacagattttggggatgccgcttacccccctgtggggcagcagccggcacggttggcacggcgtttcggcgcagcagtccctgcttgccgaagtgtttgccgccatcggcgcagcggcaggtacggacaaaccggtccatgtgaaatatgccgcgccggacgatgccaaaatcctgctgggcaaggcaaccgtcctgcccgaagacaacggcaacggcgtggtaatggtgattgacgacatcaccgttttgatacacgcgcaaaaagaagccgcgtggggcgaagtggcaaaacggctggcacacgaaatccgcaatccgctcacgcccatccagctttccgccgaacgtctggcgtggaaattgggcgggaagctggatgagcaggatgcacaaatcctgacgcgttcgaccgacaccatcgtcaaacaggtggcggcattgaaggaaatggtcgaagcattccgcaattatgcgcgttccccttcgctcaaattggaaaatcaggatttgaacgccttaatcggcgatgtgttggcattgtatgaagccggtccgtgccggtttgcggcggagcttgccggcgaaccgctgatggtggcggcggatacgaccgccatgcggcaggtgctgcacaatattttcaaaaatgccgccgaagcggcggaagaagccgatgtacccgaagtcagggtaaaatcggaagcggggcaggacggtcggattgtcctgacggtttgcgacaacggcaaagggttcggcagggaaatgctgcacaacgccttcgagccgtatgtaacggacaaaccggcgggaacgggattgggtctgcctgtggtgaaaaaaatcattgaagaacacggtggccgcatcagcctgagcaatcaggatgcgggtggggcgtgtgtcagaatcatcttgccaaaaacggtaaaaacttatgcgtag

SEQ ID NO: 49504 - DNA, 834 bp, Neisseria meningitidis; identical to SEQ ID NO: 39780

SEQ ID NO: 49505 - DNA, 2013 bp, Neisseria meningitidis
ttggcgtgtttggtatcggtattggggtttcatggtttttatacggatttgcgccatttaagggcgcgtttttctttgtcgcttaaaggcgcaacattggcggatttggtacggtttgctaatagcatgaatttaaccgctcgggctgttcggttggatttagatgagttagcaaatttgcgcgtaccctgtattttgcattgggatttaaatcattttgtggtgttgcatgaagttcatcgcaatcacattatgattatgaaccctgcttcgggttggcaaaaagtgcgtatggaagaagtctcgcgctgttttacaggtgtagcgttggaactatttcctaacacgcaatttgaagagaaacacgaaacgcgtaaaattcgcgtactaccgatgttgcgcggagtggtgggattaaaaaggtctttatttcagcttctgctgctggcggcagtattacaggtgtttgctttggcaagccctttttttatgcaatgggtaatagaccatgccattgtatcggcagaccgtgatttattgctgacattggcattgggttttggcttgttgatgattgtgcagcagttagtgtcattgttgcaaacttgggcgggtatgtacttatctacctctttgaatatccaatggaaagctaacgtattcagccacttaatggatttgcctatttcttatttcgctaaacgacatttaggtgatgtggtttcgcgttttggctcggtggacagtattcaaagtacgctcacttctactttctttgtgctggtgatcaacagcattctggccgtatttacattaggattaatgtatttgtacagcccgagtttaatggcagttgtgctggttgttttgctgatttatattggtattcgttgggtggcatattatccattacgccatgcaaccgaagaaaatattgttcatgctgccaagcagagcagttatttcatggaaaccatacgaggtattcaaacggttaaattatttgataaaaatacacaacgtcatgcggcttggctgaatttatttattgacacgattaacacaggtttaacgacacaaaaactttccgcgctgttcggttttgcgaacagccttttatttggtatcgctaatattttaattgtgtattttggtgcggtttctgtattgaacggtggttttaccgttggggcgttaatggcgtttatgtcctacaaaagtcagtttgagagtaaagcaggttcattgattgaccagtttgtacaaatcaaaatgctaggattacacgcggaacgcttggcggatattgtgctagaagaaacggaaaatgaacaaaacaacgatttcagtctgcctaaaaatttagaacattttgatattcaaatagaaaatgtatcatttagctatgctgaaaatgaaccatacattttgcaaaatttcagtttaatcatcaaacaaggaacagccattgcgtttgctggacattcaggctgtgggaaatctacgctcattcaaattctgacaggcagtctgaaacctgaaagcggtcatgtgttattaggtgggcatgacattcatgcgttaccacctgcatttatccgcacatggagcgcaagtgtgatgcaaaatgatgtgttatttactggctcaatcgcagaaaacatcagtttttttgatgatacgcccaatatggaaaaaatcgcattttgcgctcaaatggcgaatattcatcatgaaattgtcgctatgcctatggcgtatgaaacattgattggcgacatggggagtgcattgagtggtgggcaaaagcagcgcatcgtactagctcgtgctttatatcgtgaaccaaaaattttgtttttagatgaagccagtagccatttggacatcaacaatgaacgtgtgattaacgataatctacgccaactcaacattaccaaaatcatggtcgcgcatcgtcaggaaactttaaatactgctgatagcgtagtttatttagacaaggtagcctga

SEQ ID NO: 49506 - DNA, 1161 bp, Neisseria meningitidis; identical to SEQ ID NO: 39225

SEQ ID NO: 49507 - DNA, 309 bp, Neisseria meningitidis; identical to SEQ ID NO: 39572

SEQ ID NO: 49508 - DNA, 282 bp, Neisseria meningitidis; identical to SEQ ID NO: 38303

SEQ ID NO: 49509 - DNA, 402 bp, Neisseria meningitidis; identical to SEQ ID NO: 39145

SEQ ID NO: 49510 - DNA, 1977 bp, Neisseria meningitidis
atgtccaaactcaaaaccatcgctctgaccgcatcaggtctgtccgtttgtccgggtttcctatacgcccaaaacacctcatcacaccaaatcggtttggcgattatgcgcttaaactcttcaatactcgacctgcccccgacaaaacaatatttccaatccggcagcctgtggagcgagctgcgccaaggcttccggatgggcgaagtcaatcccgaactggtacgccgccacgaaagcaaattcatcgcaagccacagctatttcaacagggtcatcaaccggagtagaccctatatgtaccatatcgccaacgaagtcaaaaaacgcaatatgcccgccgaagccgccctgcttcccttcatcgaaagcgcgttcgtcaccaaagccaaatcacacgtcggcgcatcgggcctgtggcagtttatgcccgctaccggcaggcattacggcttggaaaaaacaccggtttacgacggcaggcacgacgtttacgccgccaccgatgccgcactcaactacctgcaatacctctatggactgttcggcgactggccgctcgcctttgccgcctacaactggggtgaaggaaacgtcggacgcgccatcaaccgcgcccgcgcccaagggctcgaaccgacctacgaaaacctgcgtatgcccaacgaaacgcgcaactatgttcccaagctgctcgccgtgcgcaacatcattgccgccccccaatctttcggcatgaatatcagcgacatagacaataaaccctattttcaggcaatcgaaccggaccgtccgctcgacaacgaagccatcgcccggcttgccggcatcacgcaaagcgagctgctcgccctaaaccccgcattcaacgtccccgcgttcatccccaaaagcaaacgcaaactgctgcttcctgtcgcatccgtccaaaccttccaaagcaactacctcaacgccgcacccgacagcctgttttcatgggaagtctatacgcctgccgccaaaaccagcctgtccgacatctcgacggcaaccggcatgagcattgccgacatcaaacgcctcaacaacctgaacggcaaccttgtcaacgcaggacgcagcatccttgtcgccaagaacggcaaaacccttcagacggcatcggaatccgtcgtttccatcgacatcgacaatacgcccgacacctaccgttccaatatgccggcaggcacggtgaacgtcggcattgcccgaatccgacccgccgccgcacagacagcggacattaccgtcgcacctttgccgcagaaaaccgtccgtacggaacccgatccccttgtccgtattgccgaacctgcccttgcgacagccgcagcgcaacctcaaaccgaaaaacagaccgccatgccgtctgaaacccaaaccgcaacactcgcgcagatcatcccccaaaacgacatgcaggcggcagacgaactcatgcagcttgttgcccgaaacaacctgcgccgacaggctgaagaaaccatctccgccgtcatcggcacgcctgacacagttgccgaacacaacatttcctcatctccgcaacataccgttgccgccgacggcaaacgccgggcacgtttggaaacgcgcgtagccaaagctgccgacggcgaagccgaaatctccccgctccatgccagcatccaccgcgttgtagaaggcgacaccctgttcaacattgccaaacgctacaacgtcagcgtagccgacctgattgtcgccaacaacatcaaaggcaacaccatccaaaaaggacaggtactccgcctggcgcaggcagcccctgcccaaacccgtattgaaaaagtatcctacaccgcgcgcaaaggcgacaccttcaaaagtatcgccgcgcgcttcaatatccatatcgacgacatccgccggctcaatcccaacctgaacaccatcaatccgggacagagggtcaaactgattggaagctga

SEQ ID NO: 49511 - DNA, 618 bp, Neisseria meningitidis
atgccctatacggaagatatgcgcccgggcgataccgctaatccttatggcgcatccaaagcgatggtggaacggatgttaaccgacatccaaaaggccgatccgcgttggagcgtgattttgttgcgctatttcaacccgattggggcgcacgaaagtggtttgattggcgagcagccaaacggcatcccgaataatttgttgccttatatctgccaagtggcggcaggcaaactgccgcaattggcggtatttggcgatgactaccctacccccgacggcacggggatgcgtgactatattcatgtgatggatttggcagaagggcatatcgcggcaatgaaggcaaaaagtaatgtagcaggcacgcatttgctgaacttaggctccggccgcgcttcttcggtgttggaaatcatccgtgcctttgaagccgcatccggcttaaatattccctatcaaatccaaccccgacgcgccggagacttggcgtgttcctttgccgacccgtcccataccaaacaagagacaggttgggaaaccaaacgcagccttgcgcaaatgatggaggattcgtggcgttgggtcagccgcaaccccaacggatatggggattaa

SEQ ID NO: 49512 - DNA, 1569 bp, Neisseria meningitidis; identical to SEQ ID NO: 37146

SEQ ID NO: 49513 - DNA, 420 bp, Neisseria meningitidis; identical to SEQ ID NO: 38709

SEQ ID NO: 49514 - DNA, 951 bp, Neisseria meningitidis; identical to SEQ ID NO: 45991

SEQ ID NO: 49515 - DNA, 2793 bp, Neisseria meningitidis
atgtccaacagacctacactcctcctcgttgacggctcttcctatctctaccgcgcgtatcacgcgatggggcaaaacctgaccgcacccgacggtgcaccgacgggcgcgctgtatggcgtattgaatatgttgcgccgtttgcggtcggaatatccgcacgattattgcgcggtggtttttgatgcgaaaggcaaaaatttccgccatcaaatgtttgaagaatacaaggcgacgcgcccgccgatgcccgacgatttgcgcccgcaggcggaagcactgccggatttagtgcgcctgacaggctggccggtattggtgattgggcaggtggaggcggacgatgtgatcggcacgctggcgaaacagggggcggaacatggtttgcgagtcattgtttcgaccggcgataaggacatggcgcagttggtggatgagcgcgttacgctggtgaacacgatgagcagcgaaacgctggacattgaaggcgtgaaggcaaaattcggcgtgcgccccgaccaaatccgcgattatctcgcgctgatgggcgacaaggtggacaacgtgccgggcgtggaaaaatgcggcccgaaaacggcggtgaaatggctggaagcctacggttcgctggctggtgtgatggaacacgcttcggaaatcaagggcaaagtgggcgaaaacctgcaagccgcgctgccccaactgccgctgtcatatgatttggtcacgattaaaaccgatgtggacttgcacgccgagctttcagacggcatcgaaagcctgcgccgtactacgccgaaatgggcgcagctggttgtcgatttcaaacgctggggcttccgcacctggctgaaagaagcggaatcaaacatgaataccggctcgaccgatgatttgttcggcagcgacagcatcggcgagcaggcggctttgaatgcggaaatgccgtttgaaaaacaagccgaaaaagccaccgcccccgaaaaactggattatcaagccgttaccaccgaagcgcagtttgccgctttgttggacaaactgtcgcgggcggacacaatcggcatcgatacggaaaccacgtcattagacgcgatgaacgcctcgctggtcggcatcagcatcgctttccaagcaggcgaagcggtttacatccccgtaggacacagcctgaccgccgcgcctgaacagcttgatttacaagacgtattaggccgtctgaaaccgcatttgggaaaccccgccctaaaaaaaatcgggcaaaacctcaaatacgaccaacacgttttcgccaactacggcatcgccctgaacggcattgccggcgacgccatgctcgcttcctacatcatcgagagccatctcggacacggcttggacgaattgtccgaacgctggctcggcttggaaaccattacctacgaatcgctgtgcggcaaaggcgcgaagcaaatcggttttgccgatgtcgccatcgggcaggcgaccgaatacgccgcccaagacgccgatttcgccctgcgcctcgaagcgcacctgcgcgcgcaaatggacgaaaaacagcttgaaatgtatgaaaaaatggagctgcccgtcgcgcaggtattgtttgaaatggaacgcaacggcgtgcaaatcgaccgcgccgaactcgcccgccaaagcgcggaactcggcgccgagctgatgaagctcgaacaacaagcctatgccgccgcagaccagccgttcaacctcaattcgcccaaacagctgcaagaaatcctgttcgacaaaatgggcatccccaccaaaggcctgaaaaaaaccgccaaaggcggcatttccaccaacgaagccgtgctcgaacagctcgcgcccgactaccccctgcctaaaatcatcctgcaaaaccgcagcctggcgaagctcaaatccacctacaccgacaaactacccgaaatgatttcccccaaggacggccgcgtgcataccacctacgcccaagccgtcgccattaccggccgcctcgccagcaacaaccccaacctgcaaaacatccccatccgcaccgccgaaggccgccgcgtgcgccgcgcctttaccgcaccgcaaggcagcgtcatcgtttccgccgactattcccaaatcgagctgcgcattatggcgcacctctccggcgacaaaaccctgattgccgcgttccaaaacggcgaagacgtacaccgccgcaccgccgccgaagtgttcggcactgcgcccgaaaacgtctcgtccgagcaacgccgctacgccaaaaccatcaacttcggcttaatttacggtatggggcaatacggtttggcaaaatcattgggcatcgacaacctttccgccaaaaactttatcgaccgctacttcgcccgctaccccggcgtcgccgaatacatgcagcgcaccaaagaacaagccgccgcccaaggctacgtcgaaaccctgttcggcagaaggctctatttgcccgacatccgcaacaaaaacgccaacgcccgcgcaggagccgagcgcgccgccatcaatgcccccatgcaaggcaccgcgtccgacctcatcaaacgcgccatgatagacgtgcgaaactgtctttcagacggcatcggcagcaaactggtcatgcaggtgcatgacgaactggtgctggaagtcgttgaaaccgaactggattttgtcaaagaaaaactgccgcagattatggcgaaagtggacggcggattattggatgtaccgctggtggctgaggttggcgtaggggagaattgggaagaggcacattga

SEQ ID NO: 49516 - DNA, 864 bp, Neisseria meningitidis
atgaacaaattttcccaatccggaaaaggtctgtccggttttttcttcggtttgatactggcgacggtcattattgccggtattttgttttatctgaatcaaacaggtcaaaatgcgttcaaaatcccggctctgtcgaagcagcctgcagaaacggaaatcctgaaaccgaaaaaccagcctaaggaagacatccaacctgaaccggtcgatcaaaacgccttgtccgaaccggatgctgcgaaagaggcagagcagtcgaatgcggaaaaagctgccgacaagcagcccgttgccgacaaagccgacgaggttgaggaaaaggcgggcgagccggagcgggaaaagtcggacgggcaggcagtgcgtaagaaagtgctgacggaagagcgtgaacaaaccgtcagagaaaaagcgcagaagaaagatgccgaaacggttaaaaaacaagcggtaaaaccgtctaaagaaacagagaaaaaagctccaaaagaagagaaaaaggcggaaaaggaaaaagttgcacccaaaccgaccccggaacaaatcctcaacagcggcagcatcgaaaaagcgcgcagtgccgccgctaaagaagtgcagaaaatgaaaacgtccgacaaggcggaagcaacgcattatctgcaaatgggcgcgtatgccgaccgccggagcgcggaaggacagcgtgccaaactggcaatcttgggcatatattccaaagtggtcggttatcaggcgggacataaaacgctttaccgcgtgcaaagcggcaatatgtctgccgatgcggtgaaaaaaatgcaggacgagttgaaaaaacatgaagtcgccagcctgatccgttctatcgaaagcaaataa

SEQ ID NO: 49517 - DNA, 429 bp, Neisseria meningitidis; identical to SEQ ID NO: 38751

SEQ ID NO: 49518 - DNA, 1884 bp, Neisseria meningitidis
ttggccatttccgaaaacggtcaaaccaaagtgatcgaaaacgcagaaggcgcacgcaccacgccgtccgttatcgcttatttggacggcggcgaaatcctcgtcggtgcgcctgccaaacgccaagccgtaaccaacgctaaaaacaccatttacgccgccaaacgcctgatcggccacaaatttgaagacaaagaagtccaacgcgacatcgaatctatgcctttcgaaatcatcaaagccaacaacggcgacgcatgggtaaaagcacaaggcaaagagctgtctcctcctcaaatttccgcagaagtcctgcgtaaaatgaaagaagccgccgaagcttacttgggcgaaaaagtaaccgaagccgtgattaccgtccctgcctacttcaacgacagccaacgtcaagctaccaaagacgcaggccgtatcgccggtttggacgtgaaacgcatcatcaacgagccgaccgcagccgctttggcattcggtatggacaaaggcgacaacaaagaccgcaaagtagccgtatatgacttgggcggcggtactttcgatatttccatcatcgaaatcgccaacctcgacggcgacaaacaatttgaagtattggctaccaacggcgatactttcttgggcggtgaagacttcgaccaacgcctcatcgaccacatcatcgccgagttcaaaaaagaacaaggcattgatttgaaacaagacgtcatggctctgcaacgtctgaaagaagctgccgaaaaagccaaaatcgaattgtccagcggccagcaaaccgaaatcaacctgccgtacatcaccatggacgcaaccggcccgaaacacttggcgatgaaaattacccgcgccaaattcgaaagcctggttgaagacctgattgcccgctctatcgagccttgccgcaccgcattgaaagatgccggtctgagcactggcgacatcgacgacgtgattttggtcggtggtcaaagccgtatgccgaaagtacaagaagccgttaaagacttcttcggcaaagagccgcgcaaagacgtgaaccctgacgaagctgtcgccgtaggcgcagcgattcaaggcgaagtgttaagcggcggccgcagcgacgtattgctgctggacgtaacccctctgtccttgggtatcgaaaccatgggcggcgtgatgaccaagctgattcaaaagaacaccaccatcccgaccaaagcgtcgcaagtgttctctaccgccgaagacaaccaaagcgcagtaaccatccacgtactgcaaggcgaacgcgaacgcgcttctgccaacaaatctttgggtcagttcaacttgggcgacatcgcacccgcaccgcgcggtatgccgcaaattgaagttactttcgacatcgacgccaacggtatcctgcacgtttccgccaaagacaaaggcactggcaaagcagccaacatcaccatccaaggttcttcaggtttgagcgaagaagaaatcgaacgcatggtgaaagatgccgaagccaatgccgaggaagataaaaaactgactgaattggtcgcttcccgcaaccaagccgaagccctgattcactctgtgaaaaaatctttggccgactacggcgacaaactcgacgcagccgagaaagaaaaaatcgaagccgcgctgaaagaagccgaagaagcagttaaaggcgacgacaaagccgctatcgatgccaaaaccgaggcgctgggcgcagccagccaaaaactgggggaaatggtttacgctcaagcacaagctgaagcccaagcaggcgaaagcgaacaagccaatgcttctgcaaagaaagacgatgatgtcgtagatgccgactttgaagaagtaaaagacgacaaaaaataa

SEQ ID NO: 49519 - DNA, 885 bp, Neisseria meningitidis
atgagcagcggaaatattcacatccacagcatgaccggatttgccaacgcggcggcagagtgcggcagcaaacgcatcaatctcgacctgcgtgcggtcaaccaccgttttctagatattcaaatcaggatgcccgacgatttgcgctatttggaaagcggtatccgcgagaaaatttcatcccatatcgcacgcggcaaagtcgaatgcaaaatccaaattcaagatgcggaaaacggcagtcagtccttggaactgaatcgcgacttggtcggacagcttgccgaaatcaaccaaaccctccgtaaacatcatgacctggcaaaattaggggttgccgacatcctgcgtttccccggcgtattggcaagccaaagggaaaatacggaagaattggcaaaaagcattaccgaactgaccgaaaaagcgttaaaagactttactgccgcacgcaagcgggaaggtaagaaattaggcgagcacctgctgcaacgccttgaggctatggaagaaatcatagatgcattaagcgaactctttcctaccctgttggaaacacataaagaaaaaatccgcgcccgcctcgtcgaagcggtcggcagcatcgacaacgaccgcctgcaacaggaatttgccctctttatccaaaaatccgacatcgacgaagagttcagccgcctacgcacccacattgccgaagtgcgccgtatcgttaccgaacacaaaggcagcagcggcaaacggctggacttcctgatgcaggaattaaaccgcgaagccaacactttgggcagcaaatccatcgctaccgaatgcacccaagcctcggtcgagctgaaagtcctgatcgaacagatgcgcgaacaggtgcagaatatcgaataa

SEQ ID NO: 49520 - DNA, 321 bp, Neisseria meningitidis; identical to SEQ ID NO: 38269

SEQ ID NO: 49521 - DNA, 894 bp, Neisseria meningitidis; identical to SEQ ID NO: 38969

SEQ ID NO: 49522 - DNA, 1518 bp, Neisseria meningitidis
atgttgtatttcagatacggttttttggttgtttggtgtgcggcaggtgtttctgccgcctatggggcggatgcgcctgcaattttggatgacaaagctttgtcgcaggtgtggcggtcggtgtcggataaatgggcggaatcggattggaaagttgaaaatgatgccccgcgcgtggttgacggggattttttgttggcgcacccgaaaatgttggaacatagtttgcgcgacgcgctcaacggcaatcaggcggatttaatcgcttcgttggcggatttgtatgccaagctgccggattatgacgcggttttgtacggcagggcgcgggctttgctggcgaaattggcgggaaggccggcggaggcggtggcgcggtatcgggaactgcacggggaaaatgcggcagacgagcggattttgctggatttggcggcggcggagtttgacgatttccggctgaagtcggcagaaaggcattttgccgaggcggaaaaattggatttgccggcgccggttttggaaaatgtggggcgttttcggaaaaaagcggaggggctgacgggctggcgtttttcgggcggtatcagcccggcggtcaatagaaatgccaataatgccgcgccgcagtattgctggcaaaacggaggccggcagatatgcagtgtcagccgggcggagcgggcggcagggttgaattatgaaatcgaggcggaaaagctgacggcgttggcggacaatcattatttgttgttccgttccaatatcggcggcacgagctattatttcagtaaaaaatcagcttatgatgacgggttcggcagggcgtatttgggttggcagtataaaaatgcacggcagacggcggggattttgccgttttatcaggtgcagttgtcgggcagcgacggctttgatgcgaaaacaaaacgggtaaacaaccgccgcctgccgccgtatatgctggcgcacggagtcggcgtgcagctgtcccatacttaccgaccaaacccgggatggcaattttcggtcgcgctggaacattaccgccaacgctaccgcgaacaggatagggcggaatacaataacggcaggcaggacgggttttatgtttcgtcggcaaaacgtttgggcgaatcggcaactgtgttcggcggctggcagtttgtgcggtttgtgccgaaacgcgaaacggtgggcggcgcggtcaataatgccgcctaccggcgcaacggtgtttatgccggttgggcgcaggagtggcggcagttgggcggtttgaatagtcgggtttccgcgtcttatgcccgccgcaactataagggcgttgcggctttctcgacagaggcgcaacgcaaccgcgaatggaatgtctcgctggctttgagccacgacaagttgtcgtacaaaggtatcgtgcccgcgttgaattatcgtttcggcaggacggaaagtaatgtgccgtatgcgaaacgccgcaacagcgaggtgtttgtgtcggcggattggcggttttga

SEQ ID NO: 49523 - DNA, 1041 bp, Neisseria meningitidis; identical to SEQ ID NO: 38851

SEQ ID NO: 49524 - DNA, 480 bp, Neisseria meningitidis
atgagtaaacacacttatccgataacacctgccgtgcgcgttttgcgtgaaaacggcatcgaatttgaaccttttacctatgcctatgaggaacacggcggcacggcgcagtttgcccgactattcggcaaagacgaacacttggtcattaaaaccattgttttgcaagatgaaaacggtaaggggctgattgtcttgatgcacggcgacaagcagatttcaacccgcaatctggcgcggcatttgggtgcgaaacacatcgaacccgccacgcccgtacaggcaaacaagtggacgggctatctggtcggcggcacaacgccgttcggcatccggacaaaattggatatttacgtcgaacagtcggtgatggatttggaaaccatctatatcaacggcggaaaacgcgggttcattatcggcatccgtcccagagatttaaatattttgaacccgaaaacaatacaggcggcggtttga

SEQ ID NO: 49525 - DNA, 2625 bp, Neisseria meningitidis; identical to SEQ ID NO: 45426

SEQ ID NO: 49526 - DNA, 1029 bp, Neisseria meningitidis
atgaaatacaaagccctgtccttactgccgcttgtcgctgcccttgccgcctgtgcggggggggggggggtagccgaaccgcacgtccccgtgtccatccccaccgccacgccgctgaccggtgaggtaaagttaacagacgacaatagcaaaatcgaaaacatcaacaccgccaacactggaaacacatccggcatttccattcagcagcgggaatataaagtaaacaattacggcgtcgaatcaacagcaaaagcattcatcttcaaaacacctggcggcgcgcaatacaccctttcatcctacgccgaccccatcgtccccagctactcctcccccgatttcaaaattcccgaccgccacgcagggcagcggcttgccgacggcagccgcatctttatctgctgcagcgactccggggcaaccaatcaagcggaaattaccaaacaagattatatgaaattcggggcgtggataggtcccaacggcgaaatcgacctcttcgccggcggcttccccgtcggcaaaacaccggcatcaagcagttattacggcagcagcacgcccgaaacccaaggcaagggcaaaatcacttatcaggtttggggcatccgcgtcagaaacgggcaatttgttacttcctcttatacgccgccgaaaaacagtggttattattcgtccacacctaccaacacccccgtcctttcctttatcaccgccaatttcaacacccataaactgtcaggcgaaatcatcggcaacagcgattacgggccaaatgtgaaaattgaaaacgcaacgattgacggactatccttttccggcgatgccacgtccggcggcaaaaacggcaaattggaaggcaagttttttggaaaattcaacggctaccgggacactgaaaccagcataggcggcaaaatcacctttgacggcgaccgctccctcgataccgtattcggcggtgtgagttataaaaaagaacttgaaaacaacactgatacaagtaccacccatctcacaaaataa

SEQ ID NO: 49527 - DNA, 1362 bp, Neisseria meningitidis
atgattattgatgtaaaagtacctatgctgtctgaaagcgtatctgaaggcacgctcttggaatggaagaaaaaagttggcgaagcagttgcccgtgacgaaatcctgatcgatatcgaaacggacaaagtggttttggaagtaccttctccacaagccggcgtattggttgaaatcgtagcgcaagacggtgaaaccgttgttgccgaccaagttttggcacgtatcgataccgctgctactgccgctgctgaagcacctgccgctgctactgccgctgctgaagcacctgccgctgctactgccgctgctgaagcacctgccgctgctactgccgctgctgaagcacctgccgctgctactgccgctgctgaagcacctgccgctgctactgccgctgctgaagcacctgccgctgctactgccgctgctgaagcacctgccgccgctcctgccgaagctgccccggccgccgctcctgctgctgcacaaaacaacgccgctatgcctgccgccgccaaactggctgcagagagcggtgttgacgtgaacgcattgcaaggttccggccgtgacggtcgcgtattgaaagaagacgtacaaaatgccgcagccaaacctgccgcagccgctgctcctgccgttgcacttcctgccggcgcacgtcctgaagaacgcgtaccgatgagccgcctgcgtgcccgtgttgcagaacgcctcttggcttctcaacaagaaaacgccattctgactacattcaacgaagtcaacatgaaaccaatcatggacttgcgtgcgaagtacaaagaaaaattcgagaaagaacacggcgtgaaactgggctttatgtccttcttcgttaaagccgctgttgcagccctgaaaaaatacccggttgtgaatgcttctgttgacggcaaagacattgtgtaccacggctacttcgacatcggtatcgcgattggcagcccacgcggtttggttgtgccaatcctgcgcgatgccgaccaaatgagcattgccgacatcgaacaagcaattgttgattacgcgaaaaaagccaaagacggcaaaatcgctatcgaagatctgaccggcggtacattcagtattaccaacggcggtactttcggttctatgatgtccaccccgatcatcaatccgcctcaatctgcgattttgggtatgcacgccactaaagagcgcgctgtggttgaaaacggccaagttgttgtccgtccaatgatgtatctggctctgtcttacgaccaccgtatcattgacggccgcgaagctgtattgaccttggtagccattaaagacgcgttggaagacccagcccgcctgttgttggatctgtaa

SEQ ID NO: 49528 - DNA, 429 bp, Neisseria meningitidis; identical to SEQ ID NO: 38929

SEQ ID NO: 49529 - DNA, 1053 bp, Neisseria meningitidis; identical to SEQ ID NO: 38435

SEQ ID NO: 49530 - DNA, 1149 bp, Neisseria meningitidis; identical to SEQ ID NO: 39038

SEQ ID NO: 49531 - DNA, 501 bp, Neisseria meningitidis
atgacccgtttgacccgcgcgtttgccgcggctctgatcggtttgtgctgcaccgcaggcgcgcacgccgacaccttccaaaaaatcggctttatcaacaccgagcgcatctacctcgaatccaagcaggcgcgcaagattcaaaaaacgctggacagcgaattttccgcccgtcaggacgaattgcaaaaactgcaacgcgaaggtctggatttggaaaggcagcttgccgaaggcaaactcagaaacgcaaaaaaggcgcaagccgaagaaaaatggcgcgggctggtcgcagcgttccgcaaaaaacaggcgcagtttgaagaagactacaacctccgccgcaacgaagagtttgcctccctccagcaaaacgccaaccgcgtcatcgtcaaaatcgccaaacaggaaggttacgatgtcattttgcagaacgtgatttacgtcaacacccaatacgacgttactgacagcgtcattaaagaaatgaacgcccgctga

SEQ ID NO: 49532 - DNA, 510 bp, Neisseria meningitidis; identical to SEQ ID NO: 36289

SEQ ID NO: 49533 - DNA, 1218 bp, Neisseria meningitidis
atggcgttaatcgtacacaaatacggcggcacatccgtaggctcgcccgaacgcattaaaaacgtggccaaacgtgtcgccaaagcccgcgccgaaggacacgacatcgtcgtcgtcgtatccgccatgagcggtgaaaccaaccgcctggtcgcgttggcgcacgaaatgcaggagcatcccgatccgcgcgaattggacgtggttttgtccaccggcgaacaagtaaccatcggccttttggcgatggcattgaaagacatcggcgtggatgccaaaagctacacaggctggcaggtcgccctcaaaaccgataccgcccacaccaaagcccgcatcgaaagcattgatgacgaaaaaatgcgtgccgaccttaccgccggcaaagtcgtcatcgttgccggcttccaaggcatcagcagtgaaggcgatatttccacgctcggacgcggcggttccgacacttccgccgttgcgcttgccgcagccctcaaagcggacgaatgccaaatctataccgacgtggacggcgtgtacaccaccgatccgcgcgtcgtacccgaagcgcgccgcatggatacggttacatttgaagaaatgatcgaattggcaagcctcggctcgaaagtcttgcaaatccgttcagtagaattcgccggaaagtacaaagtgcgcctgcgcgtactgagcagcctgcaagacggcggcaacggcaccttaattacctttgaagaggacgacaacatggaaagagctgccgtaaccggtatcgcattcgacaaaaaccaagcccgcatcaacgtgcgcggcgtacccgacaaacccggtgtcgcctatcagattttgggcgcggtcgccgatgccaacatcgaagtcgatatgattatccaaaatgtcggcagcgaaggcacaaccgatttttcctttaccgtaccgcgcggcgattacaagcagactttggaaatcctgtcggaacgccaagacagtatcggcgcggcttctattgatggcgacgacaccgtgtgcaaagtctccgcagtcggtttgggtatgcgttcgcacgtcggtgtagccgccaaaatcttccgcacgctcgccgaagagggtatcaacatccaaatgatttccacctccgaaatcaaagtttccgtattgattgatgaaaaatacatggaactggcaaccagggtattgcataaagcctttaatttgggctga

SEQ ID NO: 49534 - DNA, 831 bp, Neisseria meningitidis
atggcacattacgcaatcggcgacatacaaggctgtttcgacgaactgacctcactgctcggcaaaatcggcttcaaccacggcacggacaccctctggctgacgggtgatatcgtcaaccgcggcccgaaatccctcgaaacgctgcaattctgcatccggcacgaaaacagcgtgcaaatcgtcctcggcaaccacgacctgcacctgctcgctgtcggctgcggcgaaggcgcgcccaaacgcagcgacacaatcgaacccatactcaaacaccccgacggaaaaaaaatgctcgactggctgcgtgcgcaaccgctgttgatacgcgagggcagccgcgtgatggtacacgccggcatcctgccgcaatggcgcatcgccaaagccgaatcgctcgctagagaagccgaagccgaactgcgcggcaaaaaatacgtcaaattcttctccaaaatgtacggcaacaaaccggccgcgtgggacgaaggtttggaaggctatgcccgcctgcgcttcatcgtcaacgccttcacgcggatgcgcgccctgacctttaaaaacgaactggatttcgactacaaatccacagtgaaaaaaatgccgccttacctgcgcccgtggttcaaagcccccgaccggcaaaacctcgaccgcaccatcatcttcggacactggtcctcgctgggctacacgaatgccgacaacgtcatctcgctggacaccggcgcgctgtggggcggacagctgaccgccgtcaacctcgaaacggaagaaattacccaagtccaagccgccggcggcatagactggaaaagcttcgcaaaataa

SEQ ID NO: 49535 - DNA, 474 bp, Neisseria meningitidis
atgaaaggcgaccgtctggttatccgcgagctaaacaaaaacttaggcttgctgctggtaaccatcaaccaatatttccttcacgcccgtattttgaaaaactggggctttgaagaactgggcgaacatttcttcaaacagtccatcgttgaaatgaaagctgccgacgatttgatcgagcgcattctgttcctcgaaggtctgccgaacctgcaagaactgggcaagcttctgattggcgagtccaccgaagaaatcatcgcctgcgatttgaccaaagaacaggaaaaacacgaagccctgcttgccgccatcgccacagcagaagcgcaacaggattacgtcagccgtgatttgttggaaaaacaaaaagacaccaacgaagaacacatcgactggcttgaaacccagcaggaactgatcggcaaaattggtttgccgaactacctgcaaacagcggcgcaagaggactaa

SEQ ID NO: 49536 - DNA, 327 bp, Neisseria meningitidis; identical to SEQ ID NO: 39180

SEQ ID NO: 49537 - DNA, 399 bp, Neisseria meningitidis
atgtccgattgctgcaaccgtatccaaccggttttgctttctgttttgcgtatcgtaaccgcttacctgtttttgttgcacggtacgtcgaaaatcttcgccttccccattgaaatgggcagcggttcgcccggcgggctgttgctgcttgccggtattttagaaattgtcggcggcattttgctggtgttgggcctgtttgcgcgccctgccgcgtttgttttgtccggccagatggcggttgcctattttatggcgcatgcttccggaaatgctttgttcccgattgccaacggcggcgagtccgcagtgctgttctgcttcgtattcctctatatcgcggcggcgggcggcggagcatggtcgctggacaggctgtttttcaagcgtaaagcctga

SEQ ID NO: 49538 - DNA, 1104 bp, Neisseria meningitidis; identical to SEQ ID NO: 44993

SEQ ID NO: 49539 - DNA, 1272 bp, Neisseria meningitidis; identical to SEQ ID NO: 39580

SEQ ID NO: 49540 - DNA, 606 bp, Neisseria meningitidis; identical to SEQ ID NO: 39821

SEQ ID NO: 49541 - DNA, 1128 bp, Neisseria meningitidis
atgagcaactggaaacccgatattccctataacgatttaccacccctgccgccaaaacaggatattgaaagcaaaaccatcctgaaacgttgtatagccgcccgtgcatcccttgcccgtttaaagcaggcggcagaattgataccgaatcaagccatgctgattaacacccttcctgttatggaagcccgtgcaagttcggaaattgaaaacatcgtaaccaccacggacaagctgtttcaatccctgcaaatggatacggaacggcaagaccctgccacgaaagaagccctgcaataccgcaccgccctgtttgcaggctatgaatcactgacgagccgccctttatgcacacaaaccgccatcatggtctgcaacgccatcaagcacccctacgaaatggccatccgcaaaacaggcggcacagccctaaaaggaggcaacagcggaaatgttgtctataccccgcccgaaggagaagaaaccatacgcggcaagctggcaaattgggagcggtttattcacgaaagcggcgatttagacccgcttatcatcatggcggcggcacattaccaatttgaagccatccatccgtttacggacggcaacgggcggacggggcgcatattgaacagcctgctattgattgaaaaagggcttttggatttgcctattttgtatttgagccgctacatcatcgaaaacagggcggactattaccgcctgcttttaggcgtaaccgaacggcaggactgggaaagctggataatctacatcttagacggcgtagctgacaccgccgattggacggtatcgaaaatagatgcgatacgccgcctgttcgagcagacacggcaacacatacggacacacgcacaaggaatctacacgcacgaactggtaaatcttctgtttgagcagccatatacacgcattgccaacctagaagcggcagggatagccaaacggcagacggcctctaagtacctgaaagagctttcagacataggtgtgctgcaagaaatcgccatcggcagggacaaactattcattcatccgcgcctaatggaactattgcggggagagggcaacagctttacctcattccaatccctcgttaaagcatag

SEQ ID NO: 49542 - DNA, 1287 bp, Neisseria meningitidis; identical to SEQ ID NO: 39759

SEQ ID NO: 49543 - DNA, 501 bp, Neisseria meningitidis; identical to SEQ ID NO: 37418

SEQ ID NO: 49544 - DNA, 927 bp, Neisseria meningitidis; identical to SEQ ID NO: 39774

SEQ ID NO: 49545 - DNA, 480 bp, Neisseria meningitidis; identical to SEQ ID NO: 38692

SEQ ID NO: 49546 - DNA, 918 bp, Neisseria meningitidis; identical to SEQ ID NO: 47048

SEQ ID NO: 49547 - DNA, 798 bp, Neisseria meningitidis
atgctgaaacaacgggtgataactgctatgtggctgctgccgctgatgctgggcatgctgttttacgcgccgcaatggttgtgggctgcattttgcggactgattgccctgattgccttgtgggaatatgcccgtatgagcggcttgtgcaaaatcaaaaccaaccattacctcgccgcaaccttggttttcggcgtggttgcctatgcgggcggctggatgctgcctaatttggtttggtatgttgttttggcattttggcttgccatcatgcctttatggttgagattcaaatggaggctcaacggcggttggcaggtttatgccgtcggctggcttttggttatgccgttttggttcgcgctcgtatccctgcgcccgcatcccgatgatgccctgccgctgctcgccgtgatgggtctggtctgggttgccgacgtttgcgcgtatttcagcggcaaggcgttcggcaaacacaaaatcgcgccggcaatcagccccggaaaaagctgggaaggcgcaatcggcggcgcggtttgcgtggccgtgtacatgaccgccgtacgaagtgccggctggctggcattcgatacaggctggttcgataccgtgttaatcggtttggtgttgaccgttgtcagcgtatgcggcgaccttttggaaagctggctcaagcgcgcggcaggcatcaaagacagcagcaacctgctgcccggacacggcggcgtgttcgaccgtaccgacagcctgattgccgttatcagcgtctatgcggcgatgatgtcggttttaaattga

SEQ ID NO: 49548 - DNA, 219 bp, Neisseria meningitidis; identical to SEQ ID NO: 46065

SEQ ID NO: 49549 - DNA, 612 bp, Neisseria meningitidis
atgattacgacttataaaaccattacttcctcgacgcaggctgagtttaaagataaaggcagccgttttattgcatttgcctatccgattcggacattggctgatgtgaaaaaatacctcgatccgttaaaggaagagcatcataaagcacgacactggtgctatgcctatcgtttgggtgtggatggcatgcaatttcgtgccaacgatgatggagagccatcaggaagtgctggacgaccaattttgggacagattgattcggtgggtattaccgacgttttggttgtggtcgtccgctatttcggtggtactttgttaggtgttccaggtctgatacatgcgtacaaagaggcgacggctcaagcgttggcagttgcagaagtagttgaaaagaatattgaaaaaactgtttggctgaaatgtgaatatccgtttttgaatgaagcgatacgcattgccaaacaatatcaggcggatatattggagcgggatttgcagttggattgccgattgacggtcagtttgtcgttggtaaattatgaggcctgtgttgcggcttggaagaatactcggcagattgaagtaaatacggaaaagccttttgaatga

SEQ ID NO: 49550 - DNA, 1446 bp, Neisseria meningitidis; identical to SEQ ID NO: 38572

SEQ ID NO: 49551 - DNA, 474 bp, Neisseria meningitidis; identical to SEQ ID NO: 44352

SEQ ID NO: 49552 - DNA, 471 bp, Neisseria meningitidis; identical to SEQ ID NO: 39685

SEQ ID NO: 49553 - DNA, 282 bp, Neisseria meningitidis; identical to SEQ ID NO: 38306

SEQ ID NO: 49554 - DNA, 750 bp, Neisseria meningitidis; identical to SEQ ID NO: 38689

SEQ ID NO: 49555 - DNA, 684 bp, Neisseria meningitidis; identical to SEQ ID NO: 38600

SEQ ID NO: 49556 - DNA, 1092 bp, Neisseria meningitidis; identical to SEQ ID NO: 46293

SEQ ID NO: 49557 - DNA, 2025 bp, Neisseria meningitidis
atgaacgatatgactttatatttgataattgcccttgttccgttggcaggctcgctgattgcgggtttgttcggcaacaaaatcggccgcgccggcgcgcatacggttacgatactcggcgtggcggtgtccgccgtgctgtcggcttatgtgttgtggggctttattgacggcagccgcgccaagtttgacgaaaacgtctatacctggctgacaatgggcggcttggatttttccgtcggcttcttggtcgatacgatgacggcgatgatgatggtcgtggtaacgggcgtgtcgttgatggtgcatatctacaccatcggctatatgcacgatgaaaaagtcggttaccaacgcttcttcagctatatttctttgtttactttcagcatgttgatgctgattatgagcaacaacttcatccagctcttcttcggttgggaagcggtgggcttggtgtcgtatctcttgatcggtttctatttcaaacgtccgagcgcgacatttgccaacctgaaagcctttttgatcaaccgtgtcggcgacttcggctttttgctcggtatcggcttggtgcttgcctatttcggcggcagcctgcgctatcaagatgtattcgcttatctgcctaatgttcagacggccaccattcaattgttccccagtgtggaatggtctttgattactgtaacctgtttgctcctgtttgtcggtgcgatgggtaaatcggcacaattcccgctgcacgtctggctgcctgattcgatggaaggcccgaccccgatttctgcattgattcacgccgcaaccatggttaccgccggtctgtttatggtatcgcgtatgtcgccgatttatgagatgagtagcactgcgctgtctgtcatcatggtgattggtgcgattaccgccctgtttatgggtttcttgggcgtgattcaaaacgatatcaagcgcgtggttgcgtattccaccctgtcgcaactgggctatatgaccgtggctttgggcgcgtccgcctattccgtggcgatgttccacgtcatgacccacgccttctttaaagccttgctgttcttggcggcaggtagcgcgattatcggtatgcaccacgaccaagatatgcgccatatgggcaacctgaaaaaatatatgccggttacttggctgactatgctgatcggcaatttgtcgctgatcggtacgccgttcttctccggcttctattctaaagattcgattatcgaagcagcgaaatacagcaccctgccgggcagcggctttgcttattttgccgtccttgccagcgtgttcgttaccgcgttttacgcgttccgccaatactttatggtgttccacggcgaagagaaatggcgcagcctgcctgaacatcatgacgatcatcatggtgaagaacatcacggcttgggcaaaaacgacaatccgcacgaaagcccgctggttgttaccctgccgctgattttgcttgccatcccgtccgtcatcatcggctatgttgccatcgagcctatgctttacggcgatttctttaaagacgtgattttcgtcaataccgacgcgcatccgaccatgcacatcatgaaggaagagttccacggcgcattggcaatggtgtcgcacagcctgcattcgcctgtactctaccttgctattgcaggtgtcttaagcgcatggcttttgtacgtcaaactgccgcacctgcctgcgaaaattgcacaggcgttccgtccgatttacgttttgtttgaaagcaaatactacctcgacgccctgtatttcaacgttttcgccaaaggcacacgcgcattgggtaccttcttctggaaagtcggcgataccgccattatcgacaacggcatcgtcaacggctctgccaaactggtcggcgtaattgccgcgcaagtgcgtaaagcccaaaccggctttatctacacctacgccgccgctatggtattcggcgtattggtactgctcggcatgaccttctggggattgttcagataa

SEQ ID NO: 49558 - DNA, 540 bp, Neisseria meningitidis; identical to SEQ ID NO: 44661

SEQ ID NO: 49559 - DNA, 1329 bp, Neisseria meningitidis; identical to SEQ ID NO: 38949

SEQ ID NO: 49560 - DNA, 1449 bp, Neisseria meningitidis
atgaaaggcgatattggtgtaatcggtttggcggttatggggcaaaacctgattttgaatatgaacgattgcggatttaaggttgtcgcctacaaccgaacaatcggtaaggtggacgaatttttaaacggcgcggctaagggaacggatattgtcggcgcgtattccctgcaagacttggtcgataagctggcaaaaccgagaaaaatcatgatgatggttcgcgcaggttcggtggttgacgactttatcgaacaactgcttccgttgttggaagaaggcgacatcattatcgacggcggcaatgccaattaccccgacacgacacggcggacacattaccttgccgaaaaagggattttgtttgtcggcgcgggcgtatccggcggcgaagaaggcgcgcggcacggcccgtctatcatgccgggcggagatgagcgcgcttgggaagccgtcaaaccgatttttcaggcgattgccgccaaaacgccgcagggcgaaccgtgttgcgactgggtcggcagggacggcgcggggcattttgtcaaaatggtgcataacggcatcgaatacggcgatatgcagttgatttgcgaagcgtaccagttcatgaaagacggcttggggctgtcttacgacgaaatgcaccgcgtgtttgccgagtggaacaaaaccgagctggattcttatctgattgaaatcacagcggcaattttgggctataaggacgaaggcggcgaaccgctggtcgagaaaatcctcgatacggcagggcaaaaaggcacgggcaaatggacgggcatcaatgctttggatttgggtattccgttgacgctgatttccgaagcggtattcgcccgctgcgtttcgtcgttcaaagaacagcgcgtgcagaccggcaagctattcgcccgaaccgttacgcccgtcgaaggcggcaaacaagaatgggttgaggcgttgagacaggccctgcttgcatctaaaatcatttcctacgcacaaggcttcatgctgatccgcgaagcgggcgaaagctacggctgggatttggactacggcaacactgcgctgctgtggcgcgaggggtgcatcatccgcagcgcattcttaagcaatatccgcgacgcgtatgaaaacaatcccgatttggtgttcttgggtgcggatccgtatttcaaaaatattttggaaaactgcctgccgacgtggcgcaaggtggttgccaaggcggtcgaatgcggcatccctatgccttgcatggcttcggcgattacgttcttggacggctacacgaccgaacgtctgcctgccaacctcttgcaggcacagcgcgactacttcggcgcgcacacttacgaacgcaccgacaaaccgcgcggcgagtttttccataccaactggacgggcaagggcggagataccgcttcgacaacctacgatatttga

SEQ ID NO: 49561 - DNA, 495 bp, Neisseria meningitidis; identical to SEQ ID NO: 45730

SEQ ID NO: 49562 - DNA, 132 bp, Neisseria meningitidis; identical to SEQ ID NO: 38518

SEQ ID NO: 49563 - DNA, 507 bp, Neisseria meningitidis
atggatttctttgatttttttgcgcaaggtaagtataaaaaaattgcaactgaacaaggtttagaccgtaaatattttatattccactatatcgtatgtaatttatctgccatttcttctttttgtttaatgaaggttatccatagttatactatcctttgtttattaataatgataattggcattgcatttggatttatcttgagaaatagggttctatctatagtaaaaaataaacaaaagtttttatctgatatgtttcccttggaaatgcctttcttttctagagtatacaaaatacctatcttggccagattcttgaataggggaatgaaatggctttatctccaaaattttttctgtttagttatgatttgtttctcgatatctcttatccttaatgaagaaagggggtggatgccttattttatctgctattggtttggactttgttatccagcaaacacttattacgtttttttatccagagattataaacatatctaa

SEQ ID NO: 49564 - DNA, 819 bp, Neisseria meningitidis; identical to SEQ ID NO: 38764

SEQ ID NO: 49565 - DNA, 366 bp, Neisseria meningitidis; identical to SEQ ID NO: 44550

SEQ ID NO: 49566 - DNA, 864 bp, Neisseria meningitidis
atggaattgaacgaatttctcgataaagcctatgccgttttgcggcgtttggatgccgtgcttccgcccgaacccgggcatacggattggaacgcgcttgccttccgctggcagagtgcgggcaaaaaaggttttttggaacacttgcccgatccgcacaccttccccttggcaaggctggcgggagttggcaggcaaaccgaattgctggtgcgtaataccgaacaattcattgccggcagacccgcgaataacgtattgatgagcggcgcgcgcggaacaggcaaatcctcgctggtcaaagccctgctgcacgaatatgcggataagggattgcgcctgatcgaagtcgataaaagcgatttaatcggcctgccttacctgttgacgcttttgaaggaacgtccggaaaaatttatcgtattttgcgacgatttgtcgtttgaaagcggcgatgaaacctataaggcattgaaaaccgcgttagacggcggtctgtctcaacgttgcgccaacgtgctggtgtacgcgacttccaacagacggcacctgatgcccgaatattttgacgagaatgccggtacgacggggatgcggggggaagtccatcagaaagaagcggtggaagaaaaaatatccctgtccgaccgattcggattgtggctcagtttttatccgttcgatcaaaacgattatctggcggcggtgcaaaattggctggaagatttcggcgtgccgtatgatgaaaccgcacagatggcggcattgcagtgggcgcagacgcggggcagccgttcgggacgttccgcgtggcagtttgcctgcgactgggcgggcaggctgccggagcaacgtgcgccgtga

SEQ ID NO: 49567 - DNA, 2259 bp, Neisseria meningitidis
atgtacacaagaattatggaaatcagcccttggacgctgcgttcggcaaagctggaaaaagaacacaaacggctgcaagagagcctgaccagtttgggcaacggctatatgggtatgcgcggcagctttgaggaaacctactccgccgacagccacttgggcacctacatcgccggcgtgtggttccccgacaaaacccgcgtcggctggtggaaaaacggctatcccaaatatttcggcaaagccatcaacgcgctcaatttcagcaaagtcaaaatctttgtcgatggtcaagaggtggacttggcgaaaaacgatgttgccggcttctccgtcgaactcgatatgcagcacggcgtgttgcgccgctcgttcaccgtattcggcgtgcgtttcgatgtgtgcaaattcctgtccgtcgcacaaaaagagctggctctcatccgctgggaagccgtatctatcgacggcaaaacccaccaagtccgcatcgattccatcatcgatgccgacgtgaaaaacgaagattccaactacgaagaaaaattctggcaagtattggacaaaggcgtttcagacgaccgctcctacattgccacccaaaccgtcaccaatcccttcggcgtggaacaatttatcgtcaacgccgagcaaactttcgccggcagcttcaaagccctcggtggcagccaaaccgactggcaggtctccaattctttcgaggccgaagtcggcggcacgcccaaaacctttgaaaaacgggttattgttaccaccagccgcgattatcagggcttggaagcagtgaaagccgcaggccgtgccttgtcggaaaaagtcgcaggcgttgcgtttgaaaccttgctggacgcgcacaaagcaggctggctgcaccgttgggaaatcgccgacgtggtcatcgaaggcagcgacgaagcgcagcaaggcatccgtttcaatctgttccaactgttctccacctactacggcgaagatgcgcgcctgaacatcggccccaaaggctttaccggcgaaaaatacggcggcgcgacctattgggataccgaagcctatgccgtaccgctctacctcgcactggcggaacccgaagttacccgcaacctgctgcaataccgccgcaaccaactgccgcaggcgcagcacaacgcgcgcgaacagggcttggcgggcgcactctatccgatggtaacgtttacgggtatcgagtgccacaacgaatgggaaatcaccttcgaggaaatccaccgcaacggcgcgattccttacgccatctacaactacaccaactacaccggcgacgagggctatcttgccaaagaaggcttggaagtcttggtcgaagtgtcccgcttctgggcggaccgcgtccacttctccaaacgcaacggcaaatacatgattcacggcgtaaccggcccgaacgaatacgaaaacaacatcaacaacaactggtacaccaacaccctcgccgcatgggtattggactacacccgcgaagccttggcgaaatacccgcgtccggatttgaacgtgcgtgccgccgagttggaaaaatgggcggacatcagcgcgaatatgtaccgtccgcatgacgaagaactcggcgtattcgtgcaacacgacggcttcctcgacaaagacatccgccccgtgtccgcgctttcgcccgacgatttgccgctcaaccagaaatggtcgtgggacaaaatcctgcgttcgccctttatcaaacaggcggacgtattgcaaggcatctatttcttcggcgaccgtttcaatatcgacgaaaaacgccgcaatttcgacttctacgaaccgatgaccgtgcacgaaagctcgttgtcgccgtgtatccactctattctcgccgccgaactgggcaaagaagaaaaagccgtggaaatgtaccggcgcaccgcacgcctggacttggacaactacaacaacgacaccgaagacggcctgcacattacttctatgaccggctcgtggctcgccatcgtccaaggtttcgcccaaatgaaaacttggggcggtaaactcagcttcgcaccgttcctgccgagcgcatggacaggctacgccttccatatcaactaccgaggccgtctgattaaagtcgccgtcggcaaagaaaacgtcgtcttcaccctgctcaaaggcgagccgctcgatttgcaggtgtacggcaaagacatcacactcaacggcagccataccgccgcgttggaaaaataa

SEQ ID NO: 49568 - DNA, 1332 bp, Neisseria meningitidis; identical to SEQ ID NO: 38215

SEQ ID NO: 49569 - DNA, 1281 bp, Neisseria meningitidis
ttgaaggattgttttcctcaaggtctgaatggaaaaaaaacagcggtggcattaagcggcggcttggattccgtggtcttgctgcacctgcttgtccgcgctgggaaacgggcaggatttgtgccggaggcattgcatatccatcacggcttgagcccccgtgccgacgattgggcggatttctgtcaaaactattgcgatatgctaggggtggggctggaaacggttaaggtctgcgtggaaaaaaacggtttgggcatcgaagcggcggcgcggcaaaagcgttatgccgcgtttgccgaaaaaggctttgacattttggcgttggcgcaccacagggacgatcaaatcgaaacctttatgctggcggtcgcgcgcggcggcggtttgcgcgctttggcggctatgcccgccgtccgcccttttggggaaaaaggcatcatttggcggcccttgctgcctttttcgcgccaagatatatgggattatgcccaaaaacacggtttgccgaatatcgaggatgaaagcaataccgatacggcttatttgcgaaaccgcttccggcaccgtattttgcccgaactttcggcgcagattccccatttcgggcgacatgtgctgaacaatgtccgcgctttgcaggaagatttggctttgttggacgaggtcgtcgttcaggactgccgttgggtttgcggggccggttatttcgatacggcgcggtggctgacgttttccccgcgccggaaaacccatattttgcggcattttctgaaggaaaacggcattcccgtgccgaatcagaatgcccttgccgacattgcccgggttttgacggaggcaaaaaccggacgttggaacttgcaaggctttgaattgcatcattatgcaggcaggctgtttgtgttccgacaggaaaaaacggataaactgcggtttttgaaagacaggcagataagcggaaatttaagggaaatattgacggggcagggatttgttttaaaacgtcatccgtttgggcttcctgagcatcttttggagcaggacggaattttgaggacggtagcggcatcggatacgttggctgtcggcggcatccataagaatgtgaaaaaaatccttcaggggaaacgggttttgcctgtcctgcgcccaatttggccgcttgttgccgacagcggaaaccgtccattggcgttggcaaactgttgtgcggatttccaatattcggtttcagacggcattttgcccgtccatcctgactttcccattttattttga

SEQ ID NO: 49570 - DNA, 870 bp, Neisseria meningitidis
atgaagcgcatctttttgcccgccttgcccgccatcctgcctttatccacttatgccgacctgcccttgacgattgaagacataatgaccgacaagggaaaatggaaactggaaacttcccttacctacctgaacagcgaaaacaaccgcgccgaacttgccgcaccggtttacattcaaaccggcgcaacctcgtttatccccattccgaccgaaatccaagaaaacggcagcaataccgatatgctcgtcggcacgctcggtttgcgctacggactgaccgggaataccgacatttacggcagcggcagctatctgtggcacgaagaacgcaaactcgacggcaacagcaaaacccgcaacaaacggatgtccgacgtatccctcggcatcagccacactttccttaaagacgacaaaaaccccgccctaatcagctttcttgaaagcacggtttacgaaaaatcgcgcaacaaagcctcgtcgggaaaatcctggctcatcggcgccaccacctacaaagccatagatccgattgtcctttccctcaccgccgcctaccgcatcaacggcagcaaaaccctttcagacggcatccgctacaaatcgggcaactacctgctgctcaaccccaacatctcatttgctgccaacgacagaatcagcctgaccggaggcatccaatggctgggcaggcagcccgaccggacggacggcaaacgggaatcctccagaaacacatccacctacgcccatttcggcgcaggtttcggtttcaccaaaaccacggctttaaacgcatccgcacgtttcaacgtttcagggcaaagcagttccgaactgaaatttggcgtacagcatacattttaa

SEQ ID NO: 49571 - DNA, 1764 bp, Neisseria meningitidis; identical to SEQ ID NO: 45457

SEQ ID NO: 49572 - DNA, 2115 bp, Neisseria meningitidis
atggatttattatcggttttccacaaataccgtctgaaatatgcggtggccgtgctgacgatactgcttttggcggcagtcgggctgcacgcttccgtatatcgcaccttcacgcctgaaaacatccgcagccgcctccaacaaagcattgcacacacacaccggaaaatctcgtttgatgcggacattcagcgcaggctcctgccccggccgaccgtcatcctgaaaaacctgaccattaccgaacccggcggcgaccagactgccgtttccgtccaagaaaccaaaatcggattgagctggaaaaacctgtggtcggatcagatacagattgaaaaatgggtggtttcgagtgcggaacttgccctgacgcgcgacgggaaaggtgtttggaacatccaagacctgatcgacagccaaaaacgccaagcctcagtcaaccgcattatcgtcgaaaacagcaccgtccgcctcaatttcctgcaggaacagcttatcctgaaggaaatcaacctcaacctgcaatcccccgattcgtcggggcagccgtttgaaagttcgggcatactggtttggggaaagctgtccgtcccgtggaaaagcagggggctgttcctttcagacggcatcggcacgcccaaaatctcaccgttccattttgaagcttccacttcgctggacggacacggcatcaccatttccaccaccggcagcccttctgtccgcttcaacgccggcggagcggatgccgccggcctcggcctgcgtgcagacacttccttccgcaacctccacctgaccgcgcaaatccccgcgctggcactcaggaacaacagcattaaaattgaaaccgtcaacggcgcatttaccgccggcggcgaatatgcccaatgggacggttcgttcaaactcgacaaagccaacctgcactccggcatcgccaacatcggcaacgccgaaatctccggcagcttcaaaacaccgcgccaccaaaccaacttctccctcaattcgccgctcgtatggacggaaaacaaagggctggacgcgccgcgcctgtatgtatcgacccttcaggataccgtcaaccgcctgccgcaaccccgtttcatcagccggctcgacggttcgctgtccgtaccgaatctgcaaaattggaatgccgaattaaacggcacattcgaccgccaaaccgttgccgcgaaattcagatacacacatgaagacgcaccgcatctggaagccgccgtcgcactgcaaaaattgaacctgaccccctatcttgacgacgtgcggcaacaaaacggcaaaatatttcccgacaccctcgccaagctgtccggcgacatcgaggcgcacctgaaaatcggaaaagtccaacttcccggcctgcaactggacgatatggaaacctacctccacgccgacaaaggccatatcgcgctcagccgtttcaagtcagggctttacggcggccataccgaaggcggcatcagcatcgccaacacccgtcccgccacttaccgcctgcaacagaatgcaagcaacatccaaatccaaccgctgctgcaagacctgttcggcttccacagcttcagcggcaacggcgatgcggtcatcgacctgaccgcgggcggcgaaacccgaaaagagcttatccgctcgcttcagggcagcctgtcgctgaatatttccaacggcgcgtggcacggtatcgacatggacaatatcctgaaaaacggcatttcgggcaaaactgccgacaatgccgcacccagcacacccttccaccgattcacgctcaacagcgaaatttcagacggcatcagccgccacatcgataccgaactcttctccgacagcctctatgttaccagcaacggctataccaatctggatacgcaggaattgtctgaagatgtccttatccgcaacgccgtccatccgaaaaacaaaccgattcccctgaaaatcaccggtacggtggacaagccgtccattaccgtcgattacggcaggctgaccggcggcatcaattcgcgcaaagagaaacagaaaatcctcgaagacaccctgctggaacaatggcagtggctcaaacctaaagaaccgtaa

SEQ ID NO: 49573 - DNA, 360 bp, Neisseria meningitidis; identical to SEQ ID NO: 39361

SEQ ID NO: 49574 - DNA, 855 bp, Neisseria meningitidis; identical to SEQ ID NO: 38553

SEQ ID NO: 49575 - DNA, 531 bp, Neisseria meningitidis; identical to SEQ ID NO: 41265

SEQ ID NO: 49576 - DNA, 1692 bp, Neisseria meningitidis; identical to SEQ ID NO: 39144

SEQ ID NO: 49577 - DNA, 456 bp, Neisseria meningitidis; identical to SEQ ID NO: 41084

SEQ ID NO: 49578 - DNA, 618 bp, Neisseria meningitidis; identical to SEQ ID NO: 45040

SEQ ID NO: 49579 - DNA, 630 bp, Neisseria meningitidis
atgaacagacacatccgccaagaaatcttcgaacgcttccgcgccgccaacccccatccgaccacagaactcaacttcaactcccctttcgagcttttaatcgccgttttactgtcggcacaggcaaccgacgtcggcgtaaacaaagcgacggcgaagctgtttccggttgccgatacgccgcaggcgatgctggatttgggtttggacggcgtgatggaatatacgaaaaccatcgggttgtataaaaccaagtccaagcacatcatgcagacctgccgcatcctgctggaaaaatacaatggcgaagtgccggaagaccgcgaggctttggaatcgttgccgggcgtggggcgcaaaacggcaaacgtggtattgaacacagcgttcggacaccccgttatggcggtcgatacgcatattttccgcgtgtccaaccgaaccaaaatcgcccccgggaaagatgtgcgcgaagtcgaagacaaactgatgcgcttcattcctaaagagttcctgatggacgcgcaccactggctgattttgcacggacgctacacctgcaaggcactcaaaccgcaatgccaaacctgcatcatcaacgatttgtgcgaatatcccgccaaagcctga

SEQ ID NO: 49580 - DNA, 336 bp, Neisseria meningitidis; identical to SEQ ID NO: 45775

SEQ ID NO: 49581 - DNA, 840 bp, Neisseria meningitidis; identical to SEQ ID NO: 38805

SEQ ID NO: 49582 - DNA, 999 bp, Neisseria meningitidis
gtgattgcaagccgtctctctggaaatatatcttcagctattcaggagcataaagatggtaaagttaatatcaaccgttttcaaaatattttagcggatttatattcattgggagggttaggaagtacattaatagagaagaatggaaatatgcagagttgggggattccattagcaattgctggagatataattgcagcaacggctattgccacaggagatactggtacgatatctacagaggaattttataattttgacaactggaaaggttttgggtatgagctatttgaagactggtctcgttgggtatacgactggctgcccgacggctggaatctgtggaaagaattggacagaaaccgttcaggccaataccacatctacgaccccctcgccctagacctagacggcgacggcatagaaacagtcgccgccaaaggctttgcaggcagcttatttgatcacaccaacaacggtatccgcaccgccaccggttgggtttctgccgatgacggtttactcgtccgcgatttgaacggcaacggcatcatcgacaacggtgcggaactcttcggcgacaacaccaaactggcagacggttcttttgccaaacacggctacgcggctttggccgaattggattcaaacggcgacaacatcatcaacgcggcagacgccgcattccaatccctgcgtgtatggcaggatctcaatcaggacggcatttcccaaaccaacgaactccgcacccttgaagaattgggtattcaatctttggatctcgcctataaagatgtaaataaaaatctcggtaacggtaacactttggctcagcaaggcagctacaccaaaacaaacggtacaaccgcaaaaatgggggatttacttttagcagccgacaatctgcacagccgcttcacgaacaaaatgctatccattagccatgttcgggaaaacacgatttccccgtttgttttaggctgtctaaacaaataa

SEQ ID NO: 49583 - DNA, 1179 bp, Neisseria meningitidis
atggcatttttaaaactgaccgaacaaaacgtgcagggcaaaaccgtcctcatccgcgccgatatgaacgtgccgttcaaagacggcaaaatcagcgacgacacccgtatccgcgcctcgctcgcgtccatccaatactgcatggacaacggcgcatccgttatcgtgatgatccacttgggtcgcccgactgaaggcgagttccaccccgaagacgacgttgcgcccgttgccgcgcatttgggcggtctgttgggcaaagacgtgaaagtattgaacgactggcgcgaaaacaaaccggctttgaacgcgggcgatgtcgtgatgctgcaaaacgtgcgtatcaacaaaggcgagaagaaaaacgatttggaactgggtaaagcctacgcttctttgtgcgacgtgttcgtcaatgacgcgttcggcaccgcgcaccgcgcccaagcttcgaccgaagccgtcgctcaagccgcgcccgttgcctgcgccggcgtattgatggcgggcgaactcgacgctttgggcaaagccctgaaacagcccgcgcgcccgatggttgccatcgttgccggcagcaaagtgtccaccaagctgaccatcctcgaatcgctggcggataaagttgaccaactcatcgtcggcggcggtatcgccaacaccttcctgttggcggaaggtaaagccatcggcaaatctttggcggaacacgatttggtggaagaatccaaaaaaattatggcgaaaatggcggccaaaggcggttctgtgccgctgccgaccgatgtcgtcgttgccaaagcctttgccgccgatgccgaagcggtcgtgaaagacattgccgacgttgccgaagacgatatgattttggacatcggtccgaaatccgccgccgagcttgccgaactgctcaaagccgcaggcacggtcgtttggaacggccctgtcggcgtgtttgagtttgaccaattcgcaggcggcacgaaagctcttgccgaagccattgcccaaagcaaagcattctcgattgcaggcggtggcgacacgctggcggcgattgctaaattcggcgttaccgaccaaatcggctatatttctaccggcggaggcgcgtttcttgagttcttggaaggtaaagagttgcctgccgtagccgctttggaaaaacgcggcgcgtaa

SEQ ID NO: 49584 - DNA, 1344 bp, Neisseria meningitidis; identical to SEQ ID NO: 39017

SEQ ID NO: 49585 - DNA, 678 bp, Neisseria meningitidis; identical to SEQ ID NO: 47922

SEQ ID NO: 49586 - DNA, 1407 bp, Neisseria meningitidis
atgaaaaatcgagttaccaacatccattttgtcggtatcggcggcgtcggcatgagcggcatcgccgaagtcttgcacaatttgggttttaaagtttccggttcggatcaggcgcgtaatgccgctaccgagcatttgggcagcctgggcattcaagtttatcccggccataccgccgaacacgttaacggtgcggatgtcgtcgttacctctaccgccgtcaaaaaagaaaatcccgaagttgtcgctgcgttggagcagcaaattcccgttattccgcgcgccctgatgttggcggagttgatgcgcttccgtgacggcatcgccattgccggcacgcacggcaaaaccacgaccaccagcctgaccgcctccatcctcggcgcggcaggacttgacccgactttcgttatcggcggcaaactcaacgccgcaggcaccaacgcccgcttgggcaaaggcgaatacatcgttgccgaagccgacgagtcggatgcatcctttctgcacctgacaccgattatgtccgtcgttaccaatatcgacgaagaccatatggatacctacgggcacagcgtcgaaaaactgcatcaggcgtttatcgatttcatccaccgtatgcccttctacggcaaagcctttttgtgtattgacagcgaacacgtccgcgcgattttgcccaaagtgagcaaaccttatgctacttacggtttggacgataccgccgacatctacgccaccgacatcgaaaacgtcggcgcgcaaatgaaattcaccgtccatgttcaaatgaaaggacatgagcaggggtcgtttgaagtcgtgctgaatatgcccggcagacacaacgtgctgaacgcattggcagccatcggcgtggcgctggaagtcggcgcatcggttgaagcgatccaaaaaggcttgctcggctttgaaggcgtcggccgccgcttccaaaaatacggcgacatcaagttgccaaacggcgggaccgcgctcttggtggacgactacggacaccaccccgtcgaaatggcggcgacccttgccgccgcacgcggcgcgtatccggaaaaacgtttggtactcgccttccagccgcaccgctatacccgcacgcgcgatttgtttgaagactttaccaaagtcctcaataccgttgacgcgctggtgctgaccgaagtttatgccgccggtgaagagccgattgccgccgccgattcccgcgctcttgcccgcgccatccgcgtgttgggcaaactcgagccgatttactgcgaaaacgttgccgatctgcccgaaatgctgttgaacgttttgcaggacggcgacatcgtgttgaatatgggcgcgggaagcatcaaccgcgtccccgccgcgctgctggaattgtcgaaacagatttga

SEQ ID NO: 49587 - DNA, 156 bp, Neisseria meningitidis; identical to SEQ ID NO: 44824

SEQ ID NO: 49588 - DNA, 1311 bp, Neisseria meningitidis
atgccgtctgaaagcaaacccgtgtcgcgcatcgtaaccgacagccgcgacatccgcgcgggcgatgtgtttttcgcattggcgggcgggcggtttgatgcgcatgattttgttgaagacgtattggctgctggtgcggcggcggttgtggtttcgcgcgaagattgcgttgcaatggatggcgcgttgaaagtcgatgacacgcttaccgcgttgcaaatgttggcgaaggcgtggcgcgagaatgtgaacccgtttgtgttcggtattaccggctcgggcggcaagacgacggtgaaggaaatgttggctgcggtattgcgccgccgtttcggcgataatgccgttttggcgacggcaggcaacttcaacaaccacatcggattgccgttgactttgttgaaattaaacgaaaaacaccgctatgccgtgattgaaatgggtatgaaccattttggcgaactggcggttttgacacaaatcgccaaacccgatgccgcattggtcaacaacgccatgcgcgcccatgtcggctgcggtttcgacggagtgggcgatattgccaaagcgaaaagcgagatttatcaaggcttatgttcagacggcatggcgctgattcctcaagaagatgccaatatggctgtcttcaaaacggcaacgcttaatttgaatacgcgcactttcggcatcgatagcggcgatgtccacgcggaaaatatcgtgctgaaaccgttgtcgtgcgaatttgatttggtgtgcggcaacgagtgcgcagccgtggttctgcccgttcccggccgccacaatgtccacaacgccgccgccgccgccgcgctgtctttggctgcaggtttgagtttgaacgatgtggcggaaggtttgaaaggcttcagcaatatcaaaggccgtctgaacgtcaaatccggaatcaagggcgcaaccctgattgacgatacttataatgcgaaccctgacagcatgaaagctgcggttgacgtgttggcgcgtatgcctgcgccgcgtattttcgtgatgggcgatatgggcgaactgggtgaggacgaagccgccgccatgcacgccgaagtcggcgcgtacgcccgcgaccaaggcatcgaagcggcttattttgtcggcgacaacagcgtcgaagcggcggaaaaatttggcgcggacggtttgtggttcgccgccaaagacccgttgattcaagtgttgcgccacgatttgcccgaacgcgccaccgtgttggtgaaaggttcgcgctttatggagatggaagaagtggtcgaggcattggaggataagtga

SEQ ID NO: 49589 - DNA, 984 bp, Neisseria meningitidis
atgagtgaaatcaaaaccgacgaccccaaacgcggcatcaaactcagaggcgcggacaaaaccgcccgcatccccatcaaagtcgtcccccttcaggagaaactgaaaaagcccgaatggatacgcgccaaactcccatcgcgcaaattctttgaaatcaaagacattttgcgcgaacaaaagatgcacaccgtttgcgaggaagcctcctgccccaacatcggcgaatgcttcagcaaaggcacggcgaccttcatgattatgggtgacatctgcacccgccgctgcccgttctgcgacgtgggacacggtcggcccaatatgctcgaccccgacgaaccgagaaacctcgccgaatccgtcaaagccatgaacctgcgttacgtcgtcatcacctccgtcgaccgcgacgacctgcgcgacggcggcgcacagcatttcgccgactgcatcaaagccatccgcgaaaccagcccgaacaccaaaatcgaaatcctcgtccccgacttccgaggacgcttggacatcgcactcaaaatccttgccgaaaccccgcccgacgtgatgaaccacaacctagaaacccatccgagcctgtacagaaaagcccgtcccggtgccaattatcaacattctttagacttattaaaacgttataaagaaatgatgccgcacatcccgaccaaatccggcatcatggtcggcttgggcgaaacagacgaagacgtgcgtgaaattatgcgcgatatgcgggcgcacaatatcgaaatgattaccatcggacagtacctccagccttcagacggacacctgcccgtcctgcgctacgttacgcccgagcagttcaaaatctttgaaaaagaagcatacgaactgggctttaccaatgccgccatcggcgcgatggtacgttccagctaccacgccgacgaacaggctgccgaagccttacgcgaaagccacggcggttgcgggcatcattaa

SEQ ID NO: 49590 - DNA, 765 bp, Neisseria meningitidis; identical to SEQ ID NO: 44922

SEQ ID NO: 49591 - DNA, 717 bp, Neisseria meningitidis; identical to SEQ ID NO: 39244

SEQ ID NO: 49592 - DNA, 525 bp, Neisseria meningitidis; identical to SEQ ID NO: 38758

SEQ ID NO: 49593 - DNA, 741 bp, Neisseria meningitidis; identical to SEQ ID NO: 39171

SEQ ID NO: 49594 - DNA, 2853 bp, Neisseria meningitidis; identical to SEQ ID NO: 47293

SEQ ID NO: 49595 - DNA, 1635 bp, Neisseria meningitidis; identical to SEQ ID NO: 45745

SEQ ID NO: 49596 - DNA, 264 bp, Neisseria meningitidis; identical to SEQ ID NO: 36383

SEQ ID NO: 49597 - DNA, 1167 bp, Neisseria meningitidis
atgagaaaattcaatttgaccgcattgtccgtgatgcttgccttaggtttgaccgcgtgccagccgccggaggcggagaaagctgcgccggccgcgtccggtgagacccaatccgccaacgagggcggttcggtcagtatcgccgtcaacgacaatgcctgcgaaccgatggaactgaccgtgccgagcggacaggttgtgttcaatattaaaaacaacagcggccgcaagctcgaatgggaaatcctgaagggcgtgatggtggtggacgagcgcgaaaacatcgcccccggactttccgataaaatgaccgtcaccctgttgccgggcgaatacgaaatgacttgcggtcttttgaccaatccgcgcggcaagctggtggtaaccgacagcggctttaaagacaccgccaacgaagcggatttggaaaaactgtcccaaccgctcgccgattataaagcctacgttcaaggcgaggttaaagagctggtggcgaaaaccaaaacctttaccgaagccgtcaaagcaggcgacattgaaaaggcgaaatccctgtttgccgacacccgcatccattacgaacgcatcgaaccgattgccgagcttttcagcgaactcgaccccgtcatcgatgcgcgtgaagacgacttcaaagacggcgcgaaagatgccggatttaccggctttcaccgtatcgaatacgccctttgggtggaaaaagacgtgtccggcgtgaaggaaattgcagcgaaactgatgaccgatgtcgaagccctgcaaaaagaaatcgacgcattggcgtttcctccgggcaaggtggtcggcggcgcgtccgaactgattgaagaagtggcgggcagtaaaatcagcggcgaagaagaccggtacagccacaccgatttgagcgacttccaagccaatgtggacggttcgaaaaaaatcgtcgatttgttccgtccgctgatcgaggccaaaaacaaagccttgttggaaaaaaccgataccaacttcaaacaggtcaacgaaattctggcgaaataccggactaaagacggttttgaaacctacgacaagctgggcgaagccgaccgcaaagcgttacaggcctctattaacgcgcttgccgaagaccttgcccaacttcgcggcatactcggcttgaaataa

SEQ ID NO: 49598 - DNA, 1770 bp, Neisseria meningitidis; identical to SEQ ID NO: 38843

SEQ ID NO: 49599 - DNA, 531 bp, Neisseria meningitidis; identical to SEQ ID NO: 39309

SEQ ID NO: 49600 - DNA, 1095 bp, Neisseria meningitidis; identical to SEQ ID NO: 38108

SEQ ID NO: 49601 - DNA, 798 bp, Neisseria meningitidis; identical to SEQ ID NO: 36750

SEQ ID NO: 49602 - DNA, 483 bp, Neisseria meningitidis; identical to SEQ ID NO: 39611

SEQ ID NO: 49603 - DNA, 534 bp, Neisseria meningitidis; identical to SEQ ID NO: 37791

SEQ ID NO: 49604 - DNA, 1194 bp, Neisseria meningitidis; identical to SEQ ID NO: 38750

SEQ ID NO: 49605 - DNA, 345 bp, Neisseria meningitidis; identical to SEQ ID NO: 39643

SEQ ID NO: 49606 - DNA, 1101 bp, Neisseria meningitidis; identical to SEQ ID NO: 39233

SEQ ID NO: 49607 - DNA, 1848 bp, Neisseria meningitidis; identical to SEQ ID NO: 41875

SEQ ID NO: 49608 - DNA, 657 bp, Neisseria meningitidis; identical to SEQ ID NO: 39146

SEQ ID NO: 49609 - DNA, 1515 bp, Neisseria meningitidis
atgactacctccaaatgccccgtaacccatctgaccatgaacaacggcgcgcctgttgccgacaatcaaaacagcctgaccgccggtcctcgcggccctctgctggcgcaggatttgtggctgaatgaaaaactcgccgacttcgtgcgcgaagtcattcccgaacgccgtatgcacgccaaaggttcgggcgcgttcggtacgtttaccgtaacacacgacatcaccaaatacacccgcgccaaaatcttcagcgaagtcggcaaaaaaactgaaatgttcgcccgtttcaccaccgtggcaggcgaacgcggcgcagccgatgcagaacgcgacatccgcggttttgcattgaaattttataccgaagaaggcaactgggatgtggtcggcaacaacacgcccgtgttcttcctgcgcgacccgcgtaagttccccgacctgaataaagccgtcaaacgcgatccgcgcaccaatatgcgctctgccacaaacaactgggacttctggacgctgctgcccgaagccctgcaccaagttaccatcgtgatgagcgaccgcggcatcccagccggctaccgccatatgcacggcttcggttcgcatacttacagcttctggaacgaagcgggcgaacgcttttgggtaaaattccatttccgcagccaacaaggcattaaaaacctgaccaacgaagaagctgcaaaaatcatcgccgacgaccgtgaaagccatcagcgcgacctgtacgaagccatcgagcgcggcgagtttccgaaatggacgatgtacatccaagtcatgcctgaagccgatgcggaaaaagtgccgtatcatccgtttgacttgaccaaagtttggccgaaaaaagactatccgctgattgaagtgggcgaattcgagttgaaccgcaatcccgaaaacttcttcgccgatgtggaacaatccgccttcgcaccgagcaacctcgttcccggtgtcggcgccagcccagataaaatgctgcaagcgcgtttgttcaattacgccgacgcgcaacgctaccgcttgggcgtgaacttccgccaaatccctgtcaaccgtccgcgttgccctgttcacagcaaccagcgcgacggacaaggacgcgccgacggcaactacggcagcctgccgcactacgaacccaatagcttcggccaatggcagcaacaacccgacttcgccgaaccgcctttgaaaatcaacggcgacgcggcgcactgggactaccgccaagacgatgacgactatttcagccaaccgcgcgccctgttcaacctgatgaacgacgcgcagaaacaggcattgttcggcaacaccgccgccgcaatgggcgacgcgcccgacttcatcaaataccgccatatccgcaactgctaccgttgcgatccggcatacggcgaaggcgtggcaaaagccctcggactgactgtcgaagacgcacaagccgcccgcgcgaccgaccccgcactcggccagcccggtttgctgtaa

SEQ ID NO: 49610 - DNA, 270 bp, Neisseria meningitidis; identical to SEQ ID NO: 39556

SEQ ID NO: 49611 - DNA, 645 bp, Neisseria meningitidis; identical to SEQ ID NO: 39354

SEQ ID NO: 49612 - DNA, 324 bp, Neisseria meningitidis; identical to SEQ ID NO: 38468

SEQ ID NO: 49613 - DNA, 330 bp, Neisseria meningitidis; identical to SEQ ID NO: 38921

SEQ ID NO: 49614 - DNA, 402 bp, Neisseria meningitidis; identical to SEQ ID NO: 39029

SEQ ID NO: 49615 - DNA, 309 bp, Neisseria meningitidis; identical to SEQ ID NO: 38004

SEQ ID NO: 49616 - DNA, 951 bp, Neisseria meningitidis
atgtcccaacaccgcaaactgattattttgggttccggccccgccggatacaccgccgccgtctatgccgcgcgcgccaatttaaaccccgtcattattacaggtatcgcgcaaggcgggcaactgatgaccaccaccgaagtggacaactggcctgccgatgccgacggcgtgcaagggccggaattgatggcgcggtttctcgcccacgccgaacgtttcggaacggaaatcatttttgaccaaatcaacgccgtcgatctgcaaaaacgcccgtttacactcaaaggcgatatgggcgagtacacttgcgatgccctgattgtcgcaacaggcgcgtccgccaaataccttggtttgccgagtgaggaagcgtttgcagggaaaggcgtttccgcctgcgccacctgcgacggtttcttctacaaaaaccaagatgttgccgtagtcggcggcggcaatacggcagttgaggaggcactctaccttgccaatatcgccaaaaccgttacgttgattcaccgccgcagcgagttccgtgccgaaaaaatcatgattgacaaactgatgaaacgcgtggaagagggcaaaatcatcctcaagctggaaagcaatctgcaagaagtactgggcgacgatcggggcgtaaacggcgcattattaaaaaacaacgacggttctgagcaacaaattgccgtcagcggcatctttatcgccatcgggcacaagccgaataccgatattttcaaaggtcagttggaaatggacgaagccggttacctgaaaaccaaaggcggcacggcggacaatgtcggcgcaaccaatatcgaaggcgtatgggcggcgggcgacgtaaaagaccatacctaccgtcaggcaattaccagcgcggcttccggctgtcaggcggctttggacgcggaacgctggctgggcagccaaaacatttga

SEQ ID NO: 49617 - DNA, 2151 bp, Neisseria meningitidis
atgaaaaccccactcctcaagcctctgctcattacctcgcttcccgttttcgccagtgtttttaccaccgcctccatcgtctggcagctaggcgaacccaagctcgccatgcccttcgtactcggcatcatcgccggcggccttgtcgatttggacaaccgcctgaccggacggctgaaaaacatcatcgccaccgtcgccctgtttaccctctcctcgctcacggcacaaagcaccctcggcacagggctgcccttcatcctcgccatgaccctgatgaccttcggctttaccattttaggcgcggtcgggctgaaataccgcaccttcgccttcggcgcactcgccgtcgccacctacaccacacttacctacacccccgaaacctactggctgaccaaccccttcatgattttatgcggcaccgtactgtacagcaccgccatcatcctgttccaaatcatcctgccccaccgccccgtccaagaaagcgtcgccaacgcctacgacgcactcggtggctacctcgaagccaaagccgacttcttcgaccccgatgaggcagcctggataggcaaccgccacatcgacctcgccatgagcaacaccggcgtcatcaccgccttcaaccaatgccgttccgccctgttttaccgccttcgcggcaaacaccgccacccgcgcaccgccaaaatgctgcgctactacttcgccgcccaagacatccacgaacgcatcagctccgcccacgtcgattatcaggaaatgtccgaaaaattcaaaaacaccgacatcatcttccgcatccaccgcctactcgaaatgcagggacaagcctgccgcaacaccgcccaagccctgcgcgcaagcaaagactacgtttacagcaaacgcctcggccgcgccatcgaaggctgccgccaatcgctgcgtctcctttccgacggcaacgacagccccgacatccgccacctgcgccgtcttctcgacaacctcggcagcgtcgaccaacaattccgccaactccagcacaacggcctgcaggcagaaaacgaccgcatgggcgacacccgcatcgccgccctcgaaaccggcagcctcaaaaacacctggcaggcaatccgtccgcagctaaacctcgaatcaggcgtattccgccatgccgtccgcctgtcccttgtcgttgccgccgcctgcaccatcgtcgaagccctcaacctcaacctcggctactggatactgctgaccgcccttttcgtctgccagcctaactacaccgccaccaaaagccgcgtccgccagcgcattgccggtaccgtactcggcgtaatcgtcggctcgctcgtcccctactttaccccctccatcgaaaccaagctttggatcgtcatcgccagtaccaccctctttttcatgacccgcacctacaaatacagtttctccaccttcttcattaccattcaagccctgaccagcctctccctcgcaggtttggacgtatacgccgccatgcccgtgcgcatcatcgacaccattatcggcgcatcccttgcctgggcggcggtcagctacctatggcccgactggaaatacctcacgctcgaacgcaccgccgcccttgccgtatgcagcaacggcgcctatctcgaaaaaatcaccgaacgcctcaaaagcggcgaaaccggcgacgacgtcgaataccgcgccacccgccgccgcgcccacgaacacaccgccgccctcagcagcaccctttccgacatgagcagcgaacccgcaaaattcgccgacagcctgcaacccggctttaccctgctcaaaaccggctacgccctgaccggctacatctccgccctcggcgcataccgcagcgaaatgcacgaagaatgcagccccgactttaccgcacagttccacctcgccgccgaacacaccgcccacatcttccaacacctgcccgaaaccgaacccgacgactttcagacagcactggatacactgcgcggcgaactcgacaccctccgcacccacagcagcggaacacaaagccacatcctcctccaacagctccaactcatcgctcggcagctcgaaccctactaccgcgcctaccgacaaattccgcacaggcagccccaaaacgcagcctga

SEQ ID NO: 49618 - DNA, 1056 bp, Neisseria meningitidis; identical to SEQ ID NO: 38662

SEQ ID NO: 49619 - DNA, 957 bp, Neisseria meningitidis; identical to SEQ ID NO: 39752

SEQ ID NO: 49620 - DNA, 492 bp, Neisseria meningitidis; identical to SEQ ID NO: 39850

SEQ ID NO: 49621 - DNA, 963 bp, Neisseria meningitidis; identical to SEQ ID NO: 39603

SEQ ID NO: 49622 - DNA, 447 bp, Neisseria meningitidis; identical to SEQ ID NO: 39246

SEQ ID NO: 49623 - DNA, 600 bp, Neisseria meningitidis; identical to SEQ ID NO: 39034

SEQ ID NO: 49624 - DNA, 462 bp, Neisseria meningitidis
atgaccgaagtcatcgcctacctcatcgaacatttccaagatttcgatacctgtccgccgcccgaagacttgggtatgctgcttgaagaagcgggtttcgatacgatggaaatcggcaacaccctgatgatgatggaagtattgctcaacagctccgaattttccgccgaacctgccgacagcggcgcattgcgcgtgtacagcaaagaagaaaccgacaacctgccgcaggaagtgatggggctgatgcagtatctgattgaagaaaaagccgtcagctgcgaacagcgggaaatcatcatccacgcgctcatgcacatccccggcgacgaaattaccgtagataccgccaaagtgctgaccctgctgcttttatgggcaaacaagagcgagctgcccgtgttggtcggcgacgagctgatgagtgcgcttttactcgacaacaaacccacgatgaactga

SEQ ID NO: 49625 - DNA, 492 bp, Neisseria meningitidis
atgaaataccgtcgtttttaccgcaatggcggcacttacttttttacggttgtaaccaataaacggcagaagattttgaccgatgatgcggtgcgtttggctttgcggcaggcggtaatggcggtgcgcgaacggtatccgtttgaaattttggcatgggtgttgatgcccgaccatctgcataccatatggcggctgccggacaatgattctgcttattcggaacgctggcggcaaatcaagcggcacagccaatatttaatcggcggcaatctcaggctttggcaaaaacgcttttgggaatatactatccgcgatgaggccgattttgcctggcattttgattatctgcatttcaatccagtcaaacatggctatgtaggacaaatttccgattggcggttttctacgtttcaccgttatgtcaaacagggtatttatccgcataattggggtggcggcaatgcggacttttctattggatacgattga

SEQ ID NO: 49626 - DNA, 1254 bp, Neisseria meningitidis; identical to SEQ ID NO: 39319

SEQ ID NO: 49627 - DNA, 423 bp, Neisseria meningitidis
atggaatgggtgtctttattttctgatccgcaaagagacgatgatagtcttataacccttaaagatgaaaaaatcactgtaaaaaactatattgtgccttggtggaaaaaaggtgaaaactttagaaaattagaacttattacccctggtaaaaatgataatggaaatttaacggtaaatggaatttacggcatccaatcttttgcagacccgcaattaggatatacgcctgaattatcggtgaaaagcaataatgatattctatttaaaaataatctccaatctgttgacgtgaagccccattccggaaatatccatttggatgccaaaggaaaaattcaatttaatttgaatgttcccaatgttgatggggtacaagatgtagccagtggaaaaaaataccgacaaacaatagtgccttag

SEQ ID NO: 49628 - DNA, 750 bp, Neisseria meningitidis; identical to SEQ ID NO: 39066

SEQ ID NO: 49629 - DNA, 285 bp, Neisseria meningitidis; identical to SEQ ID NO: 38872

SEQ ID NO: 49630 - DNA, 651 bp, Neisseria meningitidis
atgatttcagttgaacacgtttccaaacgctatctgacccgccaaggttggcggacagtcttgcacgatattagcttcaaaatggagaagggcgagaaaatcggtattctcggccgcaacggtgcaggtaaatcgacgctcatccgtttgatcagtggcgttgagccgccgaccacgggtgaaatcaagcggacaatgagtatttcttggcctttggcattctccggtgcgtttcaaggcagtctgaccggtatggacaatttgcgtttcatctgccggatttacaatgtcgatatcgattatgtgaagaactttaccgaagagttttccgagttggggcaatatctttacgagccggtcaagcgttattcttcaggtatgaaggcgcgtttggcatttgctttgtcgttggcggtagagtttgattgctatctgattgacgaagtgattgcagttggcgactcgcgctttgccgataaatgtaagtacgagttgtttgaaaagcgcaaagaccgttccatcatcttggtgtcgcacagccacagcgccatgaagcaatattgcgataatgcgatggtgctggaaaaagggcatatgcaccagtttgaagatatggacaaagcctacgaatattataattcgctaccttaa

SEQ ID NO: 49631 - DNA, 1368 bp, Neisseria meningitidis
atgcctgaccttcataccgaattttcccgactcctgccggcagatgaaattgccgaactttctccgacgcttttaaaagaccagcgcaaccgctttacgtctgcaccagacatcattttgcagccgcgcagcgttgaaagcgtgcaaaccattatgcgtttttgttacgaacaccgtattccggttacgccgcaaggcggcaataccggtttgtgcggcgcggcagtatcggaaaacggcgtattgctgaacctttccaaactcaaccgcatccgcagcatcaatttgtcagacaactgcataaccgtcgaagcaggttccgtactccaaaccgtccaacaggcagccgaagcctcaaacaggctgtttccactcagtctcgccagcgaaggctcgtgccaaatcggcggcaacatcgcctgcaatgccggaggtttgaacgtattgcgttacggcacgatgcgcgacctggttatcggtttggaagtcgtcctccccaacggcgaacgggtttcccatctccatcccctgcataaaaacaccaccggctacgacctgcgccatctgtttatcggcagcgaaggcacactgggcatcatcactgccgccacactcaagctttttgcccgtccctcggacaaggcaacggcatgggtcggcatacccgacatcgaatccgccgtccgcctgctgaccgaaacccaagctcactttgccgaacgcctatgcagttttgagctgatcggccgttttgccgccgagttgtcttccgaattcagcaaattccccctgccgacacattcagaatggcatattttacttgagttgaccgactcattacccgacagcaatcttgatgatcggctcgtcgaatttctttataaaaaaggatttaccgacagcgtattggcacaaagcgaacaagaacgtatccatatgtgggcattgcgcgaaaacatctccgcctcccaacgcaaactgggcaccagcatcaaacacgatattgccgttcctatcggacgcgttgccgactttgtccgccggtgcgccaaagatttggaacagaattttaaaggcatacaaatcgtctgcttcggacatcttggcgacggcagcctgcactacaatactttcctgcccgaaatcctcagcaatgaagtctatcgttacgaaaacgacatcaacgacgcagtttatcgcaacgttcttgcctgcaacggcacgattgccgccgaacacggcataggtatcatcaaaaaacagtggctggacaaagtacgcacgcctgccgaaatcgccctgatgaaaagcatcaaacaacaccttgatccatataacattatgaatccgggcaaactgcttccgtaa

SEQ ID NO: 49632 - DNA, 615 bp, Neisseria meningitidis
atgaacttcacccgactgctcaaccaagtcttaagcacggttcaaaaaaaaggcaacacattctccgacagcccgctcaattcattcggcggaggcgcgctggttgccggtgtcgcctccatgctgctgaacggtaaaaaccgcaaaaccatcaccaaaatcggttcgaccgccgctttgggctacctcgcctaccggggctatcagatgtggcagcaaaacaaagggcgggcaaccgtaacacaaagcgatttccaacctgccggagaaactgaagaaacatacagccgcaccgtattgcgcaccatgatagccgccgccgcttcagacggcatgatagacgaagccgaacgccggactatcgaacaggaaagcggcacagaccccgaaactgccgcatggctcgccgccgaataccgcctgcccgcaagcatcggggacatcgccgccgccgtcggcaacgatgaggcgttggcggcggaggcctatctggcggcaaggttggtctgtgccgatttgtcgcggaaagaaaccgtcttcctcgcccgcctgtcgcaggctttgaaactggatgacaatctggtggagagtttggaaaggcaattggggttttga

SEQ ID NO: 49633 - DNA, 435 bp, Neisseria meningitidis; identical to SEQ ID NO: 39366

SEQ ID NO: 49634 - DNA, 324 bp, Neisseria meningitidis; identical to SEQ ID NO: 38414

SEQ ID NO: 49635 - DNA, 618 bp, Neisseria meningitidis
atggtcattgcagccattatggcgatgatagccctccccaatatgagccaatggattgcatcccgccgcattgccagtcacgcggagcggattgccaaccttttgcgtttctccaggggcgaagccgtccggctcaatctccctgtctatatctgtcctgttcaagttaaaaaaggcggtacggtcaacaataaatgtgactccggcaagaaggggcagggaatgttggctttcggcgacaaaaacggcaataagggatatgacaatgatacggcggatgttcttctccgcagtgtggtattgaatgatgatatcaatgataagcggattaattatgccttcaaccatatcgcttttggtcagactcagccgaccaccgaccgtgtagtttggacattcaatcaaaacgggacgttcggttatacgaaagaccagcatcttacaaaacaatccagctttttttattccgacggttatatccaaatcgtgctgacagatgcgagagcagtttcagatgccgataagaaattccgttcggcggtggttttgattgacagcagcggcagggttgaggtttgtcctagaaacgataggcgtaccgtatgccaatataaatga

SEQ ID NO: 49636 - DNA, 897 bp, Neisseria meningitidis; identical to SEQ ID NO: 38955

SEQ ID NO: 49637 - DNA, 924 bp, Neisseria meningitidis; identical to SEQ ID NO: 39069

SEQ ID NO: 49638 - DNA, 867 bp, Neisseria meningitidis; identical to SEQ ID NO: 38666

SEQ ID NO: 49639 - DNA, 1335 bp, Neisseria meningitidis
atgtcgcccgaacattcggcgcaacttcaggcgtttgaggcaaaaatcctgtccaatcacgccaaaatcgaggcgtggttccgcacgcagtggagcgtacaccgcccgccgttttacggttcggtcgatatacgcaatgccggttacaaaatttcgtctatcgatatgaatttgttccccggcggcttcaataatctgaatcccaactttatcccgctggcggcggttgccgcgcaagatgcggtgcaacgcgcctgtgaaacggcgaaatccgtattgattattcccgaaaaccacacgcgcaatacgttttacctgcaaaacgtttacgccctcggcgagattttgtgttcggcagggtatgaagtgcgcttgggcagcctgaatccggaagtaaccgaaccgaccgaatttgaaaccgcattgggcgacaaaatcctgttggaacctttattgcgtacccgcgaccgcgtccatcttgcagacggcttttcgccttgcgtggttttgttgaacaacgatttgtccgccggtattcccgacatcctcaaaggcatcagccaaaccgttttgccgccgttgcacggcggttggacgacgcgccgcaaaacaaatcatttcggcgcgtacaaccaagttgccgccgaatttgccaagttaatcggcatcgacgaatggcaaattaacccttattttgaaaaaatcggcggtttggacttccaagggcgtgaaggcgaagacgcgttggcggaggcggtagaacgtgtgctggcgaaaattcaagccaaatacgacgaatcgggcattaccgacaaacctttcgtcatcgtcaaagccgatgccggcacttacggcatgggcgtgatgagcgtcaaatccgccgacgaagtgcgcggattgaaccgtaaaaaccgcaataaaatggcgaaagtcaaagaaggtttggaagtcagcgaagtgattgtccaagaagggatttatacttatgaaaccttaaacagcgcggtgtgcgaacccgtcgtgtatatgatggaccgcttcgtcatcggcggctttttccgcgtacacgaagggcgcggtgcggacgaaaacctcaacgccggcggtatggtgtttgttccgctgtctaacagcattcctaccggtaacggcgataattcccaagaagcgcccgaagcctgcaagcgcgtattcgaacaatgggactcgctgggtatgccgcgctctgaaaaagactgcgacgtggacaacgaacacaaccgcctctacgtttacggcgtaatggcacgcctgtcgcttctggcggcttcaatcgagttggaagaaacggcgtaa

SEQ ID NO: 49640 - DNA, 933 bp, Neisseria meningitidis; identical to SEQ ID NO: 38585

SEQ ID NO: 49641 - DNA, 747 bp, Neisseria meningitidis; identical to SEQ ID NO: 38161

SEQ ID NO: 49642 - DNA, 312 bp, Neisseria meningitidis; identical to SEQ ID NO: 39058

SEQ ID NO: 49643 - DNA, 633 bp, Neisseria meningitidis; identical to SEQ ID NO: 39614

SEQ ID NO: 49644 - DNA, 759 bp, Neisseria meningitidis; identical to SEQ ID NO: 39453

SEQ ID NO: 49645 - DNA, 324 bp, Neisseria meningitidis; identical to SEQ ID NO: 38702

SEQ ID NO: 49646 - DNA, 615 bp, Neisseria meningitidis; identical to SEQ ID NO: 36682

SEQ ID NO: 49647 - DNA, 558 bp, Neisseria meningitidis; identical to SEQ ID NO: 45463

SEQ ID NO: 49648 - DNA, 783 bp, Neisseria meningitidis; identical to SEQ ID NO: 38714

SEQ ID NO: 49649 - DNA, 447 bp, Neisseria meningitidis; identical to SEQ ID NO: 38915

SEQ ID NO: 49650 - DNA, 294 bp, Neisseria meningitidis; identical to SEQ ID NO: 38787

SEQ ID NO: 49651 - DNA, 249 bp, Neisseria meningitidis
atgctgaccccggaacaagtaaaagccatgattgaagacgtggcaaaatgcgaacatatcaaagtagaaggcgacggacaccattttttcgccgtcatcgtttcatcagaatttgaaggcaaggcacgcctcgcgcgccaccgcctgattaaagacggactcaaagcccaactggaaagtaacgaactgcacgcactttccatttcggttgccgccactccggcggaatgggcagccaaagcacaataa

SEQ ID NO: 49652 - DNA, 906 bp, Neisseria meningitidis; identical to SEQ ID NO: 38587

SEQ ID NO: 49653 - DNA, 372 bp, Neisseria meningitidis; identical to SEQ ID NO: 39755

SEQ ID NO: 49654 - DNA, 1194 bp, Neisseria meningitidis; identical to SEQ ID NO: 38586

SEQ ID NO: 49655 - DNA, 570 bp, Neisseria meningitidis; identical to SEQ ID NO: 45138

SEQ ID NO: 49656 - DNA, 519 bp, Neisseria meningitidis
atgactacgcattttgtcgttatgggcgtatgcggctgcggcaagaccaccgccgcgctgtccctgcagaaacacctcggtcaatgtccctatgccgaaggcgacgagttccacacccaagccaaccgcgacaagatgggcgcgggtattccgctgaccgatgaagaccgctatccgtggttgggcaatctgcgcgactggatgacgcaacaggcgcaaaacggtgcgaaccacaccatcgtaacctgttccgccctcaaacgcggctaccgcgacattctgcgcggagccgaaggcaaagctgccttcatccacctcagtccgccgcaagacgtcaacctcgagcgcatgatgtcgcgcaaaggacattacatgaaagcagggatgctcgattcgcaactggaaatcctcgaggaactgggcgaaggcgaatacggggtcaaaatcgccaaccccggcacgcccgaagcggtcgaagccgatattctgaactgggttgcctcggaaaacctgctttga

SEQ ID NO: 49657 - DNA, 348 bp, Neisseria meningitidis; identical to SEQ ID NO: 39706

SEQ ID NO: 49658 - DNA, 1074 bp, Neisseria meningitidis
atgcgcccgttttgcgtcggcgcgacagtgcttgccatactcggcgcgttggtgtttttcatcagccccggtgtcgtcgtcctgcaccgccaaatcttcttagaactcatgctgcctgcagcatatggtggtttcctgactgcggctttgttggactggacgggtttttcgggcaacctgaaacctgccactactttgatggcggtgttgttgcttgttgcggctgttttattgccgtttttaccgcaacttgccgcattctttgtagcggcttattggctggttttattgctgttctgcgcttggttgatttggctggcccgcaacacggataacttcgccctgctgatgctgcttgccgcgttcaccgtttttcagacggcatacgcggcaaccggcgacttgaacctgttgcgcgcgcaagtgcatttaaatatggctgcggtgatgtttgtttccatacgtgtgagtgttttgctgggcgcggaagcccttaaagaatgccgtctgaaagaccccgtattcatccccaacatcgtctataaaaacatcgccatcaccttcctgctgctgcacaccgccgccgaactttggctgcccgcgcagaccgccggttttaccgcgctcgccgtcggctttatcctgcttgccaaactgcgcgaactgcaccatcacgaactcctgcgcaaacactacgtccgcacttattacctgctccagctctttgccgccgcaggctatttgtggacaggcgcggcgaaactgcaaaacttacctgcctccgcgcccctgcacctgattaccctcggaggcatgatgggcggcgtgatgatggtgtggctgaccgccggactgtggcacagcggctttaccaagctcgactaccccaaactctgccgcatcgccgtccccatccttttcgccgctgccgtttcgcgcactgttttaatgaacgtgaacccgatattcttcatcaccgtccccgcgattctgaccgtcgccgtgtttgtgctttatctctttacgttcgtaccgatctttcaggcaaatgcgtttacgggcgatccggaataa

SEQ ID NO: 49659 - DNA, 384 bp, Neisseria meningitidis; identical to SEQ ID NO: 38550

SEQ ID NO: 49660 - DNA, 642 bp, Neisseria meningitidis
atgaccgatttccgccaagatttcctcaaattctccctcgcccaaaatgttttgaaattcggcgaattcaccaccaaagccggacggcggtcgccctatttcttcaatgccggcctctttaacgacggcttgtccacgctgcaactggcaaaattttacgcacaatccatcattgaaagcggcatccgattcgatatgctgttcggccccgcctacaaaggcattattttggcggcggcaaccgcgatgatgctggcggaaaaaggcgtgaacgtcccgtttgcctacaaccgcaaagaagccaaagaccacggcgaaggcggcgtgttggtcggcgcgccgcttaaagggcgcgtgctgattatcgacgacgtgatttccgccggcacatccgtacgcgaatcgatcaaactgattgaagcggagggtgcaacccccgccggtgtcgccatcgcgctcgaccgcatggaaaaaggcacgggtgaattgagcgcggttcaggaagtggaaaaacaatacggtctgcccgtcgcccccatcgccagcctgaacgatttgtttattctgttgcaaaacaaccccgaattcggacagttcctcgaacccgtccgagcctaccgtcggcagtacggcgtagaataa

SEQ ID NO: 49661 - DNA, 606 bp, Neisseria meningitidis; identical to SEQ ID NO: 39329

SEQ ID NO: 49662 - DNA, 588 bp, Neisseria meningitidis; identical to SEQ ID NO: 39526

SEQ ID NO: 49663 - DNA, 1170 bp, Neisseria meningitidis; identical to SEQ ID NO: 39234

SEQ ID NO: 49664 - DNA, 300 bp, Neisseria meningitidis; identical to SEQ ID NO: 44211

SEQ ID NO: 49665 - DNA, 1311 bp, Neisseria meningitidis; identical to SEQ ID NO: 40125

SEQ ID NO: 49666 - DNA, 1239 bp, Neisseria meningitidis; identical to SEQ ID NO: 38584

SEQ ID NO: 49667 - DNA, 210 bp, Neisseria meningitidis; identical to SEQ ID NO: 39306

SEQ ID NO: 49668 - DNA, 1554 bp, Neisseria meningitidis; identical to SEQ ID NO: 39330

SEQ ID NO: 49669 - DNA, 540 bp, Neisseria meningitidis; identical to SEQ ID NO: 44661

SEQ ID NO: 49670 - DNA, 285 bp, Neisseria meningitidis; identical to SEQ ID NO: 38289

SEQ ID NO: 49671 - DNA, 1713 bp, Neisseria meningitidis; identical to SEQ ID NO: 39377

SEQ ID NO: 49672 - DNA, 1197 bp, Neisseria meningitidis; identical to SEQ ID NO: 39690

SEQ ID NO: 49673 - DNA, 324 bp, Neisseria meningitidis; identical to SEQ ID NO: 36328

SEQ ID NO: 49674 - DNA, 348 bp, Neisseria meningitidis; identical to SEQ ID NO: 38212

SEQ ID NO: 49675 - DNA, 231 bp, Neisseria meningitidis; identical to SEQ ID NO: 39550

SEQ ID NO: 49676 - DNA, 876 bp, Neisseria meningitidis; identical to SEQ ID NO: 39479

SEQ ID NO: 49677 - DNA, 684 bp, Neisseria meningitidis; identical to SEQ ID NO: 38389

SEQ ID NO: 49678 - DNA, 780 bp, Neisseria meningitidis; identical to SEQ ID NO: 39156

SEQ ID NO: 49679 - DNA, 492 bp, Neisseria meningitidis; identical to SEQ ID NO: 39111

SEQ ID NO: 49680 - DNA, 348 bp, Neisseria meningitidis
atgtatgaacctcctgatgagtttggaacagaatattatgaatctcccgactcaaatttactcatttccgtcgaaaaaaacaaaattatttcgatattttgttatcaggagctatattttatgggcgttaatataataggtctgaattttgaagattttaaacagcttttccatcaccctaaatcatacggtgttgataaatattatttatcaaatgaatcttatccgacatatgtctatgagtttgatgaaataggagtacaagcttgggaagcaaaagggaaaattgttactatcattgccgggggcaaagacaattattcgacagaaccttactacgatgaataa

SEQ ID NO: 49681 - DNA, 1059 bp, Neisseria meningitidis; identical to SEQ ID NO: 39445

SEQ ID NO: 49682 - DNA, 822 bp, Neisseria meningitidis; identical to SEQ ID NO: 39389

SEQ ID NO: 49683 - DNA, 675 bp, Neisseria meningitidis; identical to SEQ ID NO: 38475

SEQ ID NO: 49684 - DNA, 2604 bp, Neisseria meningitidis; identical to SEQ ID NO: 39803

SEQ ID NO: 49685 - DNA, 960 bp, Neisseria meningitidis; identical to SEQ ID NO: 39447

SEQ ID NO: 49686 - DNA, 462 bp, Neisseria meningitidis
atgtctgatttttcccccatttcccgatttcttgccgacgaagccgccacactcgatttgggcgcggcgtggtcttcccgtttaaacgcaccgctggtcatttatctcgaaggggatttgggtgcgggcaaaaccacgctgacacgcggcatcctgcgcggattgggtcatcagggcgcagtcaaaagcccgacctacgccatcgtcgaatcttatccgctggaacgcttcaccctgcaccatttcgacctctaccgcttctcgttccccgaagaatgggaagacgcggggcttgacgaactgtttgccgcaaacagcgtctgcctgatcgaatggccgcaacagggaggcgaatttaccccgcccgccgacatcaccgcaacattgacacacgacggcggcggcagaaaatgcctgctgaccgcccataccgaacgaggacgcgaaagcctgccgctatga

SEQ ID NO: 49687 - DNA, 297 bp, Neisseria meningitidis; identical to SEQ ID NO: 39169

SEQ ID NO: 49688 - DNA, 1842 bp, Neisseria meningitidis; identical to SEQ ID NO: 39934

SEQ ID NO: 49689 - DNA, 450 bp, Neisseria meningitidis; identical to SEQ ID NO: 38501

SEQ ID NO: 49690 - DNA, 1977 bp, Neisseria meningitidis
atggaatatatggatctcaaaagcctgcttaattttgggttgccaaatatgccaagaacagtaatagggctgagaaaaaaagcgcaaagggatggttggcaaacgagaaggcgtcaaggtaagggtggtggtgttgaatatgccctccctgccgaaatccgagcagccatcatgaaacggcagtcggacgagctggcggagaagatgccgaaaaccctgccccaagtcagaccggggacggcgatgtcggctcaggcactggctgaagcggccaagctgttgaacgagaaacaacggtcggtggcggatgcgcgatgtgcggtggtggcggcggtattggggattaaatacgaatacgattgctctgccaaggctgcggtggctcagtttttgggcttgctggcagaaggtaaattggacgcggtcacgcttgggaacttggaaaaggccaatgaccgcagccggtcggcgaaggttggcgaacgtactttagacggctggatttctgcttatttgaaagcggaaaacgcgacagagcggttggttgctttggctccgaagacgacgaaggcggttaagccgattgagagctacggttggttgccgatgtttatgcagtttcacagtatcccatccgagccgaaactggcgcacagctaccgccggtttgtgcagtgggcggaagcggaaaatatgccggtcaatgatgtgcctagcttgagtatggtgcggcgcgtttggggcaagctgccgctgattatgcaggagcgtggcaggaaaacgggggcggcttataaatcgctgctgccttatgtgaaacgtgattggggggctttgaagccgaacgatgtttggatcggcgacggccacagctttaaggcgaaggtggcgcaccctgtacacggcagaccgtttaagccggaagtgacggtgattattgatggttgtacgcggtttgtggtcggtttttcggtgtcgttggctgaaagttgtgtggcggtatcggatgctctgcgtatcggggtcaagcactttggtttgccgattatctactactcggataacggcggcggccaaatcggcaagacgatagaccatgaaatcacgggtatcacgtcccgactgggtatccggcatgaaacgggtatcgcgggcaacccgcaagggcgcggcatcattgagcgatggtggaaagacaatctgattgagatggcgcgacagtatgagacgtttacgggcgcggggatggacagcagcacgaagaacctgatgtaccgcaagatggaaagtgcttttaatgctttggaaaaaggcaaggatttgacggaggaacaacagaaatatttgaaaaaactgccgagctggtcgcgctttatcgcggatgtggccaagtgtatcgacgaatacaacaaccgcccgcacggcgagctgccccgacatcctgacggcgggcattattcgccgaaggcttatcgggaaatgaggctggaacaggacggtatcgcgccggatatgttgtcggcagaagagctggcgacgatgtttatgccgcaagaggtgcgaaaggtacagcgcggttggctggatttgttcaacaactcttatttctcaactgagctggcggagtatcacaaagacgaggtacgggtcagctacgatttgagcgatgcgtcggcggtcaatgtgtttgatatggacggcaagtttatcactaaggcgcaggccgacggcaatacccgcgaggctttcccgacggctcgtatcgaccaactggcggaaaaacgccgaaaaggcaaaatcaagcgggcggaaaatgcaatcaagctcgcaaacgcggaagtcaatccggcactggaacaggcggcagcttgggacgagctgggacatttgggcggaaacgacatcgaggcggagtatgcggtattgccgaaaacgggcacagacgattttgtgttgtttgaggcggatagaagttaa

SEQ ID NO: 49691 - DNA, 207 bp, Neisseria meningitidis; identical to SEQ ID NO: 39624

SEQ ID NO: 49692 - DNA, 330 bp, Neisseria meningitidis
atggatgtgcaaaaacaatatccctttgaaaccgtcgccgtatgcgtgctgccaaaccacattcacgccatttggacgctgccgcccgacgatgcggattattccctactccggcggctgattaaaaccaaattctccgcatattccccttatactaaaaacttatccgccggcaaacagcggcagcacgaacgcggtatttggcaacggcgtttttacggacacaccgtgcgcgacgaaacggatttgcagcgttgcgcggactacatccattctaatcctatcaaacaaaaaatgtcgcgtgctaaaacagaatcctgcaaaaaataa

SEQ ID NO: 49693 - DNA, 540 bp, Neisseria meningitidis; identical to SEQ ID NO: 44661

SEQ ID NO: 49694 - DNA, 627 bp, Neisseria meningitidis; identical to SEQ ID NO: 45676

SEQ ID NO: 49695 - DNA, 1467 bp, Neisseria meningitidis; identical to SEQ ID NO: 38295

SEQ ID NO: 49696 - DNA, 1155 bp, Neisseria meningitidis; identical to SEQ ID NO: 39789

SEQ ID NO: 49697 - DNA, 720 bp, Neisseria meningitidis
atggagaacatcatttatttcggcgacacggcgcgcgtgccttacgggacgaaatctaaggcgaccatcgaaaatttctcgatgcagattgtcgattttttattggaacacgatgtcaaggcgatggttatcgcgtgcaatacgattgcggcggtggcggggcagaaaatccgtcaaaaaaccggcaatatgcccgttttggacgtgatttccgccggcgcgaaagccgcgctggcaacgacgcgcaacaataaaatcggcattatcgccaccaatacgacagtcaacagcaacgcctatgcgcgcgccatccacaggaacaaccccgatacgctcgtccgcacgcaggccgcgccgctgctcgtccctttggtggaggaaggttggttggaacatgaagttacccgcctgaccgtatgcgaatacctcaaaccattgcttgcggacggcatcgatacgctggtgttgggctgcacgcactttcccttgctcaaacccttaatcggcagggaggcgcacaatgtcgcactggtcgattccgcgattacgactgccgaagaaaccgcacgcgtccttgcgcaggagggattactcaataccgacaacaacaatcccgactaccgtttttatgtcagcgatattcctttgaaattcagaaccatcggcgagcgttttctgggcaggacgatggagcagattgaaatggtgtctttgggttag

SEQ ID NO: 49698 - DNA, 408 bp, Neisseria meningitidis
atggaaattcgggcaataaaatatacggcaatggctgcgttgcttgcatttacggttgcaggctgccggttggcaggttggtatgagtgttcgtccctgtccggctggtgtaagccgagaaaacctgccgccatcgatttttgggatattggcggcgagagtccgccgtctttagaggactacgagataccgctttcagacggcaatcgttccgtcagggcaaatgaatatgaatccgcacaacaatcttacttttacaggaaaataaggaagtttgaagcctgcgggttggattggcgtacgcgtgacggcaaacctttgattgagacgttcaaacaggaaggttttgattgtttgaaaaagcaggggttgcggcgcaacggtctgtccgagcgcgtccgatggtaa

SEQ ID NO: 49699 - DNA, 1224 bp, Neisseria meningitidis; identical to SEQ ID NO: 39212

SEQ ID NO: 49700 - DNA, 789 bp, Neisseria meningitidis; identical to SEQ ID NO: 38837

SEQ ID NO: 49701 - DNA, 534 bp, Neisseria meningitidis; identical to SEQ ID NO: 45717

SEQ ID NO: 49702 - DNA, 1293 bp, Neisseria meningitidis
atggctgtcttcccactttcggcaaaacatcggaaatacgcgctgcgcgcgcttgccgtttcgattattttggtgtcggcggcatacattgctttgacagagaggacggaacgcgtcagaccgcagcgcgtggaacaaaatctgccgccgctgtcttggggcggcagcggcgttcagacggcatattgggtgcaggaggcggtgcagccgggcgactcgctggcggacgtgctggcgcgttcgggtatggcgcgggacgagattgcccgaatcacggaaaaatatggcggcgaagccgatttgcggcatttgcgtgccgaccagtcggttcatgttttggtcggcggcgacggcggcgcgcgcgaagtacagttttttaccgacgaagacggcgagcgcaatctggtcgctttggaaaagaaaggcggcatatggcggcggtcggcttctgaggcggatatgaaggttttgccgacgctgcgttcggtcgtggtcaaaacgtcggcgcgcggttcgctggcgcgggcggaagtgcccgtcgaaatccgcgaatccttaagcgggattttcgccggccgcttcagccttgacggtttgaaggaaggcgatgccgtgcgcctgatttacgacagcctgtatttccacgggcagcaggtggcggcgggcgatattttggcggctgaagtcgttaagggcggcacaaggcatcaggcgttctattaccgttcggacaaggaaggcggagggggcggcaattattatgatgaagacggcagggtgttgcaggaaaaaggcggcttcaacatcgagccgctggtctatacgcgcatttcttcgccgttcggctaccgtatgcaccccatcctgcacacttggcggctgcacacgggcatcgattatgccgcaccgcagggaacgccggtcagggcttccgccgacggcgtgattacctttaaaggccggaagggcggatacggcaacgcggtgatgatacgccacgccaacggtgtggaaacgctgtacgcgcacttgagcgcgttttcgcaggcacaaggcaatgtgcgcggcggcgaggtcatcggttttgtcggttcgacagggcgttcgacggggccgcacctgcattacgaggcacgcatcaacgggcagcccgtcaatcctgtttcggtcgcattgccgacacccgaattgacgcaggcggacaaggcggcgtttgccgcgcagaaacagaaggcggacgcgctgcttgcgcgcttgcgcggcataccggttaccgtgtcgcaatcggattga

SEQ ID NO: 49703 - DNA, 741 bp, Neisseria meningitidis; identical to SEQ ID NO: 38736

SEQ ID NO: 49704 - DNA, 1914 bp, Neisseria meningitidis
atgttgaatattaccttgccggacggctcagtccgccaatacgaatcccccgttaccgtggctcaaattgctgcgtctatcggtgccggtttggcgaaggcggcggtggcaggcagggtaaacggcaaattggtcgatgcgtgcgacccgattgttgaagattctgctgttcaaatcattactccgaaagatcaggaaggcatcgaaatcatccgccattcctgcgcccatcttgtcgggcatgccgtcaagcaactctatcctaatgcaaaaatggttatcggccccgtcattgaagagggcttttattacgacattgccacggaaaaaccgtttacaccggaagatgttgccgccattgaagcgcgtatgaaagaattgattgcccaagactatgatgtggtcaaaatcatgactccgcgtgcggaggcgattaaaatttttcaagagcgcggcgaagaatacaaactgcgcctgattgacgatatgcctgaagtggaagcgatggggatgtatcatcatcaggaatatgtcgatatgtgccgcggtccgcacgttccgaatacccgtttcctgaaaaacttcaaactgaccaagttggcgggcgcatactggcgcggcgacagcaacaatgaaatgctgcaacgcatatacggtacggcttgggcgacaaaagacgagttgaaagcctatattcaacgtatcgaagaagccgaaaagcgcgaccaccgcaaattgggcaagcaattggatttgttccacctgcaagacgaagcgccgggcatggtgttttggcatcctaaaggctgggctttgtggcaagtgattgaacagcatatgcgtaaagagctgaacgccgccggttataaagaggtcaaaacgcctcaaatcatggataaaaccttttgggaaaaatccggccattgggacaactacaaagataatatgttcgtaaccagttcggaaaaacgcgaatatgcggttaaaccgatgaactgtccgggtcatgttcaaatttttaacaacggtttgcgttcgtatcgagatttgccgatgcgtttggcggaattcggttcctgccaccgcaacgagccgagcggtgcattgcatggtctgatgcgggttcgtgggttcgtgcaggatgatgcgcatattttctgtaccgaagatcaaatcgtcagcgaggcccgtgcgttcaatgaattgttggttcgcatctacaaacagtttggtttccatgatgtatccgtcaagctttctcttcgccctgaaaaacgcgcaggttcggatgacgtgtgggataaggcagagcagggtttgcgcgaggcattgactgcctgcggcgtggaatggggcgaattgccgggcgagggtgcattttacgggcctaaaatcgaatatcacgtcaaagatgccttgggtcgttcttggcaatgcggtacattacaactggatttcgtcttgccggaacgcttggatgcagaatatgtaaccgaaaacaacgaccgcgcgcggcctgttatgttgcatcgcgccattttaggttctttggagcggtttatcggcattctgattgagaaccatgcaggctctttcccgttatggctggcgccggttcaattggtaattatgaatattaccgaaaatcaggcagattattgtcgggaagtggctgccaagttgcaggcggcaggattccgtgtcgaattggatttgcgtaacgagaaaatcggttacaaaatccgcgacaacagccaataccgtttcccttatcaaatcgttgttggcgataaagaaaagcaggaaaacaaagttgcggtacgccgcaaagcagaagacttgggttctttggatttagatgatttcattgcacaattgcagcaagaaatcactgatgccctcgtcaatcattaa

SEQ ID NO: 49705 - DNA, 342 bp, Neisseria meningitidis; identical to SEQ ID NO: 38375

SEQ ID NO: 49706 - DNA, 435 bp, Neisseria meningitidis; identical to SEQ ID NO: 39784

SEQ ID NO: 49707 - DNA, 441 bp, Neisseria meningitidis
atgccgaaagccaccttttacacgcacgttgcccaagttccgattttcacctgccgcctgattgcccgtgcgattcgggacggcggcaggatactggtgtggtccgattcgttcgggcggcttcaggaattggacaaaatgctttggcaatacgaagccgagagtttcattccgcacgaaatttgggaaatggaagaagccatgccgtctgaaccatccgtcctgcttgcctgcggcggcaatctgccccgaattcccgaaggcatgaccgttttgaacctgtccgacggtttttggaacaccgctccggtcttgcccgcgcgcgttttggaaatcgtcggcaacagcttggaagatctcgccgacgcgcgcgaacgctttaccgcttaccgccgaagcggttttgccatcgaacatcacggcatggagggcaaggcataa

SEQ ID NO: 49708 - DNA, 2058 bp, Neisseria meningitidis
atgcccgaacaaaaccgcatcctctgccgcgaactaagcctgctggcattcaaccgccgcgtgttggcacaggcggaagacaaaaacgtcccccttttggaacgcctgcgcttcctgtgcatcgtgtcgtccaatcttgacgagtttttcgaagtccgcatggcgtggctcaagcgtgaaaacaagctgcacccccggcgcaggctggacaacggcaaaatgccgtctgaaaccatcgccgacgttaccgaagcggcgcgctccctgatacggcaccagtacgacctgttcaacaacgtccttcagcccgagttggcgcgggaaagcatccatttttaccgccgccgcaactggacgggcgcgcagaaaaaatggatcgaagactatttcgaccgcgaactgctgccgatcctgacccccatcggactcgacccgtcccaccccttcccgcgaccgctgaacaaatcgctcaacttcgccgtcgaactcgacggcacggacgcattcggcaggccttcggggatggcgattgtgcaggcaccgcgcatcctgccgcgcgtcgttcccctgccgtccgaactgtgtggcggcggacacggcttcgtcttcctgtcgtccatcctccacgcccacgtcggcaaactcttcccgggcatgaacgtcaaaggctgccaccagttccgcctgacgcgcgacagcgacttgaccgttgacgaagaagacctgcaaaacctccgcgccgccatccaaaacgaactgcacgaccgcgaatacggcgacggcgtgcggctcgaagtcgccgacacctgtcccgcctacatccgcgactttctgctcgcgcaattcaaactgaccgccgccgaactctatcaggtcaaaggcccggtcaacctcgtgcgcctcaacgccgtccccgacctagtcaaccgccccgatttgaaatttcccacacacacgccgggcagactgaaagccttgggcaaaaccgcgtccatattcgatttggtgcgccaatcgcccatcctgctgcaccacccctaccaatcgttcgaccccgttgtcgaaatgatgcgcgaagctgccgccgaccccgacgtgcttgccgtcaaaatgacgatttaccgcaccggcacgcgttccgaactcgtccgcgccctgatgaaggcggcactcgccggcaaacaagtaaccgtcgtcgtcgaactgatggcgcgttttgacgaagccaacaacgtcaactgggcgaagcagctcgaagaggcgggcgcgcacgtcgtgtacggcgtgttcggctacaaagtccacgccaagatggcactggtcatccgccgcgaagacggcgtactcaagcgttacgcccacctcggcacgggtaactaccaccaaggcacatcgcgcatctacaccgacttcggcatcattaccgccgacgaacaaatcaccgccgatgtgaacacattgtttatggaaatcacaggcttgggcaaacccgggcggctgaacaaactctaccaaagcccgtttaccctgcacaaaatggttatcgaccgcatcgcacgcgaaaccgaacacgcaaaagccggcaaaccggcgcggattaccgccaagatgaattcgctcatcgaaccgaccgtcatcgaagccctgtatcgggcaagcgcggcaggcgtacaaatcgatttgattgtgcgcggtatgtgcaccttgcgcccgggtgtaaaaggcttgtccgaaaacatccgcgtccgctccatcatcggcaggcagctcgaacacgcgcgcgtgtattgcttccacaacaacggcgcggacgatacctttatctccagcgcggattggatggggcgcaacttcttccgccgcatcgaaaccgccgcgccgattgccgcgcccgaactcaaaaaacgcgtcatccgcgaaggtttggaaatggcactggcagacaatacgcacgcgtggctgatgcagcccgacggcggctatatccgcgccgcgcctgccgagggcgaaagcgaagccgacctgcaaaacgatttgtggacactgctcggaggctga

SEQ ID NO: 49709 - DNA, 1272 bp, Neisseria meningitidis
atgttccaatggctttatgatgtattgtggctgcttgcgccgatatggatacggcgttatttggacaaacgctccggaagtgccccggcatatcgggcgcatcgggacgagcgtttcggcaagccgtatccgaatcccgttaccggcgcggtttggatacacgccgtttcggtcggagaaacgcgtgccgcccagcccttgatacgcgagttgcggcagcgttttcccgatgcgccgctgctgatgacgcagatgaccccgacgggacgggaaaccgcgcaagttctgtttcctgatgcacaatgccgttatcttccgtatgacaaaaaaacgtgggtacggcagtttttgcgcgaacaccgcccgatgttcggcattttgatggaaaccgaaatctggcccaacctgatgacggagtgccggaaatcgggcgttccgctgtttttggcgaatgcgcggctgtcggaaaaatcgctaaacggttatctgaaagtccgccgcctgatccgtcctgccgccgcttcgctgacgggttgtctggcgcagacggaggcggatgcggcgcggttggcgaaattgggcgcggcatccgtgcaggtgtgcggcaataccaaatacgacctgatgccgtcggaacagatgaaaacgctggcggggcagtttgaaaaacgcatcggagaccggcaggttgccgtgtgcggcagcacgcgcgtttatcggggtgaagacgaggcggaaaaactgctggcggcgtggcaacaatatcgcggcgatgcgctgctggtcgtcgtgccgcgccatcccgagcattttcagacggtatttgaaacggcaaaacgcttcgggtttaaggttcagcggcgcagcgacggtttgccggtcgaacctgatacgcaggtgtggataggcgacagtatgggcgagctgtatgcgtattacttgtgcgccgatgtcgcttttgtcggcggcagtctggtcgattcgggctgtcagaacattatcgaaccgctttcctgcggcgttccgacgatattcggcttttcaacctacaatttttccgaagcctgctggcacgccttggcatcgggggcggcggttcaagtcgaatcggcggatgcgtggcgtgaagccgttgaaaaaaccttatcgtccaaggggggcggaatgcagatgcaggtgcgcgtggacggctttatcgcacaacatcgcggagcgggcgcgagaatcgccgaggcggtgcgggaagcggtatgcggacatcgggggcgatag

SEQ ID NO: 49710 - DNA, 2580 bp, Neisseria meningitidis
atgcgatacgacaaattaaccgccaaattccaacaggcccttgcagaagctcagagtttggcgttggctgcggacggcagctatctggaagcgggctttgtgctgaaagccctgcttgacgaccaaaacagcggtgctgccgcgctcttggctcatgcgggcgtgaacgtgccgcaggtgaaacagcgtttgcagcagcatttgaacagcctgccgaaagtgtccggccagggcggcgacattctgcccagccgcgaattgcaggcggtgttgaacctgatggacaaagccgcaaccaaacgcggcgatgcctatatcgccagtgaacttttcctgcttgccttggtgcagcagaacgatgcggccggcaaaattttgaaagaagccggcgcgaccgaacaaaacatcaatgccgcgattgacgcggtacgaggaggacaaaacgtgaacgatgccaatgccgaagaccaacgcgatgctttgaaaaaatatacgctcgatctgacccaacgcgcccgagacggtaagctcgaccccgttatcggccgtgacgacgaaatccgccgtgcgattcaggtattgcaacgccgtaccaaaaacaaccctgtgctgattggcgaaccgggcgtgggtaaaaccgccatcgtcgaaggtttggcacaacgcatcgtcaatggcgaagtacctgaatccctgcgcaacaaacgcctactggttttggacttggcggcattgattgccggcgcgaaataccgcggcgaatttgaagaacgcttgaaaggcgtgttgaacgacttggcgaaagacgacggcaacactctgattttcatcgacgaaatccatactttggtcggcgcaggcaaaaccgacggtgcgatggatgcgggcaatatgctgaaaccggctttggcacgtggcgaattgcactgtatcggcgcgaccaccttggacgaataccgccaatacatcgaaaaagacgcggcactcgaacgccgcttccaaaaagtattggttggcgagccaagtgtagaagacaccatcgctatcttgcgcggtttacaggagcgttatgaaatccaccacggtatcgatattaccgaccctgctatcgttgccgcagcggagttgagcgaccgctacattaccgaccgcttcctgcctgataaagcgattgatttgattgacgaagccgccagccgtgtcaagatggaaaaagaaaccaagccggaagcaatggacaaaatcgaccgccgtctaattcagcttcggatggaaaaggcgcacgttgaaaaagaaaaagacgatgccagcaaaaaacgtttggaactgatagatgaggaaatcgacggtttggaaaaagaatatgccgatttggacgaaatctggaaagccgaaaaagcaatttcagacggtgctgctaatattaagaaacaaattgacgaagtcaaaattaaaatcgaacaggcaaaacggcaaggcgatttggcactggcttcaaaattgatgtatgaagatttggagcatttggaaaaacagcgtgcagccgccgaacgggcagatacggacagcacaaaaccggcaaacaaactcttgcgtaataatgtcggcgcggaggaaatcgcagaggtggtttcccgtatgaccggcattcccgtatccaaaatgatggaaggcgaacgcgacaaactgctgaaaatggaagaagtattgcaccgccgcgtggtcggacaggacgaagccgtgcgtgccgtgtccgacgctatccgccgcagccgctccggtcttgccgatccgaacaagccttacggcagcttcctgttcttgggcccgaccggcgtgggtaaaaccgagttgtgtaaagccctggcaggctttctgttcgacagcgaagatcatctgattcgtatcgatatgtccgaatatatggaaaaacacgccgttgcccgcttaatcggcgcgcctccgggctatgtcggctacgaagaaggcggctacctgactgagcaagtccgccgcaaaccgtacagcgtgattcttttggacgaagtggaaaaagcccatcccgacgtgttcaacatcctgctgcaagtattggatgacggtcgtttgaccgacgggcaaggcaggacggtagattttaaaaataccgtgattgtgatgacttccaacatcggcagccagcacatccaacaaatgggcattcaggattacgaagcggtaaaagaagttgtgatggaggatgtgaaagaacatttccgtcctgaaatgatcaaccgcatcgacgaagtggtcgtgttccacggactggatcaggataatatccgcaacattgcgaaaatccagctcaaaggcttggaaaaacgtttggaaaaacaaaacctgcgcctgactgtttccgatgccgcactggacatcatcgccaaagccggtttcgacccgatttacggcgcacgtccgctcaaacgcgccatccagtcggaaatcgaaaacccgctggcaaaagccctgcttgccggaaactatgcgcccgaaagcgaaatcagggtagaagccgacggcgacagactgaaatttgcctga

SEQ ID NO: 49711 - DNA, 3204 bp, Neisseria meningitidis
atggctaaattttttatcgaccgccctatttttgcgtgggttatttcgattttcattattgcggcgggtattttcggcatcaaaagcctgcctgtttcgcaatatccgtctgtcgccgccccgaccattactttgcacgccacttatccgggtgcgtccgcgcaggtaatggaagacagcgtgctttccgtgatcgagcggaatatgaacggcgtggaaggtttggattatatgtccacttccgccgattcgagcggcagcggcagcgtgagcctgacctttacgcccgataccgacgagaatctggcgcaggtggaagtgcagaacaagctttccgaagtattgagcacgctgccggcaaccgtccagcaatacggcgtaaccgtatccaaggcgcgttccaatttcctgatgattgtgatgctttcgtcggatgtgcagtcaaccgaagagatgaacgactacgcgcagcgtaatatcgttcccgagttgcagcgtatcgaaggcgtggggcaggtacgtctgttcggcgcgcaacgcgcgatgcggatttgggttgatcctaagaaactgcaaaactacaatttgtcgtttgccgatatcggcagtgcgctgtccgcccagaacgtccagatttcagcgggttctatcggttcgcttcccgccgttcgcggacagacggttacggctaccgtaacggcgcaagggcagttgggtacggcagaagaattcggcaacgtcatcctccgcgccaataccgacggttctaatgtttacctgaaggatgtggcaagggtcggactgggtatggaagactattcttcctcaacccgtctgaacggtgtaaataccaccggtatggcggtgatgctgtccaacagcggcaatgcgatggcgacggcaaaggcggttaaagaacgcatggcgacgttggaaaaatactttcctcagggtatgagctggaaaaccccttacgatacttccaaattcgtcgaaatttcgattgaaaaagtgattcatactttaatcgaagcgatggtgctggtgtttgtcgtaatgtatctcttcctgcaaaacatccgttatacgctgattccgaccatcgtcgtaccgatttcgctgttgggcggtttcgccttcatctcttatatgggcatgtcgattaacgtactgaccatgtttgcgatggttttggtcatcggcatcgtggtcgatgacgcgattgtggtggttgaaaacgtcgagcgcattatggcgggtgaaggcttgccgcccaaagaagcgaccaaaaaagcgatgggtcagatttcgggcgcggtcatcggtattaccgccgttctgatttccgtgttcgtaccgttggcgatgttcagcggggcgacgggcaatatttacaaacagtttgccctgacgatggcgtcatcaatcgcattctccgccttccttgcgctgacccttacccctgctttgtgtgccacaatgttgaagacaatcccgaaagggcatcacgaagagaaaaaaggtttcttcggctggtttaacaagaaattcaacagttggacgcacggttacgaaggccgggttgccaaagtgctgcgtaagactttccgcatgatggttgtctatatcggcttggcggttgtgggcgtgttcctgtttatgcgtctgccgacttcattcctgccgaccgaagaccaaggcttcgtcatggtcagcgtgcaactgcctgcaggagcgacccaagagcgcaccaatgcgactttggcgcaagttacccaactggcgaaaagcattcctgaaatagaaaacatcattaccgtttccggcttcagcttttcgggcagcggtcagaatatggcgatgggttttgccatattgaaagattggaacgagcgtaccgcgcccggcagcgatgccgttgcgattgccggcaagctgacgggtatgatgatggggacgcttaaagacggttttggcatcgccgtcgtcccgcctccgattttggagttgggcaatggttcgggcctgagcatcaacctgcaagaccgcaacaataccggccataccgcattgctggcgaagcgcaacgagttgattcagaaaatgcgtgccagcggtttgtttgaccccagcaccgtccgtgccggcggtttggaagactcgccgcagttgaaaatcgacatcaaccgtgccgccgcggcggcgcaaggcatttcgtttgccgacatccgcaccgcattggcaagtgcgctgagttcgtcttatgtcagcgacttcccgaaccaaggccgtctgcaacgcgtgatggtgcaggccgacgaggatgcccgtatgcagcctgccgatattttgaacctgaccgtgccgaacaaatccggcgtcgccgtaccgctttccaccattgctactgtttcttgggaaaacggtacggaacagagcgtacgcttcaacggttatccttcgatgaagctgtccgcttcgcctgcaaccggcgtttccaccgggcaggctatggcggcggttcaaaaaatggttgacgaattgggcggcggttacagcttcgaatggggcggacagtcgcgcgaagaggcaaaaggcggctcgcaaaccctgattttgtacggtttggcggttgcagccgtatttttggtacttgccgcgctttatgaaagctggtcgattccgctggcggtcatccttgtgattccgttgggtttgatcggtgcggctgcgggcgtaaccgggcgcaacctgtttgaaggactgttgggcagcgttccctcgttcgccaacgacatctactttcaagtcggtttcgttaccgtgatgggtttgagtgcgaaaaacgcgattttgattatcgaatttgccaaagaccttcaagcgcaagggaaaagcgcggtcgaagctgctttggaagccgcccgcctgcgtttccgtccgattatcatgacctcgttcgcctttattttgggcgtggttcccctgtatattgccggcggtgcaagttctgccagccagcgcgccatcggcacgaccgtattctgggggatgctcatcggcacgctcttgtccgtgttccttgttccgcttttctatgtggtggtgcgcaaattcttcaaagaaaccgcgcacgaacacgaaatggcagtaaaacacgccgccgaagcgggcatcaccggttcggacgacagccaacattaa

SEQ ID NO: 49712 - DNA, 384 bp, Neisseria meningitidis; identical to SEQ ID NO: 38324

SEQ ID NO: 49713 - DNA, 894 bp, Neisseria meningitidis
atgattattgtcatgagcaggcgtgccgccgaagcggacattgccggcgttgtcgcctttatccgcagcagaggtctgcgagaacacatttctcacggcgacgagcgtaccgtcatcggcgcaatcggcgacgatagggttttgagcgtcagggaggtgcagacgctgccggaggtcgagaaagccgtccgcattttggatacatggaaaaccgtcagtcgggaaaatcgggcggaagacagccgcgttgccgccaaaggcgtggctttcggcggcggggaaaccgtctgtatcgccgcagaaccgtcagtatggcgcaatgcggatgcagtgtttctggatccgtttttcacttcggcaaacttatacgacacttcaagtgcggatgaagggcggggacggtgcagacggttggcggaacagaccgcatcggcgcatgatgcagggaaacccgtattggtgcgcgtccgcaacgtccgccatgtcgaagcggctttgaatgcgggggcggacatcctgtatttgggcggcgggctgatgtccgatcttgccgtattgaatgaagccggaaacctgaacattcccttggtgctgtgtaaagacaagcaccattctgccgaagattggttgaatgccgcagaatatgtcgtctcgcgcggcaaccgccacctgattctgggcgagtcgggcgtattgaaccataccaaaggccatccctaccgtttggatgtcgaatccatcgtgaaagtccgccaaatcagccatctgcccgtgattgcgaatattacgggattatggaaccgcgatatgccgcaggaaatcctgtacggcttggcaaaggcagcaggcgcgtgcggaatcgtcggaacctgttttgaaaagtcgggcggatag

SEQ ID NO: 49714 - DNA, 1050 bp, Neisseria meningitidis; identical to SEQ ID NO: 36439

SEQ ID NO: 49715 - DNA, 714 bp, Neisseria meningitidis; identical to SEQ ID NO: 38766

SEQ ID NO: 49716 - DNA, 1080 bp, Neisseria meningitidis; identical to SEQ ID NO: 43538

SEQ ID NO: 49717 - DNA, 123 bp, Neisseria meningitidis
atgaaaaaaggtcgtctgaaactgctttttcagacgaccttttttaatggttgtttcaaatcaaaatatctatgccgccggccccatcagcacttcttcacatccgaaggcaaaaatccgtaa

SEQ ID NO: 49718 - DNA, 567 bp, Neisseria meningitidis; identical to SEQ ID NO: 43197

SEQ ID NO: 49719 - DNA, 2226 bp, Neisseria meningitidis; identical to SEQ ID NO: 38398

SEQ ID NO: 49720 - DNA, 729 bp, Neisseria meningitidis; identical to SEQ ID NO: 38455

SEQ ID NO: 49721 - DNA, 465 bp, Neisseria meningitidis
atgcaaggcaatcaagctgttgttgattatatgaacgaattgctgtctggcgagctggcggcacgcgaccaatactttatccactcccgcctctactccgaatggggctacaccaaactttttgaacgtctcaaccacgagatggaagaagaaaccacacacgccgaagacttcatccgccgcatcctgatgctgggcggtacgccgaaaatggcacgcgccgaactgaatatcggcacggacgtggtttcctgcctcaaagccgacctgcaaaccgaatatgaagtacgtgatgcgttgaaaaaaggcatcaaactgtgcgaagaggctcaagactatgttacgcgcgacctgatggttgcccaactgaaagataccgaagaagaccacgcccactggctggaacagcagcttcgcctgatcgagttaattggcgaaggcaactactaccaaagccaactgtaa

SEQ ID NO: 49722 - DNA, 954 bp, Neisseria meningitidis
atgggttttctgattggtttgagccgcaacctgacgcggtttacggctttggtcattttgcttgcgtcggcggttgcgtttatcggaccggcttcgtttgcgtgggttaagggcgatgttcaggtcttggtgctgggcatcattatgctgggtatggggatgactttgggcagggaggactaccggattttggcgcagcgtcctttggatgtgtttatcggtgcggcggcgcaatataccgtgatgccgttgctcgccatcggtattgccaagctgttcgacctttcgccggggctgactttggggctggtgttggtggggacgtgtccgggcggcgtgtcgtccaacattatgagtttccttgccaaaggcgatgtggcgttttcagtcggtatgacgacggtgtctacggtgctggctccggccgttacgcctttgtggatgacctgcctggtcggtcagacggtggatatggacggttgggggatgttccggtttatgctgctggtcacgcttttgccggtggtgctgggttcggcggcaaatatcctgctgcacggaaaacattggtttgaaaatgtccgtgccgttatgccgggcgtggcggtattggcatttgcctgcattgtcggcggcgtggcttcggttcacggacaccgttttgccgaatcggcgttggtaatggtgttggcgattgcggtacacaatatcgccggctatgtgtcaggctattacgccgccgcgctgtttggtatggatacggcaaaaaaacgcaccttggcaatcgaagtcggcgtgcagaatgccggtttggcaacaggattgagcgcgaaatttttcccaggcaaccccgaatcggcggttgcggcggcggtcgcctgcgtgtggcattcggtttcggggacggtattgggcaacttgttcgctctgtgggacaagcgtcgggacgcttag

SEQ ID NO: 49723 - DNA, 1815 bp, Neisseria meningitidis; identical to SEQ ID NO: 38522

SEQ ID NO: 49724 - DNA, 1104 bp, Neisseria meningitidis; identical to SEQ ID NO: 39574

SEQ ID NO: 49725 - DNA, 2190 bp, Neisseria meningitidis
atgatctaccaccgcatcgccgtaaacgtgccgctttcagacggccttttgacttattcccattccgatccgcttcctccgggaacgcgggtgcttgtgcctttccgcaataaaaccgtggtcgggatggtgtgggaaacggatattgcgccggatatggatacggcgcggattttgagtattcagacgacctttttagacgagccgccgttgcctgaaagctggcgtgatttgctctcgtttacgtcgcgttattaccactatccgacggggcaggcggtgtttgccgcgctgccgcagggtttgaaggaaacgcgcgcggtggaaatgccgcagccgccgttgttttatgcgttgaacgaagcgggcagggcgcaaacgccgccgccggcgcggttcaacaaaaaagcggctttgtgggacgcgctgctttcgggcggaatgacgatggcagcgttgaagcaggtgaacgcgcaggcggcgaaattaatcgaagattggacggagcagggctggattgaaacggcggaagcggcgaaaccggttttaaggtcgtgccacgggcaggcttcgcacgccggatttgtgttgaacgccggccagcggcaggcttccgatgagattcagacggcattgggacggtttcagccgtttttgctgtacggcatcaccggcagcggcaagaccgaggtgtattttgatgcgatggcgaaagtgttggcgcaggggcggcaggtgttgtttctgttgcccgaaatcaacctcacgccgcagcttttgaagcgggtagaaaaccgttttgccgacgtgccgaccgccgtgttgcacagccagatggcggcaggcaggcgcacgcaggattatttgcgcgcgatgttggggcaggcgaagctggtgattggcacgcggttggcggtgttcacgccgatggatgatgtcgggctgattgtggtcgatgaggaacacgacggctcgttcaaacaggacaacgaattgcgctaccacgcccgcgatttggcggtgtggcgggcgaagcagggcggctgcccgatcatattgggcagtgccacccccagcttggagagctggcacaaggcgcaaagcggcgcgtaccgcctgctgcaactgaccgaacgcgcccataccgccgcgcaactgccgcaagtggacatcctcaacgtaggccgtctgaaacttgacaacggcttctcgccgcaagccttgcagcttttgaaacagaactttgaagcaggtggcatgtcgttggtgtacctcaaccgtcgcggcttcgcgcccgcgctgttttgcggcgactgcggttataccttcggctgcccgaactgctccgccaaaatggtgctgcaccaacgcgtccgccaactgcgctgccaccactgcgaccaccgcgaacccattccgttcaaatgccccgactgcggcaaccaagacctgaccgctgtcggccacggcacgcagcgcgtcgaagaaaccctgcgcgccttcctgcccaaggcagccgtcgtccgtgttgacagggacagcaccgcgcacaaaaacgactgggcggatttgtaccgccgcattgccgacaacgaaatcgacattctggtcggcacgcagatgctcgccaaaggccatgatttcgcgcggctcaacctcgttatcgtgttgaacgccgacggcagcctgtacagcgcggactttcgcgcgccggaaaggctgtttgccgagctgatgcaagtgtccggcagggcggggcgcgccgacaaacccggcaaggtgctgatacagacccagctgcccgaacatcccgttttcgccgccgtcaaagcgcaaaattacgccgtgttcgccgaaaacgaattgaacgagcggcaaatgttcgcgatgccgcccttcggtttccagaccgccgtccgcgccgatgcgccgcgtgttgccgatgcgatggaatttctcaacgccgccaaagaaaccctcgccccgctgttgcccgaaagcgtttcccagtttggcgcggctccgatgctgatggtgcgccttgccgaacgcgaacgcgcgcaaatcttcctcgaatcaacatcccgacaagatttgcaccgagccgtgagtttgtgggtgcaggtgttgcagcaaaacagggacggcaaaatccgatggtcggtggatgtcgatccgcaggaggcttga

SEQ ID NO: 49726 - DNA, 540 bp, Neisseria meningitidis; identical to SEQ ID NO: 44661

SEQ ID NO: 49727 - DNA, 1233 bp, Neisseria meningitidis
atgccttctgcccattatcctgaaatgagcgaaaaactgatggcggttttgatggcgatgctggttacgctgatgccgttttccatcgatgcctacctgcccgcgattcccgaaatggcgcagtcgctgaacgcggatgtccaccgcatcgaacagagcctgagtttgtttatgttcggcacggcgttcggacaggtggtcggcggttcggtgtccgacatcaaagggcgcaaacccgtcgcgctgaccggactggccgtctactgccttgccgttgccgccatcgtatttgcttcgagtgccgaacagctcctcaacctgcgcgtcgtgcaggcattcggtgcgggcatgactgtggtcatcgtcggcgcaatggtgcgcgattattattccggacgcaaagccgcccagatgtttgcccttatcggcatcattttgatggttgtgccgctggtcgcacccatggtcggcgcactgttgcagggcttgggtggctggcaggcgatttttgtttttctggcggcgtattcgctggtgctgctcggtttggtgcagtatttcctgcccaagcctgccgtcggcggcaaaatcggacgggatgtgttcgggctggtggctgggcggttcaaacgcgtattgaaaacccgtgccgcgatgggttatctgttttttcaggcattcagcttcggttcgatgttcgcctttctgaccgaatcttccttcgtgtaccagcagctttaccgtgttacgcctcatcaatacgcttgggcgtttgcactcaacatcatcacgatgatgtttttcaaccgcattaccgcgtggcggctcaaaaccggcgcgcatccgcaaagcatcctgctgtgggggattgtcgtccaatttgccgccaacctgtcccaactcgccgccgtgctgtttttcgggttgcctccgttctggctcttggtggcgtgcgtgatgttttccgtcggcacgcagggcttggtcggcgcgaacacgcaggcatgctttatgtcttatttcaaagaagagggcggcagcgcgaacgccgtgttgggcgtgttccagtccttaatcggcgcgggcgtgggtatggcggcgaccttcttgcacaacggttcggcaaccgtgatggcggtaaccatgaccgcgtccacctcttgcggcattgcgcttctgtggctgtgttcgcaccgggcgtggaaggaaaacgaacagagcgaatacttgtaa

SEQ ID NO: 49728 - DNA, 1674 bp, Neisseria meningitidis
atgcttctaacactttctttgcgtgattttgtcattgtcgaaaatctgaatctggattttcaaagcggctttaccgtattgaccggagaaactggcgcgggcaagtccattactttggatgcgattggtctgctgttgggcgataaagccgattacagccaagtccgcagcggcgcaaaagaagcgcagttgtcggcgttgtttgatatttcccatttacctgttttaaaagcagaattgtatgaacaggggcttttaaacgacggagaagaagaactcagtatccgccgcattatcgatgccaaaggcaaaagccgcagctttatcaacaatcaggccgctaccttggcgcaactcaaagccgtcggcagccagcttatcgacatccacgggcaaaacgcccatcattcgcttaatcaggaagccgctcagcgcgaattgttggacgcatttgcgggcagcagggcgcaggcggaaaccgtcaggcagctttatcaaaactgggcaaactcaaaaaaagcattgcaggaagcgcaggaacaggcagaaaacattgcactcgaacaagagcgtctggaatggcagtttaacgaattgaatcagttggacattaaacaaggcgaatgggaagccctcagccaaagccacgacagccttgcccattctgccgagctgttgcaggctgccgaagaagtcggaagcaagattgacggcgacaacggcatccaacgccatatctatcaatgtcaaaaactattggccaatctgcaaaacatcgagccgcgctttgccgagagcctgaatatgttggcaagcatcgaggccgaattgggcgaaatcagtgccaatatgcgcgatgtggcaggtcgcagcgacatcaaccccaatgaattggcggcacaggaacagcgtatgggcgaactgatggggatggcgcggaaataccggatcgagcctgaagagttgcctgccaagttggcagaaatcgaagaacgcctgcaaagcctgcaagctgccgccgatttggacgcgctcgagcataatgttgcccacaattttgccgaatatcaggaagctgcccacatcctttctgccatgcgccatcaggcggcagagcgtttgagcggcgaaacgaccgagcatatgcaacaccttgccatgaaaggtgcacgtttcgacatcgtcctgttgccctcgtcgccgacggcacacggtttggagcaggttcaatttcaagttgccgccaacaaaggcaatccgccccgtccgctgaataaagttgcctccggcggcgaattggcgcgtatcagccttgccttacaggttgttgccagccaatatacccaagttcccaccctgatttttgatgaggtcgataccggtattggagggggagtggctgaaatggtcggcaaggcattacgtgcgttgggcagaaaacatcaggtgcttgccgttacccatcttccgcaagtcgcatcctgcggcgaaaaccactggcgggtgcgcaagcacagcgagggagagcaaaccgtcagcgaaatcagtatattggatgaaatccaacgggtcgaagaggttgcccgtatgttgggcggagaagtcattaccgatacgacgcggcaacatgcggcagaattgctgcaacttgcgtcgaaaaatagtttattttaa

SEQ ID NO: 49729 - DNA, 309 bp, Neisseria meningitidis
atggttgaacgttacaaaaccatgattgccgaagcaaacggtaagattcaccgtttggaagattggggtcgccgccaactggcttacccgattaacaaaatccataaagcccattacgttttgatgaacatcgaaaccactcccgaagtggttgaagagctggaaaccgcattccgcttcaatgatgccgtattgcgccatctaaccatcaaaaccaaacacgccgttaccgaagcatcccctatgttgggtggtgaaaaggctaagaacctgttgagcggtgcgtctgaagaagcggtcgcccaataa

SEQ ID NO: 49730 - DNA, 1566 bp, Neisseria meningitidis; identical to SEQ ID NO: 38156

SEQ ID NO: 49731 - DNA, 378 bp, Neisseria meningitidis
atgctcgtaatggcggcaatcggcatcggcatgactgttttggtgtacggaatcgttgccgtcatcgtcaaactcgacgacttaggcatgctgctgatgcgccgcccacaaaccttttcgcgcagtttggggcaaatgctgactgcctttatgccttgctttatgcgcggtttgagcgtggtcggcacgcttgccatgtttcttatcggcggcgtactggtcgcccacaacctcggccttctgcacgatttcctgcacgcgcaacactgggacgctggctgggcggagtacttcgccaacctcgttgtcgggctgctttccggttcgattgcctgcgcccccgccttgccgctgatgaatcgtttcggcaggcattga

SEQ ID NO: 49732 - DNA, 825 bp, Neisseria meningitidis
atgaactgcaatacgccgaccgatattatgttttcctttgaaggcttccgccggcgcggcggcattaccgaccatcatgccgacggtttcggcatcggctttttcgaaggcaaaggcgtgcgcctgttccacgacgacaagccgagcgcaaattcccccgtcgccgacctcgtgcgtgcctaccaaatcaaatcggaaaacgtcatcgcacatatccgcaaagcatcgcaaggacaaacctcgctggcgaacacccatccctttatgcgcgaaatgtggggcggctactggctgtttgcccacaacggacatttgattgattttttccccgaacagggcgaatttttccaccccgtcggcacaaccgattccgaacgcgcgttctgccacatcctcaaccgcctgcgcacccgctttgccgcccgtcccgacgacgacacgctgtttgacgcgattgcggggctgacgcacgaaatccgcaagttcgggctgtttaactttatgctttcagacggcattgccctgtttgcccacgccagcacgctgctgcactacatcgtccgccaagccccgttcggcaaggcgcgcctgctcgacgacgacgtgatggtcgattttgccgaagtaaccacgccctccgaccgcgtcgccgttatcgccaccctgccactgacccgcgacgaatcatggtcccaacttgccgtggacgaactggtcatgttccgcgaaggcaacatcgtccgacacgaccgtcccgaaaaccccgtctatatgagtgccgaagaaggtctggaaatcgcccgcgccgccggcgtcgccgtctga

SEQ ID NO: 49733 - DNA, 672 bp, Neisseria meningitidis; identical to SEQ ID NO: 38297

SEQ ID NO: 49734 - DNA, 474 bp, Neisseria meningitidis
atggaacaaaaagggtttacattgattgagatgatgatagtcgtcgcgatactcggcattatcagcgtcattgccataccttcttatcaaagttatattgaaaaaggctatcagtcccagctttatacggagatggtcggtatcaacaatatttccaaacagtttattttgaaaaatcccctggacgataatcagaccatcaagaacaaactggaaatatttgtctcaggctataagatgaatccgaaaattgccgaaaaatataatgtttcggtgcattttgtcaataaggaaaaaccaagggcatacagcttggtcggcgttccaaagacggggacgggttatactttgtcggtatggatgaacagcgtgggcgacggatacaaatgccgtgatgccgcttctgcccgagcctattcggagactttgtccgcggatgccggctgtgaagctttctctaatcgtaaaaaatag

SEQ ID NO: 49735 - DNA, 501 bp, Neisseria meningitidis
atggcggatttgcagaaaacttttcaaacttcgttccgtgatgcgatggcatcttgtgcggcaggcgttcatgtcatcacgacagacggtgcggcagggcgttacggcattacaatgacggcggttacaccggttacggacgagccgccgaccgtgatgctgtgcatcaaccggagtgcgcgaatcattccgatcctgtcggaaaacggcagcctctgcatcaatacgctggcggacgaacatcaggatgttgccgaacattttgccgggctgaccgggctgtcgcccgaagagcggtttgcctaccacatctggcatcgcggcaaaacgggacaacttgaaatagagggcgcgttggcgcacctgcacgggcatattgtcggcaaacatgaaatcggcacgcattttgtgttttacgtcaggctcgacgaaatcaaaaactgcgggtgcaaacgccccgcgctgctgtatttcagacggcagtttagatttttagactga

SEQ ID NO: 49736 - DNA, 366 bp, Neisseria meningitidis; identical to SEQ ID NO: 38539

SEQ ID NO: 49737 - DNA, 1422 bp, Neisseria meningitidis; identical to SEQ ID NO: 38131

SEQ ID NO: 49738 - DNA, 3291 bp, Neisseria meningitidis; identical to SEQ ID NO: 38278

SEQ ID NO: 49739 - DNA, 564 bp, Neisseria meningitidis; identical to SEQ ID NO: 39293

SEQ ID NO: 49740 - DNA, 216 bp, Neisseria meningitidis; identical to SEQ ID NO: 38246

SEQ ID NO: 49741 - DNA, 780 bp, Neisseria meningitidis; identical to SEQ ID NO: 45214

SEQ ID NO: 49742 - DNA, 1407 bp, Neisseria meningitidis
atgaacgattacacagccatgccgtctgaagaccgtgagatcggcgcattgtcgcttccgccgcactcaatggaggcggaacaatccgttttgggcgggttgatgctggaaaatccggcatgggacaggattgccgatgtggtttcgggagaggatttctaccgccacgaacaccgcctgattttccgatccattgccaaattgattaatgagagccgtcccgccgatgtgattacggttcaggaagatttgcagcggaacgaagaattggaagcggcaggcggattcgaatacctgattacgctggcgcaaaacaccccgtctgccgctaacatccgccgctatgccgaaatcgtgcgcgagcgttccatcatgcgccagctcgccgaagtggggacggaaatcgcccgcagcgcctacaatccgcaaggcagggacgcggggcagcttttggacgaggcggaaaacaaagtattccaaatcgccgaaagcacggccaaatccaagcagggctttttggagatgcccgatttgctgaaagaagtcgtacagcgcatcgatatgctctactcgcgcgacaatcccgatgaagttaccggcgtgccgacggggttcatcgacctcgacaaaaaaacctcgggcctgcaacccggcgacctgattatcgtcgccggtcgtccttctatgggtaagaccgccttttctatcaatatcgccgaacacgttgccgtagaaggcaagctgccggttgccgtcttctcaatggagatgggcggggcgcaactggtcatgcgtatgctcggctcggtcggacggctggatcaaagcgttttgaaaaccggcaggctcgaagacgaacactggggtcgcctgaacgaagcagtcgtcaaactctccgacgcgcccgtgtacatcgacgagaccccgggtctgaccgcgctcgaactgcgcgcccgtgcccgccgtctcgcccgtcaatttaacaataagcttggattgattgtcatcgactacctgcaactgatggcgggatccggccgttccgacaaccgagcttcggagctgggagagatttcacgttcgctcaaagcgttggcgaaagaattgcaagtccccatcatcgccctgtcgcaattgagccgtaccgtcgaatcgcgtaccgacaaacgcccgatgatgtccgaccttcgcgagtccggcgcaatcgagcaggatgccgacctgattatgtttatgtaccgcgacgaatactacaaccaagactcgcccatgaaaggccttgccgaatgtatcatcggcaaacaccgcaacggtcccgtcggtaaaatcttcctcacatggacgggacaattcaccaaattcgacaatgctgcctatattcccgaggaggcaaagatagaagattaa

SEQ ID NO: 49743 - DNA, 2391 bp, Neisseria meningitidis
atgactgaacaaaaacacgaagaatacggcgccgacagcattcaggtgctcgaaggcttggaagcggtacgcaaacgccccggcatgtacatcggcgacacgcaggacggcagcggcctgcaccatatggtgttcgaagtattggacaacgccattgacgaagcactcgccggacattgcgacaaaatcacggtaacgatacacgccgaccattccgtcagcgtcgccgacaacgggcgcggtatgcccaccggcatccacccgaaagaaggacgctccgccgccgaagtcatcatgaccgtattgcacgcgggcggtaaattcgacaacaacagctacaaaatctccggcggcctgcacggcgtgggcgtatccgtcgtcaacgcgctgtccgactgggtaacgctgaccatctaccgcgacggcaaagaacacttcgtccgcttcgtacgcggcgaaaccgaagagccgttgaaggttgtcggcgattccgacaaaaaaggcacgaccgtacgcttcctcgccagcgcggaaaccttcggcaacgtcgaatacagcttcgacatccttgccaaacgtatccgcgaactttccttcctgaacaacggcgtggacatcgaattgaccgacgaacgcgacggcaaacacgaaagcttcgccctttccggcggcgtggccggcttcgtgcaatacatgaaccgcaaaaaaacaccgctgcacgaaaaaatcttctacgcgttcggcgagaaagacggcatgagcgtcgaatgcgcgatgcaatggaacgacagctaccaagaaagcgtgcaatgtttcaccaacaacattccgcaacgcgacggcggtacgcacttgaccgcgctgcgccaagtgatgacccgcaccatcaacaactatatcgaagccaacgaagtggccaaaaaagccaaagtggaaaccgccggcgacgatatgcgtgaaggtttaacctgcgtgttgtccgtcaaactgcccgatccgaaattctcgtcccaaaccaaagacaaactggtttccggcgaaatcggccccgtcgtcaacgaagtcatcagccaagccctgaccgacttcctcgaagaaaacccgactgaagccaaaatcatcaccggcaaaatcgtcgatgccgcccgcgcgcgcgaagccgcccgcaaagcccgcgaaatcacccgccgcaaaggcgtgatggacggcttggggctgcccggcaaactcgccgactgccaagaaaaagaccctgccctgtccgaactctacctcgtcgagggcgactccgcaggcggttccgccatgcaaggccgcgaccgcaaattccaagcgattttgccgctcaaaggtaaaattttgaacgtcgaaaaagcacgttttgaaaaaatgctggccagccaagaagtcgccacgctgattaccgctttgggcgcgggcatcggcaaagaagaattcaatgccgaaaaactgcgttaccaccgcatcatcatcatgaccgatgccgacgtggacggcgcgcacatccgcaccctgctcctgaccttcttctaccgccaaatgcccgagctggtcgaacgcggctacatctacattgcccagccgcctttatacaaagccaaatacggcaaacaagaacgatatctcaaagacgaattggaaaaagaccaatggctgctcggtttagccttggaaaaagccaaaatcgtttcagacagccgcaccatcgaaggcgaagagcttgccaataccgccaaacaattcctgttggccaaaaccgtcatcgagcaagaaagccgcatcattgacgaactcgtcctgcatgccatgctacatgcttcgccggtcgatctcagcacagcagaaagcgcagaccgctccgttgccgaattgagcggcctcttggacgaaaaagaagtcgcgctcgaacgtatcgaaggccacgaaggacaccagttcatcaaaatcacacgcaagctgcacggcaatgtggtggtgagctacctcgagcctaagttcctcaacagcaaagcctatcaaacccttacccaaaccgccgccgcacttaaaggcatggtcggcaaaggggcgaagctctacaaaggcgacaacgaatacgacatcgacagctttgaaggcgctttggacatcttgatgagcgttgcccaaaaaggcatgtccatccaacgatacaaaggcttgggcgagatgaatccggaacaactttgggaaaccacgatggatcctaccgtccgccgtctcctgaaagtccgcattgaagacgctatcgccgccgacgaagtgttcgtcaccctgatgggcgacgaagtcgagccgcgccgtgcctttatcgaaaacaacgcgctgattgcccaaaatatcgacgcataa

SEQ ID NO: 49744 - DNA, 183 bp, Neisseria meningitidis; identical to SEQ ID NO: 39415

SEQ ID NO: 49745 - DNA, 666 bp, Neisseria meningitidis; identical to SEQ ID NO: 38448

SEQ ID NO: 49746 - DNA, 384 bp, Neisseria meningitidis; identical to SEQ ID NO: 38957

SEQ ID NO: 49747 - DNA, 1953 bp, Neisseria meningitidis; identical to SEQ ID NO: 44785

SEQ ID NO: 49748 - DNA, 744 bp, Neisseria meningitidis
atgctcatcatccgcaacctgatttactggctgatactctgttccaccctgattttcctctttccctttatgctgctcgcctcgcctttccgggacggggcgcacaagatggcgcgggtctgggtcaaaatcctcaacctctcgctcaaacacatcgtcgggctcaaataccgcatcatcggcgcggaaaacatccccgaccgccccgccgtcatctgcgccaaacaccaaagcggctgggaaacgctcgcccttcaggacatttttccgccgcaggtttacgttgccaaacgcgagttgttcaaaatcccctttttcggctggggcttgaaactggtcaaaaccataggcatagaccgcaacaaccgccgcgaagccaacgagcagctcataaaacaggggttggcgcgcaaaaacgaaggctattggattaccattttccccgaaggcacgcgccttgcacccggaaagcgcggcaaatacaaactcggcggcgcgcgcatggcgaaaatgtttgagatggacatcgtccccgtcgccctcaacagcggcgaattttggccgaaaaactcctttctgaaatatccgggggaaatcaccgtcgtcatctgtccggccatcccgcacgcaagcggcagcgaagccgaattgatgggaaaatgcgaacacctcatcgaaacgcagcagccgctcatttccggcgcaggcccgtttgccgccaaaatgccgtctgaaaccgcatga

SEQ ID NO: 49749 - DNA, 1233 bp, Neisseria meningitidis; identical to SEQ ID NO: 39021

SEQ ID NO: 49750 - DNA, 1434 bp, Neisseria meningitidis
atgaacgaatattcccaattaatcaagcatcccgatatttccctttccccgatttcagacagcatcgggatcggcaatccggcgacgggtgaaattttggcgtatgtccgcaacacgggttcggacaaactgaaaaacctgattcaaaaggcggcggcagcgcaaaaattatgggcggcgaaaactgctttggaacgcgccgacatattgtggcgttggtattttttagttaaagaaaacaaggaagcactggcgcgcctgatgacgatggagcagggcaaaagcctgaccgagtcgcgcggcgaaatcgattatgcggcttcgtttgtgcgctggtttgcggaagaggcgcggcggattgacggcgatgtgctgacaagtgtgaaagcgtcgcaaaaactggtcgtgttgaaacagcctgtcggcgttaccgccgcgattacgccgtggaacttcccatctgcaatgattgcgcgcaaggctgcgcctgctttggcggtgggctgcgcgatgatcgtcaaacccgcatcgctcacgcctttgagtgcgtatgcgttggtcgtgctggcttatgaagcgggcgtaccacaggatttgttgcccgtcgtcagcggtcgcgcatcggaaatcggccgtgaatttgccacgaacccgattatccgcaaaatcagcttcaccggctctaccgaagtcggtgcgaaaatttttgccgacagcgcggcggacattaaaaaactcagtttggagctgggcggcaacgcgccgtttatcgtgtttgacgatgccgatttggacaaagccgtcgaaggtgcgctcgccagcaagttccgcaacagcggtcagacctgcgtctgcaccaaccgcgtttacgcccaatccggcatttacgacgaattttgtcgcaaattgagtgaaaaagtagccgagctcaaattgggcaacggcttggaggatggcgtcaaccaagggccgctgattgaggaaaaagcggtagaaaaagtcgagcagcacattgctgacgcgctcgctaaaggcgcggtctgtctgaccggcggcaaacgcagcgcattgggcggaacgttttttgagccgaccgtcttaagcggcgtaacggcgcaaatggcggtggctcgcgaagaaaccttcgggcctttgtgtccggtattccgttttgaaaccgaagtcgaggtcatcgaggctgcgaacaatacggaatacggtttggcggcctaccttttcaccgccgacaccgcccgccaatggcgcgtcggcgaagccttggaatacggtatggtcggcatcaatacgggcttaatcagcaatgaagcggcaccgttcggcggcgtgaaacgcagcggtttgggacgtgaaggcagcaaatacggtgcggacgaatatctggaattgaaatatctgtgtatggatgtcgggtga

SEQ ID NO: 49751 - DNA, 1878 bp, Neisseria meningitidis
atgagccaagccttaccctaccgcccggacatcgacacattgcgcgccgccgccgttttgtccgtcatcgtgttccatatcgaaaaaaattggctgccgggcggatttctcggtgtcgatatattctttgtgatttcaggctttttgatgacggcgatcctccttcgcgaaatgtcggggggggggaggttttccctgaaggcattttatatccgccgcatcaaacggattttgcccgcatttttcgccgtattggcggcaacgctggcaggcggcttctttttattcaccaaagatgatttctttcttttgtggaaatccgcgctgaccgccttgggtttcgcctccaacctgtattttgcaagggggaaggattatttcgatcccgcgcaggaagaaaagcccttgctgcacatttggtctttgtcggtcgaagaacaattttactttgtctttccgatattgctgctgcttgtcgcccgcaaaagcccgcgcgtacagttcggcttcctcgccgcattgtgcgccttaagccttgccgcttcctttatgccttccgcgttcgataaatattacctgccccacctgcgcgcctgcgaaatgctggtcggatcgctgaccgccgtgtggatgcggtaccggcaacagcggaatctcgccgtcggcagatgctgtgccgccgccggcgcattgttttccgcgtgcatactgtccgcctgcctgtttgcctattcggaacaaaccgcctatttcccagggcccgccgctttgattccctgtctggctgttgccgcgctgatttatttcaatcattacgaacacccgcttaaaaaatttttccaatggaaaatcaccgttgccgccggtttgatttcctattcgctttatctgtggcattggccgatattggcctttatgcgctatatcggcccggacaacctgccgccttattcgccggcggcggcggtcgtcctgatattgctgctttccctgttttcttaccactgcatcgaaaaaccgtttaaaaaatggcaaggttcgttcgcacaatccgttttatggatttatgccttgcctatgctcattttgggggcgggctcattttttgcgatgaggctgccgtttatggcgcaatacgaccgcttggggctgacgcgttccaacacctcctgccacaacaataccggcaaacaatgcctatggggggatacggaaaaacagccggaactgctggttttgggcgactcccacgccgaccattacaaaacattcttcgatgccgtgggcaaaaaagaaaaatgggctgccactatggtttccgccgacgcttgcgcctatgtggaaggctacgcgtcccgcgtattccaaaactgggccgcctgccgcgccgtttaccgctatgccgaagaacacctgccccggtattcaaaagtggttttggcgatgcgctggggcagccaaatgcccgaaaacagccgctcccttgcctatgatgccggttttttccaaaaattcgaccgtatgctgcacaaactctcatccgaaaaacaagccgtttacctgatggcggacaacttggcctcgtcttacaacgtccagcgcgcctatatcttgtcttcccgcataccgggttaccgccaagccctgcgcccggacgacgaaagcaccctgaaagccaatgcacgcatcagggaattggcagccaaataccccaacgtctatattattgatgccgccgcctatatccccgcagattttcaaatcggcggattgccggtttactcggacacagaccacatcaacccttacggcggcacggaattggcgaagcgtttttccgaaaaacaacggtttctcaatacgcgccataaccattga

SEQ ID NO: 49752 - DNA, 699 bp, Neisseria meningitidis; identical to SEQ ID NO: 38523

SEQ ID NO: 49753 - DNA, 993 bp, Neisseria meningitidis; identical to SEQ ID NO: 39311

SEQ ID NO: 49754 - DNA, 183 bp, Neisseria meningitidis; identical to SEQ ID NO: 39725

SEQ ID NO: 49755 - DNA, 903 bp, Neisseria meningitidis; identical to SEQ ID NO: 38685

SEQ ID NO: 49756 - DNA, 126 bp, Neisseria meningitidis; identical to SEQ ID NO: 42488

SEQ ID NO: 49757 - DNA, 1968 bp, Neisseria meningitidis
gtggggaacacctttaaatcaatccttgtctgggtcgccttgggtatcggcctgatggctgcgttcaacgctttagacggtaaaaaagaagacaacgggcaaatcgaatattctcagttcatccaacaggtcaacaacggcgaagtatccggcgtcaacatcgaaggatccgtcgtcagcggctacctgattaagggcgagcgcaccgacaaaagcaccttcttcaccaacgcgcctttggacgacaacctgattaaaacactgctcgacaaaaacatccgtgtaaaagtaacgccggaagaaaaaccgagcgcgctggctgccctgttttacagcctgctgcccgtcctgctgctgattggcgcgtggttctactttatgcgtatgcagacgggcggcggcggaaaaggcggcgcattctcattcggcaaaagccgcgcccgcctactggacaaagatgccaacaaagtgacctttgccgatgtcgccggctgcgacgaagccaaagaagaagtgcaggaaatcgtcgattacctcaaagcgccgaaccgctatcaaagcctcggcggtcgcgtgccgcgcggcatcctgctggcgggcagcccgggtacgggtaagacgcttttggcaaaagccattgcaggcgaagccggcgtgccgttcttcagcatttccggttccgactttgtcgaaatgttcgtcggtgtcggtgcgagccgcgtccgcgatatgttcgagcaggcgaagaaaaacgctccctgcatcatctttattgatgaaatcgacgcagtcggccgccaacgcggcgcaggtttgggcggcggcaatgatgagcgcgagcaaacattaaaccaattgttggttgaaatggacggttttgagagcaatcagactgtaattgtgattgcggcaaccaaccgccccgacgtactcgatcctgcgctgcaacgccccggccgtttcgaccgccaagtggttgtccccctgccggacatccgggggcgcgaacagattttgaacgtccattctaaaaaagtgcctttggacaaatctgtggatttattgtccctcgcgcgcggcacgccgggtttttccggcgcggatttggcgaacttggtcaacgaagccgccctgtttgccggccgccgcaataaagtcaaagtcgatcagagcgattttgaagacgccaaagacaaaatctatatgggtccggaacgccgcagtatggtgatgcacgaagacgaaaaacgtgcgacggcgtatcacgaatccggacacgcgattgttgccgaaagcctgccctttaccgaccccgtccacaaagtaaccattatgccgcgcggacgtgcgctgggtctgacttggcagcttccggagcgcgaccgcatcagtatgtataaagatcagatgttgagccagctctccatcctgttcggcggacggattgccgaagacatcttcgtcggacgcatctccaccggcgcatcaaacgactttgaacgcgcaacccaaatggcgcgcgaaatggtaacgcgctacggcatgagcgacaaaatgggcgtgatggtttatgcggaaaacgaaggcgaagtcttcttaggacgcagcgtaacccgttcgcaaaacatttccgagaaaacccagcaggacatcgatgcggaaatccgccggattttggacgagcagtatcaggttgcctacaaaatcctcgatgaaaaccgcgacaagatggaaaccatgtgcaaagccctgatggaatgggaaaccatcgaccgcgatcaggtactggaaatcatggcgggcaaacaacccagtccacccaaagattacagccacaacctgcgcgagaatgcggacgcggcggaagataacgcgccgcacgctccggctcgggaagaaaccgaagcacctgccccggcagacaccgcttcgtcagagtccgagcagcggcctgaaaacaaggcttaa

SEQ ID NO: 49758 - DNA, 360 bp, Neisseria meningitidis; identical to SEQ ID NO: 39161

SEQ ID NO: 49759 - DNA, 1257 bp, Neisseria meningitidis
atgaaagtgcttgttttaggtgcgggtgttgccggcgtgtcttccgcgtggtatctggcagaggcaggacatgaagtaacggtcatcgaccgcgccgagggtgtggcgatggaaaccagttttgccaacgcaggccagctttcttacggctataccacgccttgggctgcacccggtatcccgaccaaagcgctgaaatggctgtttacaagccatccgcctttgctgtttcgccccgacggcagcctgtatcaaatcgaatggctgtggcaaatgctgcaaaactgcacggcagcgcactatcaaaccaataaagagcgcatggtcaggatttccgaatatagccgtgaaatgttccgccgttttgaagcgcaaaccggcatgaattttgaggaacgcaaaaaagggacgttgcagattttccgccaaaccaaagaagtcgaagcggcagaacaagacattgccgttttggaacgctacggcgtgccgtaccgccgtctgaaacccgaagaatgtgcagaatttgagcctgcgctggcacgcgttaccgccaaaattgccggcggcctgcacctgcctgcagatgcgaccggcgactgccacctcttcactgaaaacctatacaaattgtgtcaggaaaagggcgtacagtttcatttcaaccaaaccatcagccgcatcgaccataacgggctgcgcatcaaagccgttgaaaccgaaacagggcggtttgaagcagatgccgttgtctgtgcgctcggctgcttcagtaggactgtgttggcgcagttggatctcaatctgcccatttatcccgtcaaaggctattccttgaccctgccggtcaccaattcagacggcgcaccggtgtccaccgttttagatgaaagctacaaagtcgccatcacgcgctttgacaacagaatccgcgtcggcggtatggcggaattgtcgggctacgaaatcaaactgcccgaaaaacgccgcgaaaccttggctttggtcgtcaacgacttgttcccggaaggcggcgatttgagccaagcatcgttctggagcggcctcagaccgatgacgcccgacagcacgccgttaatcggccgcacccgctttgaaaacttattcttgaatacaggccacggcactttgggctggaccatgtcgctgggttcggcaaaattaaccgccgatatcgtgagcggcaaagacaccgaaatccgaagcgacgatttgagcctgtcgcgctatcaggcttaa

SEQ ID NO: 49760 - DNA, 426 bp, Neisseria meningitidis
atgccgtctgaacacgcggcttatgccgacttgatggcgagttccgccaagcgtttgctttgtgcgaaggcgatattgttttcttcggcggtcaggacgggagccgctgtcgggaatatcttttttgacggcttcgcagacggcggagactttggggacggtgcgcaatacggcttcgcaaccttcaacgctgtcgatgccgcgagcgattcggcgggcgggattgcgggtgctaccgttttggaaatagtagaggacgaggattttgagggggatttgggttcatgggcggattccgttaaaatggttcggtcttcagacggcataacagttgttccgatgccgtctgaaacagccgcagttcaggcatttgttcctgacggcaaaattggctataacatcgggcatcaatgcccaacttactga

SEQ ID NO: 49761 - DNA, 369 bp, Neisseria meningitidis
ttgaataatattcctgttgaaatccgtttgttgaaaaaccgtaccgtgttggttttgacttatggggacgaacctaaaaatctgcctgccgaatttttacgcgtctattcgccgagtgcggaagtgcgcggacacggtgtgggacaggatgttttgcagaccggtaaggcagatgtgcaaattacggatttgcagcctgtcggacagtacgcgctgaaaatcagtttttcggacgggcacgacagcagtctttacgattgggcgtatctgcacagactggcatacggatacgatgcgatgtggcaggaatatttggacaaattggcggcggctggtgcgtcgcgttttgaaaagcaatcagattgttaa

SEQ ID NO: 49762 - DNA, 669 bp, Neisseria meningitidis; identical to SEQ ID NO: 39678

SEQ ID NO: 49763 - DNA, 1494 bp, Neisseria meningitidis; identical to SEQ ID NO: 38920

SEQ ID NO: 49764 - DNA, 513 bp, Neisseria meningitidis
gtgatttccgcctttcagacggctgggacggcaatgactgacaacctaatacagatagcaacgccgatattgactgttatcggcgtttttgttgccgcttacggcatcatgaggaatacagaaaacgccaaaaagcgcgccaccatcgacatgatcatggccgaacgtaacaatgccgcccttcaagaagccataaccatagtaaacgggctggcaaaaacagacggatgcatactcgccacctatacatcggatacctcggacaagaagaaagaccgtgaagccatactgacagttttaaaccagcgcgaatttgtctgtgcgggcgtattgggcggagcactgcacgagaaaatgtataaagatttcgaatactccatgctgttacgtgactgggacaacctaagcagcttcatttttgaaatacgccgtatcaggagcgcaccgacggcctttcaagaatttgaagccgtagcccgaaaatggaagaaaaagcctctgaaaaccaaatag

SEQ ID NO: 49765 - DNA, 1416 bp, Neisseria meningitidis
atgaacctgcatgcaaaggacaaaacccagcatcccgaaaacgtcgagctgctcagtgcgcagaagccgattaccgactttaagggcctgctgaccaccattatttccgccgtcgtctgtttcggcatttaccacatcctgccttacagccccgatgccaataaaggtatcgcgctgctgattttcgttgccgcactttggtttaccgaggccgtccacattaccgtaaccgcactgatggtgccgattctcgccgtcgtactcggtttccccgacatggacatcaaaaaggcgatggctgatttttccaacccgattatctacatttttttcggcggcttcgcgcttgccaccgccctgcatatgcagcggctggaccgtaaaatcgccgtcagcctgttgcgcctgtcgcgcggcaatatgaaagtggcggttttgatgttgttcctcgttaccgcctttctgtccatgtggatcagcaacaccgccaccgccgcgatgatgctgcctctagcaatgggtatgctgagccacctcgaccaggaaaaagaacacaaaacctacgtcttcctcctgctcggcatcgcctattgcgccagcatcggcggcttgggcacgctcgtcggctcgccgcccaacctgattgccgccaaagccctaaatctggacttcgtcggctggatgaagctcggcctgccgatgatgctgttgattctgcccttgatgctgctctccctgtacgtcatcctcaaacctaatttgaacgaacgcgtggaaatcaaagccgaatccatcccttggacgctgcaccgcgtgatcgcgctgttgattttccttgccacagccgccgcgtggatattcagctccaaaatcaaaaccgccttcggcatttccaatcccgacaccgttatcgccctgagtgccgccgtcgccgtcgtcgtcttcggcgtggcgcaatggaaggaagtcgcccgcaataccgactggggcgtgttgatgctcttcggcggcggcatcagcctgagcacgctgttgaaaacatccggcgcgtccgaagccttgggacagcaggttgccgccaccttttccggcgcgcccgcatttttggtgatactcatcgtcgccgccttcattatttttctgaccgagttcaccagcaacaccgcctccgccgcattgcttgtaccgattttctccggcatcgctatgcagatggggctgcccgaacaagtcttggtattcgtcatcggcatcggcgcatcttgtgccttcatgctgccggttgccacaccgcctaacgcgattgtgttcggcacgggcttaatcaagcaacgcgaaatgatgaatgtcggcatactgctgaacatcctctgcgtagtattggttgctctgtgggcttatgctgtactgatgtaa

SEQ ID NO: 49766 - DNA, 669 bp, Neisseria meningitidis; identical to SEQ ID NO: 39284

SEQ ID NO: 49767 - DNA, 273 bp, Neisseria meningitidis; identical to SEQ ID NO: 38880

SEQ ID NO: 49768 - DNA, 873 bp, Neisseria meningitidis
atgcccattttgaaccatattgccctcatcggtgtagggctgatcggcggttcgttcgttctcgacctcaaaaggcagggactcgtccgcaccgttaccggtatcgacaccgaccgcgacaacctcgaacgtgcattggaacgcggcgtgattgaccgggcttccgttgccatcgacgcggacagcatcggcggtgcggacttggtactgattgccacgcccgtcgccaccgttcccgccattttgaccgcgctgcgccccgttttgccggaacacacttggatttccgatgtcggcagcaccaaatcttcggtcatcgaagccttccgccgctgtctgcccgaccgtctgcaccactgcatcgccgcccacccgattgccggttcggacagaagcggtgcgcaagccgcgcagttcgggctgttccgccacagaaaactcatcatcacgccacacggcggcgaacattcagacggcattgccttggtagaagaactgtggcacgcggtcggtgcggaaatttatacgatggacgcgcaacgccacgacgcggttttcgccgccgtctcccatatgccccacctgaccgccttcgcctatgtccaccagattctcgaccaccccgacggacaggaatatctgaaattcgccgccacgggctttcgggacttcacccgcatcgcctccggccatcccgccgtgtgggcggacatctgccttgccaacaaagacagcctgctgcaactggttcaaggcttgggcaaacagttggacgttttggcaaacatcctgaccaccgacgaccgcgaagccctgtaccgctattttgaagaagccaaaaccacacgcgaccgctggctggacggcaactga

SEQ ID NO: 49769 - DNA, 828 bp, Neisseria meningitidis
atgaaactcgatatttatgctttgctggaacgcgccctgctttcgggcgacccagatgaaaaaggacggctgacggatgaggcgtttgccgccgttcaaaatgcggacggggcggaagcaaacgcgccgccggcggacttcccccgagcgggacggccggacaagcctgttttggtcgcgccgtcgcaactgaccccgcgcaaaatgaacacaaccgaaggttatgcggcgatgctgcacgcgattgcgcatatcgaattcaacgccgtcaatctagctttggacgcggcataccgtttccgcacgctgccgtttcagtttgtccgcgactgggtgaaagtggcgaaggaagaggtgtaccatttccgcctgatgcgcgacagattgcgcgctttcggcttcgattacggcagtttcgaggcgcacaaccatttgtgggatatggcgtacaaaaccgcctacgacccgctgttgcgtatggcgttggtaccgcgcgtgttggaagcgcgcgggctggacgttacgccggggatacgcgcgaaggtggcgcagcgcggcgattcggaaacctgcggcgtgttggacatcatttacagcgacgaagtgggacacgtcgccatcggcaaccattggtatcaacacctttgccgcgaacgcggtttggaaccgattgccctgttccgcagtctgattgcccgttacgatatgtttatcttccgcggctatgtgaacatcgaagcgcgcgaaaaagcgggcttcagccgctttgaattggatatgctggaagatttcgagcagagtttgaaacaaggcaaaaaggtcgtctga

SEQ ID NO: 49770 - DNA, 963 bp, Neisseria meningitidis; identical to SEQ ID NO: 39013

SEQ ID NO: 49771 - DNA, 960 bp, Neisseria meningitidis
atgtctcaccatcacgaacaccatcatcacgcacacgcccacacgcataccgccaacaaaaaagtattgcgcgtgtcgttcatcatcatcgccgcctttatgctgctggaggcgttcggcggctggctgacccattcgctcgcgctgctttccgacgcagggcatatgttcagcgacgcattttccttgggcgtggcgttgtgggcgttcaaactcggcgaaaaagaaaccacactgcaaaagaccttcggctacaaacggttcgaaatcctcaccgccatgttcaacggtttgtcgctggtggtcatcgccgtgctgattttctacgaagccgtcaaacgcctgctttatccgcccgaaatcgccacgctggggatgctcgtcatcagcgtcgtcggcctgctggtcaacatcggcgtggcggtttacatgctgaaaaacagcgacaccgaagccaacgtcaacatgcgcggcgcgtatctgcacgttttgagcgaccttctcggctcaatcggcgcgattgccgccgccgtgctcatgatggcgttcggctggaaatgggcagatccgctcgccagcgtgttcgtggccgcgttggtcggacgcagcggctggagcctgctcaagcaaacgctgcacatcctcatggaaggcgcgcccgaaaacatccacaccgacgacctgctcgccatcatccgcaacaccgacggcgtcaaatccgtccacgacttacacgcctggacgattaccagtaatatcaacgtattatcctgccacatcgtcgtagacggcagcatgaccgttgccgaatccgagcaaatcgcctaccgcatcgaacacgagttgtcccacaaaaacatcggacactgcaccatccaaatcgaaagcgaacaccacccgcacaaaaacgagattttgtgttcgccctacgcagaagcacatcatagccacagccattaa

SEQ ID NO: 49772 - DNA, 1284 bp, Neisseria meningitidis; identical to SEQ ID NO: 44141

SEQ ID NO: 49773 - DNA, 1209 bp, Neisseria meningitidis
ttgttcgcaaagaaagaaaaacgctttatctttgaaggcaggcattccgcctccgacaaactggtcaacggcgaagtatccgcgtttaccgaagaagaggcgcgcaaaaaactggcaaaacgcggcatccgcccgttgcagattacccgtgtgaaaacaagctccaagcgcaaaatcacacaagaagacatcaccgttttcacccgccagctgtccacgatgattaaagcgggcctgccgctgatgcaggcatttgaaatcgtggcgcgcggacacggcaacccgtctatgacggaaatgctgatggaaatccgaggcgaagtggaacagggcagctcgttgagccgcgcattctcaaaccacccaaaatatttcgaccgcttctactgcaatctggttgcggcgggcgaaacgggcggcgtattggaaagcctgctggacaaattggcaatttacaaagaaaaaacccaggccatccgcaaaaaggtaaaaaccgcactgacctatccggtatccgtcatcgccgtcgccatcggtttggtattcgtgatgatgattttcgtactgcccgcctttaaagaagtttacgccaatatgggcgcggagcttcccgcactgacccaaacagtgatggatatgtccgactttttcgtctcatacggctggatggtgctgatcgcactgggctttgccatatacggcttccttaaattgaaggcgcgttcgattaaaatccaacggcgtatggatgccatactgctgcgtatgccgattttcggagacattgtccgcaaagggacgattgcccgctggggcaggacgacggcgacgctgattgcggcaggcgtgcctttggtcgatgtattggactccactgccggcgcggcgggcaatttaatctatgaagaagccacccgggaaatccgtacgcgcgtcatccaaggtttgtctatgacttcggggatgcgtgcgacggaactgttccccaatatgatgttgcagatgtcttccatcggcgaggaatcgggttctttggacgatatgctcaacaaagccgccgaattttacgaagacgaggtggacaatgcggtcggcaggctgtccgctatgatggagccgatcattatcgtgattttaggcttggtcatcggcacgcttctggtcgccatgtatctgccgctgtttaatttgggcaacgtggtcgcctga

SEQ ID NO: 49774 - DNA, 1086 bp, Neisseria meningitidis; identical to SEQ ID NO: 38486

SEQ ID NO: 49775 - DNA, 1011 bp, Neisseria meningitidis; identical to SEQ ID NO: 39239

SEQ ID NO: 49776 - DNA, 2229 bp, Neisseria meningitidis
atgcgttctgctgttttatttatatatttctttctacttaatatattccttttccagccagccgttatccacatccaatctaactatattttatttatgtctatcgtatccgcaccgctccccgccctttccgccctcatcatcctcgcccattaccacggcattgccgccaatcctgccgatatacagcatgaattttgtacttccgcacagagcgatttaaatgaaacgcaatggctgttagccgccaaatctttgggattgaaggcaaaggtagtccgccagcctattaaacgtttggctatggcgactttacccgcattggtatggtgtgatgacggcaaccatttcattttggccaaaacagacggtgagggtgagcatgcccaatttttgatacaggatttggttacgaataagtctgcggtattgtcttttgccgaattttctaacagatattcgggcaaactgatattggttgcttcccgcgcttcggtattgggcagtttggcaaagtttgactttacctggtttattccggcggtaatcaaataccgccggttgttttttgaagtattggtggtgtcggtggtgttgcagctgtttgcgctgattacgcctctgtttttccaagtggtgatggacaaggtgctggtacatcggggattctctactttggatgtggtgtcggtggctttgttggtggtgtcgctgtttgagattgtgttgggcggtttgcggacgtatctgtttgcacatacgacttcacgtattgatgtggaattgggcgcgcgtttgttccggcatctgctttccctgcctttatcctatttcgagcacagacgagtgggtgatacggtggctcgggtgcgggaattggagcagattcgcaatttcttgaccggtcaggcgctgacttcggtgttggatttggcgttttcgtttatctttctggcggtgatgtggtattacagctccactctgacttggttggtattggcttcgttgcctgcctatgcgttttggtcggcatttatcagtccgatactgcggacgcgtctgaacgataagttcgcgcgcaatgcagacaaccagtcgtttttagtagaaagcatcactgcggtgggtacggtaaaggcgatggcggtggagccgcagatgacgcagcgttgggacaatcagttggcggcttatgtggcttcgggatttcgggtaacgaagttggcggtggtcggccagcagggggtgcagctgattcagaagctggtgacggtggcgacgttgtggattggcgcacggctggtaattgagggcaagctgacggtggggcagctgattgcgtttaatatgctctcgggacaggtggcggcgcctgttatccgtttggcgcagttgtggcaggatttccagcaggtggggatttcggtggcgcgtttgggggatattctgaatgcgccgaccgagaatgcgtcttcgcatttggctttgcccgatatccggggggagattacgttcgaacatgtcgatttccgctataaggcggacggcaggctgattttgcaggatttgaacctgcggattcgggcgggggaagtgctggggattgtgggacgttcggggtcgggcaaatccacactcaccaaattggtgcagcgtctgtatgtaccggagcagggacgggtgttggtggacggcaacgatttggctttggccgctcctgcctggctgcggcggcaggtcggcgtggtcttgcaggagaatgtgctgctcaaccgcagcatacgcgacaatatcgcgctgacggatacgggtatgccgctggaacgcattatcgaagcagccaaactggcgggcgcacacgagtttattatggagctgccggaaggctacggcaccgtggtgggcgaacaaggggccggcttgtcgggcggacagcggcagcgtattgcgattgcccgcgcgttaatcaccaatccgcgcattctgatttttgatgaagccaccagcgcgctggattatgaaagtgaacgagcgattatgcagaacatgcaggccatttgcgccaaccggacggtgctgattatcgcccaccgtctgtccactgttaaaacggcacaccggatcattgccatggataaaggcaggattgtggaagcgggaacacagcaggaattgctggcgaagccgaacggatattaccgctatctgtatgatttacagaacgggtag

SEQ ID NO: 49777 - DNA, 1602 bp, Neisseria meningitidis; identical to SEQ ID NO: 39640

SEQ ID NO: 49778 - DNA, 204 bp, Neisseria meningitidis; identical to SEQ ID NO: 38753

SEQ ID NO: 49779 - DNA, 759 bp, Neisseria meningitidis; identical to SEQ ID NO: 39063

SEQ ID NO: 49780 - DNA, 1773 bp, Neisseria meningitidis; identical to SEQ ID NO: 39698

SEQ ID NO: 49781 - DNA, 1557 bp, Neisseria meningitidis
atggatttcagttggttggcagaaccgcatacctggataggttttgccacgcttttggtgttggaagtcgtattggggatagacaaccttgtctttgtggcgattttggcaaacaaggtccagcccgcacggcgcgaccgcgcacggattatcgggctggggctggcagtcgtcatccgcatcattatgcttgcttttatggcgcacatcatcacgctgaccgagccgctgttccaaatcggcggcctcgccgtttccggcaaggacatgattatgctcgcgggcggtattttcctgctttacaaagccaccaccgaactgcatgaacgcctcgaagggcacaaccgttttactgttgccgacaaccaaaaaaaacacgcgccgttttggggcgtggtcgcgcaaatcctgatactggatgccgtgttttccatcgattcggtcattactgcggtggcgatggtcgatcatatcgtcgtggcgatgggtgcggtcgtcgtcgcaatggctgtaatgatttctgccagcaaactcttgaccgaatttgtcgacagacaccctaccgtcgtgatgctctgccttggttttttgttgatgatcggtttcagcctgattgccgaagccttccatttccacattcccaaaggctacctctacgccgccatcggcttctcgattttaatcgaactgtttaaccagatttcccagcgcaacagccgcaaaaacgactacatcggcagctcgtggcgcaaacggactgctgaaaacgttttgggtatgatgggcatacgcgaaagcgtgcttgccgacgcgggcggcgaatccggggacgacgcgcattttgaagaaaacgaaaaatcgatgatacgcagcgtgctgacgcttgccgaacgcccgattatgggggtgatgatcccacgccgcgacatcgaacggctggacatttcccaaagccgcgaagaacagtgtgcccaactgcaaaacacgccttacagccgcctgctcgttgtcggtaaggcgggcgtggacgaacctttgggctacatcaacaaaaaagacctgctgtcccaactgctggaaacaggcggtctcgacattcagacggcattgcgccagccactcgtcctgcccgacagcaccaccgcgctgggcgcaatcgaactcttccgccaaagcagcgcggattatgctttggtggtggacgagttcggcgcggtattgggcatggtaaccatgaaagacctgctcgaaaccatcgcaggcgagttccccgaagaatttgagcgcgaagaagaaccagccgttcaggggaatcccgatgaaagcctgacggtggaaggcgcgttggaatatgtggaactcgcaccgcaactcaacctgccgcagcaggaggaagatgccgatttccatacggttgccgggctgattatggaagaattgcaaaccatccccgatgtcggcgattttgccgatttccacggctggcggtttgaagtggtcgaaaaagaagggcagcgcatcgagcgggtcaaaatcaccaaattgcccgaagaataa

SEQ ID NO: 49782 - DNA, 450 bp, Neisseria meningitidis; identical to SEQ ID NO: 38561

SEQ ID NO: 49783 - DNA, 234 bp, Neisseria meningitidis; identical to SEQ ID NO: 39424

SEQ ID NO: 49784 - DNA, 1002 bp, Neisseria meningitidis
atgaaacggaaaatttggctgctgccgctgctggcggtttcggcatacctgcaggcgcagacggaagtcaggctggcggtgcataagtcgttcagcctgcccaaagggctgattgcgcgcttcgagcgggcaaacgatgcgaaggtgtcgattattcaggcgggcggcgcgaacgaaatgctcaacaaactgattttgagccgcgccaacccgattgccgacgcggtgtacggtttggacaacgccaatatcggcaaggcgcgggaaatgggcattttggcggcggcgcaacccgaatccgcccccgtcgcggtcgggctgccttcggctttggcggtcgattacggctatgtgtccatcaattacgacaaaaaatggtttgaaggcaaaaagcttcctctgccgcaaaccctgcaggatttgacccgccccgaatataaaaacctattggtcgtgccgtctcccgccacgtcgtccccggggctgggcttcctgatggcgaacatcagcggtctgggcgaagaaggcgcgttcaaatggtgggcacagatgcggcagaacggcgtgaaggtcgccaaaggctggagcgaggcgtattacaccgacttttcgcacaacggcggcgcgtatccgctggtggtcggttatgccgccagcccggcggcggaagtgtatttttccaaaggcaaatacagcgagccgccgacgggcaacctgtttttaaaaggcggcgtattccgccaggtcgaaggcgcggcggtcttgaagggcgcgaaacagccggaattggcggcaaaactggtgcaatggctgcaaagtcgggaagtgcagcaggcggttccgtccgaaatgtgggtttaccccgccgtcaaaaacacgcgcctgcccgacgtgttccgcttcgcccaagccccgacgcacaccaccgcccccgcgcagcgcgatattgatgcgaaccagcgcggatgggtttcccgttggattagaacggttttgaaataa

SEQ ID NO: 49785 - DNA, 375 bp, Neisseria meningitidis; identical to SEQ ID NO: 38650

SEQ ID NO: 49786 - DNA, 435 bp, Neisseria meningitidis; identical to SEQ ID NO: 45056

SEQ ID NO: 49787 - DNA, 666 bp, Neisseria meningitidis
gtggacaatatgatgaagttcaaatatgtttttctgttggcgtgtgttgtcgtttctttatcttatcgtttgaatgctgcaccgatgtttaacgataatcctgttgtttacggaaaaatcaaagtgcagagttggaaagcgcggcgggatttcaatattgtaaagcaggatttggatttttcctgtggggcggcttcggtggcgacgcttttgaacaatttttacgggcaaacgctgacggaagaagaagtgttgaaaaagctggataaggagcagatgcgcgcgtcgtttgaggatatgcggcgcattatgccagatttgggttttgaagcgaaaggctatgccctgtctttcgagcagctcgcacagttgaaaatccccgtcatcgtgtatctgaaataccgcaaggatgatcatttctcggtattgcgcgggatagacggcaatacggttttgcttgccgacccgtcgctgggtcatgtttcaatgagcagggcgcagtttttggatgcttggcaaacccgtgagggaaatttggcaggtaagattttggcggtcgtgccgaaaaaagccgagacaatttcaaataaattgtttttcacacatcatcccaagcggcagacagagtttgcagtcggacaaatcaggcaagcacgtgcagagtaa

SEQ ID NO: 49788 - DNA, 720 bp, Neisseria meningitidis; identical to SEQ ID NO: 38874

SEQ ID NO: 49789 - DNA, 1143 bp, Neisseria meningitidis
atgaaaaaatccgtattagccgttttggccgcgctgtctctggcagcctgcggcggcagcgaaaaaaacgccgtgcaacctcaagcagacgctgcgtctgctgccaatgccgaagccgctgccaccgatactctgaacatctacaactggtcgaactatgttgacgagagtacggtcgaagactttaaaaaagccaacaatctgaagctcacttacgacttgtacgaaaacaatgaaacgctggaagccaaaatgctgaccggcaaatccggttacgatttggttgtgccgggcatcgccttcctaccgcgccaaatcgaggcgggcgcgtatcaaaaagtcaacaaagacctgattcccaactataaaaacatcgatcccgaactcttgaaaatgctggaaaccgccgacccgggcaaccagtatgccgtcccctatttctccggcgtgaacacgattgcgattacggcgaaaggcaaagagcttttaggcggcaagctgcccgaaaacggctgggatttgctgttcaaacctgaatacacccacaaactgaaatcctgcggcatcgccctgtgggacaccccgagcgaaatgttcccgattttgctgaactacttgggcaaagaccccaaaggctcgaatcctgaagatttgaaggcggcggcggaagtgttgaagtctatccgtcctgatgtcaaacgtttcagcccgtccatcatcgacgagctggcgcgcggcgacatctgcctggcggcaggcaacggcggcgatttgaacttggcgaaagcacgttccgaagaagtgaaaaacaacgtcggcatcgaagtgctgaatccgaaaggcatgggcttctggattgagtcttggctgattcccgccgatgcgaaaaacgtcgccaatgcccacaaatacatcaactacacgctcgaccccgaaatcgcggcgaaaaacggcatcgccgtaaccttcgcccccgccagcaaaccggcgcgcgaaaaaatgcctgccgaactggtgaacacccgttccatcttcccgaacgagcaggatatgaaagacggtttcgtgatgccgcaaatgagtacggatgcgaaaaaactgtctgtcagcctgtggcagaaaatcaaagtcggcaccaactga

SEQ ID NO: 49790 - DNA, 771 bp, Neisseria meningitidis; identical to SEQ ID NO: 39218

SEQ ID NO: 49791 - DNA, 621 bp, Neisseria meningitidis; identical to SEQ ID NO: 38571

SEQ ID NO: 49792 - DNA, 1278 bp, Neisseria meningitidis
atgcgtagcagcgatattttaattgtagacgacgaaatcggcatccgcgacctgctgtcggaaatcctgcaggacgaaggttattcggtcgcattggcggaaaacgccgaagaggcgcgcaagctgcgccatcaggtacgcccggcgatggtgttgctggatatttggatgcccgattgcgacggcatcacccttttgaaggagtgggcgaaaaacgggcagctcaatatgccggtggtgatgatgagcgggcatgccagcatcgataccgccgtagaagcgaccaaaatcggcgcgctcgactttttggaaaaaccgatttccctgcaaaagctgctgtctgccgtcgaaaacgcgttgaaacacggtgcggcgaaaatcgaaacgggaccggtgttcgacaagctgggcaacagtgcggcgattcaggaaatgaaccgtgaggtaggggctgcggtgaaacgtgcctctcccgtacttttgacgggcgaggcgggttcgccgtttgaaacggtggcacgctatttccataaaaacggtacgccgtgggtcagcccggcaagggtcgaatatctgatcgatatgccgatggaactgttgcagaaggcggagggcggcgttttgtatgtcggcgacatcgcccaatacagccgcaacatccaagccggcattgcctttattgtcggcaaggcagaacgctgccgcgtcagggtggtcgcatcgggcagcagggcggcaggttcagacggcattgcctgcgaggaaaagctggcggaactgctgtcggaatcggtcgtccgtattccgccgctgcgtatgcagcatgaagatattcccttcctgatacaggggattgcctgcaatgtggcggaaagtcaaaagattgcgcccgccgcattcagtgaagaggcacttgccgcattgacccgttacgactggccgggaaatttcgaccaactgcaaagcgtcgttgcaacgctgttgttggaggcggacggacaggaaatcggcgcggcggcggtttcttcccttttggggcagaatgtgcctgccgagggagcggaagatatggtgggcgggtttaatttcaacctgcccctgcgcgaattgagggaggaggtggagcggcgttatttcgagtaccacatcgcccaagaaggtcagaatatgagcaaagtggcgcagaaggtcggtttggaacgcacgcacctttaccgcaaactcaaacagctcggcatcggcgtttcgcgccgggcgggggaaaaaaccgaagaatag

SEQ ID NO: 49793 - DNA, 996 bp, Neisseria meningitidis
atgaaaacatctatccgatacgcactgcttgccgcagccctgaccgccgcaacccccgcgctggcagacattaccgtgtacaacggccaacacaaagaagcggcacaagccgttgcagatgcctttacccgggctaccggcatcaaagtcaaactcaacagcgccaaaggcgaccagcttgccggtcaaatcaaagaagaaggcagccgaagccccgccgacgtattctattccgaacaaatcccggcactcgccaccctttccgcagccaacctcctagagcccctgcccgcctccaccatcaacgaaacacgcggcaagggcgtgccggttgccgccaaaaaagactgggtggcactgagcggacgttcgcgcgtcgtcgtttacgacacccgcaaactgtctgaaaaagatttggaaaaatccgtcctgaattacgccacgccgaaatggaaaaaccgcatcggttacgcccccacttccggcgcgttcttggaacaggttgtcgccatcgtcaaactgaaaggcgaagcggccgcattgaaatggctcaaaggtctgaaagaatacggcaagccttacgctaaaaactccgtcgcccttcaagcggttgaaaacggcgaaatcgatgccgccctcatcaacaactactactggcacgctttcgcgcgtgaaaaaggcgtacaaaatgtccacacccgcctgaatttcgtccgccacagagatcccggcgcactcattacctattccggcgcagccgtgttaaaatcctcccaaaacaaggatgaggcgaaaaaattcgtcgccttcctcgccagcaaggaaggacagcgcgccctgaccgccgtccgtgccgagtatcctttgaatccgcacgtggtatccaccttcaatttggaacccatcgccaagttggaagcaccccaagtgtccgccaccactgtttccgaaaaagaacacgccacccggctgcttgagcaagccggtatgaaataa

SEQ ID NO: 49794 - DNA, 987 bp, Neisseria meningitidis
atgaaattgtctattcaaaaattcatgatgctgtttgcagcagcaatatcgttgctgcaaatccccattagtcatgcgaacggtttggatgcccgtttacgcgatgatatgcaggcaaaacactacgaaccgggtggtaaataccatctgttcggtgatggtcgcggcagtgttaaaaatcgggtttacgccgtccaaacatttgatgcaactgcggtcggccccatactgcctattacacacgaacggacaggatttgaaggtgttatcggctatgaaacccatttttcagggcacggacatgaagtacacagtccgttcgatcatcatgattcaaaaagcacttctgatttcagcggcggtgtagacggtggttttactgtttaccaacttcatcggacagggtcggaaatccatccggaggatggatatgacggaccgcaaggcagcgattatccgccccccggaggagcaagggatatatacagctattatgtcaaaggaacttcaacaaaaacaaagactaatattgtccctcaagccccattttcagaccgttggctaaaagaaaatgccggtgccgcctctggttttttcagccgtgcggatgaagcaggaaaactgatatgggaaagcgaccccaataaaaattggtgggctaaccgtatggatgatgttcgcggcatcgtccaaggtgcggttaatccttttttaatgggttttcagggattgggagttggggcaattacagacagtgcggtaaacccggtaacctatgcggcagcacggaaaactttacagggtattcacaatttaggaaatttaagtccggaagcacaacttgcggctgcaaccgcattacaagacagtgcttttgcggtaaaagacggtatcaactctgccaaacaatgggctgatgcccatccgaacattacagctactgcccaaaccgcccttgccatagcagaggccgcaactacggtttga

SEQ ID NO: 49795 - DNA, 300 bp, Neisseria meningitidis; identical to SEQ ID NO: 46309

SEQ ID NO: 49796 - DNA, 579 bp, Neisseria meningitidis; identical to SEQ ID NO: 38740

SEQ ID NO: 49797 - DNA, 1119 bp, Neisseria meningitidis; identical to SEQ ID NO: 39438

SEQ ID NO: 49798 - DNA, 294 bp, Neisseria meningitidis; identical to SEQ ID NO: 38873

SEQ ID NO: 49799 - DNA, 126 bp, Neisseria meningitidis; identical to SEQ ID NO: 45386

SEQ ID NO: 49800 - DNA, 450 bp, Neisseria meningitidis; identical to SEQ ID NO: 39721

SEQ ID NO: 49801 - DNA, 351 bp, Neisseria meningitidis; identical to SEQ ID NO: 39679

SEQ ID NO: 49802 - DNA, 447 bp, Neisseria meningitidis; identical to SEQ ID NO: 44675

SEQ ID NO: 49803 - DNA, 801 bp, Neisseria meningitidis; identical to SEQ ID NO: 38785

SEQ ID NO: 49804 - DNA, 723 bp, Neisseria meningitidis; identical to SEQ ID NO: 45345

SEQ ID NO: 49805 - DNA, 855 bp, Neisseria meningitidis; identical to SEQ ID NO: 39178

SEQ ID NO: 49806 - DNA, 1197 bp, Neisseria meningitidis; identical to SEQ ID NO: 39631

SEQ ID NO: 49807 - DNA, 480 bp, Neisseria meningitidis; identical to SEQ ID NO: 38443

SEQ ID NO: 49808 - DNA, 639 bp, Neisseria meningitidis; identical to SEQ ID NO: 38746

SEQ ID NO: 49809 - DNA, 927 bp, Neisseria meningitidis; identical to SEQ ID NO: 39981

SEQ ID NO: 49810 - DNA, 690 bp, Neisseria meningitidis; identical to SEQ ID NO: 39729

SEQ ID NO: 49811 - DNA, 939 bp, Neisseria meningitidis; identical to SEQ ID NO: 44742

SEQ ID NO: 49812 - DNA, 333 bp, Neisseria meningitidis
atgtcccgatgttgtctgaagcggcttcagacggcatcggctgtttcggcgttctccggcggcgttttggaggtggtaagattgtgctgccggcggctatccgtccttttcaatccgagcgtgatgctgtttgtgccggactgtcccgtcggcggcgcggtcgggtttttccaatatgaaatgctttgcccgtttttctggcaggggcggttgcagaccggttcgaatcttgcttacgatgtttttatgtctgccggacgtttgaatggcaggcggaacccccgcacagccgccgttttcttgccctgctttgctccgttgccttataattaa

SEQ ID NO: 49813 - DNA, 711 bp, Neisseria meningitidis; identical to SEQ ID NO: 38849

SEQ ID NO: 49814 - DNA, 1929 bp, Neisseria meningitidis; identical to SEQ ID NO: 38520

SEQ ID NO: 49815 - DNA, 957 bp, Neisseria meningitidis; identical to SEQ ID NO: 39243

SEQ ID NO: 49816 - DNA, 738 bp, Neisseria meningitidis; identical to SEQ ID NO: 39301

SEQ ID NO: 49817 - DNA, 372 bp, Neisseria meningitidis; identical to SEQ ID NO: 38879

SEQ ID NO: 49818 - DNA, 687 bp, Neisseria meningitidis; identical to SEQ ID NO: 39393

SEQ ID NO: 49819 - DNA, 660 bp, Neisseria meningitidis; identical to SEQ ID NO: 39748

SEQ ID NO: 49820 - DNA, 312 bp, Neisseria meningitidis; identical to SEQ ID NO: 38659

SEQ ID NO: 49821 - DNA, 753 bp, Neisseria meningitidis; identical to SEQ ID NO: 39622

SEQ ID NO: 49822 - DNA, 252 bp, Neisseria meningitidis
ttgttagacggcattatgcgcaaagcctgccgcaaccgtccgctgtcggaaacgcaaaccaaacgcaaccggtatttgtcgaagacccgttatgtggtcgaacaaagcttcggtacgctgcaccgtaaattccgctatgcgcgggcagcctatttcgggctgctcaaagtgagtgcgcaaagccacctgaaagcgatgtgtttgaacctgttgaaagcggccaacaggctaagtgcgcccgctgccgcctaa

SEQ ID NO: 49823 - DNA, 942 bp, Neisseria meningitidis; identical to SEQ ID NO: 38511

SEQ ID NO: 49824 - DNA, 2607 bp, Neisseria meningitidis; identical to SEQ ID NO: 47620

SEQ ID NO: 49825 - DNA, 1131 bp, Neisseria meningitidis; identical to SEQ ID NO: 39043

SEQ ID NO: 49826 - DNA, 447 bp, Neisseria meningitidis
atgaatttcagttttgctcccctgtttctggttacgctgattctgttgggggtggtcagcaacaacaattcgattaccatctcggcaaccatattgctgctgatgcagcagacggcattgatacagtttgtcccgttggtcgagaagcacgggttgaatctcggtatcattcttttgaccataggggttttgagtccgttggtttcaggaaaggcgcaggttcctcccgttgccgaatttttgaattttaaaatgatatccgccgtttttatcggtattttcgtggcttggctggcgggacgcggcgtgcctttgatgggacagcagcctgttttaattacagggctgttaatcgggacggttatcggggtggcatttatgggcggtatccctgtcgggccgctgattgcggccggcatcttgtcttttgtcgtcggaaagggttaa

SEQ ID NO: 49827 - DNA, 807 bp, Neisseria meningitidis; identical to SEQ ID NO: 44744

SEQ ID NO: 49828 - DNA, 864 bp, Neisseria meningitidis; identical to SEQ ID NO: 44142

SEQ ID NO: 49829 - DNA, 471 bp, Neisseria meningitidis; identical to SEQ ID NO: 38791

SEQ ID NO: 49830 - DNA, 504 bp, Neisseria meningitidis; identical to SEQ ID NO: 38844

SEQ ID NO: 49831 - DNA, 369 bp, Neisseria meningitidis; identical to SEQ ID NO: 43089

SEQ ID NO: 49832 - DNA, 324 bp, Neisseria meningitidis; identical to SEQ ID NO: 39252

SEQ ID NO: 49833 - DNA, 852 bp, Neisseria meningitidis; identical to SEQ ID NO: 39835

SEQ ID NO: 49834 - DNA, 645 bp, Neisseria meningitidis
gtgacccgccccgccaaaatcaatacttacacacgcatcatcgacgccagccttgcgctcttcaacgaggaaggcgagcgcaacatcagcaccaaccatattgccgcccacttgggcatcagtccgggcaatctctattaccacttccgcaacaaagacgaaatcatcgtccaactgttcaaacgttacagcgaagccctgctggcatacctgaatgaagccgtgctgccgtctgatgtggaagactctatcaactatatggcgggcatttacgacgtcatgtgggaataccgcttcctctttagcgacgtaaacaccctgcttgcacgcagtgccgaattgttgggcgaacacaacaccttcacccaagccaaagtctccccgctcttggtcaacctgctcacccagctcaacggactaaacgtcatcaacgccgaccaaaccgctatgaacgacctcgccgtcaatatgtggatggtcacgaaatactggttcgacttcgacagctccctgcgcggtcgcaccaagctgaccgaagactccaaagcacgcggcatccgccgcaccttaagcctccttcgtccttatcttttgcccgaacaccgcgagaaatacgaccggaaaatcggcaacggcaacccgtaa

SEQ ID NO: 49835 - DNA, 3606 bp, Neisseria meningitidis
atgtttcattttgcatttccggcacaaactgccctgcgccaagcgataaccgatgcctaccgccgtaatgaaatcgaagccgtacaggatatgttgcaacgtgcacagatgagcgacgaagagcgcaacgccgcctccgagcttgcccgccgtttggttacccaagtccgcgccggccgcaccaaagccggcggcgtggatgcgctgatgcacgagttttcactctccagcgaagaaggcatcgcgctgatgtgtctggcagaagccctgctgcgtatccccgacaacgccacgcgcgaccgcctgattgccgacaagatttcagacggcaactggaaaagccatttgaacaacagcccttccctcttcgtcaatgctgccgcctggggcctgctgattaccggcaaactgaccgccacaaacgacaaacaaatgagttccgcactcagccgcctgatcagcaaaggcggcgcaccgctcatccgccaaggcgtaaattacgccatgcggcttctgggcaaacagttcgtaaccggacagaccattgaagaagccctgcaaaacggcaaagaacgcgaaaaaatgggctaccgcttctccttcgatatgttgggcgaagccgcctacacccaagccgatgccgaccgctactaccgcgactatgtcgaagccatccacgccatcggcaaagatgcggcaggacaaggcgtttacgaaggcaacggcatttccgtcaaactctccgccatacatccgcgctactcgcgcgcccaacacggccgtgtgatgggcgaactgttgccgcgcctgaaagagctgttccttttgggtaaaaaatacgatatcggtatcaacatcgatgccgaagaagccaaccgtctggagctgtctttggatttgatggaggcactcgtttccgatcccgatttggcaggctacaaaggcatcggtttcgttgttcaagcctaccaaaaacgttgtccgttcgttatcgactacctgatcgaccttgcccgccgcaacaaccaaaaactaatgatccgcctcgtcaaaggcgcgtattgggacagcgaaatcaaatgggcgcaagtggacggcttgaacggctatccgacctacacccgcaaagtccacaccgacatctcctacctcgcctgcgcgcgcaaactgctttccgcgcaagacgcggtatttccgcaattcgccacccacaacgcctacaccttgggcgcaatctaccaaatgggcaaaggcaaagactttgaacaccaatgtctgcacggcatgggcgaaaccctgtacgaccaagtcgtcggcccgcaaaacttaggccgccgcgtgcgcgtgtacgccccggtcggcacacacgaaaccctgctcgcctacttggtgcgccgcctgttggaaaacggcgcgaactcgtctttcgtcaaccaaatcgtcgatgaaaacatcagcatcgacacgctcatccgcagcccgttcgacaccatcgccgaacaaggcatccacctgcacaacgccctgccgctgccgcgcgatttgtacggcaaatgccgtctgaactcgcaaggcgtggacttgagcaacgaaaacgtattgcagcagcttcaagaacagatgaacaaagccgccgcgcaagacttccacgccgcatccatcgtcaacggcaaagcccgcgatgtcggcgaagcgcaaccgattaaaaaccctgccgaccacgacgacatcgtcggcacagtcagctttgccgatgccgcgcttgcccaagaagcggttggcgcagccgttgccgcgttccccgaatggagtgcgacacctgccgccgaacgcgccgcctgcctgcgccgtttcgccgacctgctcgaacagcacacccccgcgctgatgatgcttgccgtgcgcgaagcaggcaaaacgctgaacaacgccattgccgaagtgcgcgaagccgtcgatttctgccgctactacgcaaacgaagccgaacacaccctgcctcaagacacaaaagccgtcggcgcgattgtcgccatcagcccgtggaacttcccgctcgccatctttaccggcgaagtcgtgtccgcattggcggcaggcaacaccgttatcgccaaacccgccgaacaaaccagcctgattgccggttatgccgtttccctcatgcacgaagccggcatcccgacttccgccctgcaactcgtcctcggcgcaggcgacgtgggtgcggcattgaccaacgatgcccgcatcggcggcgtaattttcaccggctcgaccgaagtggcgcgcctgatcaacaaagcccttgccaaacgcaacgacaatcccgtcctgattgccgaaaccggcggacaaaacgccatgattgtcgattccaccgcacttgccgaacaagtctgcgccgacgtattgaactccgccttcgacagcgcgggacaacgctgctccgccctgcgtatcttgtgcgtccaagaagacgttgccgaccgtatgctcgacatgatcaaaggcgcgatggacgaactcgtcgtcggcaaaccgattcaactcaccaccgatgtcggccccgtcatcgatgccgaagcgcagcaaaacctgttgaaccacatcaacaaaatgaaaggtgttgccaagtcctaccacgaagtcaaaaccgccgccgatgtcgattccaaaaaatccacgttcgtccgccccatcctgtttgaattgaacaacctcaacgaactgcaacgcgaagtcttcggtcccgtcctgcacgtcgtccgctaccgcgccgacgaactcgacagcgtcatcgaccaaatcaacagcaaaggctacgccctgacccacggcgtacacagccgcatcgaaggcacggtacgccacatccgcagccgcatcgaagccggcaacgtttacgtcaaccgcaacatcgtcggcgcagtcgtcggcgtacagcccttcggcggacacggtctgtccggcacaggccccaaagcaggcggttcgttctacctgcaaaaactgacccgcgccggcgaatgggttgccccgaccctgagccaaatcggacaggcggacgaagccgcactcaaacgcctcgaagcactggttcacaaactgccgttcaacgccgaagagaaaaaagccgcagcggccgctttgggacacgcccgcatccgcaccctgcgccgtgccgaaaccgtccttaccggaccgaccggcgagcgcaacagcatctcatggcacgcgcccaaacgcgtttggatacacggcggcagcacggttcaagcctttgccgcactgaccgaacttgccgcctccggcatacaggcagtggtcgaacccgacagccccttggcttcctacactgccgacttggaaggtctgctgctggtcaacggcaaacccgaaaccgtcggcatcagccacgttgccgccctgtcgcctttgaacagcgcgcgtaaacaggaacttgccgcccacgacggcgcactcatccgcatcctcccttcggaaaacggactcgacatcctgcaagtgtttgaagaaatctcttgcagcgtcaacaccacagccgccggcggcaacgccagcctgatggcggtcgccgactga

SEQ ID NO: 49836 - DNA, 1539 bp, Neisseria meningitidis
atggtttccaaactggacaaatactggcagcaccccgccctctactggcctttgctcatcctttttgccgccgccaccccctttaccttcgcaccctactaccacttttggctgatgcccttgattttcggtgccttcgtccgcctcatcgaactgcgtccgcgttttgctgtctcttccgcctacctgttcggcctgaccgcatacacgacacagttctactggatacacaccgccctgcacgacgtttccggcctgcccgacctctatgccgtaccgctgaccttcctactccccgcctaccttgccctttatccggcactgtgtttctggctgtggaaaaaatttaccctgcctcggggcataaaaatcggtttggtactgcccatcctgtggacactgaccgagtttgcccgcgaacgtttcctgaccggattcggctggggcgcaatcggctactcccaaatcaccccggacagcccgctcgccggctttgccccattgggcggcatccacatggttacactggcaaccgcctttctcggtgtctggctggttttggcgagtgataacaccgcacgttcgggcaaacgcctgcttccaattatcctgattgccgccctgcttgccgcaggctacaccgcccgacaaaccgacttcacccgccccgacggcagccgcagcaccgtcgccctgcttcaaggcaacatcgaccaaaccctcaaatggcgtgaagaccaagtcatcccgaccatacagaaatattacgaacaggtcggcaaaaccactgccgacatcgtcatcctgcccgaaaccgccatccccgttatgcgccaaaacctgccggaaaacatactggtaaaatttgccgaacaggcgcaaaacaacggcagcgcgctcgccgtcggcatcagccaatacacttcggacggcaacggttacgaaaacgccgtcatcaacctgaccggttatcaggaaaacaatcaggacggcatcccctactacgccaaaaaccacctcgtccccttcggcgaatacaaaccgctgcccttcctgaccacgccgctttacaaaatgatgaatatgcccctttccgacttccgcaaaggcggcggtaagcaatccgccctgctgatgaaaaaccaaaaaatcgccttcaacatctgttacgaagacggattcggcgacgaactgattgccgccgccaaagatgccacactgcttgccaatgccagcaatatggcgtggtacggaaaatccaacgccatgtaccagcacctccaacaatcgcaggcacgagctatggaactcggacgctatatggtccgtgccaccaacaccggcgcaaccgccatcatctcccccaaaggcaacatcatcgcccaagcccaacccgatacggaaaccgtattggaaggacacatcaaaggctatgtcggcgaaacgccctatatgaaaaccggcagttcatggtggttgatgggcatattgaccctagccgcactgattcttttcatcttccgaaacaaagaacactga

SEQ ID NO: 49837 - DNA, 1428 bp, Neisseria meningitidis
atgtacatcaacggacgctttgaaaacgatttcaacggcgaatggcgcgacgtattgaacccgtccaccgaagaggccatcgcccgcgaacccaaaggcggcagggcggacgttgaccgcgccgtagcggcggcgcgtgcggcgcaaccggcttgggagcgtctgcctgcggtcgaacgcggcgcgtatttgcgcaaaatcgcccaaggcatacgcgaacgcgccgacgagctgaccgacaccatcgttgccgaaggcggcaaaaccaaagacttggcgcgcgtggaagtgatgttcaccgccgactatctcgattaccaagccgaatgggcgcgccgttacgaaggcgaaatcatccaaagcgaccgcccgcgcgaaaacattttattgttcaaacgtccgctgggcgtaattgccggcattttgccgtggaacttccctttcttcctgattgcccgcaaaatgggtcccgccttagtaacgggcaacaccatcgttgtcaaacccagcagcgtaaccccgatcaactgccacatcttcgccgaaatcgtcgatgcggtcggattgcccgcaggcgtgttcaacgtggtgaacggtccgggtgcggaaatcggcaatgccttgtctgcccatccgcaagtcgatatggtcagcctgaccggctccgtcgaagcaggccgccaagtgatggaagccgcttccgccaacatcaccaaagtttcgctggaactcggcggcaaagcccccgccatcgttttgaaagacgcggatttggatttggcggtgaaatccatcttggcttcgcgcgtcggcaacaccggtcaaatctgcaactgcgccgagcgcgtctatgtccacagcagcctgaaagacgcgttcattgaaaaaatgaccgccgccatgaaaggcgtgcgctacggcaaccctgccgaagccgaagcaggcgcgctggaaatgggtccgctgattgaagagcgcgccgtcaaagccgttgccgaaaaagtggaacgggcagtcaaacaaggtgcgaaactggtctgcggcggcaaacgcgccgaagggcgcggctatttcttcgagccgaccctgctgaccgacaccgacaacagtatggacattatgaaagaagaaaccttcggccccgtgctgcccgtttccgctttcgacacgctcgaccaagtcatcgcactggctaacgattgcgagtttggtctgaccagttctgtttatacgactaatttaaacgaagccttctacgttacccgccgcctgcaattcggcgaaacctacatcaaccgcgaaaacttcgaagccatgcagggtttccacgcgggctggaaaaaatccggcatcggcggcgcggacggcaaacacggtttggaagaatatctgcaaacccaagtcgtttatctggaaaccgacatttaa

SEQ ID NO: 49838 - DNA, 2133 bp, Neisseria meningitidis
atggcctatcaagttctcgcccgaaaatggcggcccaaaacctttgccgacttagtcggtcaggaacacgtcgtcaaagccctgcaaaatgccttggacgaaggcaggctgcaccacgcctacctgctgaccggtacgcgcggcgtgggcaaaaccaccatcgcccgcatccttgccaaaagcctcaactgcgaaaacgcgcaacacggcgaaccttgcggcgtgtgccaaagctgcacccaaatcgatgccggacgctatgtcgacctgctcgaaatcgacgccgcctccaacacaggcatcgacaacatccgcgaaatcttggaaaacgcccaatacgcgccgactgccggcaaatacaaagtctatatcatcgatgaagtgcatatgctttccaaaagcgcgttcaacgctatgctcaaaacgctggaagagccgcccgaacacgtcaaattcatcctcgcgaccaccgatccgcacaaagtccccgttaccgtattaagccgctgcctgcaattcgtcttacgcaatatgaccgcgcagcaggttgccgaccacctcgcccacgtcctcgacagcgaaaaaatcgcctacgaacccgccgccctgcaacttttgggacgtgccgccgccggatcgatgcgcgatgccttaagcctgctcgaccaagccatcgccctgggttcgggcaaagttgccgaaaacgatgtccgccaaatgatcggcgcggttgacaaacaatacctttacgaactgctgacaggcatcatcaaccaagacggcgcagccctgaccgccaaagcgcaggaaatggcggcgtgtgccgtcggctttgacaacgccttgggcgaactcgccatactgctgcaacacctcgccctgatacaggcagtgccgaatgccttggcgcacgacgaccccgattccgatattttgcaccgcctcgcccaaaccataagcggcgaacaaatccagctttactaccaaatcgccgtccacggcaaacgcgacctgagcctcgcccccgacgaatacgccggctttatgatgaccctgctgcggatgctggcgtttgcgcccttggcggcaacatcgtgtgatgcaaatgccgtgattgaaaataccgaacttcaatccccatcggcacaaaccgccgaaaaggaaaccgccgcaaaaaagccccaaccgcgccctgaagcggaaaccgcccaaacatccgttcagacggcatccgcagcggcaatgccgtctgaaggcaaaactgccgaacccgttaccaatcaagaaaacaacgatgttccgccttgggaagacgcgccggacgaagcccaaaccgcagccggcacgaccgcgcaaacgtcggcaaaaagcattcagacggcatccgaagccgaaacgccgcccgaaaaccaagtttccaagaacaaggcagccgacaacgtaaccgatgcccccttgtccgaagtgccgtctgaaaaccccattcaggcaacaccgaatgatgaagccgttgaaacggaaacatttgcacacgaagcccctgcagaacctttctacggttacggctttccggataatgactgccccgtagaagacggcgcagaaatcccgccgcccgattgggaacacgccgcccctgccgataccgcaggcggaggcgcggacgaagaagcagaagcaggcggcatcggcggaaacaacacgccgtccgccccgccgcccgaattttccaccgaaaactgggcagccatcgtccggcatttcgcccgcaaactcggcgcggcgcaaatgccggcgcaacactccgcgtggacggaataccatcccgacaccggcctgatggttttggcgatgaccgccgaagcccgcgccaccgccgacaaaaaacgtctcgacaaaatccgcgacacccttgcccaagcctacggactgcaactcaccctgcaaacccaagactggcgcgacgaagccggcagggaaacccccgcgatgcaggacaagcgcgtccaagccgaagacaggcaaaaagcacaagcattgctcgaagccgaccccgccgcacaaaaaatcctccaagcattcggcgcgcaatggcagcccgaatcactggaattggcagcaaaccggccataa

SEQ ID NO: 49839 - DNA, 726 bp, Neisseria meningitidis; identical to SEQ ID NO: 43300

SEQ ID NO: 49840 - DNA, 963 bp, Neisseria meningitidis; identical to SEQ ID NO: 39226

SEQ ID NO: 49841 - DNA, 582 bp, Neisseria meningitidis; identical to SEQ ID NO: 39271

SEQ ID NO: 49842 - DNA, 1221 bp, Neisseria meningitidis; identical to SEQ ID NO: 39275

SEQ ID NO: 49843 - DNA, 663 bp, Neisseria meningitidis
atgaatttgaaattagtatttgaatcgggcgatcccgtcctgatcggtgtgtttgtgttgatgctgttgatgagtatcgtaacgtggtgtttggttgtcttgcgctgcatcaagctgtatcgggcgcgcaaagggaatgccgccgtcaaacggcatatgcgcgatactttgtcgctgaacgacgcggtcgaaaaagtgcgcgccgtcgatgcgcctttgtccaaactggcgcaagaggcattgcagtcttaccgcaactaccgccgaaacgaagcgtccgaactggcgcaggctttgccgttgaacgagtatttggtcattcaaatccgcaacagtatggcgcagattatgcgccggtttgattacgggatgaccgcgcttgcctccatcggcgcgaccgcgccgtttatcgggctgttcggcacggtttgggggatttaccacgccctgatcaatatcgggcaaagcgggcagatgagtattgcggcggttgccggcccgattggcgaggcactggtggcgacggcggcgggtttgttcgtggcgattccggcggtgttggcatacaacttcctcaatcgcggcacaaaaatactgacccaggatttggatgcgatggcgcacgatttgcacgtccgcctacttaatcaaaaggatagctga

SEQ ID NO: 49844 - DNA, 270 bp, Neisseria meningitidis; identical to SEQ ID NO: 39117

SEQ ID NO: 49845 - DNA, 1470 bp, Neisseria meningitidis
ttggcactggcacttgccatcattacccgccgcgtactgctgtctttaggcatcggtattctggtcggcgttgcctttttggtcggcggcaaccccgtcgacggtctgacacacctgaaagacatggtcgtcggcttggcttggtcagacggcgattggtcgctgggcaaaccaaaaatcctggttttcctgatacttttgggtatttttacttccctgctgacctactccggcagcaatcaggcgtttgccgactgggcaaaacggcacattaaaaaccggcgcggcgcgaaaatgctgaccgcctgcctcgtgttcgtaacctttatcgacgactatttccacagcctcgccgtcggtgcgattgcccgccccgttaccgacaagtttaaagtttcccgcgccaaactcgcctacatcctcgactccactgccgcgcctatgtgcgtgctgatgcctgtttcaagttggggcgcgtcgattatcgccacgcttgccggattgctcgttacctacaaaatcaccgaatacacgccgatggggacgtttgtcgccatgagcctgatgaactattacgcgctgtttgccctgattatggtgttcgtcgtcgcatggttttccttcgacatcggctcgatggcgcgtttcgaacaagccgcgttgaacgaagcccacgatgaaactgccgtttcagacggcagccggggcagggtttacgcattgattattcccgttttggccttaatcgcctcaacggtttccgccatgatctacaccggcgcgcaggcaagcgaaaccttcagcattttgggggcatttgaaaacacggacgtaaacacttcgctggtattcggcggcacttgcggcgtccttgccgtcgttctctgcacgctcggcacgattaaaaccgccgactatcccaaagccgtttggcagggtgcgaaatctatgttcggcgcaatcgccattttaatcctcgcttggctcatcagtacggttgtcggcgaaatgcacaccggcgattacctctccacactggttgcgggcaacatccatcccggcttcctgcccgtcatcctcttcctgctcgccagcgtgatggcgtttgccacaggcacaagctgggggacgttcggcattatgctgccgattgccgccgccatggcggtcaaagtcgatccctcactgattatcccgtgtatgtccgcagtaatggcgggggcggtatgcggcgaccactgttcgcccatctccgacacgaccatcctgtcgtccacaggcgcgcgctgcaaccacatcgaccacgttacctcgcaactgccttacgccttaaccgttgccgccgccgccgcatcgggctacctcgcattgggtctgacaaaatccgcgctgttgggctttggcacgacaggcattgtattggcggtgctgatttttctgttgaaagataaaaaacgcgccaacgcctga

SEQ ID NO: 49846 - DNA, 423 bp, Neisseria meningitidis; identical to SEQ ID NO: 39423

SEQ ID NO: 49847 - DNA, 195 bp, Neisseria meningitidis; identical to SEQ ID NO: 46074

SEQ ID NO: 49848 - DNA, 1260 bp, Neisseria meningitidis
atgaaacagaccgtcctcaaaaataacctgcaaaacctgcttgaaagcgcagaaaatatcctgctgcttcaaggccctgtcggcgatttttttctgcgccttgccgactggctgactgcaaacggcaaaaccgtacataaattcaactttaatgcaggcgacgactatttttatccgcccactcaagcgcataccgttgtttttaacgacaactacgatgcctttcctgagtttttgcaagaatacatcactcaacatcacatccaggccgttgtctgctttggcgacacacgcccttatcacgtcattgcaaaacgcattgcaaacgaaaaccaagccagtttctgggcgtttgaagaaggctatttccgcccctactacatcaccttagaaaaagacggcgtcaacgcattttccccgttgccgcgccgtgccgacttttttcttgaacaattccctaagcttgcccagcaagaatataaagcgccaacgccggtacacggcggttttacgcccatggcaaaaaacgctatccgttactatatcgagttgttccgcaatccacgcaaataccccgactacatccaccaccgcgcacccaatgccggccattaccttaaaccgtggtcgctctccatcctcaagcgtttgaactactatattgaagacatccaaatcgccaaacgtgtggaagcaggcaaatacggcaagttttttattgttcccttacaggtattcaacgacagccaagtccgtatccattgcgactttcccagcgtccgcagcttcctgctccatgttttgagttcatttgccgagcacgcgcctgccgataccaacatcatcatcaagcatcatcctatggaccgcggctttatcgactactggcgcgacattaaacgctttatcaaagaacaccccgaactcaaaggccgtgtgatttatgtccatgatgtccccctgcccgttttcctgcgccacggtctcggcatggttaccatcaacagcaccagcggcctgtccggactgattcacaatatgccagttaaggttctcggccgtgcctattatgatattcccggcattactgaccaaaataccttggcagaattttggaatcatccgacaccgcctgacaaagagctgttccatgcctaccgaatgtaccacctcaacgtgacccaaattaacggcaacttctacagtcaggtcttttttcctaacaaaaacacatccgactcttccacaccaacaacctaa

SEQ ID NO: 49849 - DNA, 642 bp, Neisseria meningitidis; identical to SEQ ID NO: 38943

SEQ ID NO: 49850 - DNA, 1662 bp, Neisseria meningitidis
atgacagaatccatcacccgcgacagtatgcaatacgatgtcgtgattgtcggcgcaggcccatcgggtttgtccgccgccatcaaactcaagcagcttgccgaacagaacgggcgcgaaatcagcgtttgcgtggtggagaaaggttcggaggcgggtgcacattcgctggcgggcgcggttatcgatccgattgcgctgaatgagttgattcccgactggaaagaaaaaggcgcgccgctgacgcgtacggtaacgcaggacaaagtgttgttcctgactgagaaaaaagcgttcaatctgcctattaccccaaatttcgacaatcacggcaactacatcgtcagcttgggcgaagtcgtgcgctggttggcggagcaggcggaaaatatgggcgtggaaatctatccgggctttgccgccgccgaagtgctgtatcacgaagacggttcggtcaaaggcattgcaaccggcaatatgggcattggcaaagacggcgagccgaccgattcattccaacccggcatggagctttgggcgcagcaaaccctgtttgccgaaggttgtcgcggttcgctttccaaacaaatcatcgaacgcttcaaactcgaccaaaacagccagccgcaaacttacggcttgggcattaaagaagtttgggaagtgccgtccgaacagcatcagcccggtttggtggtgcacagcgcaggctggccgctggacagcaaaacctacggcggcgcgtttgtttaccatttcgatgacaacaaagtcgccgtcggcttcgtggtcggtttggactatcaaaatccttatctgtcgccgtttgaagagttccaacgtttcaaaacccatcccgaaatccgcaaaacctttgaaggcggccgccgcattgcttacggcgcgcgttcgctgattgaaggcggtttgcaaagcctgccgaaactctcgttcaaagggggcattttggtcggcgatgcggcgggtttcctcaatatgccgcgcatcaaaggcattcataccgcgatgaaatccgccatgctcgccgccgaagccgtgttccccttgttggaaaaccttgaagaagtggagggtttcgacagcggcaaagaggcggcggattatcagcaacgttttgaacaaagctggctgtatcaagagctttacgccgcgcgcaacgtccgtccgtcattcaaatggggcgtttacctcggctcgctttataccggcatcgaccagatgattttcagaggcaaagccccgtggaccttgaaacatcacggtaaagacaacgagcagctcaaaaaagccgccgcgtgcaagccgattgcttatccgaaacccgatggcgtgttgaccttcgaccgcttgagcagcgtcttccttgccaatctcgcgcacgaagaaaaccagcccgaccatttggtgctgaacaatccgcaaacgatgataaacgtgaactacaaagaatacgcctcgcccgaaacgcgctattgtccggcgggtgtgtacgaaattattgaagaaaacggcaatccgcgcctgcaaatcaacgcggcaaactgcgtgcactgcaaaacctgcgacatcaaagacccgacgcaaaacatcacttggatttgccccgaaggcgcgagcgggccgaattacggcgggatgtaa

SEQ ID NO: 49851 - DNA, 1248 bp, Neisseria meningitidis; identical to SEQ ID NO: 41324

SEQ ID NO: 49852 - DNA, 270 bp, Neisseria meningitidis
ttgcgtaaagaggcttttttgtatattgttggacaccatgtaattttttgcggacatggttttttgtcagcatcaacggttgcttcttatttaagtttacttagcaataaattgagagagaacaatccggatattgttcaatttaatattgaattcaaagcagtaggcaattgcgacaagttgtcattgatacaacaacatggggtaaaaagtattcttttagatgcttcggcatatcaattatccagaaacaggcggattcgcatttga

SEQ ID NO: 49853 - DNA, 1410 bp, Neisseria meningitidis; identical to SEQ ID NO: 38903

SEQ ID NO: 49854 - DNA, 567 bp, Neisseria meningitidis; identical to SEQ ID NO: 38406

SEQ ID NO: 49855 - DNA, 330 bp, Neisseria meningitidis; identical to SEQ ID NO: 40782

SEQ ID NO: 49856 - DNA, 300 bp, Neisseria meningitidis; identical to SEQ ID NO: 44211

SEQ ID NO: 49857 - DNA, 291 bp, Neisseria meningitidis; identical to SEQ ID NO: 38154

SEQ ID NO: 49858 - DNA, 999 bp, Neisseria meningitidis; identical to SEQ ID NO: 39365

SEQ ID NO: 49859 - DNA, 234 bp, Neisseria meningitidis; identical to SEQ ID NO: 41393

SEQ ID NO: 49860 - DNA, 483 bp, Neisseria meningitidis
atgaaatacttgaatcttgccgcaatcacccttggcgccacatttgccgcacataccgcctcggcagacgaactggccggatggaaagacggtgccgcgcaaagcctgcaatcgctcaaagcccccgtccgcatcgtcaacctttgggcgacctggtgcggtccgtgccgaaaagagatgcctgccatgtccaaatggtacaaagcgcagaaaaaaggcagcgtcgatatggtcggcatcgcgctcgacacatccgacaatatcggcaacttcctcaagcaaacccctgtttcttacccgatttggcgttacactggggcgaacagccgaaactttatgaaaacctacggaaacactgtcggcgtactgccctttaccgtcgtcgaagcaccgaaatgcggatacaggcagaccattaccggggaagtgaacgaaaaaagcctgaccgaagccgtcaaactcgcccattcaaaatgccgttaa

SEQ ID NO: 49861 - DNA, 1002 bp, Neisseria meningitidis; identical to SEQ ID NO: 38823

SEQ ID NO: 49862 - DNA, 282 bp, Neisseria meningitidis
atgaaaaccctcgtcctcctcctgctttccttctccacgaccaccgctttcgccgcatacggtttgggtttggggcaggcaccgaaatatcctgccgactttcgcgcctacggttatgtttattccggacggcagggctgggttttaaaaacagaggcggatgccattaaattagacacgcttttcaaacgctttgtgtaccgtccttccgccgccaatcaaaaccccgtcggacagcgttcggacggcatacccgccaaccacacaaaggaaaaaccatga

SEQ ID NO: 49863 - DNA, 2364 bp, Neisseria meningitidis
atgcaattctcctactcatggctgaaaacccaagccgataccgaactttccgccgataagctggaacacctgttaacgatgtccggcttggaagtggaagaagccgagactgccgcgcctgcgtttacgggtgtggtaattgccgaagtgaaatccgttgaaaaacatcctgatgccgaccgtttgaacgttacccaagtcgatgcgggtacgggtgggttggttcagatcgtgtgcggtgcgccgaatgtgaaagcgggcatcaaagtgccgtgttcgctgccgggtgccgttttgccgggtaatttcaaaatcaagccgaccaaaatgcgcggcgtggtgtcggacgggatgttgtgttccaccgacgaactcggtctgcccgacgacggtgtgaacggcctgcacattctgcctgaagatgcgcccgtcggtaccaatatccgcgaatacttggatttggacgatacgctgtttacgttgaaaattacgcctaaccgcgccgactgcttgagcatcaaaggcattgcgcgcgaagtgtccgcattgacggggtgcgcgttcaggcagcccgaaatccataccgcgccgatcacgggcagtcgaaaacagcccgtgcagattaacgcgcctgccgattgcggccgttttatcagccgcgttattgaaaatgtcaatgcgaaagcggctactcccgattggatgaaacaacgtttggagcgcagcggcatccgcagtatttccgcgctggtggacatcggcaattatgtgatgctggaaatcggtcagccgatgcacgtttttgatgccgacaaactttccggcagcctgcacatccgccgcgcgcgcgaaggggaaacgctggaatgcctgaacgagaaaaccgtttccctgtctgaaaacacgctggtcgtggcggacgaaaaaggcgtgttgagtttggcgggcttaatgggcggcgcggcgagcgcggtttcagacggcacgcaaaatatcgtgctggaagcggcttggtttgcgcccgaaatcatcgccggcaaatcgcgccaatacggtttcggttcggattcgtcgttccgcttcgagcgcggcgtggattaccgtttgcaggcggatgccatggaacgtgctaccgaattggtgttgcagatttgcggcggtgcggcaggcgagatggttgaagcacaaggtaaattgcccgaagccaagcaggttggattgcgtttggaccgtctgaaaaccgtgttgggcgtggacattcctgccgaacaggtggaaaccattttgcaacacttgggtctgcagcccgagaaaacggcggaaggcttccgcgttaccgcgccgagcttccgttttgacatcgaaattgaggctgatttgattgaagaaatcggacgcgtttacggctatgaaaacatccccgacgattacacgtcaggccgtctgaaaatgctggaactgcccgaaacacgtcgctcgcgttttgccgtttacaacgaaatggcggcgcgtggctaccgcgaagtggtcagctatgccttcgttgacgagcagtgggaacaagattttgccgccaacgccgaccccatccgcctgcaaaacccgctggcggcgcaatatgccgtgatgcgttccacactcatcggcggcttggtggaaattttgcaaaacaacctgaaccgcaaacaaaaccgcgtgcgcgtgtttgaaatcgcccgcgtgttcggcaaaggttcagacggccggtttgtccaaaacgaacgcatcggcggcttgtggtacggcgcggcaatgcccgaacaatggggcgggaaaacgcgcaatgcggatttttacgacatcaaggcagatgtggaaaatctgttgaaaaacaaagcggtcgagttcgttaaaaccggatatcccgccctgcatcccggacgcgccgccaatatcgtttcagacggcaaagtcatcggctttgtcggcgaactgcatccgaaatggctgcaaaaatacgacctgccgcaagcgccgctggtatttgaaatcgatatggcggccgtgttggaatgcgggaaaacgcgctatcgggccgtatcgaaattccagccggtgcgccgcgatttggcgtttgtgatgccggaagctatgagccatgatgatttgctgcttgtcttgaaaggcgcggcaaacaagttggtacaggaaatcagcgtgtttgacgtgtatcgcggcatgggactgcccgaagggatgaagagcgtggcggtcaaagtgattttgcaggatatggaaaacacgctgacggatgaggcggtcgagccgcttatcggaaaactgattggcgcggcaacggcggcaggggcgcggcttcgcagttaa

SEQ ID NO: 49864 - DNA, 1392 bp, Neisseria meningitidis; identical to SEQ ID NO: 38462

SEQ ID NO: 49865 - DNA, 1071 bp, Neisseria meningitidis
atgaacctgatttcacgttacatcatccgtcaaatggcggttatggcggtttacgcgctccttgccttcctcgctttgtacagcttttttgaaatcctgtacgaaaccggcaacctcggcaaaggcagttacggcatatgggaaatgctgggctacaccgccctcaaaatgcccgcccgcgcctacgaactgatgcccctcgccgtccttatcggcggactggtctctctcagccagcttgccgccggcagcgaactgaccgtcatcaaagccagcggcatgagcaccaaaaagctgctgttgattctgtcgcagttcggttttatttttgctattgccaccgtcgcgctcggcgaatgggttgcgcccacactgagccaaaaagccgaaaacatcaaagccgccgccattaacggcaaaatcagcaccggcaataccgacatttggctcaaagaaaaaaacagcattatcaatgtgcgcgaaatgttgcccgaccataccctgctgggcattaaaatctgggcccgcaacgataaaaacgaactggcagaggcagtggaagccgattccgccgttttgaacagcgacggcagttggcagttgaaaaacatccgccgcagcacgcttggcgaagacaaagtcgaggtctctattgcggctgaagaaaactggccgatttccgtcaaacgcaacctgatggacgtattgctcgtcaaacccgaccaaatgtccgtcggcgaactgaccacctacatccgccacctccaaaacaacagccaaaacacccgaatctacgccatcgcatggtggcgcaaattggtttaccccgccgcagcctgggtgatggcgctcgtcgcctttgcctttaccccgcaaaccacccgccacggcaatatgggcttaaaactcttcggcggcatctgtctcggattgctgttccaccttgccggacggttcttcgggtttaccagccaactctacggcatcccgcccttcctcgccggcgcactacctaccatagccttcgccttgctcgctgtttggctgatacgcaaacaggaaaaacgttga

SEQ ID NO: 49866 - DNA, 1371 bp, Neisseria meningitidis; identical to SEQ ID NO: 44745

SEQ ID NO: 49867 - DNA, 666 bp, Neisseria meningitidis; identical to SEQ ID NO: 39825

SEQ ID NO: 49868 - DNA, 537 bp, Neisseria meningitidis; identical to SEQ ID NO: 38262

SEQ ID NO: 49869 - DNA, 414 bp, Neisseria meningitidis
atgatgcccgcctacgcctacgccgcgctcgctttttccgccttcacttccgccaccctcctgcccggcacatccgaagccgcctttgccctgttcgtccaccgctttcccgaacacgcatacggcgcgttgctgtgcgccggccttgccaacggattgggcagtatggtttcctattggatggggcgtttgctgccctcccgaaaaatgccgtctgaaaaaacactgaatctgatgcggcgtttcggtatttggctgcttgcgtttgcctggctgcccgtcgtcggcgacgcactgccgcttgccgccggctggctgcggttgaatccgtggacaagcgggctgatgctggttatcggcaaaacggcgcgttacgccttcattctgtggggaatgcaatattacgccgcctaa

SEQ ID NO: 49870 - DNA, 537 bp, Neisseria meningitidis; identical to SEQ ID NO: 38767

SEQ ID NO: 49871 - DNA, 552 bp, Neisseria meningitidis; identical to SEQ ID NO: 38339

SEQ ID NO: 49872 - DNA, 1065 bp, Neisseria meningitidis; identical to SEQ ID NO: 44887

SEQ ID NO: 49873 - DNA, 702 bp, Neisseria meningitidis; identical to SEQ ID NO: 39401

SEQ ID NO: 49874 - DNA, 276 bp, Neisseria meningitidis; identical to SEQ ID NO: 44823

SEQ ID NO: 49875 - DNA, 372 bp, Neisseria meningitidis; identical to SEQ ID NO: 39427

SEQ ID NO: 49876 - DNA, 1311 bp, Neisseria meningitidis
atgagcgtaactgttgaaactttagaaaatctggaacgcaaagtagtgttgtccctgccttggtccgaaatcaacgcagaaaccgataaaaaactgaaacaaacccagcgccgtgcaaaaatcgacggtttccgcccgggtaaagcacctttaaaaatgattgcccaaatgtacggtgcgagcgcgcaaaacgacgtgatcaacgagctggtgcaacgccgcttccacgatgttgccgttgcccaagagttgaaagtggcaggcttcccccgttttgaaggcgttgaagaacaagacgataaagaatctttcaaagttgccgccatttttgaagtgttccccgaagtcgttatcggcgatttgtctgcacaagaagttgaaaaagtaaccgcttccgtcggtgatgccgaagtggaccaaaccgtagaaatcctgcgcaaacaacgcacccgcttcaaccatgtcgaacgcgaagcccgaaacggcgaccgcgtcatcattgactttgaaggcaaaatcgacggcgaaccttttgcaggcggcgcatccaaaaactacgccttcgtattgggcgcaggtcaaatgctgcctgaatttgaagccggcgtagtcggcatgaaggctggcgaaagtaaagacgttaccgtcaacttccctgaagaataccacggcaaagacgttgccggtaaaactgccgtgttcaccattacgctgaacaacgtttccgaagcgactctgcctgaagtcgatgcagattttgcaaaagccttgggtattgcggatggcgacgttgccaaaatgcgcgaagaagtgcagaaaaacgtaagccgcgaagtggaacgccgcgtaaacgaacaaaccaaagaatccgtaatgaacgcgctgctcaaagccgtagagctgaaagcacctgttgctttggtcaatgaagaagccgcacgcttggcaaacgaaatgaaacaaaattttgttaaccaaggtatggctgatgctgccaacttggatctgcctttggatatattcaaagaacaagccgaacgccgcgtatctttgggtctgattttggccaaactggttgatgaaaacaaactggaaccgactgaggagcaagtcaaagccgttgtcgccaacttcgcagaaagctacgaagatcctcaagaagtaatcgactggtactacgcagagccttcccgcctgcaagccccgacttctttggcgatagaaagcaacgtcgttgatttcgttttgggtaaagccaaagtaaacgaaaaagctttgtcttttgacgaagtgatgggcgcgcaagcctga

SEQ ID NO: 49877 - DNA, 1776 bp, Neisseria meningitidis; identical to SEQ ID NO: 39332

SEQ ID NO: 49878 - DNA, 396 bp, Neisseria meningitidis; identical to SEQ ID NO: 39569

SEQ ID NO: 49879 - DNA, 588 bp, Neisseria meningitidis; identical to SEQ ID NO: 38394

SEQ ID NO: 49880 - DNA, 207 bp, Neisseria meningitidis; identical to SEQ ID NO: 39219

SEQ ID NO: 49881 - DNA, 264 bp, Neisseria meningitidis
ttgcgcccgggcggttcgtggctcgcgctcaaagccctccccctctgtctgccgctttcaggtatcttgaaaaagaaaatctatacctaccaatacagctccatgctggttctgatttattttgccgaagccgttatgcgcctgttcgacgcctatccggcagaacagatttgcgccgcgctttccgcagtattcagcatcatcttcttcatatcctgcctgtcgttcgtcaaacaatacaaggaaacaaacaatgcccgctga

SEQ ID NO: 49882 - DNA, 2208 bp, Neisseria meningitidis; identical to SEQ ID NO: 39167

SEQ ID NO: 49883 - DNA, 567 bp, Neisseria meningitidis; identical to SEQ ID NO: 38972

SEQ ID NO: 49884 - DNA, 1287 bp, Neisseria meningitidis; identical to SEQ ID NO: 39561

SEQ ID NO: 49885 - DNA, 951 bp, Neisseria meningitidis; identical to SEQ ID NO: 44968

SEQ ID NO: 49886 - DNA, 1455 bp, Neisseria meningitidis; identical to SEQ ID NO: 39072

SEQ ID NO: 49887 - DNA, 174 bp, Neisseria meningitidis; identical to SEQ ID NO: 38300

SEQ ID NO: 49888 - DNA, 564 bp, Neisseria meningitidis; identical to SEQ ID NO: 36962

SEQ ID NO: 49889 - DNA, 519 bp, Neisseria meningitidis; identical to SEQ ID NO: 36779

SEQ ID NO: 49890 - DNA, 768 bp, Neisseria meningitidis
atgcaaacccgcattctctccgccgtactgctggctttttcaaccgctgcctttgccgggggcgcattcacgctacaattcgacaacccgtccgaagacggcggcttcacgcaaaaccagcttttgagcgcgccttacggatttggctgttcgggcggcaatgcttcgcccgcgctgtcgtggaaaaatccgcccgccgggacaaaaagtttcgtcctgaccgtttacgataaagacgcgccgaccggactgggctggatgcaccgggtggtcgccgacattcccgccgatgtccaccgccgcaacgcgacctcgctgcaattaagccgctgcgccaacatcgccgaccggactgggctggatgcactgggtggtcgccgacattcccgccgatgtccgccgccgcaacgcggcctcgctgcaattaagccgctgcgccaacatcgccgacgaccagtccgcagccatatcggcggtaatcagtttgcggatttgccgcatcaggttgacgccttcgtacacggcaaaaccgatgccgtcatgctgcaaccacgccaacacgccgcaaagcgcggcctccgccgcattgtgcggcacttcttcatccgtcagcaccgccgccgcataatcaaacgccgcgcccatccgcccggggtgcggcagcttcaccgcatcgcacactgcctgcgccgtcccgtattgtgcggcgaacctttctacggtttcctgttcaaaagcaatccattgcgcctgatagaggccgtctga

SEQ ID NO: 49891 - DNA, 426 bp, Neisseria meningitidis; identical to SEQ ID NO: 39901

SEQ ID NO: 49892 - DNA, 375 bp, Neisseria meningitidis; identical to SEQ ID NO: 38588

SEQ ID NO: 49893 - DNA, 183 bp, Neisseria meningitidis
gtgctgtttgcccgtaaacctgctgcctcccgaatcggtttgtccggtttgggaggtatgtttttcaagatgttgcaatttcgtacggtttgcggtcggcggattcagatttttccacttgatacagactttcagatatggacacttcaaaacaaacactgttggacgggatttttaagctga

SEQ ID NO: 49894 - DNA, 435 bp, Neisseria meningitidis; identical to SEQ ID NO: 40438

SEQ ID NO: 49895 - DNA, 558 bp, Neisseria meningitidis; identical to SEQ ID NO: 43644

SEQ ID NO: 49896 - DNA, 261 bp, Neisseria meningitidis
ttgacgaaggcggtacgccgaaaaaatgtgcaaccccccaaaatatgctatgcattccgaacgccctccgcatacgggcaataccttgccgacgcgggattcgactacctcagcttcgccaacaaccacagcaacgacttcggcgcgcaaggcatcacggcaacggcggcgagcggcagctcttttacatactcgatcgcgctaaagccgctgccgataacgaggccaaaattgcggaaaataccgccatcgcccagataa

SEQ ID NO: 49897 - DNA, 417 bp, Neisseria meningitidis; identical to SEQ ID NO: 39888

SEQ ID NO: 49898 - DNA, 306 bp, Neisseria meningitidis; identical to SEQ ID NO: 40024

SEQ ID NO: 49899 - DNA, 435 bp, Neisseria meningitidis; identical to SEQ ID NO: 39950

SEQ ID NO: 49900 - DNA, 330 bp, Neisseria meningitidis; identical to SEQ ID NO: 37738

SEQ ID NO: 49901 - DNA, 369 bp, Neisseria meningitidis; identical to SEQ ID NO: 37026

SEQ ID NO: 49902 - DNA, 171 bp, Neisseria meningitidis; identical to SEQ ID NO: 42347

SEQ ID NO: 49903 - DNA, 453 bp, Neisseria meningitidis
ttggttatgtatgtagtaaaatcagccaatgatggaggtaattccctatttttaagttcatcagatattgtcaatcagttatctaaaacagaaaccggtaaaaaacacttaaaaacattaacgggcaatttatatccatttaaaacaccagcatcatttgataaaaaacaaggtgtgagatggggtaatatcttatcggtcaatactcaaatgattagatttagaagtgattgtatctataaaggtattgaagaaaatagaaataaagtatcaaaggaaatggtacttgcacttgattatcttgtaaatgttataaaaaatgcgagtgatattcaagaattttctgcacaagatgatggtttgattattattgacaatgtcaatggcttgcatgccagaactgattatacggataaaaacaggcattatattagagcaagaattactgtataa

SEQ ID NO: 49904 - DNA, 219 bp, Neisseria meningitidis; identical to SEQ ID NO: 36291

SEQ ID NO: 49905 - DNA, 114 bp, Neisseria meningitidis; identical to SEQ ID NO: 42949

SEQ ID NO: 49906 - DNA, 177 bp, Neisseria meningitidis; identical to SEQ ID NO: 38352

SEQ ID NO: 49907 - DNA, 138 bp, Neisseria meningitidis; identical to SEQ ID NO: 39930

SEQ ID NO: 49908 - DNA, 465 bp, Neisseria meningitidis; identical to SEQ ID NO: 36919

SEQ ID NO: 49909 - DNA, 335 bp, Neisseria meningitidis
atgttggacgcaagcccaccgcaagagcggggtagccgccgcgaaacgcgcagccaaaaaaaagcgtcgcaaataactgcctttttccgatggctgggcggcttggtctctaatccggccacagggaaaatcagccataccaaactatggacaaacgtggcagccgcttctatgacctataagttctctcaaacagcagatgcgccggaatggctctggtgggcttatggcgcattggtcggcgggtatgcattaatcaaacgcggcatcgccgccgtaccgcagttggcagaaatcaaaaagtccgcgaatgcggaagaatggagcggcaatga

SEQ ID NO: 49910 - DNA, 318 bp, Neisseria meningitidis; identical to SEQ ID NO: 43381

SEQ ID NO: 49911 - DNA, 363 bp, Neisseria meningitidis; identical to SEQ ID NO: 37674

SEQ ID NO: 49912 - DNA, 306 bp, Neisseria meningitidis; identical to SEQ ID NO: 38913

SEQ ID NO: 49913 - DNA, 225 bp, Neisseria meningitidis
atgaatcaaaagtatattttatctgcaaacaataatagtttgatagaagaaattcacaatacagtacagcgtattgggtattgtattgttcgaggtcttaatctaaaccatcttgatggcagccggagaaacaagaaattatttgactttctatctcaattaggaatgctgacaaaccacaaaggcgatggttttaaatctatattttgggatattaaatattga

SEQ ID NO: 49914 - DNA, 279 bp, Neisseria meningitidis; identical to SEQ ID NO: 37183

SEQ ID NO: 49915 - DNA, 393 bp, Neisseria meningitidis; identical to SEQ ID NO: 39912

SEQ ID NO: 49916 - DNA, 144 bp, Neisseria meningitidis; identical to SEQ ID NO: 39918

SEQ ID NO: 49917 - DNA, 396 bp, Neisseria meningitidis; identical to SEQ ID NO: 39895

SEQ ID NO: 49918 - DNA, 291 bp, Neisseria meningitidis; identical to SEQ ID NO: 39870

SEQ ID NO: 49919 - DNA, 390 bp, Neisseria meningitidis; identical to SEQ ID NO: 37209

SEQ ID NO: 49920 - DNA, 345 bp, Neisseria meningitidis; identical to SEQ ID NO: 36231

SEQ ID NO: 49921 - DNA, 192 bp, Neisseria meningitidis; identical to SEQ ID NO: 39474

SEQ ID NO: 49922 - DNA, 345 bp, Neisseria meningitidis
ttgcgcactcactttgtcatttccaatgttccaagtacacctaatctgctaagaggaagacagcttgaaggaaaacttattttagaagttcctgctcaggtcaatccaattccacaatctgtattaagggcggcacaagaagaaaatgttatcattagagatacaacaggaaggatttacaataggtggtggtttagtattaggtggttgtgcaggtgcacatcttgcaagaaaagaaccattgatactaacagggaaaacaggggcaggtgcgtcagcaattgcaaatgcaagcattggatatcaatggactgtcaatttgtcagagccaaaagaaggagctaa

SEQ ID NO: 49923 - DNA, 924 bp, Neisseria meningitidis; identical to SEQ ID NO: 40004

SEQ ID NO: 49924 - DNA, 429 bp, Neisseria meningitidis; identical to SEQ ID NO: 41701

SEQ ID NO: 49925 - DNA, 312 bp, Neisseria meningitidis; identical to SEQ ID NO: 39965

SEQ ID NO: 49926 - DNA, 216 bp, Neisseria meningitidis; identical to SEQ ID NO: 37963

SEQ ID NO: 49927 - DNA, 315 bp, Neisseria meningitidis; identical to SEQ ID NO: 37950

SEQ ID NO: 49928 - DNA, 396 bp, Neisseria meningitidis; identical to SEQ ID NO: 40899

SEQ ID NO: 49929 - DNA, 396 bp, Neisseria meningitidis; identical to SEQ ID NO: 39968

SEQ ID NO: 49930 - DNA, 1503 bp, Neisseria meningitidis
atgagtcgtgaaatgttacagctggcagaagcactggcaagcgaaaaaaacgttgatgcggaagtcgtcttccaagcactggaattcgccctgtctaccgccgccaagaaaaaggcagaccgcgaacacatggacgtgcgcgtccaaatcaaccgcgacaccggcgaataccaaaccttccgccgctggctgattgtcgccgatgaagactatacctatcccgatgtcgaaaaaaccatcgaggaaatccaagaggaaattcccggcaccgccatccaaatcggcgaatactatgaagagcagctacccaacgaaggcttcggccgccaagccgcacaaaccgccaaacaaatcatcctgcaacgcatccgcgatgcggagcgcgagcaaaatctgaacgagtttctcgccgtcaaagaagacatcgtgtccggtacggtcaaacgcgtcgaacgccacggcatcatcgtcgaagtcgttgccggcaaactggacgcgctgattccgcgcgaccaaatgattccgcgcgaaaacttccgcagcggcgaccgcatccgcgccctcttcctgcgcgtcgaagaaatcggcaacatcggccgcaaacaagtcatcctgagccgtacttccggcgatttcctcgtcaaactgtacgccaatgaagtacctgaaattgcagacggcatgcttgaaatccgcgctgtcgcccgcgacccgggacaacgtgccaaagtcgccgtcaaagccaacgaccagcgcatcgatccgcaaggcacctgtatcggcgttcgcggttcgcgcgtcaacgcggtcagcaacgaattgtccggcgaacgcatcgacgttgtcctttggtcgcccgagcctgcccaattcgtcatgagcgcgctctcacccgccgaggtcagccgcatcgtcatcgacgaagacaaacacgccgtcgatgtcatcgttgccgaagaccagctcgcgctcgccatcggacgcggcggtcaaaacgtgcgccttgcttccgacctgactggctggcagctcaacatcatgacctctgcagaagcagacgagcgcaatgcggcagaagatgccgccatccgccgcctgtttatggattacttgaacgtggacgaagaaaccgccgacgtactggttcaggaaggttttgcaaccttggaagaagtcgcctatgttcctgccgccgaactgcttgccattgaaggatttgacgaagaaatcgtcgatatgctccgcaaccgcgcccgcgatgccatcctgaccatggcgattgccgccgaagaaaaactgggcgaagtatccgacgatatgcgcaacctcgaaggcatagatgccgatatgctccgcagccttgccgaagcaggcattaccacccgcgacgacttggcagagcttgctgtggacgaactgattgaaatcaccggtgtaaacgaagaaaccgcaaaagccgtcatcctgaccgcacgcgaacactggtttaccgaagacaaataa

SEQ ID NO: 49931 - DNA, 525 bp, Neisseria meningitidis
atggaaatgaaacaaatgcttttgaccgtcggcgtggcggcggtgttggcaggctgcggcaaggatgccggcggttacgagggttattggcgcgaaaagtcggacaaaaaagagggtatgattgccgtcaaaaaagaaaaaggcaattacttccttaataaaatcaacgtggttacaggtaaggaagaatctatgcttttgtctgaaaaagacggcgcgctttcgataaacacggggataggggaaatcccgattaaactttccgacgacgggaaagagctgtatgtcgaacgcaggcagtatgtgaaaaccgatgcggcgatgaaggacaaaatcatcgcccatcagaaaaagtgcggacaaacggcacaggcatacctcgacgcacgaaaggcgttgccgtcaaaccagacgtatcagcagcatcaggcggcgatcgagcagttgaaacggcggtttgaagccgagtttgacgaattggaaaaagaaatcaaatgcaacggcaaaccgacattgttgttttag

SEQ ID NO: 49932 - DNA, 318 bp, Neisseria meningitidis; identical to SEQ ID NO: 41968

SEQ ID NO: 49933 - DNA, 732 bp, Neisseria meningitidis; identical to SEQ ID NO: 40027

SEQ ID NO: 49934 - DNA, 2256 bp, Neisseria meningitidis; identical to SEQ ID NO: 39911

SEQ ID NO: 49935 - DNA, 318 bp, Neisseria meningitidis
atggtagtacgcggcggaatctatctggtctccttagacccgaccgtaggaagcgaaatcaaaaagacacgtccttgtgtcgtagtctctcctcctgaaatacacaactatctcaagactgtgctgatcgttcctatgacgagcggaagccgtcctgccccgttccgcgtcaatgtccgctttcaggataaagacggtttgcttttacccgaacaaattagggctgtggataaagccggattggtcaaacatcttggaaatttagacaacagtacggctgaaaaactgtttgcagtattgcaggagatgtttgcctga

SEQ ID NO: 49936 - DNA, 375 bp, Neisseria meningitidis; identical to SEQ ID NO: 39975

SEQ ID NO: 49937 - DNA, 285 bp, Neisseria meningitidis; identical to SEQ ID NO: 39839

SEQ ID NO: 49938 - DNA, 687 bp, Neisseria meningitidis; identical to SEQ ID NO: 36558

SEQ ID NO: 49939 - DNA, 354 bp, Neisseria meningitidis; identical to SEQ ID NO: 39889

SEQ ID NO: 49940 - DNA, 369 bp, Neisseria meningitidis; identical to SEQ ID NO: 39932

SEQ ID NO: 49941 - DNA, 1320 bp, Neisseria meningitidis
atgaaggcagccgccgcctttgcggcaggtttggatgcacaggctgttcgcatcgtcatcgacatttacggctcgctcgcactgaccggatacggacacggtacatttgacgcgctgatgctcggtttggaaggcagcctgccgcacgacatcccgcttgccggcattcccgaacgcctcgaacgcatccgcacgcagcacatcctccggctcaacgggcaagaaatccgcttcatccccgaccgcgacctgaacatactcggcaatcaagtgctgcccaaacaccccaacggcctgcgttttaccgcctatgcttcagacggcacggtattgaatgaacaggtttattattcggtcggcggcggctttgtcgttaccgaagaagattttgaccggcaggcggaaacggaaaaagccgttccctatccctataccagttgcgccgaactgcttgcccgatgccgtctgaaccggctcgacatctccgaagtcgtgttggcaaacgaagccgcgcttgccggatgcggcgaagccgaaatccgccgccgcgccgctgccgttgccgaggttatggaaggctgcatcaaacgcggcttgggtgcggacggcgaactgcccggctgattgaacgtccgccgccgcgccccgcatcttgccaccaagctcaaagtcctgcgcgaaaccgaaatcgtcaacacccagctctggccgatggtgtacgccatggcggtcaacgaagaaaacgccgccggcggacgcgtcgttaccgccccgaccaacggggcggcaggcatcattcccgccgtattgcactatttccgcaagttcaacccccacgccacacaggagcgcgtcgaaaacttcctgctcaccgccggcgcaatcggcatcctctacaaaaccaacgcctccatttccggtgcggatgtcggctgtcagggcgaagtcggcgtagcgtgttcgatggcggcgggcgcatacgccgaagtcatcggcggcacgcccaaacaagtggaaaacgccgccgaaatggcgatggaacaccatttggggctgacttgcgaccccgtcggcggactggtgcaaatcccctgcatcgagcgcaacggcatcgccgccgaaaaagccctcaaactcggcacgctcgcgcttttggaagacggcacggacaaaaaagtctcgctcgacgaagtcatccgaaccatgctgcaaaccggccgggatatgaaggcgacctacaaagaaacctcgcttgccggactcgccgccacgctccggaaaaaagccgtccccgtatccgtgcgcgtggtcgagtgctga

SEQ ID NO: 49942 - DNA, 300 bp, Neisseria meningitidis
atgaagaaaatgttcgtgctgttctgtatgctgttctcctgcgccttctcccttgcggcggtaaacatcaatgcggcttcgcagcaggagttggaggcgctgccgggcataggccctgcgaaggcgaaggccattgcggaataccgtgcgcaaaacggtgcgttcaagtctgtggacgatttgaccaaggtaaagggcatcggccctgcggtgctggcgaagctgaaggatcaggcttccgtcggcgcgcccgcaccaaaagccccagccaaaccggtgctgcccgcggataaaaaatag

SEQ ID NO: 49943 - DNA, 672 bp, Neisseria meningitidis
atgatgcaaaaacacaaatgtctaatagattttattttgactgttgccagccaaattgcttatgctgacttacctttaagtttggaagaattattgactgacaagggtaaattcaaactagaaagcagtattagctacatcaacactgaacgcaatcaaagcgaatttgctaatcctatttatgtgcaaaccagcgcaacgaaaattgcaactgtaatggctatgatgattacacctgtaatggcgcaaaatttagacagccaagtttttgacagccaaaatgtgaaaacaattcaattatcacaggctgaaatgaaagaaacacaaggtgaatttgttcccattattgcagccgctgcttttggcggtgcattaggtgcatgggggtatcatggtgctaatttgtataatcatggtaaattaggaactgcgcaaggcgcggctactgcggcaggaatcggtgcggcaacaggagtagcggcaacagggctggctgctgctgccggaggcggattggctgggaatttggcatggagaccgggtattcatgcactaggttttggtgccaatgctgccaacaatgcagtcaattctcggaaatatagtggattaacaaaaaccagtacggcgttgcctcgccttgccgtactggtttttgttaatccactataa

SEQ ID NO: 49944 - DNA, 666 bp, Neisseria meningitidis; identical to SEQ ID NO: 39840

SEQ ID NO: 49945 - DNA, 696 bp, Neisseria meningitidis; identical to SEQ ID NO: 39886

SEQ ID NO: 49946 - DNA, 501 bp, Neisseria meningitidis; identical to SEQ ID NO: 37882

SEQ ID NO: 49947 - DNA, 471 bp, Neisseria meningitidis; identical to SEQ ID NO: 37133

SEQ ID NO: 49948 - DNA, 4176 bp, Neisseria meningitidis; identical to SEQ ID NO: 39904

SEQ ID NO: 49949 - DNA, 321 bp, Neisseria meningitidis; identical to SEQ ID NO: 39983

SEQ ID NO: 49950 - DNA, 279 bp, Neisseria meningitidis; identical to SEQ ID NO: 36930

SEQ ID NO: 49951 - DNA, 621 bp, Neisseria meningitidis; identical to SEQ ID NO: 39955

SEQ ID NO: 49952 - DNA, 714 bp, Neisseria meningitidis; identical to SEQ ID NO: 37885

SEQ ID NO: 49953 - DNA, 2760 bp, Neisseria meningitidis
atgaaaagaatgttattcaacgcaacgcaggccgaagagctgcgcgttgccatcgtcgacggacaaaacctgctggatttggacatcgaaacgctgggcaaagaacagcgcaaaggcaatatctacaaaggcatcattacccgcatcgagccgtcgctggaagcgtgtttcgtggattacggaaccgaccgccacggcttcttgccgtttaaagaagtctcccgctcatacttccaagactacgaaggcggacgcgcgcgcatccaagacgtgctcaaagaaggcatggaagtcatcgtccaagtcgaaaaagacgagcgcggcaacaaaggcgcggcgctgaccaccttcatcagcctcgccggacgctatctggtattgatgccgaacaacccgcgcggcggcggcgtatcccgccgtatcgaaggcgaagaacgtcaagaactcaaagccgctatggcgcaactcgacattccgaacggcatgagcatcatcgcccgtaccgccggcatcggccgcagcgcggaagagttggaatgggacttgaactacctcaaacaactctggcaggcgattgaagaagcaggaaaagcgcatcacgacccttacctgctctttatggaaagctcgctgctcatccgcgccatccgcgactatttccgccccgacatcggcgagattttggtggacaatcaagaagtttacgaccaagttgccgagttcatgagctacgtcatgccgggcaatataggccgtctgaaactctacgaagaccacacgccgctgttttcccgcttccaaatcgaacatcaaatcgaaagcgcgttttctcgcagcgtcagcctgccttccggcggcgcaatcgtcatcgaccacaccgaagccctcgtctccatcgatgtcaactccgcacgcgccacacgcggtgcggacatcgaagacaccgccttcaaaaccaatatggaagccgccgaagaagtcgcccgacaaatgcgcctgcgcgacttgggcggcttggtcgtcatcgacttcatcgacatggaaaaccccaaacaccagcgcgatgtggaaaacgtcctgcgcgacgcgctcaaaaaagaccgcgcccgcgtacagatgggcaaactctcccgtttcggccttttggaattgagccgccaacgtttgaaaccggctttgggcgaaagcagccacgtcgcctgtccgcgctgcgccggcaccggcgtgattcggggcatcgaatccaccgccctgcacgttttacgcatcattcaagaagaagcgatgaaggacaacaccggagaagtgcgcgcccaagtgcccgtcgatgtcgccaccttcctgctgaacgaaaaacgcgccgagctgtttgcgatggaagagcgtttggatgtcaacgtcgtcctgattccgaacatccacctcgaaaatccgcactacgaaatcaaccgcatccgcaccgacgacgtagaagaagacggcgaaccgagctacaaacgcgtcgccgagcctgaagaagacgaatccgccaaaccgttcggcggcgaaaaagccaaagccgcccgtcccgaacccgccgtcaaaggcgtgcgccacaccagccccgccccgactgccgcccccgagaaaaaaacctcttggtgggacagcttcaaagcttggctcaaacgcattttcggcggcagcgaaacccaagccgcgcccgctgccgaaacctccgaaaaacgcagcacggcaaaccgcagcggcagccgcgccaacaaccgccgccaaaacccgcgccgcagcaaacgcgaaggcagcaaagtagaagtccgcgaagtggcaggcaaaactgccggacaggaagcgcgtgccgacaaagccgaaacgcgcaacaacggcaaccgccgccgcaacgaacgcggcgaccgtgccgctggacgcgccgacgaagcggaaatccaagaccgcaacatacagcctgccgcaaccgttgcagatgccgcaccgtccgaaaccgaagtgcaaaccggaaaacgccgccgcaacggcagccgcagcgaacgcggccaaaccgcgccggaaaccgccaccgttgccgaaacaaccgttcagacagcggaaaacacgccgtccgaaccgcataccgcagaagacaaaggcagcaagcccaaatccgaacgcaaccgccgcgaacgcgacagccgagatgccaaagaacgccgcgagcgcaacaatcagcgcgaccgccgtcaaaacggcaaaaaacgcaatattccgtctgccgccaaaatcgagcagtacctgaatattcacgacaccgccgacaaagtccgttccgccgccgcgcacgttttcggcgaaaccgacgcaaacgcgccgattaccgtcagcattgccgatccggttgcagaaagggatcttccgacagcatctcccgccgtttcaaacggcgacgcaccggtttatgatgcggcggaaaaaatccgccgtgccaccgccgccatcctgcccgaaggcgcgacaccgaaagccgaagcacaggaaatgccgtctgaaaccgcaacctttacggctgcggcggaacaggcacgggaaaccgcacaaaccggcggactcgtcctgatcgaaaccgaccctgccgcattgaaggcatgggcggcacaacccgaagtccaagccggacgcggtttgcgccgttccgaacagcccaagccgtctgaagtcgcaaccgtccctgccgaagaaatgatccaagtcgaaacccggcaaggctga

SEQ ID NO: 49954 - DNA, 291 bp, Neisseria meningitidis; identical to SEQ ID NO: 39909

SEQ ID NO: 49955 - DNA, 924 bp, Neisseria meningitidis; identical to SEQ ID NO: 39986

SEQ ID NO: 49956 - DNA, 873 bp, Neisseria meningitidis; identical to SEQ ID NO: 47953

SEQ ID NO: 49957 - DNA, 621 bp, Neisseria meningitidis; identical to SEQ ID NO: 37903

SEQ ID NO: 49958 - DNA, 1452 bp, Neisseria meningitidis; identical to SEQ ID NO: 39988

SEQ ID NO: 49959 - DNA, 1077 bp, Neisseria meningitidis; identical to SEQ ID NO: 39857

SEQ ID NO: 49960 - DNA, 1083 bp, Neisseria meningitidis
atgatgaaaatcaaagccctgatgattgccgccgcattgctggcagcagccgatgtccacgccgcaccgcaaaaggcaaaaaccgcatccgccaaagctgccaaagctgccaaagctgccaaagttgccaaagttgccaaagttgccaaagttgccaaagttgccaaagttgccaaagttgccaaagttgccgccacggcgcaaaaagaagccgcacccgcacaacagcagggcggtatccgcttttcagacggcattgccgccgttgccgacaacgaagtcatcacgcgccgccggcttgccgaagccgttgccgaagccaaagccaacctgcccaaagacgcgcagataagcgaatccgagctgtcccgacaggtgctgatgcagcttgtcaaccaatccctgattgtacaggcgggcaaacgccgcaacattcaagcaagcgaagcggaaatcgatgccgtcgtcgcaaaaaatcccgccctcaaaaacctcagccccgcccaacgccgcgattttgccgacaacatcattgccgaaaaagtccgccagcaggcagtgatgcagaacagccgagtgagcgaagctgaaatcgatgccttcctcgagcaggcgcaaaaacaaggcatcaccctgcccgaaggcgcaccgttgcgccaataccgcgcccaacacatcctgattaaagccgacagcgaaaacgctgccgtcggcgcggaaagcaccatccgcaaaatctacggagaggcccgcagcggcacagacttttccagcctggcgcgccaatattcgcaagacgcgagcgcgggcaacggcggagatttgggctggtttgccgacggcgtgatggttcccgcctttgaagaagccgtccacgcgctcaaacccggacaggtcggcgcgcccgtccgcacccaattcggctggcatatcatcaaattgaacgaagtgcgcgatgccggcacacctcaggaacgtatccgcaattccgtgcggcaatacatcttccaacaaaaagccgaacaggcaaccgtcaacctgttgcgtgacctgcattccggcgcgtatgtcgacatccgctaa

SEQ ID NO: 49961 - DNA, 2379 bp, Neisseria meningitidis
gtgctggcattgggcctctgcttcggcacgcattgcgccgccgccgatgccgttgcggcggaggaaacggacaatccgaccgccggaggaagcgttcggagcgtgtccgaacccatacagcctaccagcctgagcctcggttcgacctgcctgttttgcagtaacgaaagcggcagccccgagagaaccgaagccgccgtccgaggcagcggcgaagcatccatccccgaagactatacgcgcattgttgccgacaaggtggaaggacagtcgcaggtgcaggtgcgtgccgaaggcaacgtcgtcgtcgaacgcaaccggacgaccctcaataccgattgggcggattacgaccagtcgggcgacaccgttaccgcaggcgaccggttcgccctccaacaggacggtacgctgattcggggcgaaaccctgacctacaatctcgagcagcagaccggggaagcgcacaacgtccgtatggaaaccgaacaaggcggacggcggctgcaaagcgtcagccgcaccgccgaaatgttgggcgaagggcattacaaactgacggaaacccaattcaacacctgttccgccggcgatgccggctggtatgtcaaggccgcttccgtcgaagccgatcgggaaaaaggcataggcgttgccaaacacgccgccttcgtgttcggcggcgttccccttttctatacgccttgggcggacttcccgcttgacggcaaccgcaaaagcggcctgcttgttccctcactgtccgccgattcggacggcgtttccctttccgttccctattatttcaaccttgcccccaatctcgatgccacgttcgcgcccggcgtgatcggcgaacgcggcgcggtctttgacgggcaggtacgctacctgcggccggattatgccggccagtccgacctgacctggctgccgcacgacaaaaaaagcggcaggaataaccgctatcaggcgaaatggcagcaccggcacgacatttccgacacgcttcaggcgggtgtcgatttcaaccaagtctccgacagcggctactaccgcgacttttacggcaacaaagaaatcgccggcaacgtcaacctcaaccgccgtgtatggctggattatggcggcagggcggcgggcggcagcctgaatgccggcctttcggttctgaaataccagacgctggcaaaccaaagcggctacaaagacaaaccgtatgccctgatgccgcgcctttccgccgattggcgcaaaaacaccggcagggcgcaaatcggcgtgtccgcccaatttacccgcttcagccacgacagccgccaagacggcagccgcctcgtcgtctatcccgacatcaaatgggatttcagcaacagctggggttacgtccgtcccaaactcggactgcacgccacctattacagcctcaaccgcttcggcagccaagaagcccgacgcgtcagccgcactctgcccatcgtcaacatcgacagcggcgcaacttttgagcggaatacgcggatgttcggcggcggagtcctgcaaaccctcgagccgcgcctgttctacaactatattcctgccaaatcccaaaacgacctgcccaatttcgattcgtcggaaagcagcttcggctacgggcagctctttcgcgaaaacctctattacggcaacgacaggattaacaccgcaaacagcctttccgccgccgtgcaaagccgtattttggacggcgcgacgggggaagagcgtttccgcgccggcatcgggcagaaattctacttcaaaaacgacgcagtcatgcttgacggcagtgtcggcaaaaaaccgcgcagccgttccgactgggtggcattcgcctccagcggcatcggcagccgcttcatcctcgacagcagcatccactacaaccaaaacgacaaacgcgccgagaactacgccgtcggtgcaagctaccgtcccgcacagggcaaagtgctgaacgcccgctacaaatacgggcgcaacgaaaaaatctacctgaagtccgacggttcctatttttacgacaaactcagccagctcgacctgtccgcacaatggccgctgacgcgcaacctgtcggccgtcgtccgttacaactacggttttgaagccaaaaaaccgatagaggtgctggcgggtgcggaatacaaaagcagttgcggctgctggggcgcgggcgtgtacgcccaacgctacgttaccggcgaaaacacctacaaaaacgctgtctttttctcacttcagttgaaagacctcagcagtgtcggcagaaaccccgcagacaggatggatgtcgccgttcccggctatatccccgcccactctctttccgccggacgcaacaaacggccctga

SEQ ID NO: 49962 - DNA, 450 bp, Neisseria meningitidis; identical to SEQ ID NO: 39994

SEQ ID NO: 49963 - DNA, 450 bp, Neisseria meningitidis; identical to SEQ ID NO: 39994

SEQ ID NO: 49964 - DNA, 912 bp, Neisseria meningitidis
atggtgcacctgttcttagcttccatagtatggcttccatcacggtacggtcgttcttccattgatgacagccgtgcgctttcatggttgtttgtaattgttcccatatgttgtcagttattgcggttctcgccattgtttgtgtttgcctatatttcgttggaatatagggttaaaatagggctcttttgggcttattcaaattagggacacgccctagttctttctgcaactttcaagggaaatcaaactgacctaatcctagacttcttcgcaggcagcggcacaaccgcccacgccgtgatgcagcttaacgccgaaggacaaaacggtaaccgccgctatatctgtgtacagcttcccgaaaaaaccgctgaaaaatccgaagcccgtaaagcaggctacccgaccatcttcgacatcaccaaagcccgcatagaaaaagccgccgccaaaatccgcgtcgaacatcccgattacacgggcgattcgggcttcaaaatctttcaaacggcagacaatttcaggcagcatccggacaaggatttttcgcccgaacaaccggatttgccgcttaacgatgaattaagcgaagaacagctgcaaacgcttctgaccacctggacgctgtatgacggggcggcactgaccacgccggttgagcctgtgcggttgggcagttatacggcgtatctgtgcgaaaaacggctgtatctgatgaatgccggttttacttctgccgatttgttggcgtttatccgcaagctggacgacgatgcggctttcaatcccaaccgcgtgattgtattcggcagcaatatggcaagcgccatgcagcacgaacttgaccaggcggttcgcggttatgccaataaaaaagagattgagttgaatgtggttatcagggtttga

SEQ ID NO: 49965 - DNA, 930 bp, Neisseria meningitidis
atgcatcaatattatgacgcagtaattttatcggttggaaatgggttgttaaaaaggttctttaagcagaatgcgcaattaaatattgcttcaaggccattgattattaccttgtttccaggtgtagtattcggtgatcaggcaagtattctatctcgtatgggggctgatattgttttatataataataagcatgattttagaattgcagaggaatataagaaacaatataaattaagttgtcaaaatatactttatggttatccaatttttcgccacgcatcaaaaggtcgtcatggagagaaaatttactttattgaccaagttaaaatcccatttaaaaaagaagaaagaatttatacattaaaaaaattgattgccttggctgaaaaataccctgagaaagaatttactattttgctaagggttgcagataaagatattactgtgcatcaggataaacattcgtatatagagctggcaaagcagtttcagttgccgagtaatttgacaatagagcgaaaaagtaccgcgcaagccttccaagaaatggggtattgtttatcttattcatctactatgctttttgaagctgaatgtaagggtatccctgttggtgttgttgcagacttaggcttttctgaatcctatgcaaatcagcattttttaggtagtggggttttagtttattttgatcaaatagatttcacttccccaaaaatagcagatccggattggcttgattgctatgctactaaaaaggtgattacaactgatgagtttaataagctattaaagcaggttgtgccattgcaacatgattaccaagaatatttatctgcggtgaatagtatagaatcaactaaaactatttttttaagaaaatttaaaaagttaattagggcgtgtcctcaatttaacttagcatga

SEQ ID NO: 49966 - DNA, 1164 bp, Neisseria meningitidis; identical to SEQ ID NO: 38788

SEQ ID NO: 49967 - DNA, 999 bp, Neisseria meningitidis; identical to SEQ ID NO: 45992

SEQ ID NO: 49968 - DNA, 2115 bp, Neisseria meningitidis; identical to SEQ ID NO: 39928

SEQ ID NO: 49969 - DNA, 207 bp, Neisseria meningitidis; identical to SEQ ID NO: 39999

SEQ ID NO: 49970 - DNA, 375 bp, Neisseria meningitidis
atgtgcgagttcaaggattttagaagaaacatcccttgttttgaagagtatgacgaaaattcatttattggcaaatggtatgatgacggggtgtgggatgatgaagaatattggaaattggagaatgctttaatcgaggttaggagaaaatatccttatccgatggatataccaagggatatcgtgattggaatcggtaccattattgagtttttaatggttccaaattggaaactttttacaattaaatcttccccttggttgcctaaaagtgtcaaaattgatgagcgttatgaaaggttcagagtaatgctccgttatatttttaccgagatagacatagtcaacgtgcgatttgattattacaacaaaaaa

SEQ ID NO: 49971 - DNA, 375 bp, Neisseria meningitidis
atgtgtgagttcaaggatattataagaaacgttccttattttgaggggtatgacgaaaattcatttattggcaaatggtatgatgacggggtgtgggatgatgaagaatattggaagttggagaatgatttaatcgaggttagaaaaaaatatccttatccgatggacataccaagatatgttgtcattggaatcggtaccattattgatttcttaatggttccaaattggaaactttttgaaattaaagcttccccttggctacctgatagcgtgggaattaacgaacgttatgaaaggcttaaaacaatgctccgttatatttttaccgagaaagacatagtcaacgtgcgatttgattattacaacaaaaaa

SEQ ID NO: 49972 - DNA, 405 bp, Neisseria meningitidis
atgtgcgagttcaaggattttagaagaaacatcccttgttttaaggagtatgacgaaaattcatttattggcaaatggtatgatgacggggtgtgggatgatgaagaatattggaaattggagaatgatttaattgaggttagaaaaaaatatccttatccgatggatataccaagggacatcgtgattggaatcggtaccattattgattttttaatggttcaaaattggaaactttttgaaattaaagcttctccttggttgcctaaaagtgtcaaaattaatgagcgttatgaaaggttcagggtaatgctccgttatatttttactgatctagatgtagaggactggaaatttttttactttccaatacaacatagtaaaggtagattgagacgaaaagtt

SEQ ID NO: 49973 - DNA, 1110 bp, Neisseria meningitidis
atgtccttgacccgcctaatcttgaaattctatgcactgttgcgcctttttttgggcaaaaacgcccgcaccgcatggatttcgcatcccgcctgtgccgggcacgaacccggcgcaaaccatcccgattcgcccgaccgcatcctctgcatcgagcaggcattgcgccgcgccggtatttggcagcacctccaaaccatagaggcggaagaaatcagcgatacgcgcctcgcacttgtccactcgagcaaatatctgaaccgtttggaatcttgcctgccccaaaaaggcaagattttccgcctggataacgacactgcaatcagcacaggctcgctgtctgccgcacactttgccgccggttcggcagttcaggcagtcgacatggtcatgaaccgtaaagcatggcatgccttttgcgccgcccgcccgcccggacaccatgcgggcagcggcaaagccggcggattctgcctgctgaacaacgttgccgccggcgtcatgcatgccattgccgaataccgcctgaaacgcattgccgtcatcgatttcgatgtccactacggcgacggtacggcagaaatattcaaagacgatccgcgcatcctgtttttcaacctgtttgaaaccgaccttttccccttccccgaaaacaacgatatgcccgacggcggcaatatggtgcacctgcccttgccgccgggaacgggcagccgcacattccgcgaagccgtccgcaggcagtggctgccccgacttgccgcattcaaacccgaactggtgctgctgtcggcaggattcgacgcacaccgtctagacgaatcgggcaggctcaacctgcacgaggcggattttgcctggctgacacacaaaatcattcagacggcatcgggctgccccggcaaaatcgtatccgtactcgaaggcggctacacccttgaacctctggcacaatctgctgccgagcatatccgcgtgctggcagggctgggcaaatccgatgccgcaaccgcctatcagaaaacactggacccaacaaaaaaacggtttgccaaaccgaaaaccggacaggtgcgccaacctacccaatccgaccgttacgacatatag

SEQ ID NO: 49974 - DNA, 642 bp, Neisseria meningitidis
atgagatgttttatgattcaaaatgtcgttacttcaataatcctgtattctgggacagccgtagacttacttattatcctaatgttattttttgccaaaaggaaaagcagaaaagacatcattaacatctatttaggacaatttctaggctctgttagtttgatattgctaagtttactttttgcatttgtcttagattatattcctagtaaagagattttaggtttgctcggcttgattccgattctcctaggcatcaaagttttgcttttaggagattccgatggagaggctattgccaaagagggtttgcgcaaagataataaaaacctgatttttctagtcgctatgattacttttgcaagttgtggcgctgacaatattggtgtctttgtcccatattttactaccttaaattcagcgaatttgatagtggctttacttacctttctagtcatgatttatctcttggttttttctgcccaaaaattagcacaagtcccttctgtcggagaaactttggaaaaatatagcagatggtttgttgccgttgtttatttaggattggggatatatatcctggttgaaaacaacagttttgatatgctatggactgtgttgggtcaggaaaaaatattatga

SEQ ID NO: 49975 - DNA, 543 bp, Neisseria meningitidis; identical to SEQ ID NO: 47973

SEQ ID NO: 49976 - DNA, 1332 bp, Neisseria meningitidis; identical to SEQ ID NO: 39973

SEQ ID NO: 49977 - DNA, 501 bp, Neisseria meningitidis; identical to SEQ ID NO: 47798

SEQ ID NO: 49978 - DNA, 1200 bp, Neisseria meningitidis
ttgcccacttttccgaaccacaccatgcacaccatttcctttccaaaccgcacccgactcaccgccctgccgcccctgtcgctttacatccacatcccgtggtgcatcaaaaaatgcccgtattgcgacttcaattcccacagcctgaaaaacggattgcccgaagccgcctatatcgacgcgctgctgaccgatttgcagcttgaattgcccaatatttggggcaggccggtggaaacgatctttttcggcggcggtacgcccagcctgtttcaggcggaatcgattgaccgtttgttaagcggcgtgcgttcgctgttgcgcttgcagccggaagcggaaattaccttggaagccaatccggggacatttgaaatcgagaagtttcaaggatttaaagacgcgggtattacgcggctttctatcggcgtacagagtttcaacgacgatatgctctcaaggctggggcgcgtccacaacggtaaggaagccttaaccgctatcgataccgccttgaaattatttgataaagtcaatatcgacttgatgtatgccctgccgaaccaaaccgttcagacggcattggacgacgtacaaaccgctatcgctacgggcgcgacccacatcagcgcgtatcatctgacgatggaaccgaacacgccgttcggtcatacgccgccgaaaggtttgccgcaagacgaagccgccctcgacatcgaagacgcggtacacggcgcgctggaaggcgcgggttttgtccactacgaaacatcggcttttgcgaaaccagccatgcagtgccgccacaatttgaactactggcagttcggcgattatttaggcataggcgcgggcgcgcacggcaaaatttcctatcccgaccgcatcgagcgcaccgtccgccgccgccaccccaacgactacctcgccttaatgcaaagccaaccgagtgaagccgtcgaacgcaaaaccgtcgctgccgaagatttgccgttcgaattcatgatgaacgccctgcgcctgaccgacggcgtacccgccgcgatgttgcaggagcgcacgggcgtaccgagtgccaaaatcatggcgcaaatcgaaacggcaaggcaaaaaggcctgctggaaaccgaccctgccgtattccgcccgaccgaaaaaggacgcttgtttttaaacgatttgctgcagtgttttttatag

SEQ ID NO: 49979 - DNA, 258 bp, Neisseria meningitidis
ttgctccttccacggcagcaccttggtcaaaacggcagacggctgaaaagcaaacaccgtccgtcgtgttgccgtttgcggatgagtacgggtcaaccccaatgccgccgaaaccgtcgaagccgccttcaacattgccgccgccaaagccgcaaagttggcaaaaacggtaaaaccggggagataaaagccgatggcaggaaagtaaatgtgaggatagacagtacggaggcagacctgctttatccggcagggcaa

SEQ ID NO: 49980 - DNA, 387 bp, Neisseria meningitidis
atgtggaaaattagtaaagaaaattgtgaagatttaggatttgcaatagtctgtatgttctatgatgctattaatctttctgaatttaaattatggttggatatagttgtcagagatattcctattgatacaattccattgtatatttttgatttgattgattttgataagagtataggggaaatttatgatgtaattggagtcgttaattatggttacatttcaaatgatcaaaaaaatgcattaacgggcattgccttcttaagggggatagatgtctatgatccgcctatttcaaaagaaaaagcattaaaagccttagagaaatatcctgaaatttatcagaggtttcagcatttctttccttttgtagagcttccgcttttt

SEQ ID NO: 49981 - DNA, 447 bp, Neisseria meningitidis
ttgttaatccgctatatcgacatcgccaaacgaaacttcgtcatcgccgtttcgtctttgtctaaaaccaaaaccgaaaccaacaaccccaaaggtatcgcccatactatcgaataccttaaaaaacacaaggtcgccctcgtcgtgacggaaagtaccggcggtctcgaaatccccgccgccaaagccatccgccgagcaggcatagccgtgattatcgccaacccgcgtcagacgcatcagtttgcccaatcgcagccgctgaccaaaaccgacgccaaagatgccaaaatgcccgccttcttcgcacagatgacggcacagaaagaagattcgcaaaccatgccctaccaaccgcccaccgaagcggaagaagtgttggaagccttggttaaccgccgcaaccaatcggcggatatgcggactgccgagaaaaaccgtctgcat

SEQ ID NO: 49982 - DNA, 981 bp, Neisseria meningitidis; identical to SEQ ID NO: 39972

SEQ ID NO: 49983 - DNA, 195 bp, Neisseria meningitidis; identical to SEQ ID NO: 48061

SEQ ID NO: 49984 - DNA, 354 bp, Neisseria meningitidis; identical to SEQ ID NO: 40026

SEQ ID NO: 49985 - DNA, 216 bp, Neisseria meningitidis
ttggatgcgggcgaatttagccatttccgtatcaatcacagcacacattttgctgaacgacaaaaccatatcaatggaattgagaatttttggaaccgggcaaaacgtcatttacgcaagtttaacggcattcccaaagcgcattttgagctgtatttaaaggagtgcgaatggcgttttaacaacagtgagataaaagttcttgttccattttaa

SEQ ID NO: 49986 - DNA, 2112 bp, Neisseria meningitidis
atgaaaatatcatttcatttagctttattacccacgctgattattgcttccttccctgttgctgccgccgatacgcaggacaatggtgaacattacaccgccactctgcccaccgtttccgtggtcggacagtccgacaccagcgtactcaaaggctacatcaactacgacgaagccgccgttacccgcaacggacagctcatcaaagaaacgccgcaaaccatcgatacgctcaatatctagaaaaacaaaaattacggtacgaacgatttgagttccatcctcgaaggcaatgccggcatcgacgctgcctacgatatgcgcggcgaaagcattttcctgcgcggttttcaagccgacgcatccgatatttaccgcgacggcgtgcgcgaaagcggacaagtgcgccgcagtactgccaacatcgagcgcgtggaaatcctgaaaggcccgtcttccgtgctttacggccgcaccaacggcggcggcgtcatcaacatggtcagcaaatacgccaacttcaaacaaagccgcaacatcggtgcggtttacggttcgtgggcaaaccgcagcctgaatatggacattaacgaagtgttgaacaaaaacgtcgccatccgtctcaccggcgaagtcgggcgcgccaattcgttccgcagcggcatagacagcaaaaatgtcatggtttcgcccagcattaccgtcaaactcgacaacggcttgaagtggacggggcaatacacctacgacaatgtggagcgcacgcccgaccgcagtccgaccaagtccgtgtacgaccgcttcggactgccttaccgcatggggttcgcccaccggaacgattttgtcaaagacaagctgcaagtttggcgctccgaccttgaatacgccttcaacgacaaatggcgtgcccaatggcagctcgcccaccgcacggcggcgcaggattttgatcatttctatgcaggcagcgaaaatggcaacttaatcaaacgtaactacgcctggcagcagaccgacaacaaaaccctgtcgtccaatttcacgctaaacggcgactacaccatcggccgttttgaaaaccacttgaccgtaggcatggattacagccgcgaacaccgcaacccgaccttaggttacagccgcgcctttactgcttccatcgatccatacgaccgagcaagctggccggcttcgggcagattgcagcctatcctcacccaaaaccgccacaaagccgactcctacggcatctttgtgcaaaacatcttctccgccacgcccgatttgaaattcgtcctcggcggtcgttacgacaaatacacctttaattccgaaaacaaactcaccggcagcagccgccaatacagcggacactcgttcagccccaacatcggcgcagtgtggaacatcaatcccgtccacacactttacgcctcgtataataaaggcttcgcgccttatggcggacgcggcggctatttgagcatcaacacgtcgtcttccgccgtgttcaacgccgaccccgagtacacccgccaatacgaaaccggtgtgaaaagcagttggctggacgaccgcctcagcactacgttgtctgcctaccaaatcgaacgcttcaatatccgctaccgccccgacgagcaaaatgatccctacacttgggcagtcggcggcaaacaccgttcgcgcggcgtggaattgtccgccatcgggcaaatcatccccaaaaaactctatctgcgcggttcgttgggcgtgatgcaggcgaaagtcgttgaagacaaagaaaatcccgaccgagtgggcatccatttgaataacaccagcaacgttaccggcaacctgtttttccgttataccccgaccgaaaacctctacggcgaaatcggcgtaaccggtacaggcaaacgctacggttacaactcaagaaataaagaagtgactacgcttccaggctttgcccgagttgatgccatgcttggctggaaccataaaaatgttaacattacctttgccgcagccaatctgctcaatcaaaaatattggcgttcggatgccatgcccggcgcgccgcgcacttatacggcgcgggttaattacagtttctaa

SEQ ID NO: 49987 - DNA, 822 bp, Neisseria meningitidis
atgacgtttgataaatggttgggcttgtcaaaactgcctaaaaatgaagcaagaatgctgctgcaatatgtttcggaatatacgcgcgtgcagttgttgacgcggggcggggaagaaatgccggacgaagtccgacagcgggcggacaggctggcgcaacgccgtctgaacggcgagccggttgcctatattttaggtgtgcgcgaattttatggcagacgctttacagtcaatccgagcgtgctgattccgcgccccgaaaccgaacacttggtcgaagccgtattggcgcgcctgcccgaaaacgggcgcgtgtgggatttggggacgggcagcggcgcggttgccgtaaccgtcgcgctcgaacgccccgatgcgtttgtgcgcgcatccgacatcagcccgcccgcccttgaaacggcgcggaaaaatgcggcggatttgggcgcgcgggtcgaatttgcacacggttcgtggttcgacaccgatatgccgtctgaagggaaatgggacatcatcgtgtccaacccgccctatatcgaaaacggcgataaacatttgtcgcaaggcgatttgcggtttgagccgcaaatcgcgctgaccgacttttcagacggcctaagctgcatccgtaccttggcgcaaggcgcgcccgaccgtttggcggaaggcggttttttattgctggaacacggtttcgatcagggcgcggcggtgcgcggcgtgttggcggagaatggtttttcgggagtggaaaccctgccggacttggcgggtttggacagggttacgctggggaagtatatgaagcatttgaaataa

SEQ ID NO: 49988 - DNA, 912 bp, Neisseria meningitidis; identical to SEQ ID NO: 39925

SEQ ID NO: 49989 - DNA, 1176 bp, Neisseria meningitidis; identical to SEQ ID NO: 46694

SEQ ID NO: 49990 - DNA, 393 bp, Neisseria meningitidis; identical to SEQ ID NO: 40756

SEQ ID NO: 49991 - DNA, 465 bp, Neisseria meningitidis
ttgctttacccggaaaaaatgtcggggatggcgggacggcatccgtacggcgtccggtcgggtttgcggaggaacggcttgaaactttgggatattcattttagaatgactcgttttatcgtcgcaagatgcggtttattgtttgcaacccttaaaggaaaaaccatgaagaaaatgttcgtgctgttctgtatgctgttctcctgcgccttctcccttgcggcggtaaacatcaatgcggcttcgcagcaggagttggaggcgctgccgggcataggccctgcgaaggcgaaggccattgcggaataccgtgcgcaaaacggtgcgttcaagtctgtggacgatttgaccaaggtaaagggcatcggccctgcggtgctggcgaagctgaaggatcaggcttctgtcggcgcgcccgcaccaaaaggcccggcaaaaccggctctgcccgcagctaaaaaatag

SEQ ID NO: 49992 - DNA, 252 bp, Neisseria meningitidis
atgagaaaaagtcgtctaagccagtataaacaaaataaactcattgaactgtttgtcgcaggtgtaactgcaagaacagcagcagagttagtaggcgttaataaaagtaccgcagcctattattttcatcgtttacgattacttatttatcaaaacagtccgcatttggaaatgtttgacggcgaagtagaagcagatgaaagttattttgctgaacgacaaaaccatatcaatggaattgggaacttttga

SEQ ID NO: 49993 - DNA, 354 bp, Neisseria meningitidis; identical to SEQ ID NO: 40032

SEQ ID NO: 49994 - DNA, 273 bp, Neisseria meningitidis; identical to SEQ ID NO: 47986

SEQ ID NO: 49995 - DNA, 846 bp, Neisseria meningitidis; identical to SEQ ID NO: 39931

SEQ ID NO: 49996 - DNA, 111 bp, Neisseria meningitidis; identical to SEQ ID NO: 40033

SEQ ID NO: 49997 - DNA, 279 bp, Neisseria meningitidis; identical to SEQ ID NO: 40034

SEQ ID NO: 49998 - DNA, 1242 bp, Neisseria meningitidis; identical to SEQ ID NO: 46031

SEQ ID NO: 49999 - DNA, 1149 bp, Neisseria meningitidis
atgagcatccatctcgacttcggcattagtcctaaaacgttccgacagacttatctgtatcaaaagcccaagctctttaaaggagcggttcggaatctcgaagccgcatcttggaaagatatcaacgatatataccaacgagcagacccaaccgcaccgctgtttcatctgcgtaaaaaaggtgcaattgttcctaaagaagaatacgtcgaaagtttcgacgatttgggcaaaactcgctaccgttttattaaatccgttatctacgaacatatgaagaatggcgcgtcgttgctctataaccatattatagtggattaaatttaaaccagtacagcgttgcctcgccttgccggcgcacataccattgttagtgggtatcttgcttttggcagcgacgaatcttataaaaaccattgggacatccgagatgtgtatgccatccagcttttcggcaagaaacgttggcaacttactgcccctgatttccctatgccattgtatatgcaacagactaaagatactgatatttccattcctgaacatatcgatatggatattatccttgaagcaggtgatgtcctctacatcccgcgcggttggtggcacagacctatcccgctcggctgtgaaaccttccacctcgctgtcggtacctttccgcccaacggctataattacctcgagtggctaatgaagaaattccccacgatagaaagtctgcgccacagtttctcagactgggagcaagataggacgcgtatcaacgatactgccgcacaaattgctgccatgattgccgaccccgtcaattatgaagccttcagtgaagactttctcggcaaagaacgtaccgataccgcttttcatctcgaacagttcgcgaatcccaacgctactccgctttcagacgacgtcaggttgagattaaatgccaataatttggatacgttggaaaagggatatttgattgggaatgggatgaagataagcgtagatgagttggggaaaaaagttttagaacacatcggtaagaatgaaccgttattgttgaaaaatctactggttaacttcaatcagggaaaatatgaagaagttaggaagttgatttatcagttgatagagttagattttctggaaattttgtga

SEQ ID NO: 50000 - DNA, 507 bp, Neisseria meningitidis; identical to SEQ ID NO: 47385

SEQ ID NO: 50001 - DNA, 1392 bp, Neisseria meningitidis; identical to SEQ ID NO: 39916

SEQ ID NO: 50002 - DNA, 661 bp, Neisseria meningitidis
atggacaggcatttcgggcgcaggcgttttctgacggttgccgccgttgcggcggcgggcgcggcggtttctttcctgccgaatccttttgccgccgacggtgaaaaacgaaacggggatgaaaaacgcaatgaaaatgtgtttttctggaaaggtgtcgcgctgggttccggcgcggagctgcgcctgttcggtgtggacgacagacaggcggcggatttggtcaacaaggttttggcggaagtggcgcgtttggaaaaaattgttcagcctttaccgtgaagacagcctgatcagccgcctgaacagggacggttatctgacttcgccgtcggcggattttttggaactgttgagcctgtgccgcgatattcacgcgctgacggacggcgcgttcgatccgacagtgcaggcgttgtggaaactgtatgccgattattttgccgcccgtcccgatgcggaaacgccgcctcctcaaaacagcgtgaaggaagccctgaaacgggtcggcttcggcaaagtctcgtttgacgaccgtgaaatccgttttgccgaaaagggtatgggtttgtccttgaacggcatcgcgcaagtctatagtggattaacaaaaaccagtacggcgttgcctcgccttagctcaaagagaacgattctctaa

SEQ ID NO: 50003 - DNA, 1266 bp, Neisseria meningitidis; identical to SEQ ID NO: 48000

SEQ ID NO: 50004 - DNA, 1647 bp, Neisseria meningitidis
atgaaacaatccgcccgaataaaaaatatggatcagacattaaaaaatacattgggcatttgcgcgcttttagccttttgttttggagcggccatcgcatcaggttatcacttggaatatgaatacggctaccgttattctgccgtgggtgctttggcttcggttgtatttttattattattggcacgcggtttcccgcgcgtttcttcagttgttttactgatttacgtcggcacaaccgccctatatttgccggtcggctggctgtatggtgcgccgtcttatcagatagtcggttcgatattggaaagcaatcctgccgaggcgcgtgaatttgtcggcaatcttcccgggtcgctttattttgtgcaggcattatttttcatttttggcttgacagtttggagatattgtgtatcggggggggtatttgctgacgtaaaaaactataaacgccgcagcaaaatatggctgactatattattgactttgattttgtcctgcgcggtgatggataaaatcgccagcgataaagatttgcgagaacctgatgccggcctgttgttgaatattttcgacctgtattacgatttggcttccgcgccggcacaatatgccgccaagcgcgcccacattttggaagcagcaaaaaaagcgtcaacatggcatatccgtcatgttgcgcccaagtataaaaattatgttgtggttatcggtgagagcgcgcgttcggattatatgaatgtttacggtttcccattgcccgatacgccttttttgagtcagaccaaagggctgttgataaacggttaccaatcgaccgcccacgcgacgaatctttcgctgccgcagactttggggctgccgggagaaccgaacaataacatcgtcagcttggcgaagcaggcgggttttcggacggcgtggctgtctaatcaaggaatgttggggcattttgccaacgaaatttccacctatgccctacgcagcgattatccgtggtttacccaaaggggtgattatggcaaaagcgcggggttgagcgaccgccttttgttgccggcgttcaaacgggttttgataggaaatgcaggcacgaagcctcggctgattgtgatgcacctgatgggttcgcacagtgatttttgcacacgtttggataaggatgcgcggcggtttcagtatcaaactgaaaaaatatcctgctatgtttccaccatcgcgcaaaccgataaatttttagaagatacagttaagatattgaatgaaaataaagaaagctggtctttggtttacttttccgaccacggtttgatgcatgtcggtaaaggcggcgagcgaacgttgacacatggtgcgtggaagcgtcaaagctacggcgtgccgctggttaaaatttcgtccgatgacacgcggcgcgaaatgattaaagtgaggcgcagcgcgtttaattttttacgcggattcggcagttggacgggtatcgaaaccgacgagttgcccgatgacggctatgatttttgggggaatgttcccgatgtgcagggcgaaggcaataaccttgcctttatcgacggactgcccgacgaccccgcgccgtggtatgcgggaaaaggcaaatcgactaaaaatacgtctaaaaaatga

SEQ ID NO: 50005 - DNA, 939 bp, Neisseria meningitidis
atgaaaatcgttttgaccacatctatggcaggcttgggcggcacggaaaccgccaccgtccgcctcgggcggctgctcaaacggcgcgggcacgacatcatccttgcttcttcggacgggccttttgtcggagaggcgcaagcatcgggcatccgttggcagccggttgatttttaccggggcgggcttgccggctacctcaaaagcacctttgcctacgcccggatgctgcgccgcgaacaacccgacatcatcgactgccaaatggcgcgcgtcgttccagcctgcgcccttgccgccaaaatcgtttcgccgaaaaccaaaatcatctaccactcgcacggtttggacgcggcaacctaccccaaaatcgccaaactcttcgacaagctgggcgtgtacatcatcggtaactgcaaacacgaacgcgaaaaactcatccgccacggtttccccgccgaccggattgtctacgcctacaacgcacccccccccccccccccggaatttcctttccggaaaaccgaaaaagaatgcgccgtactcggcacgctgtcgcgtctggacaccatccgcgccgtgcatctgatgctggacattttcaaaaaaatggtcgaccgcgatatgcccgtacgcctgaacgtggcgggcatcggcgaccacggcgcaggcgtgggcaacaacatcttagaagccggactttacgacacacccgtcgttacctacgatatggcgggcatttccgaaatggtcgtcaacggggaaacgggttactgcatccccttcggcgacgaagaagcctttatcgccgccgtagacacgctcgtcagacaaccggagttgcgcgaagcaatgggcaaaaggctgcacgcacacgtcgccgcactctgttccgacgacgaaatctaccgtaccaccatggcggcctataccatgtaa

SEQ ID NO: 50006 - DNA, 1134 bp, Neisseria meningitidis
atgacatctgcaaattttaatattaacggttttggagatgtgaaattaacaccctattcaccactcttgggatataaagcttgggattcatttattggttctattcaatccttatctgatttaatctataatgtggataacaatagaaataaaatggaaattactgttaataatgctattcaagctgcagatagctttttaagcagtaattggaagagataacaaaataacaaaataacaaatactgcttctttacttgcatccttcgataacattttttaaatttaagaaatgtatctcgagatatacgagaaacaggaaaatttaaacctaatgatattcaacaagcaattggtgatatattcattgctgctggtgatggattacaatatataaaacaacaaacagaggcgatggctcaaagcaaattcttaccaactaaattaaaaactggtttaaatgatgtccttaattctagaatgctaaaatcctctactgttttacagcatgaattgaattaaataaggattatggaaacgagaggcttggcgaatctataatgaatatagatgattttacaccaagtaagatagcaaacttttttgcggatcctgatacatacagcaatgtattagaagaagtatctaggtttatatattccttagttcctgatgatgcaaacccttggaaagggggcgaagattatattggacgagggataagtgaatggggagagttactggaaaaatggtataaacaagattttctcccttatcttgaaaagaatgggaccaatttccgaaatttgaagattggctgcctgaattccctgaatgggcaagagagtggttgaaattagctctcaaacgttcaggcaaatataacgtttacaatcccctcgccctagatttggacggtgacggcatagaaactgtcgccgccaaaggcttttcaggcagcttatttgatcacaccaacaacggcatccgcaccgccacgggctggattgctgcatatgacggttttcctgtgcgcaaattaaacagtaacgggggcattattagcacgacagataccatattccaatctttgcatacatggcttgatcatcaaccaaatgatacatgccattga

SEQ ID NO: 50007 - DNA, 777 bp, Neisseria meningitidis; identical to SEQ ID NO: 42022

SEQ ID NO: 50008 - DNA, 876 bp, Neisseria meningitidis
atggcaagaaggtcaaaaacatttgaagaagctgctgctgaggttgaggaacgtttcggtcatcgtggcattaagttggtcgagtttgagggtacagccaagccgtgtgtaatcaactgccctaaacatggaaaccaaacctgttcgaggtactccaatatgttcataggaagtagctggggttgcccctcttgtggtaatgagcaagctgcaaaagccggtatagcgacccttaggaagaatcacatagcgttagaaatgctgaaacaggctgtaacaggtatgaccaagcaagagcgcatcacgacgcaagcctacaatgagatgaccaaatccgtggcaggttcaaacagcatagtccttaacgatgtccaaggcgatacgaccatcaacaaccatcatacgcatacgcacaaccacagcgatgccgacggcaaagcactgtcgatgaggctcacaccacgccccctgttgtcagaccgtcaggcggcggctttcgcccgtacaggcaaactcacaggcagtttcgacttgtttgcttcggtggtcgccccctcgcagtacacgtttgccgttgccatgcccgacacgtccatgtcgccggttatcgaaaaaggggatttggtggtggtcgagccgcgtatgcgccctgcggacgaggacatcgtgctgattgaactgtccgacaagcggctggtcgtcgcgcaccttgttatcgatattgcgggcaggatgctgatttatcagacgggcaggccgtctgaagcctttgacctgcccgaaggcagcacgattttaggtgtggtgctggaggtcaaaaaacggtttatgtccgccgcacaggcgagaaggcgtgttgattcggattaccacccc

SEQ ID NO: 50009 - DNA, 966 bp, Neisseria meningitidis
atgaatccggcaatgattgagcgtcttaaggcagtcgagaatcaggcggaagcaatggaacgcggcgcacgctctgcatatcttaagcagcaggcgcaggaattgggcatcagccttgccacgctataccgcaagctggaggcggtcagcgtcaagccgacgcgcaaacggcgcagcgatgcgggcaagacggagcttaaaccggaagaagccaaattgatttcggcggttttggtggaggcgatgaggcgcaacggcaagcggttaatgtcggtgcggcaggcggtggaaatgctgcgcgccaacggaaaaatcgaggcggcgcggattgatggggaaaccggggaagtcatcccgtccgtccgcactgctttccgcccgctggcaagacatcgacctcaccgcccggttatggcacatccccgccgccgacatgaagaccaaacacccctttaccgtcccactgtcggactgggcggtagaaatactccgagagctgcacacacagaccggcgacaacatccaccttttcccaggcatccgcccacggcgcaaacccgccccccatccgaccacatcagcatcaaattcgcccacaacgccatccgacgactgggctatgacggcagcacccccggcaaatccaaacacacaatgcacggattccgccacctcttcaccaacatcagcctgaccgccggaaaagacaccctcacaacagacctcgccctcggccacatcagccgcgccgccctccaacgcgccggcttctcaagcctgcaccactacctgaccgccgacagctaccgcctccaagagcggcgcgaactcgccgaatggtacagccgccgccaccgccaagcatacgaagccgccgccaaaaccccgcaaaacaaaaaaccgcctgaaaaaaattcagacggcatcctgcccaaaacacttgcaataaaacctaaaaggtattaa

SEQ ID NO: 50010 - DNA, 558 bp, Neisseria meningitidis; identical to SEQ ID NO: 39853

SEQ ID NO: 50011 - DNA, 1200 bp, Neisseria meningitidis
atgtggacgggatttttttcaaaatcaggcactggcattgcagaggaaaggcatcaaaaccgccgtgcttgcaccgatgttccgctacttgcggaaagaaacagcaagcatcctgaccggccttacggttttgcaaaatatcggcaaagcggtttggacatctatgcatggcacggcatatatttcttcccccgctttccgttcatcgacatcgactgcatccgctgggtgtgtgcgggtttgaaagctttcaaacactacatccgcgaaaacgggctgcccgacctgattcacgcccaccgcatgaactatgccggcatactcgcccaaaaaatttcccaaaaatacggcatcccctatgtcgtcacggaacacagcagcaccatcacgcgcggtctgatccgtccccaccaatggcagccgatggaaaaagcagcggcgcacgcctccgcactgctcgctgtcagccgccatttcgcacacgtcctgcaacacaaatacggctgcgaatggcagtacctcccccacatactgggcggaatattcaaccgaccgtttgaacaaagagaaaaaaacaacaaaccgcatttcgtgttctgcaccgtctcgcaccttcgccgtctcaaaggacacgatgtcctactcactgcctttgcccgggcgttggcacaatgcccgcaactgcgcctgaacatcggcggcagcggacaggaagaacagcggctgaaacagcaggcggcagacttgggcattacccatgccgttacatttttgggcgcattgcagcccgaagcagtcttggatttgatgaggaacagcgacgcattcgtccttgccagccgcaccgaaaccttcggcgtagtctatatcgaagcactgtcccaaggattgcccgtcattgcaacacgctgcggcggtgcggaatctattgtttcagacggcaacggatatttggttcctgttgacgacgacgatgcccttgccgacgcactcatcaaaatgtatgaacaccactctgattttgaacctgcccgacttagggaaaactgtctgaacgaatttggcgaaaatgccgttataggcaggttgatcggcattttccgacaggcaatcgcagaatacggtaagaaaatacgggtgaaatatagtggattaacaaaaatcaggacaaggcgacgaagccgcagacagtacaaatag

SEQ ID NO: 50012 - DNA, 984 bp, Neisseria meningitidis
atggctgcgtacgacagtttgatggtatttacaggcaatgccaatcccgaattggcacaacgtgttgtcaggcatttggacatttctttgggcaatgcttccgtatccaagttttcagacggcgaagttgccgtcgaactgttggaaaacgtacgcgggcgcgatgttttcatccttcagccgacctgtgcgccgaccaatgacaacctgatggaaatcctgacgatggcggatgcactgaagcgtgcttcggcaggtcgtattaccacagccattccgtatttcggctatgcgcgccaagaccgccgtccgcgttccgtccgcgttccgatttctgccaaactggtggcaaatatgctgtattcggcagggatcgaccgtgttttgactgtcgatttgcatgccgaccagattcaaggtttcttcgatattccggtggacaatatttatgccaccccgattctgttgaacgacatcaaacaacagcggattgaaaatctgaccgtcgtcagcccggacatcggcggtgtcgtccgcgcccgcgccgtggcaaaatccttgaatgccgacttggcaatcatcgacaaacgccgcccgaaagccaatgtggcggaagtcatgaacatcatcggcgatattcaaggcagaacctgtctgattgtggacgatatgattgacactgcaaatacgctgtgcaaagccgccgtcgccctgaaagagcggggggctgaacgtgttctagcctatgccagccacgccgtattctccggagaggcggtcagccgtatcgcctcatccgaaatcgaccaggtggtcgtaaccgataccattcctttgtctgaagcggctaaaaactgcgaccgtatccgtcaggtaacgattgccggtctgttggccgaaaccgtccgccgcatcagcaatgaagaatccgtctcatatcttttcaatgaagaagtgatgacaggcagcatgttgctgccataa

SEQ ID NO: 50013 - DNA, 1305 bp, Neisseria meningitidis
atgctgccaacccaacccaacccaacccaacccaacccaacccaacccaacccaacccaacccaacccaacccaacccaacccaagcccctatctaatcgacacagccggggtgaacaccgaggcaatctacacttcagacggcattaccgccaactctacccaactcgaacagctcaaaaaactgtttcccgcctgttttgacgcagacggaaatttccttatcgacagattacaagccgaaattgcgccacagaccgacatcggacgcgaattttacgaaatgaactggctgggcaaatcatatgctcgcctgcttcgcaacctgccgcccgaaaccctgataagtgaagacaagacgcacaacgccaaacccgaaaatgcaggcagccaaaacctactgattcgtggcgacaatctagaagtgttgaaacacttaaaaaacgcctacacaaacagcgtgaagatgatttacatcgacccgccctacaacaccggatcagacggctttgtctatcaggacgaccgcaaattcacaccagccgaacttgcctgcttagccaatattgacgaagacgaagccgcgcggattttagatttcaccgacaaaggctcaaactcgcacagtgcatggttgacctttatgtatccgcgcctgtatatcgcccgcgaactgttaaaggacgacggcgtgatttttatctcgattgacgataacgaagcggcgcagttgaagttgttgtgtgatgaagtgtttggggaagggaattttattaaagatttaattgttaatacatcagaaggtggtggtaatgcaaaatatgttgtaaatgggcatgaaactgttttagtttatgcgaaagatattactcattttgacaatctaaaaagaccaaaagatatacgcggcaaaaaaattgtaatcaatgatgaattatattggatacaggaagatgccgttcgcgaacagtttggcaaatatgggaacttgcattacgaagatattattgaaataaaaggaattgagtttaaaaacaaaattgataaagatattgaaaataatgaatatatcttaattccgaagtcttatgggaaaacaattattggaaaacttagaaaagtatccgatgatttttccaaatttcatagcatcttaaatattggaaatataagtaaaaatcttactaaagatggtattcgtgaattagaagagttgtttgaaactggaaaaggttattctccttttgaaacaccaaaaccattagatttattgaaaagattagggcgtgtcctcaatttaacttag

SEQ ID NO: 50014 - DNA, 234 bp, Neisseria meningitidis; identical to SEQ ID NO: 40733

SEQ ID NO: 50015 - DNA, 492 bp, Neisseria meningitidis; identical to SEQ ID NO: 39917

SEQ ID NO: 50016 - DNA, 1368 bp, Neisseria meningitidis
atgtcttccccttcaaataccaatcgtcaaacctgatccagccgattaacctatatcctgaccgttgccggcgcgactgtcggtttcggcgcgacgtggcgtttcccgtatttggtcggtgaaaacggtggtggcgcgtatgtgtttttattctgtatcgcgatgctggttatcggcattccgatgattttggtggaaaatgtcatcggacggcgcaaaggcgtgaacgcgctggatgcgttcggcggtccgatgaacggcaaacccattgctaaaatttggaaactggtcggctggatggggctgctcggcgcgttcggcatcatggcttattacatggcactcggcggctgggtaatcagctatatcgttaatattattggaggaaatttgaatatttccagccccatcgacggtgtggttacaaaaggcttctttgccgaacacataaacagcccttgggaaattgcgttttatacgctgctttttgtcgccgtgaaccaatggattttggtcaaaggcgttatcggcggcattgaaaaagcggcaaaatagctgatgccgctgctgtttttgttcctaatcgcgatggtcgtccgcaacgttacccttccgggcgcaatggaaggggttgctttctatctgaaacctgatttcagcaagattaccgccgaactgttcgtcttcgttttggggcaggtattttttgccctgagcctgggtttcggcgtgatgattaccttgtccagctatttggataaaaacgaaaatctagttcagacggcagttatcacggcaattaccaataccatcatcgccatacttgcgggctttatgattttcccgtcgctcttcagcttcggcgttgcccccgattccggcccgactttggtgttccaaagcttgccgattgtgttctcacatatgtgggcgggatctgtgttcgccgtgattttcttctcgctgctcctgattgccgcgttgacaacttcgctgaccatttatgaaatgttgattacgaccattcaggaaaaaaccaaaatccgccgtaccgccgcgattacgattgtattggctgccatcttcattttcggcaacatcccgtccattttgagctacggcccttggaaagatgtttccatatttggcaaaaatatttttgacgcttttgactacatcagcggcaacatcttgtttatgctgaccgcgctcggttccgcgctgtttgtcggttttgtgatgaaggacgaagcgaaggaagaattgctttataaaggcaaccatacgacggtcaatatttggtttgcctatgtgaaatacctcgtgccgttggtgattctgctgatttttatcagcaacctgttctaa

SEQ ID NO: 50017 - DNA, 513 bp, Neisseria meningitidis; identical to SEQ ID NO: 44027

SEQ ID NO: 50018 - DNA, 1404 bp, Neisseria meningitidis; identical to SEQ ID NO: 48026

SEQ ID NO: 50019 - DNA, 978 bp, Neisseria meningitidis
atgcaagaaaacccgaccgtgtggctgttcgacctcgacaacacgctgcacaatgccgatgccggcctcttcacactcatcaaccgcgctatgacacgctatatggcacgccgcctcaaactctccgaatctgccgcgtccgacctgcgtcaagactattggcaccgctacggcgcaacgctcgccggactgcaaatccaccatcccgaaatcgacatcgccgaatttttgcgcgaaagccatccgatcgatgcaatcctgaccaggctgcacggcatgcctgaaacacaaaacaccctgagccgcctaaaagggcgcaaggcagttttttccaacggcccgtcgttttacgtccgcgccgttgtcggcgcactcggtttggaaaaccgtttcgacgcactgttcggcacggatgatttcggactgctgtacaaacccaatccgcaagcgtatctcaatgtctgccgccttttggacgtaccgcccgaatgctgcattatggtggacgacagcgcggacaacctgcatcaggcaaaagcattgggcatgaaaaccgtccggttcggtgcaaaagtgcacgacctgccctttatcgatgcttccgtaagcgatatggcgcaactggctcggtatgcagaaactttgtcagaacaccgccaaaatcattacaatacccacacccccccgaaaatacgaaagaatgttatgcgtaaaaccttccttatcctgatgactgccgccgcccttttgtcgggctgcgcgtgggaaacttatcaagacggcaacggcaagaccgccgtccgtcaaaaatatcccgccggcacgcccgtttattaccaagacggcagctactcgaaaaatatgaactacaaccaataccgtcccgaacgccatgccgtgttacccaaccaaaccggcaacaacgccgacgaagagcatcgccaacactggcaaaagcccaaatttcaaaaccgataa

SEQ ID NO: 50020 - DNA, 459 bp, Neisseria meningitidis; identical to SEQ ID NO: 38813

SEQ ID NO: 50021 - DNA, 1311 bp, Neisseria meningitidis
atgaaatcctatttttccaaatatatcctacccgtttcactttttaccttgccactatccctttccccatccgtttcggcttttacgctgcctgaagcatggcgggcggcgcagcaacattcggctgattttcaagcgtcccattaccagcgtgatgcagtgcgcgcacggcaacaacaagccaaggccgcattccttccccatgtatccgccaatgccagctaccagcgccagccgccatcgatttcttccacccgcgaaacacagggatggagcgtgcaggtgggacaaaccttatttgacgctgccaaatttgcacaataccgccaaagcaggttcgatacgcaggctgcagaacagcgtttcgatgcggcacgcgaagaattgctgttgaaagttgccgaaagttatttcaacgttttactcagccgagacaccgttgccgcccatgcggcggaaaaagaggcttatgcccagcaggtaaggcaggcgcaggctttattcaataaaggtgctgccaccgcgctggatattcacgaagccaaagccggttacgacaatgccctggcccaagaaatcgccgtattggctgagaaacaaacctatgaaaaccagttgaacgactacaccgacctggatagcaaacaaatcgaggccatagataccgccaacctgttggcacgctatctgcccaagctggaacgttacagtctggatgaatggcagcgcattgccttatccaacaatcatgaataccggatgcagcagcttgccctgcaaagcagcggacaggcgcttcgggcagcacagaacagccgctatcccaccgtttctgcccatgtcggctatcagaataacctctacacttcatctgcgcagaataatgactaccactatcggggcaaagggatgagcgtcggcgtacagttgaatttgccgctttataccggcggagaattgtcgggcaaaatccatgaagccgaagcgcaatacggggccgccgaagcacagctgaccgcaaccgagcggcacatcaaactcgccgtacgccaggcttataccgaaagcggtgcggcgcgttaccaaatcatggcgcaagaacgggttttggaaagcagccgtttgaaactgaaatcgaccgaaaccggccaacaatacggcatccgcaaccggctggaagtaatacgggcgcggcaggaagtcgcccaagcagaacagaaactggctcaagcacggtataaattcatgctggcttatttgcgcttggtgaaagagagcgggttagggttggaaacggtatttgcggaataa

SEQ ID NO: 50022 - DNA, 1041 bp, Neisseria meningitidis; identical to SEQ ID NO: 47995

SEQ ID NO: 50023 - DNA, 294 bp, Neisseria meningitidis
atgaacaaaaaattaaactatatttttatgttggactgtttagggttggtgatattgtttacttgtataatagctacttttgaaagagattatggatttaaaatttttactaattctaagaggcctgaattttattattggattggaatgttttattatggaattatttcttgctggtttgattatcaattaatttcaacaaaggcgaattcgtataaaagaaaagttaaacaatataaaattttttcagtaatattttcagttttgatatttatttctactatagtaaaactt

SEQ ID NO: 50024 - DNA, 423 bp, Neisseria meningitidis
atgtattgggaacgcggtctgcacatgtataaggcaagtgccgtcgtgccgacgggatatgtacgggttgggaataccgcgccgctggtcggcgaagacacgcaacggtatgcctctttttggggcgacggctacgacgtgtaccgtcagttgagatggcagcagatatccgaaaaacagagaaaggcattcaaaaaagccgctaaaagcaaaaagaccgtgatgtttgccggacgggaatacggcatatccaaacagaatttgagcgatgtttgggatgattttgaagacgcgatggaattgaaggcgtttccctgcctgtcttcgctgtttctgaccaagtggcataaaaatctatatgatagtggattaacaaaaaccagtacggcgttgcctcgccttagctcaaagagaacgattctc

SEQ ID NO: 50025 - DNA, 3045 bp, Neisseria meningitidis
atgttttggatagttttgatcgttattttgttgcttgcgcttgccggcttgttttttgtccgcgcacaatccgaacgcgagtggatgcgcgaggtttctgcgtggcaggaaaagaaaggggaaaaacaggcggagctgcctgaaatcaaagacggtatgcccgattttcccgaacttgccctgatgcttttccatgccgtcaaaacggcagtgtattggctgtttgtcggtgtcgtccgtttctgccgaaactatctggcgcacgaatccgaaccggacaggcccgttccgcctgcttctgcaaatcgtgcggatgttccgaccgcatccgacggatattcagacagtggaaacgggacggaagaagcggaaacggaagaagcagaagctgcggaggaagaggctgccgatacggaagacattgcaactgccgtaatcgacaaccgccgcatcccattcgaccggagtattgctgaagggttgatgccgtctgaaagcgaaatttcgcccgtccgtccggtttttaaggaaatcactttggaagaagcaacgcgtgctttaaacagcgcggctttaagggaaacgaaaaaacgctatatcgatgcatttgagaaaaacgaaacagcggtccccaaagtccgcgtgtccgataccccgatggaagggctgcagattatcggtttggacgaccctgtgcttcaacgcacgtattcccgtatgttcgatgcggacaaagaagcgttttccgagtctgcggattacggatttgaaccgtattttgagaagcagcatccgtctgccttttctgcggtcaaagccgaaaatgcacggaatgcgccgttccaccgtcatgcagggcaggggaaagggcaggcggaggcaaaatccccggatgtttcccaagggcagtccgtttcagacggcacggccgtccgcgatgcccgccgccgcgtttccgtcaatttgaaagaaccgaacaaggcaacggtttctgcggaggcgcgaatttctcgcctgattccggaaagtcagacggttgtcgggaaacgggatgtcgaaatgccgtctgaaaccgaaaatgttttcacggaaaccgtttcatctgtgggatacggcggtccggtttatgatgaaactgccgatatccatattgaagaacctgccgcgcccgatgcttgggtggtcgaaccacccgaagtgccgaaagttcccatgcccgcaatcgatattccgccgccgcctcccgtatcggaaatctacaaccgtacctatgaaccgccggcagaattcgagcaggcgcaacgcagccgcattgccgaaaccgaccatcttgccgatgatgttttgaatggaggttggcaggaggaaaccgccgctattgcagatgacggcagtgaaggtgcggcagagcggtcaagcgggcaatatctgtcggaaaccgaagcgttcgggcatgacagtcaggcggtttgtccgtttgaaaatgtgccgtctgaacgcccgtcctgccgggtatcggatacggaagcggatgaaggggcgttccaatcggaagagaccggtgcggtatccgaacacctgccgacaaccgacctgcttctgcctccgctgttcaatcccggggcgacgcaaaccgaagaagaactgttggaaaacagcatcaccatcgaagaaaaattggcggagttcaaagtcaaggtcaaggttgtcgattcttattccggccccgtaattacgcgttatgaaatcgaacccgatgtcggcgtgcgcggcaattccgttctgaatctggaaaaagatttggcgcgttcgctcggcgtggcttccatccgcgttgtcgaaaccatccccggcaaaacctgtatgggtttggaacttccgaacccgaaacgccaaatgatacgcctgagcgaaatcttcaattcgcccgagtttgccgaatccaaatccaagctgacgctcgcgctcggtcaggacatcaccggacagcccgttgtaaccgacttgggcaaagcaccgcatttgctggttgccggcacgaccggttcgggcaaatcggtgggtgtcaacgcgatgattctgtctatgcttttcaaagccgcgccggaagacgtgcgtatgattatgatcgatccgaaaatgctggaattgagcatttacgaaggcatcccgcacctgctcgcccctgtcgttaccgatatgaagctggcggcaaacgcgctgaactggtgtgttaacgaaatggaaaaacgctaccgcctgatgagctttatgggcgtgcgtaatcttgcgggcttcaatcaaaaaatcgccgaagccgcagcaaggggagaaaaaatcggcaatccgttcagcctcacgcccgacgatcccgaacctttggaaaaactgccgtttatcgtggtcgtggtcgatgagtttgccgatttgatgatgacggcaggcaagaaaatcgaggaactgattgcccgcctcgcccaaaaagcccgcgcggcaggcatccatcttatccttgccacacaacgccccagtgtcgatgtcatcacgggtctgattaaggcgaacatcccgacgcgtatcgcgttccaagtgtccagcaaaatcgacagccgcacgattctcgaccaaatgggcgcggaaaacctgctcggtcagggcgatatgctgttcctgccgccgggtactgcctatccgcagcgcgttcacggcgcgtttgcctcggatgaagaggtgcaccgcgtggtcgaatatttgaaacagtttggcgagccggactatgttgacgatattttgagcggcggcggcagcgaagagctgcccggcatcgggcgcagcggcgacggcgaaaccgatccgatgtacgacgaagccgtatccgttgtcctgaaaacgcgcaaagccagtatttcgggcgtacagcgcgccttgcgtatcggctacaaccgtgccgcgcgtctgattgaccagatggaggcggaaggcattgtgtccgcaccggaacacaacggcaaccgtacgattctcgtccccttggacaatgtttga

SEQ ID NO: 50026 - DNA, 918 bp, Neisseria meningitidis
atggaaaaagcagaacatttgaacagcagccggttcgtcaatctagtcaaaagcggcggcggcagctatgtggagggcagctaccgtttcgatactttgtccaacggcatttccatccacggcggcacagtaacggcacggtgtgatttttgcagcagccgcctcgccgaaccttatgtgtcgttcgtgctcttgctggaaggcagtttggacttcggcatcaaccgctgccgcttccaaatcgatgcggacggcggcaagattgtcctaattgctgtcggggaagaagtcctgttcagccgctatctttaccgaggcggcaaaacggtcaaaatgacaattaaaggtatggaacaatggctgctgcgtccggaatacgcgcgtttcgcacccctgctttaccgcgaaccggtcaggatataggatttgcccccgaacctgcgcggcttggcggcatcctgcctgcaagccgtcccaaaggggcatttgggcaaaacattacgccgcgaggcagacgtgttgcggctgctgtcggacttgtgggacacggtttcagacggcatcgggccggcggtggggcaaacggcggaagcagacgctatgccgtctgaagacttcagccgcaccctaaatgccgcgttcgacggcggcgcacaccaagtcaaccgactgacagatgcgctgaacatcagcgaaaggacgctgcaacgccgtatgcgcgaccatttcggcattaccgcaagcgagtggctgcaccacaaacaaatgcagcacgcgctctatctgttgcaaaacggggggaaaagcataggcgaaaccgcatatttatgcggctaccgccacgtttccagctttactcaggcattcaggcaatatttcggcagcacgcctgcggaaaccaaaaaagaaaaccgataa

SEQ ID NO: 50027 - DNA, 360 bp, Neisseria meningitidis; identical to SEQ ID NO: 39792

SEQ ID NO: 50028 - DNA, 318 bp, Neisseria meningitidis; identical to SEQ ID NO: 48041

SEQ ID NO: 50029 - DNA, 567 bp, Neisseria meningitidis; identical to SEQ ID NO: 46059

SEQ ID NO: 50030 - DNA, 273 bp, Neisseria meningitidis; identical to SEQ ID NO: 44450

SEQ ID NO: 50031 - DNA, 291 bp, Neisseria meningitidis; identical to SEQ ID NO: 48043

SEQ ID NO: 50032 - DNA, 372 bp, Neisseria meningitidis; identical to SEQ ID NO: 38046

SEQ ID NO: 50033 - DNA, 234 bp, Neisseria meningitidis; identical to SEQ ID NO: 40078

SEQ ID NO: 50034 - DNA, 186 bp, Neisseria meningitidis; identical to SEQ ID NO: 38047

SEQ ID NO: 50035 - DNA, 381 bp, Neisseria meningitidis
ttgtactgtcttcggcttcgtcgccttgtcctgatttttgttaatccactatacatcatcgctactaccgttccggcgcaacaggcattcctcgatgccgccgaactgatgcaatggagtatagaaaccgaagggctgggcttgaacgtcatctcgcacaagatactcggcaaagaccacgcccaagtcgaatttgaagcctacttccgagacggacaacaccgatccgcgcatcacgaactgtccggcttcgtcaacatcggcggacaatggtattttatcgatccgaccgttccgcatcctgcgatgaaacaaccctgcatttgcggatcgggcaaaaaatttaaagcctgctgcggcaaatatctgaaacctgtcgca

SEQ ID NO: 50036 - DNA, 198 bp, Neisseria meningitidis; identical to SEQ ID NO: 40083

SEQ ID NO: 50037 - DNA, 207 bp, Neisseria meningitidis
atgtatgatgttttcaaaacgcgtgcggcagagttgtcgggcgcgttttgtagtttggatttttggttgtgccataaatttgtgccattgtgccatgctctgtgccattttttaacccgccgcgatattgatacgctgattgaggaaggcttggtggaagagcgttttgagcaaggcgtcagtaaattttatgcaaaagaggccgtc

SEQ ID NO: 50038 - DNA, 192 bp, Neisseria meningitidis; identical to SEQ ID NO: 48049

SEQ ID NO: 50039 - DNA, 483 bp, Neisseria meningitidis
atgacacacataagctcgccccgtaacgaatttatacgcggcatcaaagaaagttcgcccatgctgatcgggcttttgccttgggcattaatactcggtatgcagggtggacaaaaaggcatgagctggctggaaatgttgttgatgaccggtatgaacttcgccggcggctccgagtttgccacggtcaacctgtgggcggaacctctgccgatactgcttatcgccaccgtaacctttatgattaattctcggcatatcctgatgggggcggcacttgccccgcacctgaaagaaataccgctgaaaaaagccgtgcccgcactgttttttatgtgtgatgaaagctgggcgatggcattctccgaaatccaaaaacggaaggcagccggtttgcccgcattcaatatgcctttttatagtggattaacaaaaaccagtacagcgttgcctcgccttagctcaaagagaacgattctctaa

SEQ ID NO: 50040 - DNA, 378 bp, Neisseria meningitidis
atgtctttcggctatttgattgcaacatcgcaaccttgcgaattgttgacaaaatctcgaggtgaaactttttctttaattatggataagatggatttatggatttatttcagattttgtgaaggaaatatttatacaataaggaagaatgaaactgaatcttgtcttacagaaagaggaggcgaatggttgaaacatatttatgaatttaatcggggaagttttattttttcttatgtgcttctaaaaaagagagaaagcgaagagaattttacagaaattgttttaaaatcaataaaaaataataaaattttgacagttaaggtacggtcaggcttgcattttgacttaagaaatatttatcgtattgagatgtaa

SEQ ID NO: 50041 - DNA, 240 bp, Neisseria meningitidis
ttgctgattttgttaatttttgagtataggaagtttctaatggcaaccggtatcgtaaaatggtttaacgacgctaaaggttttggtttcatcacgcctgatgaaggcggcgaagatttgttcgctcacttctcagcaatcaatatggaaggtttcaaaaccctgaaagaaggccaacgtgtctctttcgacgtaaccaccggccctaaaggcaaacaggccgccaacattcaggctgct

SEQ ID NO: 50042 - DNA, 237 bp, Neisseria meningitidis; identical to SEQ ID NO: 45833

SEQ ID NO: 50043 - DNA, 312 bp, Neisseria meningitidis; identical to SEQ ID NO: 37456

SEQ ID NO: 50044 - DNA, 297 bp, Neisseria meningitidis
atggtttgttgtttaaggtttttaacttcgttgaaacggcaaaccgtcaatcaagcaaccgcgtgcgtgcgtaccgcacacaccctacacgttgattttgaagttccgtgtaattcacaggtagggtgtgtggcgcagccacgcacgcggtgttgggtatgcaggctacggcttgctgctgcagaaactcctgaagaaaaagccaaagacgccgctgaagaggctaaagaagaagcaaaagacgcagcggaagatgccaaagaagctgctgaagacgctaaagaagaagctaaataa

SEQ ID NO: 50045 - DNA, 201 bp, Neisseria meningitidis
atggatacgaccctgaagaataaagccgaagccatcttgggcgaaccgcttttagacgaacctatccgccccgagtcgtgggaatgttgcggcagcgactgcggcgaggcgtgcattcagacgatttattgggcggataaggcccgctacgacgcgcaacggcggaaattgaaagaagcgggttggtcggacgatgccgtc

SEQ ID NO: 50046 - DNA, 204 bp, Neisseria meningitidis; identical to SEQ ID NO: 48054

SEQ ID NO: 50047 - DNA, 444 bp, Neisseria meningitidis
atgaagtggttattaaatatgataatgagacctattaaatttagtatggtaaatacgttattatttattgttatatgtagttcattttttgatctgctcgttcaattatgtacaattttatttcatagccaaaaaatatactttattacattatttttattatttatttttaattttgttacaaaatctatctatatggcaattatttatcctattttatatttttttacgataaaaaaatattatccttactctaggaaagtgataattctgttatcattagcattatctatatattttagttttatggacttttactttttttccatatattcagataaccttagctatgaaacggagtctttacatttatacatccctattattattaattttttctcacttttagtttctaattttattttatcttttatcaacaagtaa

SEQ ID NO: 50048 - DNA, 195 bp, Neisseria meningitidis; identical to SEQ ID NO: 40091

SEQ ID NO: 50049 - DNA, 396 bp, Neisseria meningitidis; identical to SEQ ID NO: 40092

SEQ ID NO: 50050 - DNA, 207 bp, Neisseria meningitidis; identical to SEQ ID NO: 38061

SEQ ID NO: 50051 - DNA, 186 bp, Neisseria meningitidis; identical to SEQ ID NO: 48063

SEQ ID NO: 50052 - DNA, 120 bp, Neisseria meningitidis; identical to SEQ ID NO: 38062

SEQ ID NO: 50053 - DNA, 267 bp, Neisseria meningitidis; identical to SEQ ID NO: 40064

SEQ ID NO: 50054 - DNA, 303 bp, Neisseria meningitidis
atgacttgggtcggaggctcaggtaatgcgcaacaaagttcatattattgcgaaatttgcgaatctgcagggcttaacgatacgggaaatcctgataaatctttaggattgccaaacaatacgttcagtaatccgcctggttggggagctacaatcggagctttagcaggtagccgcatagggatgcctgaatttggtacgtttgcgagccatgccattgaaaatttcgactggtcatggtatcgacgttatagggaaattgccgaaacgattgaacgagaatattcaggcggtttgccttaa

SEQ ID NO: 50055 - DNA, 213 bp, Neisseria meningitidis; identical to SEQ ID NO: 39705

SEQ ID NO: 50056 - DNA, 204 bp, Neisseria meningitidis; identical to SEQ ID NO: 39691

SEQ ID NO: 50057 - DNA, 177 bp, Neisseria meningitidis; identical to SEQ ID NO: 48073

SEQ ID NO: 50058 - DNA, 2124 bp, Neisseria meningitidis; identical to SEQ ID NO: 47503

SEQ ID NO: 50059 - DNA, 216 bp, Neisseria meningitidis; identical to SEQ ID NO: 48076

SEQ ID NO: 50060 - DNA, 552 bp, Neisseria meningitidis; identical to SEQ ID NO: 39879

SEQ ID NO: 50061 - DNA, 336 bp, Neisseria meningitidis
ttgacagaagaaatgatgaaaaagcagcggcatatcctgtgtgtcggctgcctgtatattatattgaaggtcaacgtatttcccaataccggctggatggaagcgtcgaaagggatgcagggcatgtcgttcagtaccttcggatacgcggatgctccgggctatacattcagccgcattggccatactttaattttcctacttggaaagaccacagggacacgtacaactgtttccgatagttcgcataatgtatattatgttaaattatatatttgtgcaaacggtctgcttcggattcgtccttgcgttacacccctaactccaaggcattaa

SEQ ID NO: 50062 - DNA, 246 bp, Neisseria meningitidis; identical to SEQ ID NO: 38079

SEQ ID NO: 50063 - DNA, 300 bp, Neisseria meningitidis; identical to SEQ ID NO: 39866

SEQ ID NO: 50064 - DNA, 414 bp, Neisseria meningitidis
ttgccgagcgataaagaagcgcgggcagggtgcttatctttgcctgccaataacggtataattcgggcgttatcaccgccttttaccggtataaacatcagactttttgccgccttgggtctcctgtccctttccggcgcggcggcgcaagcctccgtataccattgcaactcaaatggcaaaagcgtatatacatcagccccagcaggatcgtgcgccgatgcggatttacctaaaatcagcagccatcagggaggcggataccgcctgaaaattaaaaaactcagtcaagaagccaaaatacacatagaaagtaaaaagaaaaacaaaaaacctgccgggaaaaagaacaggcaggctgccaaagccccgaaagaaaatcaaaagcaaccaaccgaaaagaaaagcccgtaa

SEQ ID NO: 50065 - DNA, 2361 bp, Neisseria meningitidis
atgctccctattgccgcgctggtcggcagtattttcggcaatccggttttggcagcggatgaagctgcatctgaaaccacgcccgttaaggcagagataaaagcagtgcgcgttaaaggccagcgcaatgtgcctgcggctgtggaacgcgtcaaccttaaccgtatcaaacaagaaatgatacgcgacaataaagacttggtgcgctattccaccgatgtcggcttgagcgacagcggccgtcatcaaaaaggctttgccattcgcggcgtggaaggcaaccgtgtcggcgttagtattgacggcgtaaacctgcctgattccgaagaaaactcgctgtacgcccgttatggcaacttcaacagctcgcgtctgtctatcgaccccgaactcgtgcgcaacatcgacatcgtaaaaggggcggactctttcaataccggcagcggcgccttgggcggcggtgtgaattaccaaaccctgcaaggacgtgacttactgttgcctgaacggcagttcggcgtgatgatgaaaaacggttacagcacgcgtaaccgtgaatggacaaataccctcggtttcggcgtgagcaacgaccgcgtggatgccgctttgctgtattcgcaacggcgcggccatgaaaccgaaagcgcgggcaaccgcggctatccggtagaaggtgcgggtaaagaaacgaatatccgcggttccgcccgcggcatccccgatccgtccaaacacaaataccacagcttcttgggtaagattgcttatcaaatcaacgacaaccaccgcatcggcgcatcgctcaacggtcagcaggggcataattacacgattgaagagtcttacaacctgcttgcttcttattggcgtgaagctgacgatgtcaacagacggcgtaacaccaacctcttttacgaatggacgccggaatccgaccggttgtctatggtaaaagcggatgtcgattatcaaaaaaccaaagtatctgcggtcaactacaaaggttcgttcccgatagaggattcttccaccttgacacgtaactacaatcaaaaggacttggatgaaatctacaaccgcagtatggatacccgcttcaaacgcattaccctgcgtttggacagccatccgttgcaactcggggggggcgaccgcctgtcgtttaaaactttcgccagccgccgtgattttgaaaacctaaaccgcgacgattattacttcagcggacagatatcccgtaccaccagctcgattcaacaccctgtgaaaaccaccaactacggtttctcgctgtctgaccaaatccaatggaacgacgtgttcagcagccgcgcaggtatccgttacgaccacaccaaaatgacgcctcaggaattgaatgccgactgtcatgcctgcgacaaaaccccgcccgcaccgaatacttacagcggctggagcggtttcgccggtttggcggctcaactgaatcaggcttggcgtgtcggttacgacattacttccggctatcgcgtccccaatgcgtccgaagtgtatttcacttacaaccacggtgcgggcacatggctgcctagtcctaatctgaaagccgagcgcagcaccacccacaccctgtctttgcagggacgcggtgaaaaaggtacgctggatgccaatctgtatcaaagcaactaccgcaatttcctgtctgaagagcagaagctgaccaccagcggcactcccggctgtactgaggaaaatgcttactacggtatatgcagcgacccctacaaagaaaaactggattggcagatgaaaaatatcgacaaggccagaatccgcggtatcgagctgacaggccgtctgaatgtggacaaagtagcgtcttttgttcctgagggttggaaactgttcggctcgctgggttatgcgaaaagcaaactgtcgggcgacaacagcctgctgtccacacagccgctgaaagtgattgccggtatcgactatgaaagtccgagcgaaaaatggggcgtattctcccgcctgacctatctaggcgcgaaaaaggtcaaagacgcgcaatacaccgtttatgaaaacaagggctggggtacgcctttgcagaaaaaggtaaaagattacccgtggctgaacaagtcggcttatgtgtttgatatgtacggcttctacaaaccggctaaaaacctgactttgcgtgcaggcgtgtacaacctgttcaaccgcaaatacaccacttgggattccctgcgcggtttgtatagctacagcaccaccaatgcggtcgaccgcgatggcaaaggcttagaccgctaccgcgccccaggccgcaattacgccgtatcgctggaatggaagttttaa

SEQ ID NO: 50066 - DNA, 4473 bp, Neisseria meningitidis
atgcgcttcacacacaccaccccattttgttccgtattgtccaccctcggtctttttgccgtttcccctgcttactcatccattgtccgcaacgatgtcgattaccaatattttcgcgactttgccgaaaataaaggcgcgttcgccgtaggtgcaagcaatatttccatccaagacaagcaaggcaaaatattaggcagggttctcaacggcatccccatgcccgacttccgagtcagcaaccggcaaaccgccatcgccaccctgattcacccccaatacgtcaacagtgtcaaacacaacgtcggctacggttccatacaattcggcaacgacacccaaaatccagaagaacaagcctatacctaccgcctcgtatcacgcaacccgcacccggactacgactaccaccttccccgcctcaacaaactggttaccgaaatctcacctgccgcactcagcagcgtacccttgcttggaaacggccagccaaaggccaatgcctacctcgataccgaccgcttcccctactttgtacgactcggctcaggcacgcaacaagtccgcaaagcagacggcacgcgtacacgaaccgccccggcataccaatacctgaccggcggcacgccgctgaaagtattggggttccaaaaccacggcttactcgtcggcggcagcctgaccgaccaaccccttaacacctacgcaatcgccggagacagcggttcccccctgtttgccttcgacaagcatgaaaaccgctgggtgcttgcgggcgtactcagcacctacgccggcttcgataatttcttcaacaaatacatcgtcacgcaacccgaattcatccgttccaccatccgccaatacgaaacccggctggatgtcgggctgaccaccaacgaactcatatggcgcgacaacggtaatggcgacagcaccctgcaagggctcaacgaacgcatcaccctgcccattgcaaacccttcgcttgccccacaaaacgacagcaggcacatgccgtctgaagatgccggcaaaacgctcatcctatccagcaggttcgacaacaaaacactgatgctggcagacaatatcaaccaaggcgcaggcgcattgcagttcgacagcaacttcaccgtcgtcggtaaaaaccacacatggcaaggtgcaggcgttatcgtagccgacggcaaacgcgtcttctggcaagtcagcaaccccaaaggcgaccggctctccaaactgggcgcaggcacgcttatcgccaacggacaaggcatcaaccagggcgacatcagcatcggggaaggcactgtcgtactcgcccaaaaagctgcttcagacggcagcaaacaagcattcaaccaagtcggcatcaccagcggcaggggtacggccgtcctcgccgacagccagcaaatcaaatccgaaaacctctatttcggcttcaggggcggacggctcgacctcaacggcaacaaccttgcctttacccatatccgccatgcggacggcggcgcgcagatcgtcaaccacaaccctgaccaagccgcgacactgacgctgaccggcaaccccgtcctcagtcctgagcatgtcgagtgggtgcaatggggcaaccgtccgcaaggcaacgcggcggtttacgaatacatcaacccgcaccgcaaccgtcggaccgactacttcatactcaaacccggcggcaacccgcgcgaatttttcccgttaaatatggaaaactcaacaagctggcaatttatcggcaacaacaggcaacaggccgccaaacaagtcgcccaagccgaaaatgcccgccccgacctaattaccttcggcggatacttgggtgagaacgcgcaaacgggcaaagccgcaccgagttacagcaaaaccaatatcgaatgggtgaatggtccaaacaccccacacaagccctcgccctatacgaatacgccaacccgcacaggggcaggcgtaccgacgattaccgcctcaaagaaggcggcaaccccggcgcctacttcccatggaatgcctacagcacccaagactgggaatttctcggacatgaccggcgaagcagccatagaaaaaaaccgccatatcgcaaatgccgccgtatacggccggcccgaataccgttacaacggcgcactcaacctgcactatcgtcccaaacgcaccgacagcacgctgttgctcaacggcggcatgaaccttaacggggaagtcttgattgagggcggcaatatgattgtgtcaggcaggcccgtaccccatgcctacgaccaccaggccaaacgcgaacccgttcttgaaaacgaatggaccgacggcagcttcaaggctgcacggttcaccctacgaaaccatgcccgactgacagcagggcgcaataccgcgcatctggacggcgacataaccgcatacaatctgtccggcatcgacctcggctttatccaaggcaaaacaccggaatgctaccgctcctaccatagcggcagcacccactgcacacccaacgccgttttaaaagccgaaaactatcgtgcactacctgtaacgcaagtacgcggcgacattacccttaacgaccgttcagagctccgcctgggcaaagcacacctgtacggcagcatccgtgccggcaaagacaccgcagtccgcatggaagcagacagcaactggacactttcccagtccagccacaccggcgcactgacgcttgacggcgcacaaattaccctgaaccccgatttcgccaataatacacacaacaaccgcttcaacacactgaccgtcaacggcacacttgacgggttcggcacattccgattcctgaccggcatcgtccgaaaacaaaatgcccccccctcaaactggaaggggacagccgcggcgcattccaaatccacgtcaaaaacaccggacaagaacctcaaacaaccgaatcgcttgcacttgtgagcctcaatccgaaacacagccaccaaagcccgattcaccctccaaaacggctatgccgatttgggtgcctaccgctacatcctccgcaaaaacaacaacggatacagcctgtacaacccgctcaaagaggccgaacttcaaattgaagccacgcgtgcggaacatgagcgcaaccaacaggcatacaaccaattacaggcaaccgacatcagcagacaggttcaacatgactctgacgcgaccaggcaggcactacaggcctggcagaacagtcaaaccgaacttgcccgcatcgacagccaagtccaatatctgtccgcccaattgaaacagacagacccgctgaccggcattctgacgcgtgcccaaaacctgtgtgccgcacaaggatacagtgtcgatatctgccgtcaggttgccaaagccgccgacacgaacgacctgacactcttcgaaaccgaactggatacgtatatagaacgtgtagaaatggccgaatccgaacttgacaaagcacggcaaggcggcgatgcgcaagccgtcgaaacagcccggcacgcctacctgaacgcactcaaccgtctgtcccgacaaatccacagtttgaaaaccgacgttgccggcatccgtatgccgaacctggccgaactgatcagccggtcggccaacaccgccgtttccgaacaggccgcctacaataccggccggcaacaggcgggacgccgcatcgaccgccaccttaccgatccgcagcagcaaaacatctggctggaaaccggtacgcaacaaaccgactaccatagcggcacacaccgtccctaccaacaaactaccaactatgcacatatcggcatccaaaccggcatcaccgaccgtctcagtgtcggtacgattttaaccgatgagcgcacaaacaaccgttttgatgaaggcgtatccgcccgaaaccgcagcaacggcgcacatctgttcgtcaaaggggaaaacggcgcactctttgccgcggcagatttaggctacagcaacagccgtacccgatttaccgattatgacggggctgccgtccgccgccacgcatgggatgcaggcatcaacaccggcatcaaaatcgataccggcatcaacctcagaccctatgccggcatccgtataaaccgcagcaacggcaaccggtacgtactcgacggcgcagagataaacagcccggcgcaaatccaaaccacatggcatgccggcatccgtctcgataaaaccgtcgaactgggtcaagccaagctgacccccgctttcagcagcgattactaccatacccgccaaaacagcggttccgccctcagcgtcaacgaccgtaccttactgcagcaagccgcccacggcacactgcataccctgcaaatcgacgccggatacaaaggctggaacgccaaacttcatgccgcttacggcaaagacagcaacaccgcccgccacaaacaggcaggaatcaaaataggctacaactgg

SEQ ID NO: 50067 - DNA, 333 bp, Neisseria meningitidis
ttgtttgtatgctttgaaaaatgtttgtttccggattttgccattcccatccggttttgcgctgtacgatgtgttttagcgcggacttgctcaaaatcgcatgtgattccggtatttgaggctttgattagggatgcggactttcaatatattttcagctacaacaacgaaggcttgatgtctgtcgggcaggtaagggagatttttgagtgtttcggcaaatatgatttggttcaaacggaataccggcgttttaaggcagataagacagaaaaccgtaaccataaggcaaattcgacattcgaatatctgcatattttagaaaagaccttt

SEQ ID NO: 50068 - DNA, 1014 bp, Neisseria meningitidis
atgattttctccatcatcgtccctatttacaatgtggaaaaatacctccgctgctgcgtggattccgtgcttgccgaaaattttgccgattatgaaatgattttggtcgatgacggttcgccggacggctgcgggaagatttgcgacgaatatgcaggcaaatatccgcatataaaagtgattcatcaagaaaacggcgggctgtcggatgcccgcaacgccggtatccgggcggcaaaaggcgattacctaatctttttggacagcgacgactattgggccgacaccaatcgttcaaaaaagcgcgggggggggattctctttgatttacaacaacttgcagacaaaaaggttgatttgatcctgcatccctcgtccttcaattaccgcgacatccccaaaggggcggacttttcggataatgattttgtccgccattttgaaacgctggtggaggggcggtactatatcgccaacgcgtggacaaagattgtcaggcgggaaataatcatcaaaaacaatctgtttttcccaaaaggatacattcacgaggatttcccgtacagtttgcaattggcgcgttttatcaagacttttgccttttacgataaccctttttaccagtaccgcgttctcggcggctctatcagccacaacatcaaatacaaaaatttcagcgatgtgctgacgcatctcgaccggggtgtggattttttagtcgaaaacaaaaattcccccatctacggcggtttgcaaaaatttgtcttcgacaatatcggctatctgaggtctatattggtaaggctttatttttccaaaaacattatcctcatctaccggaaatatttttcatttaaagaaaaatgcagaaagatattcggcgcgaaggcaatccgtccggtttttatcgggaagaccgcattcatcataggattgccgatattgcgcctgctcgtaccgcctatgctgtacccggcaatcaaggccgtttatcagaaatttttttcggaataa

SEQ ID NO: 50069 - DNA, 402 bp, Neisseria meningitidis
atggcaaaccgatttcggcagcgcaaatccgcataccgccgccttagcggcaagccgttgttttcagacggcattgcggccaacctttgcggcgggcgaaaaaccttgtcctataatttatcccgcttcaaaatcagcatacggtcggaaatgcaaaaaatatctttcaatttgttgaaacctgcaaccccgaaaatagggaaacgccgccccggtttgaacggcgcgccgcatattccgatgccctccccccgataccttccggcaagcccagaaatgcccggcaacaatatccatccggcaaaaatccgaaacaacacacccggtggcaggcagagtcaaaccgccccgcaaagcatccgccatcagaaaaacaaaccgcctccgagggcttcatcctaa

SEQ ID NO: 50070 - DNA, 657 bp, Neisseria meningitidis; identical to SEQ ID NO: 40110

SEQ ID NO: 50071 - DNA, 1077 bp, Neisseria meningitidis
atggatttaagtatcgtagttcccatttataatgtcgaaagttatttggaagcgtgtctaaattccatagaacctatattaagtaatgaaaatgtcgaacttatccttgtgaatgacgggtcaaaagacggaagtgaagatatatgttataaatatatagataaaacaacaaacaacaaacaacaaacaacaaacaacaaacaacaaacaacaaacaacaaacaacaaacaacaaacaacaaacaacaaacaacaaacaacaaacaacacagataccgaacaccaaacatcaaatatatatatcaggataaccaagggacggcagaagctaggaataccggaataaaaaattcaaacggaaaatatatagtctttattgattcagatgattttattaattgtcaggtcttgctggattttcttagtaaagatgatattgatatgccggatgtggtttttttaaatgcggttaaatatgataagggaagtgtttcacattttggcgaagattatcagcctgaaaaaatactcaatcaatccaaagtcgaagttttgaaaggattatgccgatttagaaaatttccgggttcggcgtgtaataagattataaaaagggaattgattatcaaagaaaaactgttttttgaaaaagaggtttatgccgaagatatcgaatggtcaatgagattatttaatgcggcaacaactttttcttatttggacggttgttattactattatcggcagggaagaaaagattctaaaacaggaactgtttcggaaaaaagtataaagtcattattatatattttggagaaaaatgcggaaatggaatttgatagggatatatcaagttatctttattcttttctttcctacgaatatctcgttttgctttttatcatgacgagtaaaaatatagagtgtgatgctgatataaaaagaagggcgtatcatttaaggtttatgctgttaaagtccaataaattgatatataagctgatattcccgataatcacattattcggggtcgatattacaggcaggattttaaaagcaatcagggggaatatttaa

SEQ ID NO: 50072 - DNA, 1158 bp, Neisseria meningitidis
atgaaacgccaagccttagctgcaatgattgcttccttattcgcattagccgcctgcggaggcgaacctgccgcgcaagcccctgccgcttccgcagaagccgcaagttccgccgcacaaaccgccgccgaaacgccgacaggcgaactgcccgttatcgatgcagttaccacccacgctcctgaagtacctcccgcaatcgaccgcgactatcctgccaaagtccgcgtaaaaatggaaactgtcgaaaacatgaccatggaagacggtgtggaataccgctactggacatttgacggcgacgttccgggtcgcatgatccgcgtacgcgaaggcgatacggttgaagtggaattttccaacaacccgtcttctaccgttccccataacgtcgacttccacgccgcaaccggtcagggcggcggtgcagccgcaacctttaccgccccgggccgcacttccacattcagcttcaaagccctgcaaccgggtctgtacatctaccactgcgccgtcgcgccggtcggtatgcacatcgccaacggtatgtacggtctgattttggtcgagcctaaagaaggtctgccgaaagtggataaagagtcctacatcgtccaaggcgacttctacaccaaaggcaaaaaaggcgcgcaaggtctgcaaccgttcgatatggacaaagccgttgccgaacagcctgaatacgtcgtattcaacggtcacgtaggtgctatcgccggcgacaacgccctgaaagccaaagcaggcgaaactgtacgtatgtacgttggtaacggcggcccgaacttggtgtcttccttccacgtcatcggtgaaatcttcgacaaagtttatgttgaaggcggcaaactgattaacgaaaacgtacaaagcaccatcgttcctgccggcggttctgccatcgtcgaattcaaagtcgacatcccgggcagctacactttggttgaccactccatcttccgcgcattcaacaaaggcgcactgggtcaattgaaagtagaaggtgcagaaaaccctgaaatcatgactcaaaaattgagtgataccgcttacgccggtaacggtgcagctcctgctgcttccgctcccgcagcttctgccccggcagcctctgcatccgaaaaaagcgtttattaa

SEQ ID NO: 50073 - DNA, 3201 bp, Neisseria meningitidis; identical to SEQ ID NO: 40074

SEQ ID NO: 50074 - DNA, 1056 bp, Neisseria meningitidis; identical to SEQ ID NO: 40118

SEQ ID NO: 50075 - DNA, 804 bp, Neisseria meningitidis; identical to SEQ ID NO: 48087

SEQ ID NO: 50076 - DNA, 192 bp, Neisseria meningitidis; identical to SEQ ID NO: 48097

SEQ ID NO: 50077 - DNA, 933 bp, Neisseria meningitidis
atggacatcgtatttgcggcagacgacaactatgccgcctatctttgcgttgcggcaaaaagcgtggaagcggcccatcccgatacggaaatcaggttccacgtcctcgatgccggcatcagtgaggcaaaccgggcggcggttgctgccaatttgcgggggggggggtatatccgctttatagacgtaaaccccgaagatttcgccggcttccccttaaacatcaggcacatttccatcacgacttatgcccgcttgaaattgggcgaatacattgccgattgcgataaagtcctgtatctggatatagacgtattggtcagggacagcctgaagcccttatgggataccgatttgggcgataactggcttggcgcgtgcatcgatttgtttgtcgaaaggcagaatgcttacaaacaaaaaatcggtatggcggacggagaatattatttcaatgccggcgtattgctgatcaacctgaaaaagtggcggcagcacgatattttcaaaatggcctgcgaatgggtggaacaatacaaggacgtgatgcaatatcaggatcaggatattttgaacgggctgtttaaaggcggggtgtgttatgcgaacagccgtttcaactttatgccgaccaatgatgcctttatggcgaacaggtttgcgtcccgccataccgacccgctttaccgcgaccggacttatacggcgatgcctgtcgccgtcagccattattgcggcccggcaaagccgtggcacagggactgcaccgcgtggggtgcggaacgtttcacagaattggcgggcagcctgacgagcgttcccgaagaatggcgcggcaaacttgccgtcccgcaccgtgtgtttccgacaaagcgtatgcttcaaagatggcgcagaaagctgtctgccagattcttacgcaagatttattga

SEQ ID NO: 50078 - DNA, 747 bp, Neisseria meningitidis
atgatgtccgaacaccgagtcaaccacgaacctgtcttcctgttggcttcctcgccatggcgcgaaagcagcctgcgggtcgaagcgttcagccgccgttacgggcgtgtggcacttttggcaagaagcgcgcgcaagcggcagagcgaattgcgcggcgtgctggtttccttcgtgcccgtcagtgcgtcgtggtacggcagtcaggaactcaaaaccctgcaccgtgccgaatgggtcggcggatggcggcagccgcagggcagggcgttgttcagcggtctgtatgtgaacgaactggtgttgaaactgaccgcgcgcgaagacccgatgcccgaactgtacgacgcgttggcaaaagtgatggaggcggtgtgtcgtgaagccaaccacattgccgatttgcgccgcttcgagtggaagctgctcaatgccttgggcgttgcccccgatttgcacgccgacggcacgggcggcgatattttggcggataaaacctaccggctgatgcccgaagaggcggtcatgcccgtatgccgggacacggacgcgctttcgcacgaggccggcgcaattgtcgaagggcaaagcctgatcgatttgcgcgaaggcagtttccgcaccgccgaaagcctgcaacaggcattgaaaatcacacggctttttatccgccacctgttgcccgaggggctgaaatcgcggcaggtgttggaacagatacggcagtttgaccgcaataccgcgtag

SEQ ID NO: 50079 - DNA, 423 bp, Neisseria meningitidis; identical to SEQ ID NO: 48099

SEQ ID NO: 50080 - DNA, 273 bp, Neisseria meningitidis; identical to SEQ ID NO: 42079

SEQ ID NO: 50081 - DNA, 1398 bp, Neisseria meningitidis; identical to SEQ ID NO: 40135

SEQ ID NO: 50082 - DNA, 2034 bp, Neisseria meningitidis
atgaaactcgaagcaagcaagcaagagcagaagtttaaaaaatcatttattataagtctatttttttctattctttatacctctccgcttttggctgttgattacgtttacgacaattctaaattaacaaatgagcaaattgatcgcttaaaaaaacttagagataaaagcagcgaatactggaaacaagaaacttatcttctaaaaccgacgaatggtagctctcagaactctctcaaagttcccgcactatactctaaaacacaccaattcaaaaacatcaacaactcaaaaaagatttctttttatgacaaggaatacactgaagattaccttgttggcttcgcccgaggtttcggggttgaaaaaagaaatggggaagaagaaaaaacactccagcaatattttaaggactgtgtaaatactgggaattccaataatgataagtgtgaacaaccatccttcgaaaactctggcccaagattaataaagagcgatattttcgccttagctccacaaataaaaaatagccatatcaacagcgaaattttatctgtaggtaattatatcgaatggcttcgcccaacacttaataagcttcctagttggcaagagcatctctattctggtttagatccattccactatattgaggttacagacaactcacacgttatcggacaaacaattagtttggatgaattccgcttagaaaattctctctgggaaccccgttgggattctgatgttggggaattaaaaacaacgaatgcagacatccgttttaatactaaaagtgaaagtttactcgtaaaagaagattatgctggcggagctcgttttcgttttgcttacgatctaaaagataaagtctctgaaacaccagttttaacttttgaaaaaaatataactggcacttccgacatcatcttcgaaaatccaatagacgatttaaaaagtctcgacgggcatcaaattatcaaagtaaatggcacagcagataaacacgcattccgtctttctggcaaacaccaaaagggaatttatacgctttctttacaacaacgcccagaaggcttttttaccaaagtgcaagaacgcgatgatatttcgatttatgcacaacaggctcaagccgccaataccttattcgccttgcgtttgaacgacaaaaacagcgatatttttgaccgcactttaccacgcaaaggcttgtggttgcgtgtgattgacggacattccaaccaatgggtgcaaggcaaaacagcacctgtagaaggctatcgtaaaggtgtgcaactcggtggcgaagtattcacatggcaaaacgaaagtaatcaactttccgttggcttaatgagcggacaagcagaacaacgcagcactttccgcaatccagatacagacaatcttacaacgggaaatgtgaaaggctttggggcgggcatttatgccacttggcatcagcttcaggacaaacagacaggtgcgtatgcggatagctgggtacaatatcaacgcttccgccaccgcattaacactgaagatgctacagaacgttttacttcaaaaggtattaccgcctcaattgaagcgggttacaatgctttattggcagaacacttcactaaaaagggcaacagccttcgtgtttacctacaaccacaggcacaattgacttatttgggggtaaacggaaaattcagcgatagcgaaaatgcccacgtgaatttacttggctcccgccaattacaaactcgggttggcgttcaagctaaagctcaattttcactctataaaaatatcgctattgaacctttcgccgctgtgaacgcgctttaccacaacaaacctttcggtgtggaaatagacggagagcgtcgagtgataaacaataagacggcaattgagagccaattaggtgtagcagtgaaaatcaaatctcacttaactttacaagcctcattcaaccgccaaacaagcaaatatcatcaggctaaacaaggtgcgttgaatttgcagtggacgttttaa

SEQ ID NO: 50083 - DNA, 2124 bp, Neisseria meningitidis
atgacactgaaagcaagcaagcaagcaagcaagcaagcaagcaagcaagcaagcaagcaagcaagcaagcaagcaagcagtcgggttaatctattaacattatctgttttatcgctgttttgcacgccatatgtttgaggttcggatgcgtacgatcccgtcaaagaagccgagattaaaaacaaatttattttagaagcggcggaagacagaaattcccacgtttggcgcggcccgtgcagcatatcttttgattgcttcggtatgttcagagctcagcttggttcaaatactcgttctaccaaaatcggcgacgatgccgatttttcattttcagacaagccgaaacccggcacttcccattatttttccagcggtaaaaccgatcaaaattcatccgaatatgggtatgacgaaatcaatatccaaggtaaaaactacaatagcggcatactcgccgtcgataatatgcccgttgttaagaaatatattacagatacttacggggataatttaaaggatgcggttaagaagcaattacaggatttatacaaaacaagacccgaagcttgggaagaaaataaaaaacggactgaggaggcgtatatagaacagcttggaccaaaatttagtatactcaaacagaaaaaccccgatttaattaataaattggtagaagattccgtactcactcctcatagtaatacatcacagactagtctcaacaacatcttcaataaaaaattacacgtcaaaatcgaaaacaaatcccacgtcgccggacaggtgttggaactgaccaagatgacgctgaaagattccctttgggaaccgcgccgccattccgacatccatacgctggaaacttccgataatgcccgcatccgcctaaacacgaaagatgaaaaactgaccgtccataaagcgtatcagggcggcgcggatttcctgttcggctacgacgtgcgggagtcggacgaacccgccctgacctttgaacaaaacgtcagcggaaaatccaatgtggttttggaacgccggccggaaaatctgaaaacgctcgacgggcgcaaactgattgcggcggaaaaggcagaccctaattcgtttgcgtttaaacaaaattaccggcagggactgtacgaattattgctcaagcaatgcgaaggcggattttgcttgggcgtgcagcgtttggctatccctgaggcggaagcggttttatatgcccaacaggcttatgcggcaaatactttgtttgggttgcgtgccgccgacaggggcggcgacgtgtatgccgccgatccgtcccgtcaaaaattgtggctgcgcttcatcggcggtcggtcgcatcaaaatatacggggcggcgcggctgcggacgggcggcgcaaaggcgtgcaaatcggcggcgaggtgtttgtacggcaaaatgaaggcagccggctggcaatcggcgtgatgggcggcagggccggccagcacgcatcagtcaacggcaaaggcggtgcggcaggcagttatttgcatggttatggcgggggtgtttatgctgcgtggcatcagttgcgcgataaacaaacgggtgcgtatttggacggctggttgcaataccaacgtttcaaacaccgcatcaatgatgaaaaccgtgcggaacgctacaaaaccaaaggttggacggcttctgtcgaaggcggctacaacacgcttgtggcggaaggcgttgtcggaaaaggcaataatgtgcggttttacctgcaaccgcaggcgcagtttacctacttgggcgtaaacggcggctttaccgacagcgaggggacggcggtcggactgctcggcagcggtcagtggcaaagccgcgccggcattcgggcaaaaacccgttttgctttgcgtaacggtgtcaatcttcagccttttgccgcttttaatgttttgcacaggtcaaaatctttcggcgtggaaatggacggcgaaaaacagacgctggcaggcaggacggcactcgaagggcggttcggcattgaagccggttggaaaggccatatgtccgcacgcatcggatacggcaaaaggacggacggcgacaaagaagccgcattgtcgctcaaatggctgttttga

SEQ ID NO: 50084 - DNA, 1302 bp, Neisseria meningitidis
atgaccgaatccgtccgcctccccgtcgcccgtctcaaaccttccaccgtcgccctgcccggctccaaaagcatcagcaaccgcaccctgctgcttgccgccttgtccgacaatgcttgcgaaatccattccctgctcaaatccgacgataccgaccgtatgctcgaagcactcgataaactcggcgttcaaatcgaatatcttgccgaagaccgtctgaaagtgcacggcacaggcggacgcttccccaaccgcactgccgatttgtttttgggcaacgcgggcacggcgttccgcccgttaaccgccgctctggccgttttgggcggcgattatcatctgcacggcgtgcctcgtatgcacgaacgtcctatcggcgatttggtcgatgcgttgcggattgccggcaccgatgtcgaatatctcggcaacgaacactatccgccgcttcatatcggcgaacgccaagacaacggcgaacacgtgattccgattaaaggcaatgtgtccagccagtttctgaccgcccttttaatggcgttgccgctgaccggacaggcatttgaaatccgtatggtcggcgagttgatttccaagccctatatcgacattactttaaaactgatggcgcaattcggcgtacaggttatcaatgaaggctaccgcgtcttcaaaattcccgccgatgcgcgctaccacgcgcccgaacacttgcacgtcgaaggcgatgcctccagcgcgtcctacttcctcgcagccggtttgattgccgccacgcccgtccgcgttaccggtatcggcgcaaacagcatacagggcgatgtcgcctttgcccgcgagctggaaaaaatcggtgcggacgtggtttggggcgaaaacttcgtcgaagtctcgcgcccgaaagaacgtgccgtccaagcctttgatttggatgcaaaccatatccccgatgccgcgatgaccctcgccatcgtcgcgcttgccacagggcaaacctgcacgctgcgcaacatcggttcgtggcgcgtcaaagaaaccgaccgcatcgccgcgatggcaaacgagttgcgcaaactcggggcaaaagtcgtcgaagaagccgaagcaattcacatcaccccgcccaaaacgctgacacccgacgccgtcatcgacacgtacgacgaccaccgcatggcgatgtgtttctcgctggtttcgctgttgggcgtacccgtcgtcatcaacgatccgaaatgcacccataaaaccttcccgacttatttcgacgtgttctcttcactgaccgaaacaacggaataa

SEQ ID NO: 50085 - DNA, 2277 bp, Neisseria meningitidis
atgacaacattacatttctcaggcttcccgcgtgtcggcgccttccgcgaattgaaattcgcccaagaaaaatactggcgcaaagaaatcagcgagcaagaattgctggctgttgctaaagacttgcgcgagaaaaactggaaacaccaagctgctgccaacgccgattacgttgccgcaggcgatttcactttctacgaccacatcctcgacctgcaagtcgccaccggcgcgattcccgcccgcttcggcttcgacagccaaaacctgtctttggaacaattcttccaactggcgcgcggtaacaaagaccaattcgctatcgaaatgaccaaatggttcgacaccaactaccactacttggtgcctgaattccacgccaatactgaattcaaagccaacgccaaacactacgtccaacaactgcaagaagcccaagctttgggcttgaaagccaaaccgaccgttgtgggtccgttgactttcctgtgggttggtaaagaaaaaggcgccgttgaattcgaccgtctgagcctgttacctaaactgttgcctgtttacgttgaaatcctgactgctttggttgaagccggtgccgagtggattcaaatcgacgagcctgctttgactgtcgatctgcctaaagaatgggtagaagcctacaaagacgtttacgctactttgagcaaagtaagtgccaaaatcctgctgagcacttacttcggttctgttgccgaacacgccgcattgttgaaatccctgcctgttgacggcctgcacatcgacttggtacgcgctcccgagcaactggacgcatttgccgactacgacaaagttctgtctgcaggcatcatcgacggccgcaacatctggcgcgccaacctgaacaaagttttggaaactgttgagcctctgcaagccaaactgggcgaccgtttgtggatttccagctcttgctctctgctgcacactccatttgacttgtcagttgaagaaaaactgaaagccaacaaaccggacctgtactcttggttggcatttaccctgcaaaaaacccaagaattgcgcgttctgaaagccgcattgaacgaaggtcgcgattccgttgccgaagaactggccgccagccaagctgctgccgattcacgcgccaacagcagcgaaatccaccgtgcagacgttgccaaacgcctggccgatttgcctgccaacgcagaccaacgcaaatctccatttgccgaccgtatcaaagcgcaacaagcatggttgaacctgcctctgctgccgacgaccaacatcggttctttcccgcaaactaccgaaatccgccaagcacgcgcagccttcaaaaaaggcgaactgtctgccgccgattacgaagccgcgatgaaaaaagaaatcgccttggtggttgaagaacaagaaaaactggatttggacgtactggtacacggcgaagccgagcgtaacgacatggtcgaatacttcggcgaattgttgagcggttttgcattcacccaatacggctgggtacaaagctacggctcacgttgtgttaaaccaccgattatcttcggtgacgtaagccgtcctgaagccatgactgtcgcctggtctacttacgcacaaagcctgaccaaacgcccgatgaaaggtatgttgaccggccctgtaaccattctgcaatggtcttttgtccgcaacgatattcctcgctctaccgtgtgcaaacaaatcgcactggctctgaacgacgaagtattggatctggaaaaagcaggcatcaaagtcatccaaattgacgaacctgccatccgcgaaggcttgccgctgaaacgcgccgattgggatgcctacctgaactgggcgggcgaatccttccgcctgtcctctgccggttgcgaagacagcacacaaatccacactcatatgtgctactccgagttcaacgatatcctgcctgcgattgctgcaatggatgcggacgtgatcaccatcgagacttcacgttccgacatggaactcttgaccgcgttcggcgaattcaaatacccgaacgacatcggcccgggggtttacgacatccacagcccgcgcgtaccgacagaagccgaagtggagcacctgttgcgcaaagccatcgaggttgtaccggttgaacgtctgtgggttaacccggactgcggcctgaaaacacgcggctggaaagaaactctggaacaactccaagtgatgatgaacgtaacccacaaattgcgtgccgaattggcgaaataa

SEQ ID NO: 50086 - DNA, 1197 bp, Neisseria meningitidis
atgtcccaaaaattgatcttggttttgaactgcggcagctcgtccctcaaaggcgcggtcctggataacggcagcggcgaagtcctgctcagctgccttgccgaaaaactcaacctgcccgatgcctacatcacattcaaagtaaacggcgaaaaacacaaagtcgatctgtccgcacatcccgaccacaccggcgcggtcgaagccctgatggaagaactcaaagcccacggcctcgacagccgcatcggcgccatcggccaccgcgtcgtcagcggcggcgaactgtacagcgaatccatcctcgttgacgacgaagtcattgccggcatcgaaaaatgcatcccgctcgcccccctgcacaaccccgcccacctcttgggcctgcgtgccgcgcaaagcattttcaaaggcctgcccaacgtcgtcgtattcgatacctccttccaccaaaccatgcccgaagtcgcctacaaatacgccgttccgcaggagttgtatgaaaaatacggcctgcgccgttacggcgcgcacggtaccagctaccgcttcgtcgccgacgaaaccgcgcgcttcctcggcaaagacaaaaaagacctgcgtatggtcattgcccacttgggcaacggcgcgtccatcaccgccgtcgccaacggcgaatcgcgcgacaccagtatgggcctgaccccgctggaagggctggtaatgggtacgcgcagcggcgacatcgatccttccgtattcggcttcctcgccgaaaacgccaatatgaccatcgcccaaatcactgaaatgctgaataaaaaatccggtctgctcggcatttccggcctgtccaacgactgccgcaccattgaagaagaagccgccaaggggcataaaggcgcgaaattggccttggatatgtttatctaccgccttgccaaatacatcggcagtatggcggttgccgcaggcggtttggacgcactggtctttaccggcggcatcggcgaaaactccgacatcatccgcgaacgcgtgatcggctacttgggcttcctcggtctgaacatcgaccaagaagccaacctgaaagcccgcttcggcaacgccggcgtgattaccaccgccgacagcaaagccgttgccgtggtcattccgaccaacgaggaattgatgattgcacacgataccgcccgcttgagcggtctgtaa

SEQ ID NO: 50087 - DNA, 1881 bp, Neisseria meningitidis
atgccttatttcgccctgtttgacgatgccgtaagcggccgcgcaaaacgctatcaaaatcatgtggaaagccgttttttccgtcccgaagaactcgatgctttggacggcgcgctgcaatcgggctggcaaaaagggctgcatgccgtgttgtttgcagactacggattcggtttgccgctgacgggggtcgagtccgaacgcggcggcaaccttgccctgcactggtttgccgactgcgccgacaccgatgccgcaagctggcttgcccgacactcagacggcctccccgccggcatttccacgccgcaatcctccgtatccgaagccgattacctcgaccatatccgccaaatccacgaagccatccgacgcggcgacacctatcaaatcaactacaccactcgcctgcacctgcaagcctacggcaatcccgtcagcctctaccgccgcctgcgccagcccgtcccctatgccgtcttgtcccacctgcccgatgcggaggggcaatccgcgtggacgctgtgtttctcgcccgaactcttcctcaacatcgcttcagacggcaccatcagcaccgaaccgatgaaaggcaccgcgccgattttgggcgacggacaagacgaacgccgcgccgccgaattgcaagccgacccgaaaaaccgcgccgaaaacgtgatgattgtcgatttgctgcgcaacgacctcggcaaaatcgcccaaatcggcaaagtatgcgtacccgagccgtttaaagtatcacgtttcggcagcgtctggcagatgaccagcaccatccaagcccaagccctgccggacacctcgttcgccgacatcctccgcgccgccttcccctgcggcagcatcaccggcgcgcccaaaaaaatgagtatgcagattatcgaatcgctcgaaaccgaagcacgcggactttatacgggcagcatcggctatttgaacccgtgttccggcggcttggggtttgaaggcacgttcaacgtcgttatccgcaccttatcgctcaaacccgtttcggcttcagacggcattgtttcaggcatcggcggcccggattcaaacgcgcaagcccgaacggcagggcaaggcggggcaacgccgcatccgtttgactccaatccgccgtatcggggcgtgtacggtgtcggttccggcatcgtcatcgacagcgaccccgccgccgaatatcgcgaatgcggctggaaagcccgtttcctcaacgaattgcgccccgacttcggcatttttgaaaccctgcgcgcggaaaacggacgctgcaccctgctcgaccgccacctatgccgtctgaaaacctccgcccaagccctcaacctgcccctgcccgacggctgcgaaaatcaaatcaaacaatacatcgcccacttgcccgacggcgcgttccgcgtcaaagccctgctcgcttcagacggcatcagcctgtcccgcgccgttttaaaccgtctgaccgacaaacaacgcgtcatcatttcgcccgccgtcctgcccgcacaaaactacctgcgccgcttcaaaaccacctgccgcaccgtcttcgaccaagcgtggcaaaccgccgaaacacaaggcgcgttcgacagcctgtttttcaattcagacggcatcctgcttgaaggcggcagaagcaacgtgttcatcaaacatcgcggacaatggcttacgccctctttagatttagacattttaaacggcataatgcgccaagccgtgttggacgaaccgcaaaaatatttgcaaacaaatcaagtaatcgaaacacacatcacacaaaaaacactgcaagaagccgaagaaatccgcctctccaacgccttgcgcggcgtatttgccgccgctcttgcctga

SEQ ID NO: 50088 - DNA, 390 bp, Neisseria meningitidis
atgtccaaaaccatcatccacaccgacaaagcccccgccgccatcggcgcatacagccaagccgtccgagcaggcgacaccgtttacatgagcggtcaaattccccttgatcccgccaccatgactgttgtcggcaacggcgacttccgcgccgaagcgcgccaagtgttccaaaacctgcaagccgtcgccgaagcggcaggcggcacgctggccgacatcgtcaaactcaacgcctacctgaccgacttgggcaatttcgccgtcttcaacgaagtgatggcggaatttattgccgagcccttccccgcccgcgccgccgtcggcgttgccacgctgcccaaaggcgtgcaggtcgaagccgaagccgtcctcgttttgaacgcataa

SEQ ID NO: 50089 - DNA, 957 bp, Neisseria meningitidis
atgaatataatcgggctggacatctcaaaggataccatagacgcaacattgcataaaacaaacggaagtatccattacattaaatttaagaataatgatgatggattaaaacagtttagattgtggataaagggaaacagaatcagaaaagcctatatcggcatggaggcaacaggcatctattacgaaaaggcagcagatatgctttcttcctactataccgtttacgttatcaatcccttaaaaatcaaggactacgggaaaagcaggtttaaccgtaccaaaaccgacaaagcagattcaaacctgatagcagattacataaaaaggcatcaagatacattgataccgtatcagatacccaaaaacaaagcactgcaaaaactgattaaccttaaaaatcaattacagcaacatcagaagcaaattaaaaaccgtcttcatagcactgaagaagacttcataaggaacatacatcaagacttgatagataccatacaggacaagatggaacaggtaaaaatagccatatccgaacaaatcaaaaaacaaacggacaataaccattaccgcaatcttcaaaccatcccgagcataggcaaagacaccgcatcagttctttatgcgcaactgacagaaaaacattttaaaaccgcaaaccagtttgtatcctatgccggattaagtcccgccatcatgcaatcagggacaagcgtaagaggtcggggcagattgagccgatacggaaacagacgattaaaaagtacgctgtatatgcccgccctttgtgcttaccgttttaacgcatttccgaaattaataaataatctgaaaaaagcgggtaagccaaagatggtaatcatcgttgccatcatgcgcaaactggcgaagctcgcctattacattgttaaaaccggccagccttacgatgcggaaagacaccgattgaatcaataa

SEQ ID NO: 50090 - DNA, 237 bp, Neisseria meningitidis
atgcgtattttggatatttttaaaaacccggcgacaggcaatgtgtcgcactcgaaactgtgggcaaacgttgcctgcgcggctgggacgtttaagtttgtgatgttgcccgatccgtcggcggaaatttgggcggtgtatttgggcattgtcggcggctatgcggtggcgcgttcatttgtcagcgtgaagcgtcaggaggtcgagaatgaatctcgtgaaactgctggcgaataa

SEQ ID NO: 50091 - DNA, 1845 bp, Neisseria meningitidis
atgttacctaaccgtttcaaaatgttaactgtgttgacggcaaccttgattgccggacaggtatctgccgccggaggcggtgcgggggatatgaaacagccgaaggaagtcggaaaggttttcagaaagcagcagcgttacagcgaggaagaaatcaaaaacgaacgcgcacggcttgcggcagtgggcgagcgggttaatcagatatttacgttgctgggaggggaaaccgccttgcaaaaggggcaggcgggaacggctctggcaacctatatgctgatgttggaacgcacaaaatcccccgaagtcgccgaacgcgccttggaaatggccgtgtcgctgaacgcgtttgaacaggcggaaatgatttatcagaaatggcggcagattgagcctataccgggtaaggcgcaaaaacgggcggggtggctgcggaacgtgctgagggaaagaggaaatcagcatctggacggactggaagaagtgctggctcaggcggacgaaggacagaaccgcagggtgtttttattgttggcacaagccgccgtgcaacaggacgggttggcgcaaaaagcatcgaaagcggttcgccgcgcggcgttgaaatatgaacatctgcccgaagcggcggttgccgatgtggtgttcagcgtacagggacgcgaaaaggaaaaggcaatcggagctttgcagcgtttggcgaagctcgatacggaaatattgccccccactttaatgacgttgcgtctgactgcacgcaaatatcccgaaatactcgacggctttttcgagcagacagacacccaaaacctttcggccgtctggcaggaaatggaaattatgaatctggtttccctgcacaggctggatgatgcctatgcgcgtttgaacgtgctgttggaacgcaatccgaatgcagacctgtatattcaggcagcgatattggcggcaaaccgaaaagaaggtgcttccgttatcgacggctacgccgaaaaggcatacggcagggggacggaggaacagcggagcagggcggcgctaacggcggcgatgatgtatgccgaccgcagggattacgccaaagtcaggcagtggctgaaaaaagtatccgcgccggaatacctgttcgacaaaggtgtgctggcggctgcggcggctgtcgagttggacggcggcagggcggctttgcggcagatcggcagggtgcggaaacttcccgaacagcaggggcggtattttacggcagacaatttgtccaaaatacagatgctcgccctgtcgaagctgcccgataaacgggaggctttgagggggttggacaagattatcgaaaaaccgcctgccggcagtaatacagagttacaggcagaggcattggtacagcggtcagttgtttacgatcggcttggcaagcggaaaaaaatgatttcagatcttgaaagggcgttcaggcttgcacccgataacgctcagattatgaataatctgggctacagcctgctgaccgattccaaacgtttggacgaaggtttcgccctgcttcagacggcataccaaatcaacccggacgataccgctgtcaacgacagcataggctgggcgtattacctgaaaggcgacgcggaaagcgcgctgccgtatctgcggtattcgtttgaaaacgaccccgagcccgaagttgccgcccatttgggcgaagtgttgtgggcattgggcgaacgcgatcaggcggttgacgtatggacgcaggcggcacaccttacgggagacaagaaaatatggcgggaaacgctcaaacgtcacggcatcgcattgccccaaccttcccgaaaacctcggaaataa

SEQ ID NO: 50092 - DNA, 1260 bp, Neisseria meningitidis
atgagtatggcacttgcccaaaaacttgccgccgacagcattgcggcggttgccgaaggacgcaaccttcaggacgtgttggcgcaaatccgcaccgcgcatcccgaccttacggcgcaggaaaacggcgcgttgcaggacatcgcctacggttgccagcgttatttgggcagtttgaaacatatgctcgcgcagatgctgaaaaaaccgattgacaatccgcagctcgaaagcctgcttttggcggcgttgtaccaactgcattacacgcgcaacgcgccgcacgccgtggtcaatgaggcggtggaaagcatagccaaaatcgggcgcgggcagtaccgttcgtttgccaacgcggttttgcgccgctttttgcgcgaacgcgacaagctcgcggcttcctgtaaaaaagacgatgtggcgaaacacaacctgccgctgtggtgggtggcttacctgaaaaaccattatccgaaacactggcacaacatcgccgccgcgctgcaatcccatccgccgatgacgttgcgcgtcaaccgccggcacggcaacgccgaaagctatttggaaaaactggtggcggaaggtattgcggctaaggcgttggacgaatatgcggttacgttggaagaagccgtgccggtaaaccgtctgcccggtttttcagacggcattgtttcggtacaggacttcggcgcgcagcaggcggcgtatttgttaaacccgaaagacggcgaacggattttggacgcgtgcgccgcgccgggcggcaagacggggcatatcttggaactggcggattgccgcgttaccgccttggacatcgatgcaggccgtctgaaacgggtggaggacaatatcgcccgtttgggctttcagacggcatcggcggcgtgtgccgatgcgcgggatttggcggcgtggtatgatggaaagcctttcgacgcaatccttgccgacgtgccatgcaccgcttccggcgtggcgcggcgcaatcccgacgtgaaatggctgcgccgtccgaccgacgcgctcaaaaccgcccgccagcaggaagccctgctggacgcactttggcagacgctgaaacagggcggcagaatgctgcttgccacctgttccgtgttcgtcgaagaaaacgacgggcaattgcaaaaattcctcaaccgccatgccgatgccgaaccgatcgaatcgcgggtgcttttaccgaacaaacaccaagatggcttttattacgcgcttattcaaaagcattaa

SEQ ID NO: 50093 - DNA, 2226 bp, Neisseria meningitidis
atgactcaaaaatccaccattgtttatacccataccgacgaagcccccgcgctggcgacccaatcgctgctgccgattgtgcaggcttttacccgccacgccgatattgatgtcaaaactgccgacatttccctgtccggccgtattttggcggcattccccgaatatctgaccgaagcgcaacgcgtacccgacgcgcttgccgaattgggcgaactggtaaaacaacccgatgcaaacgtaatcaaactgccgaacatcagcgcatccgtaccgcaactgaccgccgcgattaaagaattgcagtctaaaggctttgccgttcccgattatcctgccgacccgcaaaccgatgaagaaaaagccgtgcgcgaacgctacgaccgcatcaaaggcagcgcggtaaaccctgtcctgcgtgaaggcaactccgaccgtcgcgcccccaaagcggtgaaaaactttgccaaaaaaaatccgcacagcatgggcgcatggacaaaagactccaaaacccacgttgccaccatgcaaagcggcgactttttccataacgaacaatccgttaccgtacctgaagcgacttccgtatccatcgtgttcaccgacaaacaaggcaataaaaaagagctgcgcgcgcctgttgccctgaaagccggcgaaatcatcgacgcgaccgtgatgagtaaaaaagccctgctcgccttccttgccgaacaagtaaaagatgcgaaagcaaaaggcgtgttgttctcgctgcacatgaaagccacgatgatgaaagtgtccgacccgattatcttcggacacgccgtcaaagtattcttcgcgcctgtttttgaaaaattcggcgacaaactggctgctgccggcgtcaacgttaacaacggcttcggcaacctgcttgccaatctggacaaactggatgcggacacccgcaccgccgtcgaagccgaaatcgccgccgtttacgccgccaaccccgatttggcgatggtcgattccgataaaggcattaccaacctgcacgttcccagcgatgtcatcgttgatgcttctatgcctgcgatgattcgtaactccggccgtatgtgggataaagacggcaaagcgcaagacaccaaagccgtgattcccgacagcagctacgccggcgtttaccaagcaaccatcgacttctgccgcgaacacggcgcatttgacccgacaaccatgggtactgtgcccaacgtcggactgatggcgcaagcggcggaagaatacggctcgcacaacaaaacctttgaaatcgaagccgacggccaagtccaagtcattgatgcggcaggaaaagtcctaatgcagcacgacgttgaagccggcgacatctggcgtatgtgccaaaccaaagacgctccggttaaagactgggtacaacttgccgtcaaccgcgcccgtctgagcaacacgcctgccgtgttctggctcgacgaaaaccgtccgcacgacaagagcctgctcgccaaggttaaagcctaccttgccgaactggataccaatggcctcgacatccgcgtcctcgctcctgaagaagccgccaagttcagcttgggtcgtctgaaaaacggcgaagacaccatctccgtaaccggtaatgtcttgcgcgactacctgaccgacttgttcccaattttggaactcggcacaagcgcgaaaatgctgtctatcgttccattgatgaacggcggcggtatgtttgaaaccggcgcgggcggttctgcaccgaaacatgttcaacaattcctcgaagaaaaccatttgcgctgggactcgctgggcgaattcctcgcactcgccgtatcgtttgaacatttggcgcaaaaaaccggcaatgccaaagcccaagtcctcgccgacactttggatgcagccaccgaaaaactgctgttgaacgacaaatcgcctaaacgtaaagccggcgaactcgacaaccgcggcagccatttctacctcaccctctactgggcgcaagaattggcggcgcaagacaaagatgccgaactgaaagccgcatttacgccattggcagccgctttgaccgccgacgaagcgaaaatcgttgccgagctttccgccgtacaaggcaaagcggccgacatcggcggctactacgccgccaatcctgaaaaagccgcacaagtgatgcgtccgagcgtaacctttaatcaggcactaaacgccttataa

SEQ ID NO: 50094 - DNA, 750 bp, Neisseria meningitidis
atggtattgcgcagggattttctgacttggtgtaatgaaacattgcagacagcgttgtttaaagattacgcccctaacggtttgcaggttgaagggagggaatatatagggaaaatcgttacgtcggtaacggcaagcagggcagcgattgattttgctgtggagcagaaggcagatttgcttttggtacatcacggtatgttctggaaaaacgagttgccgaccgttactggttggaaaaaagaacggattgccgcactgttacggcacgacatcaatatggcaggctaccatctgcccctggatgcacatcccacactgggcaacaatgcccaactcgccgacagattgggttttgcgacagaaaaacggttcggcgaacaaaacctgctcaactcgggcagcctgaaacaagccaagacactcggcgcattggcggcgcatattgaaacagttttgcaacgtaagcctgtcgtcatcggcaaacccgaacgcgaaatccgacgggttgcatggtgcagcggcggggcgcaggggttttttcagacggcaatagacgaaggtgtcgatctgtatttgacgggggaaatctctgaagctcaataccaccttgccaatgaaacgggtacggctttcatttcggcagggcatcacgcgacggaacgttacggcgtacgcgcgctggcagaatcggcggcagaggttttcgggttggaagtgtgccattttgacgaaaacaatccggcttga

SEQ ID NO: 50095 - DNA, 1155 bp, Neisseria meningitidis
atgagcatccatctcgacttcggcattagtcctaaaacgttccgacagacttatctgtatcaaaagcccaagctctttaaaggagcggctcggaatctcgaagccgcatcttggaaagatatcaacgagatataccaacgagcagacccaaccgcaccgctgttttatctgcgtaaaaaaggtgcaattgttcctaaagaagaatacgtcgaaagtttcgacgctttgggcaaaactcgctaccgttttattaaatccgttatctacgaacatatgaagaatggtgcgtcgttagtctataaccatattaacaacgagccgttttcagatcatatttcccgtcaagtcgcccgctttgctggcgcacatactattgtcagtggatatcttgcttttggcagcgacgaatcttataaaaaccattgggacacccgcgatgtgtatgccatccagcttttcggcaagaaacgttggcaacttactgcccctgatttccctatgccattgtatatgcaacagactaaagatactgatatttccattcctgaacatatcgatatggatattatccttgaagcaggtgatgtcctctacatcccacgcggttggtggcacagacctatcccgctcggctgtgaaaccttccacttcgctgtcggtacctttccacccaacggctataattacctcgagtggctaatgaagaaatttcccaccatagaaagtctgcgccacagtttctcagactgggagcaagataggacgcgtatcaacgatactgccgcacaaattgctgccatgattgccgaccccgtcaattatgaagccttcagtgaagactttctcggcaaagaacgtaccgataccgcttttcatctcgaacagttcgcgaatcccaacgctactctgctttcagacgacgtcaggttgagactaaatgccaataatttggatacgttggaaaaggggtatttgattgggaatgggatgaagataagcgtagatgaattggggaaaaaagttttagaacacatcggtaagaatgaaccgttattgttgaaaaatctactggttaacttcaatcagggaaaatatgaagaagttaggaagttgatttatcagttgatagagttagattttctggaaattttgtga

SEQ ID NO: 50096 - DNA, 159 bp, Neisseria meningitidis; identical to SEQ ID NO: 42666

SEQ ID NO: 50097 - DNA, 1032 bp, Neisseria meningitidis; identical to SEQ ID NO: 36792

SEQ ID NO: 50098 - DNA, 4476 bp, Neisseria meningitidis
atgcgcttcacacataccatcccattttattccgtattgtccaccctcggtctttttgccgtttcccctgcttactcatccattgtccgcagcgatgtcgattaccaatattttcgcgactttgccgaaaataaaggcgcgttcgccgtaggtgcaagcaatatttccatccaagacaagcaaggcaaaatattaggcagggttctcagcggcatccccatgcccgacttccgcgtcagcaaccggcaaaccgctatcgccaccctggttcacccccaatacgtcaacagtgtcaaacacaacgtcggctacggttccatacaattcggcaacgacacccaaaaccctgaagaacaagcctatacctaccgcctcgtatcacgcaacccgcacccggactacgactaccaccttccccgcctcaacaaactggttaccgaaatctcacctgccgcactcagcagcgtacccttgcttggaaacggccagccaaaggccaatgcctacctcgataccgaccgcttcccatactttgtacgactcggctcaggcacgcaacaagtccgcaaagcagacggcacgcgcacacaaaccgccccggcataccaatacctgaccggcggcacgccgctgaaagtattgggtttccaaaaccacggcttactcgtcggcgacagcctgaccgaccaaccccttaacacctacgcagtcgccggagacagcggttcccccctgttcgccttcgacaagcatgaaaaccgctgggtgcttgcgggcgtactcagcacctacgccggcttcgacagcttcttcaacaaatacatcgtcacgcaacccgaattcatccgttccaccatccgccaatacgaaacccggctggatgtcgggctgaccaccaacgaactcatatggcgcgacaacggtaatggcgacagcaccctgcaagggctcaacgaacgcatcaccctgcccattgcaaacccttcgcttgccccacaaaacgacagcaggcacatgccgtctgaagatgccggcaaaacgctcatcctatccagcaggttcgacaacaaaacactgatgctggcagacaatatcaaccaaggcgcaggcgcattgcagttcgacagcaacttcaccgtcgtcggtaaaaaccacacatggcaaggtgcaggcgttatcgtagccgacggcaaacgcgtcttctggcaagtcagcaaccccaaaggcgaccggctctccaaactgggcgcaggcacgcttatcgccaacggacaaggcatcaaccagggcgacatcagcatcggggaaggcactgtcgtactcgcccaaaaagctgcttcagacggcagcaaacaagcattcaaccaagtcggcatcaccagcggcaggggcacggccgtcctcgccgacagccagcaaatcaaatccgaaaacctctatttcggcttcaggggcggacggctcgacctcaacggcaacaaccttgcctttacccatatccgccatgcggacggcggcgcgcaaatcgtcaatcacaaccctgaccaagccgcgacactgacgctgaccggcaaccccgtcctcagtcccgagcatgtcgagtgggtgcaatggggcaaccgtccgcaaggcaacgcggcggtttacgaatacatcaacccgcaccgcaaccgtcggaccgactacttcatactcaaacccggcggcaacccgcgcgaatttttcccgttaaatatggaaaactcaacaagctggcaatttatcggcaacaacaggcaacaggccgccaaacaagtcgcccaagccgaaaatgcccgccccgacctgattaccttcggcggatacttgggtgagaacgcgcaaacgggtaaagccgcaccgagttacagcaaaaccaatatcgaatgggtgaatagtccaaacaccccacacaagccctcgccctatacgaatacgccaacccgcacaggggcaggcgtaccgacgattaccgcctcaaagaaggcggcaaccccagcgcctacttcccatgggatgcctacagcacccaagactgggaatttctcggacataaccggcgaagcagccatagaaaaaacccgccatatcgcaaatgccgccgtatacggccggcccgaataccgttacaacggcgcactcaacctgcactatcgtcccaaacgcaccgacagcacgctgttgctcaacggcggcatgaaccttaacggggaagtcttgattgagggcggcaatatgattgtgtcaggcaggcccgtaccccatgcctacgaccaccaggccaaacgcgaacccgttcttgaaaacgaatggaccgacggcagcttcaaggctgcacggttcaccctgcgaaaccatgcccgactgacggcagggcgcaataccgcgcatctggacggcgacataaccgcatacaatctgtccggcatcgacctcggctttatccaaggcaaaacaccggaatgctaccgctcctaccatagcggcagcacccactgcacacccaacgccgttttaaaagccgaaaactatcgtgcactacctgcaacgcaagtacgcggcgacattacccttaacgaccgttcagagctccgcctgggcaaagcacacctgtacggcagcatccgtgccggcaaagacaccgcagtccgcatggaagcagacagcaactggacactttcccagtccagccacaccggcgcactgacgcttgacggcgcacaaattaccctgaaccccgatttcgccaataatacacacaacaaccgcttcaacacactgaccgtcaacggcacacttgacgggttcggcacattccgattcctgaccggcatcgtccgaaaacaaaatgccccccccctcaaactggaaagggacagccgcggcgcattccaaatccacgtcaaaaacaccggacaagaacctcaaacaaccgaatcgcttgcacttgtgagcctcaatccgaaacacagccaccaagcccgattcaccctccaaaacggctatgccgatttgggtgcctaccgctacatcctccgcaaaaacaacaacggatacagcctgtacaacccgctcaaagaggccgaacttcaaattgaagccacgcgtgcggaacatgagcgcaaccaacaggcatacaaccaattacaggcaaccgacatcagcagacaggttcaacatgactctgacgcgaccaggcaggcactacaggcctggcagaacagtcaaaccgaacttgcccgcatcgacagccaagtccaatatctgtccgcccaattgaaacagacagacccgctaaccggcattctgacgcgtgcccaaaacctgtgtgccgcacaaggatacagtgtcgatatctgccgtcaggttgccaaagccgccgacacgaacgacctgacactcttcgaaaccgaactggatacgtatatagaacgtgtagaaatggccgaatccgaacttgacaaagcacggcaaggcggcgatgcgcaagccgtcgaaacagcccggcacgcctacctgaacgcactcaaccgtctgtcccgacaaatccacagtttgaaaaccggcgttgccggcatccgtatgccgaacctggccgaactgatcagccggtcggccaacaccgccgtttccgaacaggccgcctacaataccggccggcaacaggcgggacgccgcatcgaccgccaccttaccgatccgcagcagcaaaacatctggctggaaaccggtacgcaacaaaccgactaccatagcggcacacaccgtccctaccaacaaactaccaactatgcacatatcggcatccaaaccggcatcaccgaccgtctcagtgtcggtacgattttaaccgatgagcgcacaaacaaccgttttgatgaaggcgtatccgcccgaaaccgcagcaacggcgcacatctgttcgtcaaaggggaaaacggcgcactctttgccgcggcagatttaggctacagcaacagccgtacccgatttaccgattatgacggggctgccgtccgccgccacgcatgggatgcaggcatcaacaccggcatcaaaatcgataccggcatcaacctcagaccctatgccggcatccgtataaaccgcagcaacggcaaccggtacgtactcgacggcgcagagataaacagcccggcgcaaatccaaaccacatggcatgccggcatccgtctcgataaaaccgtcgaactgggtcaagccaagctgacccccgctttcagcagcgattactaccatacccgccaaaacagcggttccgccctcagcgtcaacgaccgtaccttactgcagcaagccgcccacggcacactgcataccctgcaaatcgacgccggatacaaaggctggaacgccaaacttcatgccgcttacggcaaagacagcaacaccgcccgccacaaacaggcaggaatcaaaataggctacaactggtaa

SEQ ID NO: 50099 - DNA, 1050 bp, Neisseria meningitidis; identical to SEQ ID NO: 42696

SEQ ID NO: 50100 - DNA, 453 bp, Neisseria meningitidis
  misc_feature 8, 9, 10, 11, 12: 'n' is a, c, g or t
gtgtgtgnnnnngacaccaccaccaacaccaagatcgacaccaagcacctgccgtcaacctgccgcgacgcagcatctgccgtttgcacaaaaacacccgagtattacccgaatcacggcgaatggccgtccgacaatagtgccgccggcgtggcatcttcttcaacaatcaaaggcaaatatgttgagaaagttgaagtcaaaaacggcgtcattaccgccgaaatgaaatcaagcggcgtaaacaaagaaatccaaggcaaaaaactctccctgtgggccaagcgtcaagacggttcggtaaaatggttctgcggacagccggttacgcgcaacgccgccaacgccaaagccggcaccgacgaagtcaccgccgccacacccgacaccgacaaaatcaacaccaagcacctgccgtcaacagcaccgacaagaaaatcgacaccaaactag

SEQ ID NO: 50101 - DNA, 858 bp, Neisseria meningitidis
atgaattacgccctagacgcattatggtggaaacttaccagccaacccgtccgcgaccttgcctcgctgctgactgcgccgcctttgtggcaaagcggctgcgaattgagcgtgcgagaactactgggagaacacggtttccgttaccttttggcattggatgccgatcccacgcggctgacggattacctcgcccaacgcgccccgttcggccaccgtctcggcatttatgccgaagagctgctggctttttggtttgccaatgcaccgcacgccgaactgctcgcgcacaacctcacggtttccggttcggacggcaatacgcaaggcgcggcggattttgtggcaaggcttaacggcaaaccctaccatatcgagctgacctgcaaatattacggcggcgacacggacagtcccgaagggatgcgcggattcgaccccaaagacacgctgttgggaaaagccgccaaactgaccgcccaactcggtctgccgcacacttcagacggcatccggaccttgcggcagcacggtttgccgcttaacgtaaaacccgtttccatcgtgcgcggcatcggattttttccacacggtttccatgcttttgagccaccgcttaatccatacggttggcgcggcatctatattcaagattgggcagaatacgggtttaaacgccaagaagtccgctaccatctgctcgaccgtatggcctacctcgcgcctgcgcgtgtcgccgaaaccgaaacattgaacgcaaccgaaatccgccgtatcgaccaaggcttgattgccgttttggaatgtcggccggacggcttttggcacgaaatcgaacgcattatgaaggccgtctga

SEQ ID NO: 50102 - DNA, 891 bp, Neisseria meningitidis
atgaatcctaaatcccctttatttttacgactgtccgaccgtttggatgtgtacctgcgcctgatgcgggcggacaagcccattggggcgctgcttttgctgtggccgacctactgggcattgtggctggcttcagacggcattcccgatttggcggtattggcggcgtttacaatcggcacgtttttaatgcgcagtgccggctgcgtcatcaacgactttgccgaccgcgattttgacggtgctgtcgagcgtacaaaaaaccgtccgttcgcacagggcagggtcaagaaaaaagaagcgctgctgctgacggcatttttgtgcctgcttgccgcattgtgcctgattccgctgaatcatctgacttggctgatgagcctgcccgcgctgtttcttgcgctgacttacccgtttaccaaacgtttttttccgattccccaactctatctcgggcttgccttttccttcggtatcccgatggcgtttgccgccgttgccggaaacgtgccgcctcaagcgtggatactctttgccgccaatgtgttatggactctggcgtatgacacggtttatgcaatggcggacaaagaagacgatttgaaaatcggcatcaaaacctccgccgtcacgttcgggcgttacgacatcgccgccgttatgctgtgtcatggcggctttaccctgctgatggcagtattgggggtggttatcggtgcggcatgggcatattggacggcaatccccatcgtcctgctgctgcaataccgccaatatgccgccatcaaaagccgcgtccggcaaatctgttttgaaacgtttttggcaaacaacagaattggttgggtgtggtttaccgccatttttgcccatacgtttttcgcgaaataa

SEQ ID NO: 50103 - DNA, 1434 bp, Neisseria meningitidis
atggacacacaaacttacaactacaaagtggtgcgccagttcgccatcatgactgtagtttgggggattgtgggtatgttggtcggcgttatcgtcgccgcccagctttttgctcctgccctcgacttgtctaatatcggaccttggttccacttcggccgcctgcgtccgctgcacaccaatgcggttattttcgcatttggcggttgcggcctgatcggcacatcatactacgttgtccaacgtacttgtaatacccgtcttttcggcggttggctgccggcatttaccttttggggctggcaggcggtaatcgttgccgccgtcgtcagcttccctatgggttggacccaaggtaaggaatatgccgaactggaatggccgatcgatattctgattactttggtttgggtggcttacgccatcgtattcttcggtacgattgccaaacgtaagattaaacatatttacgttgccaactggttctacggcggctttattttggcggtcgcacttttacacatcgtcaacaatatcagcatcccggccggtttgatgaagtcataccccgtctattccggtgcgattgatgctatggttcaatggtggtacgggcataacgccgtgggcttcttcctgactgccggcttcttgggtatgatgtactatttcgtacccaaacaagcagcccgccccgtttactcctaccgcctgtccgtcgttcacttctgggcgttgattttcacctatatgtgggcgggtccgcaccatcttcactacactgcgctgcctgactggacgcaatctttgggtatggttctgtctttgattctgttcgcaccctcttggggcggtatgattaacggcatcatgaccttgtccggcgcgtgggacaaactgcgtacagacccgattcttaaattcctgattgtatccttgtccttctacggtatgtctacctttgaaggcccgatgatgtcgattaaaacggtcaatgcattgagccactatacggactggaccgtcgcgcacgttcatgcgggtgcgttgggctgggtaggctttgtaaccatcggttccgtctattacatgattccccgtctgttcggcaaagaacagatgcacagcaccaagctggtagaagcacatttttggattgcgaccatcggcgtggttctgtatatcgctgccatgtggattgccggtgtgatgcagggtttgatgtggagttctttgaacgatgacggtacgctgacctactcgtttgtcgaatccgtaaaacgcaccatgccttactacgtgatccgttttgcaggtggtttattgtatctgagtggtatgtgcattatggcgtacaacgtgtaccgcacagccatcggtggtaaagcagtcgatgccgaaatccctgcggtttcccaaacacagcaccactaa

SEQ ID NO: 50104 - DNA, 774 bp, Neisseria meningitidis; identical to SEQ ID NO: 39194

SEQ ID NO: 50105 - DNA, 714 bp, Neisseria meningitidis
ttgcggcggcaatttgcagcatcggatgcctgccgcacgggtttgaaggagggggaaataatgggattgggcatggaaatcggcaagctgattgtggcttttttggtgctgattaatccgtttagcgcgttgtcgctttaccttgacctgaccaacgggcacagcacgaaggagcgcaggaaggtcgcgcggacggccgccgttgccgtgtttgccgtgattgcggtatttgcgctgatcggcggtacgctgctgaaggttttgggcatcagcgtcggttcgtttcaggtcggcggcggaattttggtgttgctgattgccatttcgatgatgaacggcaacgacaatcccgccaagcagaatctcggcgcgcagccggaaacggggcaggtgcgccccgcccgcaatgccggagcgattgccgtcgtgcccatcgccataccgatcaccatcggcccgggcggtatttcgaccgtgattatttacgcttcggcggctaaaacatacggcgacatcgcgttgattatcgcggccggtttggtggtcagtgcgatttgttatgccattttaatcgttgccgggaaggtcagccgcctgctgggtgcgacggggctgacgattttaaaccgtatcatgggtatgatgctggcggcggtatcggtggagattattgtgtcgggactgaaaacgatattcccgcaactggcaggttga

SEQ ID NO: 50106 - DNA, 168 bp, Neisseria meningitidis
gtgccggaacaggcacgcgcccgcccgattcaaaccgcgatgacgctttgccgccggttcggggcaggatggcggcacacacgccgtctgccgcgtttcatttcacaccactcttccgaaacccgaaacccgcccggtccgacgtgcggtatgaaacgcttaagctga

SEQ ID NO: 50107 - DNA, 672 bp, Neisseria meningitidis
atgacgacacaagacgaactcaagcgcatcgccgccgaaaaagcagtcgaattcgtacccgaaaacgaatacatcggcatcggtaccggctcgaccatcaactttttcatcgaagccttgggcaaaagcggcaaaaaaatcaaaggcgcggtttcaacctccaaaaaatccagcgaactgcttgcccagtacgacattcccgtcgtttccctgaacgaagtatcgggtttggcggtctatatcgacggtgcggatgaagtgaaccacgccctgcaaatgattaagggcggcggcggcgcgcacctcaacgaaaaaatcgtcgccagcgcatcagaaaaattcatctgcattgcggatgaaagcaaatatgtttcacgtttgggcaaattccctctgcccgtggaagtcgtcgaaagcgcgcgttcccttgtttcgcgcaaactgctcgctatgggcggacagcccgaactgcgtatcggctacaccacgttttacggcaaccaaatcgtcgatgtccacggcttgaatatcgatcagccgctgacgatggaagacgaaatcaacaaaatcaccggcgtgctcgaaaacggcatattcgcccgcgatgccgccgatgtgttgattttggggacggaagagggtgcgaaagtcatctatccctgccaagggtaa

SEQ ID NO: 50108 - DNA, 2214 bp, Neisseria meningitidis
atgaccgccatcagcccgattcaagacacgcaaagcgcgactctgcaagaattgcgcgaatggttcgacagctactgcgccgctctgccggacaacgataaaaacctcatcggtaccgcatggttgctggcgcaggaacattaccccgccgatgccgccacgccgtatggcgagccgctgcccgaccacttcctcggcgcggcgcaaatggttcatgaactcgacctgctccccgatgccgtcgccgccaccctgcttgccgacatcggacgctacgtccccgactggaacctattggtttccgaacgctgcaacagtaccgtcgccgagctggtcaaaggtgtggacgaagtgcagaaactcacccacttcgcccgggtggacagcctcgccacgccggaagaacgcgcccagcaggcagaaactatgcggaaaatgctgctggcgatggttaccgacatccgcgtcgtgttaatcaaactggcgatgcgtacgcgcaccctgcaatttttaagcaacgcccccgacagccccgaaaaacgcgccgtcgccaaagaaaccctcgacatcttcgccccgctcgccaaccgtttgggcgtgtggcagctcaaatggcagctcgaagatttgggcttccgccatcaaaagcccgaaaaataccgcgaaatcgcgctgcttttggacgaaaaacgcaccgaacgcctcgaatacatcgaaaacttcctcaacatcctgcgcggtgaactcaagaaatacaatgtccatttcgaagtcgccggccgcccgaaacacatctactccatttacaaaaaaatggtgaagaaaaaactcagcttcgacggcctctttgacatccgcgccgtgcgaattctggttgataccgtccccgagtgttacaccacgctgggtatcgtccacagcctctggcagcccattcccggcgagttcgacgactacatcgccaatcccaaaggcaacggctataaaagtttgcacaccgtcatcgtcggcccggaagacaaaggcgtggaagtacaaatccgcaccttcgatatgcaccaattcaacgaattcggtgtcgccgcccactggcgttacaaagagggcggcaagggcgattccgcctacgaacagaaaatcgcctggttgcgccaactcttggactggcgcgaaaacatggcggaaagcggcaaggaagacctcgccgccgccttcaaaaccgagcttttcaacgacacgatttatgttttgaccccgcacggcaaagtcctctccctgcccacgggcgcgacccccatcgacttcgcctacgccctgcacagcagcatcggcgaccgctgccggggcgcgaaagtcgaagggcaaatcgtgccgctgtccaccccgcttgaaaacggacagcgcgtcgaaatcattaccgccaaagaagggcatccttccgtcaactggctgtacgaaggctgggtcaaatccggcaaggcaatcagtaaaatccgcgcctacatccgccagcaaaacgccgacaccgtgcgcgaagaaggccgcgtccaaatcgacaagcagcttgccaaactcacgcccaagcccaacctgcaagagcttgccgaaaacctcggcttcaaaaaactcgacgacctctacactgccgtcggacaaggcgaaatttccaaccgcgccatccaaaaagcctgcggcacgctgaacgaacctccgcccgtacccgtcagcgaaaccaccatcgtcaaacagtccaaaatcaaaaaaggcggcaaaaacggtgtgctcattgatggcgaagacggtttgatgaccacgcttgccaaatgctgcaaacccgcgccgcccgacgacattgtcggcttcgttacccgcgatcgcggcatttcggtacaccgcaaaacctgcccctctttccgacacctcgccgaacaagcacctgaaaaagtgctggacgcaagctgggcggcgttgcaggaaggacaagtgtttgccgtcgatatcgaaatccgcgcccaagaccgctccgggcttttgcgcgacgtatccgacgcgctcgcccgccacaaactcaacgttaccgccgtgcaaacccagtcccgcgacttggaagccagtatgcggttcacgctcgaagtcaaacaagttaccgacctcccacgcgtcctcgccagcctcggcgacgtcaaaggcgtattgagcgttacccggctttaa

SEQ ID NO: 50109 - DNA, 4374 bp, Neisseria meningitidis; identical to SEQ ID NO: 43165

SEQ ID NO: 50110 - DNA, 375 bp, Neisseria meningitidis
atgatgccggcaacgaggtcgtctgaaatgtatattcccgacaaaggcgatattttccatttgaatttcgacccttccagcggcaaggaaatcaagggcgggcggtttgcgctggctctgtctccaaaagcattcaaccgcgcaacgggattggtttttgcctgccccatttcacaggggaatgcagcggctgcacgaagcagcggcatgatttcaaccttactcggtgcaggaacggaaacgcagggcaatgtccactgccaccagctcaaatctctggactggcaaatccgcaaggcttcttttaaagaaactgtacccgattatgtattggacgatgtgctggcgcgcatcggcgccgtcttattcgattaa

SEQ ID NO: 50111 - DNA, 810 bp, Neisseria meningitidis
ttgaatgcgagagagaatgtgatgaatcctaaaatcgtgtttttcgacattgacgatacgctgtaccgaaaatatacggatactttgcgcccttccgtgaaaacggcggtggcggctttgcgcggcaaaggtatattgacggcgttggcaacggggcggtctttggcgacgattcccgaaaaggtcagggatatgatggcggaagcgggaatggatgccgtggtaacgataaacggacagtttgcgctgctgcacggaaaaaccgtgcgcgaagtaccgatggatgccggtttgatgggcagggtttgcgcgcatttggatggcttgggcatggattatgcgtttgtcggcggagaggggatcgctgtgtccgcgctgtcggaatgcgtgtgccgcgccttgaagcatatcgccagcgatttttttgccgataaggattatttttcaagcaaaccggtgtatcagatgctggtgtttgcggaggaaaacgaaatgccgctttggtcggatattgtggaacgggaaggcttgaaaacggtgcgctggcacgaggaagcggtcgatctgctgcctgcgggtgcgtcgaaaacggacggcatcagaagcgtggttgaagcattgggatgggaaatggcagacgtgatggcgttcggcgacggtttgaacgatgtggaaatgctgtcagaagtcgggttcggcgtggcaatgggcaacggggaacaggcggcgaaagaagcggcgaaatatgtttgccccagcgttgatgaagacggcgtgttgaggggcttgcaagatttgggcgtgatttga

SEQ ID NO: 50112 - DNA, 936 bp, Neisseria meningitidis
atgaaagcgaatatggatattgaaaccttccttgcaggggaacgcgccgccggcggataccgttgcggcttcgtggcgattgtcggtcgtccgaacgtgggcaaatcaacgctgatgaaccatctcatcggtcagaaaatcagcatcaccagcaaaaaggcgcagacgacgcgcaaccgcgtaacggggatttataccgacgataccgcgcagttcgtgtttgtcgatacgcccggctttcaaaccgaccaccgcaacgcgctcaacgacaggctgaatcaaaacgttaccgaggcgcttggcggcgtggatgtggtggttttcgtcgtggaagcgatgcgctttaccgatgccgaccgtgtcgtgttgaaacaactgcccaagcacacgccggtcattttagtggtcaacaaaatcgacaaggacaaggcgaaagaccgttacgcgctggaggcgtttgttgcccaagtgcgcgccgaatttgaatttgcggcggcggaggcggtcagtgcgaaacacggattgcggattgccaacctgttggagctgctcaagccgtatctgcccgaaagcgtgccgatgtatcccgaagatatggttacggacaaatcggcgcgttttttagcgatggaaatcgtgcgtgaaaaattgttccgctatttgggcgaggaattgccttatgcgatgaacgtcgaagtggagcagtttgaagaggaagacggtttgaaccgcatctatatcgccgttttggtcgataaggaaagccaaaaggcgattttaatcggcaaaggcggagaacgtttgaagaaaatttccaccgaagcgcggttggatatggaaaaactgtttgataccaaagtatttttgaaggtctgggtcaaagtcaaatccggttgggcggacgacatccgcttcctgcgcgagctgggtttgtag

SEQ ID NO: 50113 - DNA, 1116 bp, Neisseria meningitidis
atgaaagtaggtttcgtcggctggcgcggtatggtcggttcggttttgatgcagcgtatgaaagaagaaaacgacttcgcccacattcctgaagcgtttttctttaccacttccaacgtcggcggcgcagcccctgatttcggtcaggcagccaaaacattgttggatgccaacgatgttgccgaattggcaaaaatggacatcatcgttacctgtcagggcggcgattacaccaaatccgtcttccaacccctgcgcgacagcggctggaacggctactgggttgacgcggcgtcatccctgcgcatgaaagacgatgcgattatcgtcctcgacccggtcaaccgcaacgtcatcgacaacggcctcaaaaacggcgtgaaaaactacatcggcggcaactgcaccgtctccctgatgctgatggctttgggcggcctgttccaaaacgatttggtcgaatgggcaaccagcatgacctaccaagccgcttccggcgcaggtgcgaaaaacatgcgcgaactcatcagcggtatgggcgcggttcacgcccaagtggcagacgaacttgccgatcctgccggctcgattctcgacatcgaccgcaaagtatccgatttcctgcgcagcgaagactatccgaaagccaacttcggcgtaccgctcgccggcagcctgattccgtggattgacgtggatttgggcaacggtcaatctaaagaagaatggaaaggcggtgtggaaaccaacaaaatcctcggccgcagcgacaatccgaccgtaatcgacggcttatgcgtacgcatcggctctatgcgctgccacagccaagccctcaccctgaagctgaaaaaagacctgcctgtttccgaaatcgaagcgattttggcaggtgcaaacgactgggtgaaagtcatccctaacgaaaaagaagccagcatacacgagctgactcctgccaaagttaccggcacactgtctgttcctgtcggccgtatccgcaaactggagatgggcggcgaatacatcagcgcgttcactgtcggcgaccaactcttgtggggggctgccgagccgttgcgccgcgtgctgcgtatcgtgttgggcagcctgtaa

SEQ ID NO: 50114 - DNA, 1224 bp, Neisseria meningitidis
gtgggacgcagaaaactttggtttgccctggcagcagcaggcgttatcggcggtttggtcggcattgtgctgacggaactgatgcacttcatacagcatacggcatacggttatggcgcggacggtgcgtacatctcgttccgcgaaggtgtggcccgtgcttcggaagggcggcgtttaggcgtattgattctgtgcggtatgttggcaggcggcggctggtggttgctcaaacgtttcggtaagccgcaaatcgaaatcaaagccgccttgaagcagccgttgcaggggctgccgtttctgacgacggttttccatgttctgctgcaaatcataacggtcggactcggttcaccgctcggacgggaagtcgccccgcgtgaaatgactgccgcgttcgcttttgccggcggcaggcggttgggtttggatgaagacgaaatgcggctgctgattgcttgcgcctcgggtgcaggtttggcggccgtgtataacgtaccgctcgcctccacacttttcattctcgaagccatgctgggcgtgtggacgcagcaagccgtcgccgctgcattgttaacttcagtcatcgccaccgccgtcgcgcgcatcggcttgggcgacgtgcagcaatatcatccggccaaccttaccgtcaatacttcattactttggttttccgccgtcatcggcccgatactgggcgtagccgccgtctttttccagcgtaccgcccaaaagttcccctttatcaagcgcgacaatatcaaaattattcccttggccgtctgtatgtttgcactcatcggcgtgatttccgtttggtttcccgaaattttgggcaatggcaaagcaggcaatcaactgacctttggcggattgaccgattggcaacacagccttgggctgaccgccgtcaaatggctggtcgtcttaatggcgcttgccgtcggcgcatacggcggtctgattaccccgtccatgatgctcggcagtaccatcgcctttgctgctgccaccgcgtggaacagtgtttttcctgaaatgtcctctgaaagcgcagccattgtcggcgccgcagttttcctcggtgtttcccttaaaatgcccctgaccgccatagcctttattttggagctcacctacgcccctgttgccttgctcatgccattatgtacaggcatggcaggtgcagtatgggtggcaaagaaaatgggatttaaatag

SEQ ID NO: 50115 - DNA, 2427 bp, Neisseria meningitidis
atgtcggcacaaaccgatcccggctacttcttcatgcccaaccacattatcctgataggcgcgagcgaacgtccgtacagcctgggcgaacgcgtactcagcaacctgctgagtacgccctttcaaggaaaaatcacccccgtaaacccgcgccaccacaccatagccgggcttcccgcctacaccagcctcaacaaaatccccggcaatgcagacctgattattgccgttaccctacccgacagttacgacaccctcttcaaaacctgccgcaaaaagcagctccgacacatcatcctcatacaggactgggacagcctgtctgccgcagaactgcacaccgccgaaactgccatccgcaaacaccacggcaacggactcaacatcaccgcctgcaccaccgcaggcatccaactgccctcactcggacttaacatcagtacccaagacggatacgccgcaggccataccgccatactgaccggcaatgccgccgtcagccgccaaatcgacaacatcctgaacaaactccgtcaaggcacatcccgccacatcagcctgcatcccggcatcagccccatcacatccgccgattggctcaaccgcttcggacacagcctgcacaccaaaaccgccgtcctacaccacaaccctgaagaggatcagcgcaaactgttcagcgcaatccgccaatttacccgccatacgccgctgattctccacatcacctgccgcacgacagaaaccgaccgtgccgtactgcactgcctcgcccgacactgcaacttcctcatcagtttcaacgccgacgacctcgaagccgcactgcgcgcccaactgtccgaccttccacccctgtcccgactcgacatcctgtccgacacgcctgccgaatggctgaacgcgcacgcgccaaaaaccctcgccctccactttcccaaccttccccaccacatccgcaacggacacctgaccggcacacccacaccctcaatctgccacgacatcgcctcacgtcagcttgcccgccccgacacccaagccgtcctgaccatcctcagcccctccggacacgaggattacaaaaaaacagcacgcgcccttatccgcctgtccgaacagaccgccaaacccctgctcgtcagcagccccttttcagacggcataacacatttcgacacccccactcaggcaatccgcaccctttcctaccgcaacaccgccgccgccctgaaacaggcacagctcgacattgcaccgccgcaaccgtgccgtctgaaaacaccgcaaccccaaaacatcaaaaaagccctcgaagccgccgaccccgccctgctcgccgaagccctgcacctccccccctaccggcacaccacccataacgccgtacaattccaattcgacagccatcccatttacggcaatattctgaccgtacggtacgcagggcaaaccacggccgcccttcccccgtttaccacacaggacagcctccatatcgcccagtttgccgaattggaagacccgcaaacccttaaccagttccttcacatactgaccaccctttccgaccacaacctgcacatcggcaaaatcatcctcaacctaaacggcggacaatacaatactgactttgatctgaaagcacccgaaacacagaatgcacccggacgcaaaacaacaagcaagaccgtacaaaccctcgaacacgccgccgcaaaaatgcaaagtgccgcccaatacctgaaacacaaaaacccgacagccgccgaatttctccgccacacaagcgaagccgccgcagaactgctcggcagcaaaaccgaaaccggagcagccgtacccaacgtgctcccgccctaccctgaggcacacccaaaaacactgtccctaaaaaacgacacgaccgttaccattaccccccttttgcccgaagacgcagaagccaaacagcagttcgtccgcagcctcagccccgaagcacggtacacacgcttcatgacccacaccaacgaactgcccgcagccacgttggcacgcctgtgcaaccccgattaccactgtgaagccgcatggacggcaaaggatgccgacagcaacatcgtcgccgtcgtccgccacagccgcctgaaccgcaacgaatgcgaattcggcatcacactggcggaacatatgcgcggcagcggactggcacagaaaatgatggaactcatcatccaaaccgccgcacagcaaggctaccggactatgagtgccgacattctcaaaaccaatacccccatgatcaaacttgctgaaaaatcaggatttaccctcaaggaatcggacaccgaaaaaaacctgtaccgcgcatatctgaaccttgcggcagacaaaacaacagaaaaaacaaataaaaacttgcacaccgaccacaaaataacctaa

SEQ ID NO: 50116 - DNA, 2142 bp, Neisseria meningitidis
atgaacaatccattggtgaatcaggctgctatggtgctgcctgtgtttttgttgagtgcttgtttgggcggcggcggcagtttcgatcttgattctgtcgataccgaagccccgcgtcccgcgccaaagtatcaagatgttttttccgaaaagccgaaagcccaaaaagaccaaggcggatacggttttgcgatgaggttgaaacggaggaattggtatccgagggcagaagaaagcgaggttaaactgaacgagagtgattgggaggcgacaggattgccgacagaccccaaggaactccctaaacggcaaaaatcggttattgaacaagtaaaaacagacgacaacagcaatatttattcttccccttatctcacaccatcaaaccatcaaaacggcaacgctggcaacgctacaaaccaaccaaaaaatgaagtaaaagattataaagagttcaagtatgtttattccggttggttttacaaacacgctaaacaagatattgattcgaaaaataaaattgtacgacaaggcgacgacggttatatcttttatcacggcaaagaaccttcccgacaacttcctgcttctggaaaagttacctataaaggtgtgtggcattttgtaaccgatacaaaaaagggtcaagagtttcgtgaaattatccagccttcaaaaaaacaaggcgacaggtatagcggattttcgggtgatgacaacgaagaatattccaacaaaaaggaaacgattttacaaaacggtcatgaaggttatggttttacctcgaatttagaagtggatttcggcaataagaaattgacgggtaaattaatacgcaataatgcgagcctaaataataatactaataatgacaagcacaccacccaatactacagccttgaggctcaagtaacaggcaaccgcttcaacggcaaggcaatagcgaccgataaaccaaaagcgaatgaaaccaaggaacatccctttgtttccgactcgtcttctttgagcggcggctttttcggcccgcagggtgaggaattgggtttccgctttttgagcaacgatcaaaaagttgccgttgtcggcagcgcgaaaaccaaagacaaactggaaaatggcgcggcggcttcaggcagcacaggtgcggcagcatcaaacggtgcggcaggcacgtcgtctgaaaacagtaagctgaccacggttttggatgcggtcgagctgaaattgggcgataaggaagtccaaaagctcgacaacttcagcaacgccgcccaactggttgtcgacggcattatgattccgctcctgcccaaggcttccgaaagtgggaacaatcaagccaatcaaggtacaaatggcggaacagcctttacctacaaaacaacctacacgctggaaagtgataaaaaagacacccaagcccaaacagtcacgaacggcacgcaaaccgcttcgggtactgagagcgttaacggcgggcaggcaggaacgaaaacctatgaagtcgaagtctgctgttccaacctcaattatctgaaatacgggttgctgacgcgcaaaactgccggcaatacgggggaaggcggcaacagcagcccaaccgccgcccaaacggcacagggtgcacaaagtatgttcttacaaggcgagcgtaccgatgaaaacaagattccaaccgaccaaaacgtcgtttatcgggggtcttggtacgggcatattgccaacggcacaagctggagcggcaatgcttctgataaagagggcggcaacagggcggaatttactgtgaatttcgataagaaaaaaattaacggcacgttaaccgctgacaacaggcaggcggcaacctttactattgagggcgatattgagggcaacggtttttccggtacggcgaaaactgctgactcaggttttgatctcgatcaaagcaataacacccgcacgcctaaggcatatatcacaaacgccaaggtgcagggcggtttttacgggcctaaagccgaagagttgggcggatggtttgcctattcggacgataaacaaacgaaaaatgcaacagatgcatccggcaatggaaattcagcaagcagtgcaactgtcgtattcggtgcgaaacgccaacagcctgtgcgataa

SEQ ID NO: 50117 - DNA, 822 bp, Neisseria meningitidis
atgaaaccctattccgccaatcccaacctgaccgaaccgcgccggctgcgcgtgttgctgattgccgccgcgctgggctttctgctgctgatgctggtcgtgccgctcgtcgccgtgttttacgaagccttaaaaggcggttgggatttgtacctaaaatccttaaacgatcccgaagcgtggtctgccatcaaattgacgctgattaccgcgctgattgtcgttcccgtcaatgctgtattgggtgtggcgatggcgtggctgctgacccgttttgacttccgaggcaagcagttgctgactaccctgctcgatttgccgttttccgtatcgcccgtggtggccggtttaatgttcgtcttattgttcggcgcgcacacggcattgggtggctggctcgaagcgcaaggcatacagattatcttcgccatccccggcattattctggcgacgctgttcgttaccttcccctttgtcgcgcgcgaaatcatcccgctgatgcaggctcagggcgacagcgaagaacaggcggcattgatactcggcgcaagcggctggcagatgttttggcgcgttaccctgcccaacatcaaatgggcgttactctacggcatcatcctcaccaacgcccgcgcgatgggcgagttcggcgcggtcagcgtggtatcgggacacatacgcggcgaaaccaacaccgtcccgcttttggtcgaaatcttctacaacgaatacaacttcaccggcgcattcgccctctccggcgtattggcacttttggcactggcgacgctggcggtgcagaacatcatcaccaaattatag

SEQ ID NO: 50118 - DNA, 1242 bp, Neisseria meningitidis
atgcaaaaatggcaaaccgagctttattccacaccgctttggcttttacagactctcttgatagtttctgccgcttcagcggtgattctgtttttgacacggaaaacgcgctgcgggcgggagtttgcctatatcctgcgcctttgtctgacaccgaaaagcgcggtcaaagtattgctgctgattacggcaatggttacgctgatgttaaccgaagtacggctgaatgtgttgagtacctttatgtccaaagggctttacgactcgatgcaggatttgaatgcttcggcattttggatgtttgccgcaatgaacgcgggcgtggtgttgatacgggcgtttaacaacgtcgtcaacgactttctcgatcaaggcttggcgattaaatggtcggagcggctcaacgaagtgctgaccacgcgctggcttgccgacaaaaactactaccgcctgcaaatgcgccgccacgcgccggacaacatcgaccagcgtatccaacaggacgcgcaggaatttatcgcctcgaccatagaatttgtgcgcggtatggtcaattcggtcgttacttctctggaatttgccgttgttttgtggggcctggctggtatcctgaccgtgttcggcttcgacattccgcacggcatcgtttggtttgtctatatatttgtgattttggcgacctttatcgccatgtggataggcaacccgttgattcgttacaactatgaaaacgaaaaactcaacggcgactaccgttattctctcatccgcgtgcgcgaccacgccgaaagcgtagcgttttacaacggcgagcaacacgaacacggccggctttccgaccgctttaaagccattatccgcaaccgttggcgcattgcgcggcaaagcgtctgcctgagcggatttaacgatatgttcaccaacggcatcaaacttttcccgattattttgcaagcgccgcgcctgtttgccggacaaatcaaaatcggagatatccagcagactgtccaagccttcgcacgactgcaaaacgccctgtctttcttccgaatgttctacaataaattcaccgcctaccgcgcccgattggagcgtctgtacggctttttgctgagtaccgaagaacaacacagcgcgcggcaacccgagattagcgaagtttcagacggcattgcactggaatgtaaggcggcggcagcttttgcacgaattggcggcagcttttgcaccgccgaagcgtag

SEQ ID NO: 50119 - DNA, 276 bp, Neisseria meningitidis
atgaaaccgaatattcatcctgacaattaccggaccgtcctttttttcgacagcagcgccaatgaaggctggctgattcgttcttgcgccgaaacacacggaaaaacgatggtttggacagacggcaaagaatatccactgttttcgctggatacttcttccgcatcccatcccgtctataccggcaagcagcgcaacgtcaacaccgaaggccgtgccagcaaattcaaccaacgtttccaatccgtcatgtcatcgtttagaaaggataaataa

SEQ ID NO: 50120 - DNA, 1437 bp, Neisseria meningitidis
ttggaaaactcattaattatcggtttggcactggcggtattgctgatgcttttggttatgcgtgcgaagcagggtaagaaaacaccgaagcgcaaatcccaaggtgtcggcaatacgcaggggcagacacccggaagcaatgattcggactgggtcgatcagattggacaatcggtttcagacggcacgcaacccgactggtcttggaacgaaagtgccgagaccgcatccgccgccgtatccgcgcaagaagtcgatccgcttacggagtatcaggtttataagcaattcggttatcagggcaaggctgccgaatctttggctgcctatctggacggcattccggatggtgaagcgaaacctgaaaaccttatccgcgagctgctcgatatcaatctcgaagtgggggatgtcgatgttttggcagacaatctgcaaaaatacggcaaactgattccttccgaacttttggcaaaatatatcgaacaggcattacagcgcgattcaaaccatttgcgtatccgcgtcttggcggaagaaggtttgggatggggtactcaggagattgaaaaacgtgcggaaggcggttctgcgacggcagcttccgcatcgcccccgccggatgccggcggtaaggcttatgaagccgaagaaatcaagcgcatcccgattgtgcggggcaaaaaagacgtgtccggaatcagtcaagaggaaatcggtgcgattgccggtttggtccgtgccgatcaaggtgcgaaaatccttaaagacaaagtcagctatgaaacggcatcgaaacaatacgaccgtgccatccaaacttccgaaaaacctgcaaacctgattatcgatgcgttgaaactcgattaccaatacgcggacatagaccgttttgccggacatttgtggaaactttaccaaacgttgggcaactacggcaggcaggttaaagagcggatgctggggtgggggtacagcctgggttaccatgaggttttcgatgatttggaaaaagggccgaacgaccggcaaatcaaagacatcggtatggggcacgggtatctgccgaaaaatatacagaaattcaaatcgcaacatcgggatttggtgcttcaagattcttcgttgatcaacaccggttcgtctccggcagacgatgcggttaaggaagtagagtcgttgctgatgtatggtcagattgaagcggcaatggatgtgttggagcaggcggtattgaaatatcccgacgagtcccagctttatattacgttgatcgatatttatgaacgtactgaagattgggataggttggggcagtttttaagggtattgagggaacgtgcggacaggcttcctgaagaggtcgttatgctgatgagccggctgctgcagcgtatgaatcaaaatattaaaaaaataaaacggtacggaaaataa

SEQ ID NO: 50121 - DNA, 393 bp, Neisseria meningitidis
atgcccacttccaccaaaccctacatcctccgcgcactttgcgaatggtgcagcgataacagcctcacgccgcacattcttgtctgggtcaacgaacacacgcgcgtccccatgcagtacgtccgcgacaacgaaattatgctcaacatcggcgcgaccgccacgcaaaaccttcaaatcgacaacgattggatcagcttttccgcccgcttcggcggacaggcgcacgatatatggatacctgtcggacacgtcctcagccttttcgcacgggagaccggcgaaggtatggggtttgaattggaagcgtatcgccccgacacgccgcctgaaaacacctctgccgaaaccgcgccccggcccgccaaaaaaggcttgaaattggtcaaataa

SEQ ID NO: 50122 - DNA, 498 bp, Neisseria meningitidis
atgccgtctgaatctttccgtgccgaaaccgccgccatgaaaccgcaaaaatccctacgcgcccgcgcgatggacatcctctcgcgccaagaagtcagccgcatcggtctgaaacgcaaacttgcaccgcacgccgaaagcgaagaggagttggaaaacgtgttaaacgaatttgccgaacgcaactggcagtcggatttgcgctatgccgaagcctatatccgcagcaaaagccgcaaacacggttcattgaggctgaaacaggctttggcgcaacagggcatagatgaagaaaccagccgcaacctgcttcccgaccgctcaagcgaaaaacaggccgccatagccgtgttgcgtaaaaaattcaaacaccccgccgccgacctcaaagaaaaacaaaaacaggcgcgtttcctcgcctatcgcggattcgatgccgataccgttcagacggcattgaaacacgcttgggacgaaaattgggaagacggctgctga

SEQ ID NO: 50123 - DNA, 837 bp, Neisseria meningitidis
atgttagcgctcaaaacgcccggcgtactgcccggcttcaaactcagccttggtctgaccgtattgtgcctgtcgctgcttgtggtcttgccgtttgcgatgatggcggcgaaggcggcggaaatcggctggagcggattttggaacacgattaccgaacccaatgtcttggcggccgtctggctgagtttgcggatgtcgttttatgcgatgctgaccaatgtcgtgttcggcacgctggtggcgtgggtattggtgcgctatgaatttccgggcaagggcttggcgaacgcgctggttgatttgccgtttgcgctgccgacggcggttacgggtatcgcgttggcgaccctgtatgcgcccaacggttggataggccgttttttcgagcctttgggcatcaaaatcgcgtttacacccgtcggcatttggattgcgctggtcgtcgtcagcctgccctttatcgtccgcgccgtgcagccggtgttggaggaattatcgggcgaatatgaggaagcggcggcgactttgggcgcaaaccgctttacgacgttccgccgcgtgctgctgccggaaatcacgccggcactcttgactggcgcgggaatgatgttcgcgcgggcaacgggggaatacggctcggtgatttttatcgcgggcaatattccgatggtttctgaaatcctgccgctgattattacgggcaagctggaacagttcgacgtacagggcgcgtcggcggtggcgttgtttatgctgctggtttcgtttgtgattctgtttgcgctgaacgtgatgcagtgggcgttgggcaggcgttcgggcgcgaagggttga

SEQ ID NO: 50124 - DNA, 648 bp, Neisseria meningitidis
atgaaaacaaaattttacaatcatcaaggcggacatttaatcctgtattttgcaggttggggaacgccgcccgatgctgtaaatcatttgattttgccggaaaatcacgatttattgatttgctatgattatcaagatttaaatttggattttgatttttccgcctatcggcacatccgcttggtggcgtggtcaatgggcgtttgggcggcagagagggcattgcaaggaataagattaaaatccgcaacggcagtgaatggcacaggtttgccttgcgatgataatttcggtatcccttgcgccgtttttaaaggcacattggagaacctcacgggaaatactcgtttaaaatttgaacgcagaatgtgtggcgataaagcatcttttgaagattaccaacaattttccgcccgtccgtttgacgaaattcatcaagaacttaccgcactttttgcgatgatcgggcaagataggcgcgcagatttgattcgctggacaaatgccttggtcggatcgggcgataaaatttttatgcctgccaatcagtaccgatattggacagcgcgttgcaccgttcgggaaattgacggcggacattacctgttttcaagattcacccattggtcggcactatggaatcactga

SEQ ID NO: 50125 - DNA, 2256 bp, Neisseria meningitidis
atgggacagtacaagaagctgtggtacttgctgtttgccgttctggcggtatgctttaccattcttggctatatgggcagcgaggtttacaaaaaagccccgccttaccccgaacaggtcgtttccgcatccggcaaagtcttgatgacgaaagacgatattttggcaggtcagtctgcatggcagagtaccggcggtatggaagtcggttcgattctgggtcacggcgcatatcaggctccggactggacggccgactggctgcatcgtgagttgtccgcttggttggatttgaccgcgcaacagacttacggcaaaaaattcgatgaagtttcccctgaagaacaagccgttctgaaaacccgactggctgacgaataccgcaaccaaagccgtattaaagaagacggcagcgtcgtcatcagcgatacgcgcgtgaaagccatcgaaagcatcctgccttattaccacggtgtttacggcgatgatcccgcgctgcaaaccacccgcgaacactttgcaatgaaaaacaacacattgccaagccaagaagcgcgtgaaaaactgttcgacttcttcttctggacttcttggtctgcttcgaccaaccgtcctgacgagacgttcacttataccaacaactggccgcacgagcctttgatcaacaacgtaccgaccactgaaaactatatgtggtcattcaccagcgttgttcttctgctgatgggcatcggtttgctgatgtggggttattccttcttgaccaaacacgaggaagtggaagtgccgtctgaagacccgatttccaaaatccaactgaccccttcgcaaaaagcattgggcaaatacgtcttcctgacggtcgccctgtttgtggtacaagtattgctgggcggactgaccgcgcactacaccgtcgaaggccagggtttctacggcattgacgaggcgttgggctttgaaatgtccgactggttcccctacgccctgacccgtacttggcacatccaatccgccatcttctggattgcaaccggctttttgacggcaggtttgttcctcgcgccgattgtcaacggcggcaaagatcccaagttccaacgtgcaggcgtgaacttcctctatatcgccctcttcatcgtggtcggcggttcttacgcgggcaacttcttcgcgttgacgcacatccttccccccgaattgaatttctggttcggacaccaaggttacgaatacctcgatttgggccgtttctggcaactcctgctgatggtcggcctgttgttgtggctgttcctgatgttgcgctgcacggtttccgccttcaaagaaaaaggcgtggacaaaaacctgctggcaatctttgtcgcttctatggtcggtgtgggcgtattctacgcaccgggtctgttctatggcgaaaaatccccgattgccgtaatggaatactggcgttggtgggtggttcacctgtgggtggaaggcttctttgaagtatttgccactgccgcctttgcctttgtcttctacaatatgggctttgtccgccgcagtaccgccactgcctccactttggccgctgccgccatctttatgttgggcggcgttccgggtacgctgcaccacctgtacttctccggctctacctccgcctctatggcaatcggcgcctgcttctccgctttggaagtcgtgccgctggtgttgctgggtcgtgaagcatacgaacactggtcttaccaacacctgtccgactgggcgaaacgcctgcgttggccgctgatgtgcttcgtggcagtcgccttttggaatatgatcggtgccggcgtattcggcttcctgattaacccgccgatttccctgttctatatccaaggtttgaacacttctgccgttcacgcgcacgccgccttgtttggtgtgtacggtttcttggcattgggcttcgtattgctggttgcccgttatttgaaaccgaacgcgcagtttgacgacaaactgatgacttggggcttctggctgctcaacggcggcttggtcggtatgattgccatcagcctgctgcctgtcggcgcgattcaggcatacgcctccatcacgcacggtctgtggtatgcccgcagcgaagagttcctgcaaatggaaatcctcgataccttgcgttgggtacgtacggcagctgacttggtctttatcggcggtgcaatctgcgttgccatccaagccactaaaatcgtattcggccgcgacaaataa

SEQ ID NO: 50126 - DNA, 900 bp, Neisseria meningitidis
atgaaaaccaattcagaagaactgaccgtatttgttcaagtggtggaaagcggcagcttcagccgtgcggcggagcagttggcgatggcaaattctgccgtaagccgcatcgtcaaacggctggaggaaaagttgggtgtgaacctgctcaaccgcaccacgcggcaactcagtctgacggaagaaggcgcgcaatatttccgccgcgcgcagagaatcctgcaagaaatggcagcggcggaaaccgaaatgctggcagtgcacgaaataccgcaaggcgtgttgcgcgtggattccgcgataccgatggtgctgcatctgctggcgccgctggcagcaaaattcaacgaacgctatccgcatatccgactttcgctcgtttcttccgaaggctatatcaatctgattgaacgcaaagtcgatattgccttacgggccggagaattggacgattccgggctgcgtgcacgccatctgtttgacagccgcttccgcgtaatcgccagtcctgaatacctggcaaaacacggcacgccgcaatctacagaagagcttgccggtcaccaatgtttaggcttcaccgaacccggttctctaaatacatgggcggttttagatgcgcagggaaatccctataagatttcaccgcactttaccgccagcagcggtgaaatcttacgctcgttgtgcctttcaggttgcggtattgcttgcttatcagattttttggttgacaacgacatcgctgaaggaaagttaattcccctgctcgccgaacaaacctccaataaaacgcacccctttaatgctgtttattacagcgataaagccgtcaacctccgcttgcgcgtatttttggattttttagtggaggaactgggaaacaatctctgtggataa

SEQ ID NO: 50127 - DNA, 303 bp, Neisseria meningitidis; identical to SEQ ID NO: 43286

SEQ ID NO: 50128 - DNA, 657 bp, Neisseria meningitidis; identical to SEQ ID NO: 42090

SEQ ID NO: 50129 - DNA, 669 bp, Neisseria meningitidis
atgagtttgagtaaattggcgaaaaaaacggcacaaactgctaaaaatatcggcgaaaccctgcgcgcggcctttcggggaaaaatcacgctggtggtgtcgtccgagccgatacagcgcgtgcagttgagcggcttggccgacgaaaccctgcaagaccttgaacatttgcaggaatacggctttgccagccatccgcccgacggcagcgaagcggtagtgataccgctgggcggcaatacttcgcacggtgtgattgtgtgcagccagcacggcagctaccgcatcaaaaaccttaagcccggcgagacggcgatttttaatcatgagggtgcaaaaatcgtgattaagcaaggcaaaatcattgaggccgattgcgacgtgtaccgggttaactgcaaacaatacgaggttaatgcggccacggatgccaaatttaacgctccgttggtggagaccagtgcagtgttgacggcgcaaggccaaatcaacggcaacggcggcatggccgtcgagggcggcgacggagccacctttagcggcgatgttaaccaaacgggcggcagctttaacaccgacggcgacgtggtggccggcaatatatcgttgcgccagcacccgcataccgacagcatcggcggcaaaaccttaccagcggaaccggcatag

SEQ ID NO: 50130 - DNA, 288 bp, Neisseria meningitidis
atggatgatttgattgcagcttttttaggctatttatcaggtaaatatagcgaagggaaaataagcagattagaaatatccctaacggcaggaagtactttctttgcagtattctttattcatgaactgataatttttattgttgatggaaataaggaaaatctttggaattttattactgggataatgaaagatttatttttattttcatgttctgtttgtttattattctacttcttattatttattgcggaaactattgggaaaacaatcaataaaattaaataa

SEQ ID NO: 50131 - DNA, 606 bp, Neisseria meningitidis
ttgaataccctctatttaggttcaaacagcccacgcagaatggaaatcctgacgcagttgggctatcgggtcgtcaagctgcctgccgacatcgacgaaacggtcagacagaacgaagaccctgcccgttacgttcaaaggatggcagaagaaaaaaaccgaaccgccctgaccctcttttgcgaaaccaacggcacaatgcccgatttccccctgattaccgccgacacctgcgtcgtttcagacggcatcatattgggcaaaccccactcccaagccgaagcaatcgaatttttaaaccgattgtccggcaaacaacataccgtcctgactgccgtctgcattcattatcgcggcaatgcggaaaaccgcgtccaaaccaaccgcgtcgttttcaagcccctgagttcggaagaaatttccgcctatgtgcaaagcggcgaaccgatggacaaagccggtgcctacgccgtacaaggcataggcggcatctttatccaatctatcggaggcagcttcagcggcattatggggctgcccgtttatgaaaccgtttcgatgttgcaggatttgggataccgtaccccacctttcatccgagcctaa

SEQ ID NO: 50132 - DNA, 780 bp, Neisseria meningitidis
atgcttaaaatcatttccgccaacgtcaacggcatccgctccgcctacaaaaaaggtttttacgaatacatcgccgcatcgggcgcggacattgtctgcgtgcaggaactcaaagcgcaggaggctgatttgtctgccgatatgaaaaatccgcacgggatgcacggtcattggcattgcgccgagaagcgcggttacagcggcgtggcggtgtacagcaaacgcaaacccgacaatgtgcaaatcggtatgggcattgaagaattcgacagggaagggcggtttgtgcgttgcgatttcgacaggttgagcgttatttcgctttacttgcccagcggcagcagcgcggaagaacgccagcaggtgaaataccgtttccttgatgcgttttaccctatgctcgaagcgatgaaaaacgaaggacgcgacattgtcgtttgcggcgactggaacatcgcccaccaaaacatcgacctgaaaaactggaaaggcaatcagaaaaattcgggcttcctaccggaagaacgcgagtggataggcaaggttatccacaagctcggttggacggatatgtggcgcacgctttatcccgatgtgccgggctacacgtggtggagcaaccgcgggcaggcgtatgcgaaagatgtcgggtggcgcatcgattatcagatggttacgcccgaacttgccgccaaagccgtgtccgcacacgtttataaagatgaaaaattttccgaccatgcgccgctggtcatggagtatgactatgctgccgaataa

SEQ ID NO: 50133 - DNA, 696 bp, Neisseria meningitidis
atgaaagcgatgatactggcggcaggacgcggcgagcgtatgcgccctttgaccgataccactccgaagccgctgcttgatgtggcgggtaagcctctaatcggttggcacctatgccgtctgaagcaggcggggtttaccgaaatcgtcatcaaccacgcttggctgggtcggcagatagaagatgctttgggcgacggctcggcttatggcgtgaacatcgcctattcgcccgaacccgcaggcggtttggaaacggcaggcggcatcgcgcaggcattgccgctgttgggcgataccccgtttttggtcgtcaatggcgacgtgctgaccgacatcgattttaccgccgcgtttcagacggcatcgtccctgccggaacatatttccgcccatctgtggctggtggaaaatccgccgcaccatcctgacggcgatttttccctgctgccggacggcagcgtacagtcggaagtatccggcggcaacggattgacatttagcggcgtgggtatttaccgtcctgaaatgtttgacggaatcgaagcgggcagtgtggcgaaactcgcgcccgtattgcggggcgaaatgcggcaaaaccgcgtgagcggtcagaagcatacgggcttgtggctggatgtcggcacggtatgccgtctgaaagaggctcaagcccttgcaggggcttggaagtga

SEQ ID NO: 50134 - DNA, 1209 bp, Neisseria meningitidis; identical to SEQ ID NO: 38616

SEQ ID NO: 50135 - DNA, 1662 bp, Neisseria meningitidis
atgactgacaacagccctcctccaaacggacacgcccaagcacgcgtccgcaaaaacaacaccttgctctccgccgtctggctggtcccgctgattgcgctgattgccggtggctggctgtggattaaggaaatccgcaacagggggcctgtggttacgctcttgatggacagcgcggaaggcattgaggtcaacaatacggtcattaaggtattgagcatcgatgtcggacgcgttacccgaatcaaactgcgcgacgaccagaaaggcgtggaagtaaccgcccaactcaatgcggacgtatccggcctcatccgcagcgacacacagttttgggtggtcaagccgcgtatcgaccaaagcggcgtaaccggtttgggtacgctgctttcgggttcgtacatcgcctttacacccggcaaaagcgacgaggcaaaagacgtgttccaagtgcaggacattccgcccgttaccgccatcgggcaaagcggtctgcgcttgaatttgattggtaaaaacgaccgtatcctcaacgtcaacagccctgttttgtatgaaaactttatggtcgggcaaatcgaaagcgcgcatttcgacccgtccgaccaaagcgtgcattacaccatcttcatccaaagccccaacgacaaactgattcattccgccagccgtttttggctggaaagcggcatcaatatcgaaaccacaggcagcggcatcaaactcaattccgcccctctgcctgccctgctgtcgggcgcgatttcatttgattcgccgaaaaccaaaaacagtaaaaacgttaaaagcgaagacagcttcacgctttacgacagccgcagcgaagtcgccaacctgcctgacgaccgctcgctgtactacaccgcgtttttcaaacaatccgtgcgcggactgaccgtcggttcgcccgtcgagtacaaagggctgaatgtcggcgtggtttccgatgtcccttatttcgaccgcaacgacagcctgcatttatttgaaaacggctggattcccgtacgcatccgcatcgagccttcccgtttggaaatcaatgccgacgaacaaagcaaagagcattggaaacaacaatttcagacggctttaaacaaaggcctgaccgccaccatctccagcaacaacctgctgaccggcagcaaaatgattgagttgaacgatcagccttcgtcttcgcccaagctgcgaccgcataccgtttatgcaggcgataccgtcatcgccacacggggcggcggtttggacgatttgcaggcgaaagtggtggatttgctggacaagttcgacaaactgcctttggataagacggttgccgaattgaacggttcgcttgccgagctcaagtccgcactcaaatctgccaatgccgccctaagctccattgacaaactggccggcaatccgcagacgcaaaacattccgaacgaactgaaccaaaccctgaaagaattacgtcaaaccctgcaaggcgtatcgcctcaatcgcctatctacggcgacgtacaaaatacgttgcaaagtttggacaaaaccttaaaagacgttcaacccgtcattaacactttgaaagaaaaacccaacgcgctgattttcaacagcagcagcaaagaccccatcccgaaaggaagccgataa

SEQ ID NO: 50136 - DNA, 840 bp, Neisseria meningitidis; identical to SEQ ID NO: 39493

SEQ ID NO: 50137 - DNA, 1578 bp, Neisseria meningitidis
atgatgaaaaaatctttccttacgcttgttctgtattcgtctttacttaccgccagcgaaattgcctatcgctttgtatttgggattgaaaccttaccggcggcaaaaattgcggaaacgtttgcgctgacatttgtgattgctgcgctgtatctgtttgcgcgttataaggtgacgcgtttgttgattgcggtgttttttgcgttcagcattattgccaacaatgtgcattacgcggtttatcaaagctggatgacgggcatcaattattggctgatgctgaaagaggttaccgaagtcggcagcgcgggtgcgtcgatgttggataagttgtggctgcctgtgttgtggggcgtgttggaagtcatgttgttttgcagccttgccaagttccgccgtaagacgcatttttctgccgatatactgtttgccttcctaatgctgatgattttcgtgcgttcgttcgacacgaaacaagagcacggtatttcgcccaaaccgacatacagccgcatcaaagccaattatttcagcttcggttattttgtcggacgcgtgttgccgtatcagttgtttgatttaagcaggattcccgcctttaagcagcctgctccaagcaaaatcgggcagggcagtgttcaaaatatcgtcctgattatgggcgaaagcgaaagcgcggcgcatttgaagctgtttggctacggacgcgaaacttcgccgtttttaacccggctgtcgcaagccgattttaagccgattgtgaaacaaagttattccgcaggctttatgactgcagtgtccctgcccagttttttcaatgcgataccgcacgccaacggcttggaacaaatcagcggcggcgataccaatatgttccgcctcgccaaagagcagggctatgaaacgtatttttacagcgcgcaggcggaaaacgagatggcgattttgaacttaatcggtaagaaatggatagaccatctgattcagccgacgcaacttggctacggcaacggcgacaatatgcccgatgagaagctgctgccgttgttcgacaaaatcaatttgcagcagggcaagcattttatcgtgttgcaccaacgcggttcgcacgccccatacggcgcattgttgcagcctcaagataaagtattcggcgaagccgatattgtggataagtacgacaacaccatccacaaaaccgaccaaatgattcaaaccgtattcgagcagctgcaaaagcagcctgacggcaactggctgtttgcctatacctccgatcatggccagtatgttcgccaagatatctacaatcaaggcacggtgcagcccgacagctatctcgtgccgctagtgttgtacagcccggataaggccgtgcaacaggctgccaaccaggcttttgcgccttgcgagattgccttccatcagcagctttcaacgttcctgattcacacgttgggctacgatatgccggtttcaggttgtcgcgaaggctcggtaacgggcaacctgattacgggtgatgcaggcagcttgaacattcgcgacggcaaggcggaatatgtttatccgcaatga

SEQ ID NO: 50138 - DNA, 2151 bp, Neisseria meningitidis
atgctcaccgatttagaaaaaaacgccatccgcgaccattaccaaaatatcggcaaaaatctgcccggtttccgtccgcgcgcttcgcagcgggaaatgattgcggcggttgccaacgctttttcgcggacgttgacgcgtgaagaaggcggcgatccacccaagcgcgagggcgagagcattgccgtaatcgaaggcccgaccggcgtgggcaaatcgcttgcctacctgctggcgggcggcatcatggcgcaaacacgcggcaagcggctgattgtgagcagcgcgacggttgccttgcaggagcagttggtagaccgcgacctgccgtttttggtcgaaaaaagcggtttggaactgagcttcgcgcttgccaaagggcgcggccgttatctctgcccctacaaactctatcaactgacgcaaaacaacgcccagcaaaacctgacgggttttgaaacgccggaagtgttgtgggacagcaaacccaagcccgaagaattgaagctgctgcgcgacatcgccgacgaattttccgcccgacggttcaacggcgaccgcgacacttggccggaaaaaatcgatgacgcgatttggctcaaagtgaccaacgaccgccacggctgcctgaaaaccgcctgtcccaaccgtccggaatgccctttttacctggcacgcgatgtcttggaaaccgtcgatgtcgtcgttgccaaccacgatcttctgcttgccgacatcagcatgggcggcggtgtaattctgcccgcgcccgaaaacagtttctattgtatcgacgaagcgcaccacctgcccaaaaaagccctcagccgttttgccgccgaacattcatggaatattgccgtttggacgctggaaaaactgccgcagatgaccggcaaaattgccgcgctgaccgataaagccgaacttgccaaccttgccgacgaaaccgccgcatcattgctcgacagcctgcacgaatggcagttccatttggcggaagagccgtctttaagtttgggggtgtctgaaaacgacagacgaaccaacagcgaaccgacttggctgtgggaagacggcaaaatccccgaaggcctcgaaaccaccgtttccaacaccgccattgccgcacgcagcctgctcaaacacgttatcgggctgaacgatgcgctttccgctgcgcgccgcgaaaaagaacaagacagcgcgctcctcgaccgcctgaccggcgagttcggtctttttatcgcccgtatcgaacaaatcagcgcggtttgggatttgctctccaccgtccccctcgaaggtgaagaaccgctggcaaaatggataacccgccgcgccgacgacaaaaacgactacattttcaacgccagccccatcagcagcgcgtcccacctcgccaacagtctgtggcggcgcgcggcaggcgcggtgttgacctccgccaccctgcaatccttgggcaactttaacctgatattgcgccaaaccgggctgcaatggctgcccgaaaccaccaccctcgccctcaaaagcccctttgactttgaaaaacagggcgaactctacatccctcccatatacgccagccccaaagaccccgaagcccacaccgccgccatcatcgaatggctgcccaagcttatttcgcccaccgaagccatcggcacgctcgtcttgttttcctcgcgcaaacaaatgcaggatgtcgccctgcgcctgcccggagactacctgccgctcttgctcgtacaaggcgaattacccaaagccgtcctcctgcaaaaacaccaccgggccatagaagaaggcaaagccagcatcatcttcggactcgacagctttgccgaaggactcgacctgcccggcaccgcctgcgtgcaagtcatcatcgccaaacttcccttcgccatgcccgacaaccccatcgaaaaaacccaaaaccgctggatagaacagcgcggcggcaaccctttcatcgaaatcaccgtccccgaagccggcatcaaactgatccaggccgtcggccgcctcatccgcaccgaacaagactacggccgcgtaaccatcctcgacaaccgcatcaaaacgcagcggtacggccaacaattattggccggcctgccaccgtttaaaaggatagggtaa

SEQ ID NO: 50139 - DNA, 672 bp, Neisseria meningitidis
ttgaaaaacatcgatatggaaaagtcaggcattgtctatctgatgaaaaccgtcatcaagggcgtatataaaatcggcatttcggaggtaagcaattttgaaggcagaatgcgccatttggaaaacaacggctatgcgaacgttgccgggttggaacgcatcctcgctgtcaaaaccgacaattacaaagaaaaagaaaacctgctccatgaaattttcagcaaaagcaggataggcgataccgaattgttcgccgtggacgaaaaccttgtgaaacgtttgtttttatcgcttcgcggcgaaatcgtgttcccgaaaaacgaaacggcggaatcggaatttgaaaaaagcgtccacgaacgcaggcaggaagggaatgccgggtcaggccgcaaacaactgcttgatttggtacggcgcggacaccgggaatacccttacgcgctgccccggcttttggcgggcgcggcatcctacaagccgagaaaatcgaaaatccgcctttttaaagaagcatatttcggcaaaagcggcacgaggctgaccgacgaaattgcagacgtcatccatatttacacctgtttttcgcgggcggatttggaaaaagcctattccgaatatttggaacttttcaaatccgaatcggatgccgaaggcagaaaaccacggtaa

SEQ ID NO: 50140 - DNA, 237 bp, Neisseria meningitidis; identical to SEQ ID NO: 39540

SEQ ID NO: 50141 - DNA, 207 bp, Neisseria meningitidis; identical to SEQ ID NO: 40222

SEQ ID NO: 50142 - DNA, 1527 bp, Neisseria meningitidis
atgaatcccatgtacattacttttgcaatctatctggttgcagtccttctcatcgggcttgccgcctatttttccacgcgcaatttcgacgattatattttgggcgggcgcagcctgggcccgtttgttaccgcgatgtcggcaggcgcgtccgatatgtccggctggctgctgatgggtctgccgggcgcgatttacctgagcggtttgaatgaggcttggattgccatcggcctcttggtcggcgcgtatttcaactggctcttggtggcgggccgcctgcgcgtgcataccgaatacgccaacaatgcgctgacgctgccggattatttcttccaccgcttcggcgcgggcggacacttgatgaaagtggtttccgcactgattatcctgttcttcttcacgatttattgcgcctcgggcattgtggcgggcgcaaccctgttccaaagcctgtttgaaggtatgacttacaatcaggcaatgtggctgggcgcgggcgcgaccatcgcctataccttcttgggcggtttcttggcggtcagctggacggatacgctgcaggcttctttgatgattttcgccctgattttaacgccggtgatggtctatctgggcttgggcggcgcggaacagatgtctgccgcgattcaaagcgtcgccgcaggcacgggcaaagaatacggcagcctgtttgccggtacgaccgtcatcggcatcatttccaccgccgcatggggcttgggctatttcggacagccgcacattttggcgcgctttatggcggccgaaagcgcgaaatcgctggtatccgcacgccgcatcggcatgacttggatggcgttgtgccttgcgggcgcggtggcggtcggttatttcggcattgcgtatttcggtgcaaatcccgacaaagtttcttctatgagcggcaaccacgaacgcatcttcatcgcgctttccaccctgctgttcaacccttggatcgccggcatcattttgagcgcgattttggcggcggtgatgtccaccctgtcctgccagcttttggtttgctccagcgcgattaccgaagacttctacaaaggctttttgcgtaaaaatgcgcaacagtcggaattggtatgggtcggccgcctgatggtcttggcgattgccgtgatttccatcctgattgcttccgatccgaacagcaaagtattgggactggtttcttatgcgtgggcaggtttcggtgcggcgttcggcccgattgtgattctgtccgtattgtggaaacgcatcactgcctacggcgcgttgtcgggtatggttgcaggtgccttaaccgtagtcgtatgggcggaatgggtgaaaaaaccggctcaagcggcaggagaaagcggcttgttgacgatgtacgaaatcgtcccgggctttattgtttgcttaatcattgccgtgttggtttccctgttcaacaaagaaccttcgcgcgaaatccaagaacgctttgaaaaagccgacgcagattaccgcgccgcccgataa

SEQ ID NO: 50143 - DNA, 1545 bp, Neisseria meningitidis
atgtgcggcgtattaggtttggtcagtcatgaacccgtgaaccagcttctgtacgacggtttgcagatgttgcagcacagggggcaggatgcggcgggcattgcaacggcggaaggcggtaccttccatatgcacaaaggcaaaggcatggtgcgcgaagtgttccgcacacgcaatatgcgcgatttgaccggcaacgccggcatcgcccacgtccgttatcctactgcgggcaacgcaggcagcagcgcggaggcgcagcctttctacgtcagctcgccgttcggcatcgttttggcgcacaacggcaacctcaccaacactgccgaactgtatgaaaacgtgtgtaacaaacacctgcgccacgtcaacaccagctccgattccgaagtcttgctcaacgtattcgcgcacgaattacgccgcgaagtctctaaaaacgccgacccgcaccggctcaatgccgacaatattttcaacgccgttgcccaagtccaccgcctggtgcgcggcgcatacggtgtgattgccatgattgcgggctacggtatgctcgccttccgcgacccttacggcatccgcccgctggtattgggttcgcaaaccgacagcgaaggcagaaaatcctatgccgtcgcctccgaatccgtcgccttcaacgcgcttacctacgatttggaacgcgacatccggccgggcgaagcggtatttgtcggctttgacggcacaatgattgcccgccaatgcagcgaccgtgccaaactcagcccctgcctttttgaatatgtttattttgcccgccccgactctgtgattgacggcgtatccgtttaccaatcgcgcttggatatgggcgtgtcgctggcggaaaaaatcaaacgcgagctgcccgtggacggcatcgatgtcgtgatgcccatccccgacaccagccgccccagcgcgatggagcttgccgtccatctcgacaaaccctaccgcgagggtttgattaaaaaccgctatatcggccgcacctttattatgcccggacaggcgacgcgcaaaaaatccgtgcgccaaaaactcagcccgatggaaaccgaatttgcaggcaaaagcgtgttgctggtggacgactccatcgtgcgcgggacgaccagccgcgaaatcgtcgaaatggtacgcgcggcgggcgcgcgcaaagtctatatcgcctccgccgcgcccgaagtgcgctatcccaatgtgtacggcattgatatgcccacgcgcgaagagttgattgccaacgagcgcagcgcggcggaaatcgccgccgaaatcggcgcagacggcatcgtgttccaaaatttgagcgatttggaagccgtcgtcaaagcactcaatccgaaaatcgaatccttcgattcgtcctgtttcaacggcatttatcagaccggcgacatcgatgatgcctacctcgaccgcctgtctgccgagaaatccggctgcggcggtctgaaaatccacccgagcaggatggaacacagcatcagcatcagcgatgcgggcgacgaagaataa

SEQ ID NO: 50144 - DNA, 684 bp, Neisseria meningitidis
atgtttgatttcggtttgggcgagctggtttttgtcggcattatcgccctgattgtcctcggccccgaacgcctgcccgaggccgcccgcaccgccggacggctcatcggcaggctgcaacgctttgtcggcagcgtcaaacaggaatttgacactcaaatcgaactggaagaactaaggaaggccaagcaggaatttgaagctgccgctgctcaggttcgagacagcctcaaagaaaccggtacggatatgcagaacagtctgcacgacatttccgacggtctgaagccttgggaaaaactgcccgaacagcgcacgcctgctgatttcggtgtcgatgaaaacggcaatccctttcccgatgcggcaaacaccctatcagacggcatttccgacgttatgccgtctgaacgttccgatacttccgccgaaacccttgggaacgacgggcaaatcggcggcacagccgagccttcggaaaccgataaagaccgcgcatggcgcgaatatctgaccgcaccttcttcgcctgccgtacagaccgtcgaagtcagctatatcgataccgctgttgaaacccctgttccgcataccacttcgctgcgtaaacaggcaataagccgcaaacgcgatttgcgtcccaaatcccgcgccaaacctaaattgcgcgtccgtaaatcataa

SEQ ID NO: 50145 - DNA, 669 bp, Neisseria meningitidis; identical to SEQ ID NO: 42855

SEQ ID NO: 50146 - DNA, 1050 bp, Neisseria meningitidis; identical to SEQ ID NO: 46953

SEQ ID NO: 50147 - DNA, 753 bp, Neisseria meningitidis
atgacctcatgtgaacctgtgaatgaaaagacagatcaaaaagcagtaagtgcgcaacaggctaaagaacaaaccagtttcaacaatcccgagccaatgacaggatttgaacatacggttacatttgattttcagggcaccaaaatggttatcccttatggctatcttgcacggtatacgcaagacaatgccacaaaatggctttccgacacgcccgggcaggatgcttactccattaatttgatagagattagcgtctattacaaaaaaaccgaccaaggctgggtgctcgaaccatacaaccagcaaaacaaagcacactttatccaatttctacgcgacggtttggatagcgtggacgatattgttatccgaaaagatgcgtgtagtttaagcacgactatgggagaaagattgcttacttacggggttaaaaaaatgccatctgcctatcctgaatatgaagcttatgaagataaaagacatattcctgaaaatccatattttcatgaattttactatattaaaaaaggagaaaatccggcgattattactcatcggaataatcgaataaaccaaactgaagaagatagttatagcactagcgtaggttcctgtattaacggtttcacggtacagtattacccgtttattcgggaaaagcagcagctcacacagcaggagttggtaggttatcaccaacaagtagagcaattggtacagagttttgtaaacaattcaaataaaaaataa

SEQ ID NO: 50148 - DNA, 507 bp, Neisseria meningitidis
atggctcacccgcaagaaatccgtgaaaagttacgccggctctatgtgagcggcgagcaaactttggaaacggcggccttgatgtgcgaaatcccgcagaccactgcgcgtgcgtggaaacgtgcggataaggaaaaaggcgacgactgggataagatgcgcgccgcttacactttggccgacggcggtattgaagacttgagccgtgcgatgttggccggttttatggtgcagtacaacagcacgatgacgatgctgcaggattcgagtaccgaagatttgccgccatcggaccgcgccaagctgttggccagcctggccgatgcgtttacgaaaaccgtatccgccaatgcgcgtgtgatgccggaaacgtcaaaactggcgacggctttggaattgattgagttcttgatggcgtttgtgcaagaaaaacatcccaaacatttgcctgcttttgtggaggtattggagccgtttggggtggaagtggagaagaagtttggttag

SEQ ID NO: 50149 - DNA, 486 bp, Neisseria meningitidis
atgagtaataaaatggaacaaaaagggtttacattgattgagatgatgatagtcgtcgcgatactcggcattatcagcgtcattgccataccttcttatcaaagttatattgaaaaaggctatcagtcccagctttatacggagatggtcggtatcaacaatatttccaaacagtttattttgaaaaatcccctggacgataatcagaccatcaagagcaaactggaaatatttgtctcaggctataagatgaatccgaaaattgccgaaaaatataatgtttcggtgcattttgtcaataaggaaaaaccaagggcatacagcttggtcggcgttccaaagacggggacgggttatactttgtcggtatggatgaacagcgtgggcgacggatacaaatgccgtgataaggcttctgccgaagcctattcggagaccttgtccgcagatgccggctgtgaagccttctctaatcgtaaaaaatag

SEQ ID NO: 50150 - DNA, 441 bp, Neisseria meningitidis
  misc_feature 418, 419, 420, 421, 422: 'n' is a, c, g or t
atgcacgacaaaacctggtccggacgtttcaacgaacccgtttccgaactcgtcaaacaatacaccgcctccatcggtttcgaccgacggcttgccgaatgggacatccaaggctcgctggcacacgcgcaaatgctgaaagaaaccggcgtgttggacgaaggcgatttggcggacatccgccggggtatggcggaaatcctcgaagaaatccgcagcggcaaaatcgaatggtcgtccgatttggaagatgtccatatgaacatcgaacgccgcctgaccgacaaaatcggcgacgcgggcaaacgcctgcacaccggccgcagccgcaacgaccaagtcgccaccgacatccgcctgtggctgcgcgaccagattaccgttatacaaagcctgattcaaagccttcagacggcannnnncacacacttaattaattaa

SEQ ID NO: 50151 - DNA, 1485 bp, Neisseria meningitidis
atgccgtataatcaagcccctgattttttatgcgccgacactatgcatccgacctattccgccgtacaggcgcggctgctcgaagccaaccgcctttcccccgaactgctcgccaaaagcctgtgcatcatcggcgcgcaccacgtcgattacgccgacatctactgccagcgcaccgcttatgaaagctggcatttggaagagggcatcgtcaaatcgggcagcttccaaatcaatcagggcgtgggcgtgcgcgccgtttcgggcgataaaaccgcctttgcctacgccgacagcctgtgcatcgattcgataaaccgttccgcccgcgccgtccgcgcgattggggcggcaggcggcaaggtgtccgccaaaatgccgtctgaaacgcgcggcaagccggtttgttccgcgtccgaccccattgccggcctcgattctgccgccaaagtcgcgctgttgaacaaagtggaagcaatcgccaaagccgccgatccgcgcatcgtgcaagtgatggccggtttgacctgcgaatacgatatggtttacctcgcccgtctggacggcaaacacgccgccgacatccgcccgatggtgcgcctgaacgttaccgttatcgccaaacagggcgaacgccgcgaacagggcagcgcgggcggcggcggacgctacgacttggcttatttcgatgaaaacttggtgcggcagtttgtcgatgccgccgtcaaacaagccctgaccaacctcgaatcccgccccgcgcctgccggcgagatgaccgttgttttgggcaacggctggccgggcgtgttgctgcacgaagcggtcggacacggtttggaaggcgatttcaaccgcaaggagaccagcgtcttttccggcagaatcggcgagcgcgtggccgccaaaggcgttaccgtcgtcgatcagggcgatattgccggccggcgcggttcgctcaatatcgacgacgaaggcaacgaaacccgccgcactgtattgattgaagacggtattttggtcggttatatgcaggacgaaaccaacgcccgtctgatgggtacgcaatcgaccggcaacggccgccgcgaaagttacgcttccgcccctatgccacgcatgaccaatacctttatggaaaacggcggctatgagccggaagaaatcattgcgtccatcgacaagggcatttacgccgtcaacttcggcggcggacaagtggacatcaccagcggcaagttcgtgttcagtgcatccgaagcgtggtgggtcgaaggcggcaaactgcaatatcccgtcaaaggcgcgaccattatcggcaacggccccgaagtgctgaaacacgtttccatgataggcaacgataccgcgctcgacagcggtgtcggcgtgtgcggcaaagaagggcagagcgtccccgtcggcgtggggcaaccgaccttgcggattgatgccggactgaccgtcggcggtagcgaaatctga

SEQ ID NO: 50152 - DNA, 1044 bp, Neisseria meningitidis
atgcagattaccgacttactcgccttcggcgctaaaaacaaagcatccgaccttcacctgagttcaggcatatcccctatgattcgggttcacggcgatatgcggcgcatcaaccttcccgaaatgagcgcggaagaggtcggtaatatggtaacttcggtgatgaacgaccaccagcggaaaatctaccagcaaaacttggaagtcgacttctcgttcgaactgcccaacgtcgcccgattccgcgtcaacgccttcaacaccggccgcggtcccgccgccgtattccgcaccattcccagcaccgtcttatcgctggaagaattgaaagccccgagcattttccaaaaaatcgcagaatcgccgcgcggcatggtattggttaccggccctaccggttcgggcaaatcgaccacgcttgccgcgatgatcaactacatcaacgaaacccagccggcacacatcctgaccatcgaagacccgatcgaattcgtccaccaaagcaaaaaatccctgattaaccagcgcgagctgcaccagcacaccctcagcttcgccaacgcgctgcgttccgcattgcgcgaagaccccgacgttatccttgtcggcgagatgcgcgaccccgaaaccatcggcttggcactgaccgccgccgaaaccggacacttggttttcggcacgctgcacacgaccggcgcagcaaaaaccgtcgaccgtatcgtggacgtattcccggcgggagaaaaagaaatggtgcgctctatgctgtccgaatcgctgaccgccgtcatctcccaaaacctgctgaaaacgcacgacggcaacggccgtgtcgcctcgcacgaaatcctgattgccaaccccgccgtccgcaacctcatccgcgaaaacaaaatcacgcagattaactccgtcctgcaaaccgggcaggcgagcggtatgcagacaatggaccaatcgctgcaatcgctggtgcgccaagggctgatcgcaccggaagtcgcacgcagacgcgcgcaaaacagcgaaagtatgagtttctga

SEQ ID NO: 50153 - DNA, 534 bp, Neisseria meningitidis; identical to SEQ ID NO: 42952

SEQ ID NO: 50154 - DNA, 261 bp, Neisseria meningitidis; identical to SEQ ID NO: 42753

SEQ ID NO: 50155 - DNA, 1179 bp, Neisseria meningitidis; identical to SEQ ID NO: 42680

SEQ ID NO: 50156 - DNA, 1887 bp, Neisseria meningitidis
atgccgtctgaaaccgtttttcaagtaattgatatgaataaagaaacccgttttccggaacacttcgacatcccacttttcctcaaaaacctgcccaacctgccaggcgtataccgttttttcaacgaaagcggcaacgtcttatacgtcggcaaagccgtcaacctcaagcggcgcgtgtccggctatttccagaaaaacgaccattccccgcgcatcgcattgatggtgaaacaggttcaccacatcgaaaccaccatcacccgctccgaatccgaagccctgattctcgaaaacaacttcatcaaagccctgtcgcccaaatacaatattcttttccgcgatgacaaaagctatccttatttgatgctcagcggccatcaatatccgcaaatggcgtattaccgcggcacgctgaaaaagcctaatcaatatttcggcccatatcccaacagcaacgccgtgcgcgacagcattcaagtgttgcaaaaagtctttatgctgcgtacctgcgaagacagtgtattcgagcatcgcgaccgtccttgtctgctttaccaaatcaaacgctgcaccgcgccttgtgtaggccacatcagtgaagaagattatcgtgacagcgtgcgtgaagccgcgactttccttaatggcaaaactgacgaattgacgcgtaccctgcaacacaaaatgcaaaccgccgccgctaatctacaattcgaagaagccgcacgttaccgcgatcaaatccaagcgctcggcattatgcagagcaaccagttcatcgacagcaaaaacccgaacaaccccaacgatatcgatttgcttgcactggcggtttcagacggcctggtttgcgtacactgggtcagcatccgcggcggacggcacgtcggcgacaaaagctttttccccgacaccaaaaacgatcccgagccaaacggacaagattacgccgaagccttcgtcgcccaacactatctgggcaaaagcaaacccgacatcatcatcagcaactttcccgttcccgatgcgctaaaagaggctttggaaggcgaacacggcaagcagatgcaatttgtcaccaagaccataggcgaacgcaaagtccggttgaaaatggcggaacaaaacgcgcaaatggcgattgcacaacgccgcctgcaacaaagcagccagcaacaccgcattgatgaactggcaaaaatcctcggcatggattcagacggcctcaaccgccttgaatgtttcgacatcagccacacacaaggcgaagccactattgcgtcctgcgttgtgtacgatgagcaaaacatccagccttcgcaataccgccgctacaacatcacgaccgccaaacccggcgacgactacgccgccatgcgcgaagtgttgacgcgccgttacggcaaaatgcaggaggccgaagccaacggcgagaccgtcaaatggccggatgccgtgttgattgacggcggcaaagggcaaatcggcgtagccgtatcggtatgggaagaactcgggctgcacatccctttggtcggtatcgccaaaggccccgaacgcaaagccggtatggaagaactcatactgccttttaccggcgaagtcttccgcctgccgcccaacagcccggccttgcatctattgcaaaccgtacgcgatgaatcgcaccgtttcgccattaccggccaccgcaaaaaacgcgacaaagcccgcgttacctcctccttaagcgacatccccggcgtaggcagcaaacgccgccaagccctgctcacccgcttcggcggtctgcgcggcgtgattgccgccagccgcgaggacttggaaaaagtggaaggcatcagcaaggcattggcggaaaccatttacgagcatctgcattag

SEQ ID NO: 50157 - DNA, 717 bp, Neisseria meningitidis
  misc_feature 4, 5, 6, 7, 8: 'n' is a, c, g or t
gtgnnnnncagctacgacttccccggcgatgactgcccgattgtacaaggttccgcactgaaagccttggaaggcgatgccgcttacgaagaaaaaatcttcgaactggctgccgcattggacagctacatcccgactcccgagcgagccgtggacaaaccgttcctgctgcctatcgaagacgtgttctccatttccggccgcggtacagtagtaaccggccgtgtagagcgcggtatcatccacgttggtgacgagattgaaatcgtcggtctgaaagaaacccaaaaaaccacttgtaccggtgttgaaatgttccgcaaactgctggacgaaggtcaggcgggcgacaacgtaggcgtattgctgcgcggtaccaaacgtgaagacgtggaacgcggtcaggtattggctaaaccgggtactatcactcctcacaccaaattcaaagcagaagtatacgtactgagcaaagaagagggtggtcgtcacactccgttcttcgccaactaccgtccgcaattctacttccgtaccaccgacgtaaccggcgcggttactttggaagaaggtgtggaaatggtaatgccgggtgaaaacgtaaccatcaccgtagaactgattgcgcctatcgctatggaagaaggcctgcgctttgcgattcgcgaaggcggccgtaccgtgggtgccggcgtggtttcttctgttatcgcttaa

SEQ ID NO: 50158 - DNA, 510 bp, Neisseria meningitidis
atgacaatgattttaagcattttaagcctgttttttatcatcagactgttatttttagccgtctctattaaacatgaaaaagccttgattgccaaaggggcaacgcaatacggaaaaaccaattccacagtgcttgcggcagttcatacgctttattatttggcgtgttttgtttgggtatggctttctgacactgcttttaatggcatatccttgattggtacgctgacggtgatggcttcgtttgtgatattgtcattgattattaagcagttgggggagatttggacggttaaaatctatattttaccaaatcatcaaattaatcgttcgtggttgtttaaaacattccgccaccccaattattttttaaacatcatacccgaactgattggcatcgccttattatgtcaagcgtggtatgttttattgattggcctgccgatttatttgctggtcttatttaagcgtatccgacaagaagaacaggcgatggcaacacttttttaa

SEQ ID NO: 50159 - DNA, 1329 bp, Neisseria meningitidis; identical to SEQ ID NO: 42671

SEQ ID NO: 50160 - DNA, 1302 bp, Neisseria meningitidis
atgccgtctgaacatcaacacacatcatcattgcttgatttcgaccgtacccatctgctccatccctatacttccatgaccgatccgcttcccgtttatcctgtcaaacgtgcagaaggggtgtttatcgaattggcggacggcacgcggctgattgacgggatgtcgtcttggtggtgtgcgatacacggttacaatcatcccgttttgaatcaggcggttgagacgcagatgaaacagatgtcgcatgtgatgttcggcggtttgacgcatgagccggcggtggagctgggcaaattgttggtcgggattttgccgcaggggctggatcgtattttttatgcggattcgggttcggtttcggtggaagtcgcgttgaagatggcggtgcaataccagcaggcgcggggtttgcgtgcaaaacaaaatatggcgacggtgcggcgcgggtatcacggcgatacttggaacgcgatgtccgtctgcgatccggaaacggggatgcaccatattttcggcagcgcgttgccgcagcgttattttgtcgataacctgacaagccgtttcgacgatgaatgggacgaggcggatttgcagcctgtccgcgccttgtttgaagcgcatcatacggacattgccgcctttattttggaaccggtcgtgcagggcgcgggcggcatgtatttttatcatccgcagtatcttcgcggattgcgcgatttgtgcgacgagtttgatatcgttttgatttttgatgaaatcgccaccggattcgggcgcacgggcaagatgtttgcctgcgaacacgcggaggtcgtgccggatattatgtgcatcggcaagggtttgagcggcggctatatgacgctggcggcagcaatcacttcgcaaaaagttaccgaaacgatttcgcgcggcgaagcgggcgtgtttatgcacggcccgacgtttatggcaaacccgctggcgtgtgccgttgcctgcgcttcggtcaaactgcttttgtctcaagactggcaggcaaatatccgccgcattgaaagcatcttaaaaggccgtctgaaagccgcgtgggatattcgcggcgtgaaagacgtacgcgttttgggtgccatcggcgtgatcgagctggataaaggcgtggatatggcgcgttttcaagcagattgcgtggcgcagggcatttgggtgcgcccgttcggcaggctggtgtatctgatgccgccgtatattatttcagacggcgttttgaccaaacttgccgacaaaaccgtgcaaatcttgaaggaacacagcaaatga

SEQ ID NO: 50161 - DNA, 717 bp, Neisseria meningitidis
gtgttcaataatttccttgcttcgctgccgtttatgacggaaacacgcgccgatatgattgtcagcgcgtttttgcctatggtcaaagccggcttcgcggtctctctgcctttggcggcagcttctttcgttatcggtatgatgattgcggtagccgtggctttggtgcggattatgcccgccggcggcatcgtgcggaaaatcctgctgaaattggtggaattttatatttccgtcattcgcggtacgccgctgttggtgcagcttgtgattgtgttttacgggctgccgtccgtcggtatctatatcgacccgattcccgccgccattatcggcttctcgctcaatgtcggtgcatacgcttccgaaaccatacgcgcggcaattttgtccgtaccgaaaggccaatgggaagcaggtttctccatcggtatgacctatatgcagacgttccgccgcatcgtcgcgccgcaggcattccgcgttgccgtgccgcctttgagcaacgagtttatcggcttgttcaaaaacacctcgctcgcagcggtggtaacggtaactgaattgttccgcgtcgcgcaggaaacggcaaaccgcacttacgactttttgcccgtctatatcgaagccgcattggtttactggtgtttctgcaaggttctgttcctgattcaggcacgtttggaaaaacgtttcgaccgttatgtcgccaaataa

SEQ ID NO: 50162 - DNA, 315 bp, Neisseria meningitidis; identical to SEQ ID NO: 42635

SEQ ID NO: 50163 - DNA, 1206 bp, Neisseria meningitidis
ttgaagccttgcgatacgggcggtaaaatcgcggtttatccggttcgagaaaccggcgacagcaaggactttcccatgattaaaatcagcacccgcttcgatgccggctcggtcgtcgtcaaagacctgaccgacccttccaacatccgcctcgccctgcgtcccgacaacgcctccgattttgcacaatggttctacttccggctgcaaggcgcggcatatcaaaactgcatcatgcattttgaaaacgcggcagaagccgcctacccgaaaggctgggaaggctatcaggcgtgtgcctcatacgaccgccgcaactggttccgcgtaccgacttcctacgaaaacggcgtactgaccgtcaatcatacgccgctgtccaacagcgtgtattacgcctatttcgaaccttactccgaagaacagcatttaaacctcctcggcgacgcgcaaggcagcggcctgtgccgcatcgacgacttgggcagcaccgtgcaagggcgcgacatcaatctgctgaccatcggcaatcaggtcgaaagcgatctgaaaatctggattaccgcccgccagcatccgggcgaaaccatggcggaatggtttgtcgaggggctgctcggcaggctgctcgatccgcaagacccgacagcgcgcaccctgctcgaccgcgccacgttctatatcgtccccaatatgaaccccgacggttcggcactgggcaacctgcgtaccaacgccgccggtgcgaacctcaaccgcgaatgggaaaatccgactttggaaaaaagccccgaagtgttcttcgtgcgcgaaaaaatgctggaaaccggcgtggatttgttcttggacatccacggcgacgaaggactgccctttgtctttgttgcaggtacggaaggcgtgccgaactacaatccgcgcatttccgcgttggaaacacagttcaaaaccgcccttttgaacgccagccccgatttccaagacgaatacggttacgaaaaagatgcgcccggtcaggcaaacatgaccttggcaacaaactgggtcggcaaccgtttcaactgccttgcctatacgttggaaatgccgttcaaagacaatgccaacctgcccgacgacgatttcggatggaacggtcaacggtcgttgcgcctgggcgaagccgcgttgtccgccatcctcaacgtcatcggcgatttgcgctga

SEQ ID NO: 50164 - DNA, 303 bp, Neisseria meningitidis
atgggctatcgtgtcggcataaattgttttgatacaagattgcaggcagacgactatttattgtcgtcccttcctcctactgttacccaggacggaaaaatcatcaggccggaaagggtgggcgataaatggattttgaacggaaagccggttacgttgtcttatccggaatgttccaattttgagcagataaagcaaggttcttacgtaggttcgacggttttaattctgttcgtagtcatttacggtttcaggctgctgattaatttcttaaaagacatgggcaaggttggtactgattga

SEQ ID NO: 50165 - DNA, 1566 bp, Neisseria meningitidis; identical to SEQ ID NO: 42664

SEQ ID NO: 50166 - DNA, 354 bp, Neisseria meningitidis; identical to SEQ ID NO: 42785

SEQ ID NO: 50167 - DNA, 798 bp, Neisseria meningitidis
atgctgaaacaacgggtgataactgctatgtggctgctgccgctgatgctgggcatgctgttttacgcgccgcaatggttgtgggctgcattttgcggactgattgccctgattgccttgtgggaatatgcccgtatgggcggcttgtgcaaaatcaaaaccaaccattacctcgccgcaaccttggttttcggcgtggttgcctatgcgggcggctggatgctgcctaatttggtttggtatgttgttttggcattttggcttgccatcatgcctttatggttgagattcaaatggaggctcaacggcggttggcaggtttatgccgtcggctggcttttggttatgccgttttggttcgcgctcgtatccctgcgcccgcatcccgatgatgccctgccgctgctcgccgtgatgggtctggtctgggttgccgacgtttgcgcgtatttcagcggcaaggcgttcggcaaacacaaaatcgcgccggcaatcagccccggcaaaagctgggaaggtgcaatcggcggcgcggtttgcgtggcagtgtacatgaccgccgtacgaagtgccggctggctggcattcgatacaggctggttcgataccgtgttaatcggtttggtgctgaccgttgtcagcgtatgcggcgaccttttggaaagctggctcaagcgcgcggcaggcatcaaagacagcagcaagctgctgcccggacacggcggcgtgttcgaccgtaccgacagcctgattgccgttatcagcgtctatgcagcgatgatgtcggttttaaattga

SEQ ID NO: 50168 - DNA, 642 bp, Neisseria meningitidis; identical to SEQ ID NO: 42771

SEQ ID NO: 50169 - DNA, 426 bp, Neisseria meningitidis; identical to SEQ ID NO: 42184

SEQ ID NO: 50170 - DNA, 1677 bp, Neisseria meningitidis; identical to SEQ ID NO: 43690

SEQ ID NO: 50171 - DNA, 1569 bp, Neisseria meningitidis
atgaaacaccgtactttcttttccctttgcgccaagttcggctgcctgcttgcgctgggtgcttgttcgcccaaaatcgtcgatgccggagccgcgaccgtgccgcacactttatccactttgaaaaccgcagacaaccgccccgccagtgtttacttgaaaaaagacaaaccgacgctgattaaattttgggcaagctggtgtcctttgtgtctgtccgaattgggacagaccgaaaaatgggcgcaagatgcaaaattcagctccgccaacctgattaccgtcgcgtctccgggctttttgcacgagaaaaaagacggcgacttccaaaaatggtatgccggtttgaattatcccaagctgcccgtcgtaaccgacaacggcggcacgatcgcccaaagcctgaatatcagcgtttacccttcgtgggcgttaatcggtaaagacggcgacgtgcagcgcatcgtcaaaggcagcatcaacgaagcgcaggcgttggcgttaatccgcgacccgaatgccgatttgggcagcttgaaacattcgttctacaaacccgacactcagaaaaaggattcaaaaatcatgaacacgcgcaccatttacctcgccggcggctgcttctggggcttggaagcctatttccaacgcatcgacggcgtggttgacgcggtatccggctacgccaacggcaacacgaaaaatccgagctatgaagacgtgtcctaccgccatacgggccacgccgaaaccgttaaagtgacctacgatgccgacaaactcagcctagacgacatcctgcaatatttcttccgcgtcgttgatccgaccagcctcaacaaacagggcaacgacaccggtacgcaataccgcagcggcgtgtactacaccgaccccgccgaaaaagccgtcatcgccgccgccctcaaacgcgagcagcaaaaataccaactgcccctcgttgttgaaaacgagccgctgaaaaacttctacgatgccgaggaataccatcaggactacctgattaaaaaccccaacggctactgccacatcgatatccgcaaagccgacgaaccgctgccgggcaaaaccaagaccgccccgcaaggcaaaggcttcgatgcggcaacgtataaaaaaccgagtgacgccgaactcaaacgcaccctgaccgaagagcaataccaagttacccaaaacagcgcgaccgaatatgccttcagccacgaatacgaccatttgttcaaacccggcatttatgtggacgttgtcagcggcgaacctttgttcagctccgccgacaaatatgattccggctgcggctggccgagcttcacgcgcccgattgatgcaaaatccgttaccgaacacgatgatttcagctacaacatgcgccgcaccgaagtgcgcagccacgccgccgactcacacttggggcacgtcttccccgacggcccgcgcgacaaaggcggactgcgctactgcatcaacggcgcgagcttgaaattcatcccgctggaacaaatggacgcggcaggctacggcgcgttgaagagtaaagtgaaataa

SEQ ID NO: 50172 - DNA, 3210 bp, Neisseria meningitidis
atgttttatctgtatcaatccaaccgtcttgaaacgctggcggcactgtttgcccgcattcaaaaagtcaaaccgctgaaatcggttttacagcccgaacagattattgtgcagagtcaggggatgcgccgctacctcaatacctgcctcgcccgcgatttgggcgtggcggcgaatttgtcgttcagcctgcccgccggtctgacgtggaagctgatgaaaaaactgattcccggtattccggaactcagcccgtttgcgcctgaagtgatgcgctggcggctgttggatttgttccgcagcgaggcatttcggaatacggcagaatttgaagatgtgaggaatgtgctgcaagactatctaggcagcggcgaatcggcagattatcagcttgcgggacagcttgcggacatattcgaccaataccttgtctatcgtccgcagtggatagacgcgtggcagcagggcaggatactcagtttgggcgacgacgaaatctggcagtccaaactgtggcgttacctcgacgatggcaggcagagcgcgccgcaccgtgtcgcgttgtgggaaaagctgttggaatctttaagcagtgataagctgcccgagcgttatttcgtgttcggcatttccacgatggcgccgatgtatttgcagcttttgcacaagctgtccgaacattgcgatgtgttcgtgtttgcactcaatccgagtgggatgtattggggcaacgtcatcgaagcggcgcaaatcctcaaaggcggcggcgatcccgatttaactcaggcagggcatccgctgctcgcctcattgggcaagcaggggcgcgactttttcgactttttgaacgaaatggaaatagaaggagaaacgccggtatttgaagaaggcgggcgcgatacgcttttgcacgccctgcaaaccgatattcaaaacctgaaaatgccgtctgaaaatgtgggaagcgtcggtacggatgacggttcgatacgtatcgtctccgcgcacagccctttgcgcgaattgcagatactcaaagacaagctgttgaaaattctgcatgaacatcccgattggcagccgcatgatatcgccgtattaaccccgaatatcgaatcctatacgccttttatcgaggccgtgttcggacaggcgcagcccggtgcgcaggcattgccgtattccgtttcggacgtgaaaataagccgccgacaaccgctgtttcatgctttgtcatgcctgttcgacttgttggaaagccgatttgaagtcgataaagtgcttgtgcttttagaaaccgcacccgtgttgcgccgtttcggactgactgaggacgatttgccgcttttgcacgacatggttgccgatttgaacgtccgctggggtttggacggagaaatgcgcggcggcacggatcagctgtttacctggaagcaggcggtagaacgcatgatattgggctggatgctgcccgaaggcggcaatccgatgtggcaggatgtcagcgcgtggtatgccgacgtgaatcaaaccgccatgttcggacgttttgccgccttcctcgaaaccctgtcggatattgtacggatatggcggcaacctgcgacggttgatgaatgggtaggacgttgccgaggtttgcttaaaacattgttccaagccgaagccgatgaccaaaaggcagtccaaaacctcgaaaacgaatgggtcaaatggcaggcggaaaccgaattggcgcaattttccggacagttgccgccgcacaccgtcatccgccacatccgccgctttctcgacagcgaaagcgaggcaggctttttacgcggcggcatcaccttttgcagtatggtgccgatgcggagcctgccctttaaagtcatctgtctgttgggtttgaacgacggagattttccccgcaataccaaagccgccgtattcgacctgattgccaaacatcccgccaaaggcgaccgcgcccgccgcgacgacgaccgctacctcttcctcgaagccctcatcagcgcgcgtgaaatcctgtacctgtcctacatcgggcgcgacatccgcaaagacgaagaactggctccgtcttctttgttgggcgaactcatcgacacagttgccgccatgaccggcacaaacagccgccaacttgcacaaaacctgatagaacagcatccgctgcaagccttctcgcgccgatattttcaagaaggcggacgttcagacggcatattcggcacgcgtaccgactacgccgccgcgctcggacaaacgcccgaaccgccgcaaccctttttcgaccaatccgtagaaaacgccgaacctgttgccgaaatcggacaggacgaatttatccgcttctggcgcaaccctgtcaaagtatggcttcagcagcagcttgcgtggagcgaaccccatatcggcgaagcttgggagcctgccgaacccttcgagccgcaacacgccgatcaaatcgccgaaacctacatcgaagcacggcgcgaaggacgggattttgcccaaaccgccgcccgcatcggggcggaaagcctcctgccgtcgggagagttgggcagactttggcagcaggacttccaaaccgctgccaaacaaatcgacacggcggttttaaacagccccaaactgccaccgctttcatatgccataccgtcggacgggcaaatcctgaaaggcagcttgggcaatctgtaccgctgcggacaagtgttttacgcctacggcaaacccaacgcgccgcaacgtatcgcttttctgctggaacacctgatattttgcgccgttatgccgtctgaagccgaaacgcggcaaacctttatcgtccaatccggagaaaccgaaatattggcggaaatcgcgcaagacagggcattgcagctattgtcggaatggatggcgtttttcaatatcgggcaaaaccgcccgctgccgttttttgccaagacctcgcttgccgctgccgaagcgtttgcccaaaaacaagattgggaagccgccctgaaaaaagcccaaaccgcctattacggcaacaaagtcagcaaagggcagaaagactataccgaagtcgccctcgtgttcggcaacgcaagccaaaacccactcgaacaacccctgtttgaaaacctcgcccgcctgcttgccgacacgtttgccgcagcggaaaaaaaggaagaggccggagcagcctga

SEQ ID NO: 50173 - DNA, 906 bp, Neisseria meningitidis; identical to SEQ ID NO: 38587

SEQ ID NO: 50174 - DNA, 903 bp, Neisseria meningitidis; identical to SEQ ID NO: 38685

SEQ ID NO: 50175 - DNA, 660 bp, Neisseria meningitidis
atgtcaaaccaaaaagccttggtcatcttttcgggcggtcaggattcgaccacctgcctgattcaggcaatccaaatctacgggcgcgaaaacgtccaagccattactttccaatacgggcaacgccatgccgtcgagctggaacgtgccagctggattgcgcaggatttgggcgtcaaacaaaccgtactcgacttgagcctgatgcggcagattacgcacaatgccctgatggacgacaccgccgccatcgaaactgccgaaaacggcgttccgaatacctttgtagacggccgcaacgcgcttttcctgctctatgccgcgatttacgccaaagggcaggggatacggcacatcatcgcgggcgtgtgcgaaaccgacttctccggctatcctgactgccgcgacgtgttcgtcaaatccatgaacgttacccttaatctggcgatggactatgatttccaaatccacacgccgctgatgtatctgaccaaggcgcaaacttgggcgttggcggacgaaatgggcgcgctggactatatccgcgagcaaacccacacctgctataacggcatcgtcggcggctgccgcgaatgcccgagctgtatcttgcgcgaacgcgggctggcggaatatctggaaagtaaaaaggccgtctga

SEQ ID NO: 50176 - DNA, 546 bp, Neisseria meningitidis
ttgatattggcggttgccttgggcagcctgtcggcatggttgggacgcatcagcgaagtcgagattgaagaagtcaggctcaatcccgacgaaccgcaatacacaatggacggattggatggcaggcggtttgacgaacagggatacttaaaagaacatttgagcgcgaaaggcgcgaaacagtttcccgaaagcagcgacatccattttgattcgccgcatctcgtgttcttccaagaaggcaggttgttgtacgaagtcggcagcgatgaagccgtttaccataccgaaaacaaacaggttctttttaaaaacaacgttgtgctgaccaaaaccgccgacggcaaacggcaggcgggtaaagttgaagccgaaaagctgcatgtcgataccgaatctcaatatgcccaaaccgatacgcctgtcagtttccaatatggtgcatcgcacggtcaggcgggcggcatgacttacgaccacaaaacaggcatgttgaacttctcatctaaagtgaaagccacgatttatgatacaaaagatatgtaa

SEQ ID NO: 50177 - DNA, 357 bp, Neisseria meningitidis
atgttgtccgcttactttcccgtctttgtctttatccttgtcggtcttgcagccggcgtactgtttatcctgctcggcacaattttgggcccgaaacgtcactatgccgaaaaagacgcgccttacgaatgcggttttgaagcctttgaaaacgcaaggatgaagttcgacgtgcgctattacctcgtcgccatcctcttcatcctgtttgatttggaggtcgcgtttatgctgccgtgggctgtcgtgttcaaagatttgggcgtgtacggcttctggtctatgctggtgtttatcgtcgttctgacggtaggctttgtttacgaatggaaaaaaggtgcgctggaatgggaatag

SEQ ID NO: 50178 - DNA, 585 bp, Neisseria meningitidis
atgatcagcagactgaccggcaaactggttgaaaaaaaccctccgcaaatcgtcatcgatgtcaacggtgtcggctatgaggccgacgtatcgatgcagaccttctacaacctgccgcccgtgggtgaaagcgtacaactgtttacccagcttatcattcgggaagacgcacatcttttatttggttttgccactgcggaagaacgcaaaacattccgccaactgattaaggtcagcggcatcggcgcgaaaacggctttgggcattttgtcggcgatgacggcagacgagctggcgcaggcggttgcagaagaagatgtcaaacgcctctcctccgccccgggaatcggcaaaaaaaccgccgaacgtatggtcttggaactgcgcggcaagctggtcgcgcatacggtaacggacgggctgtttgccgccgcacccgccgccgacgaaacggaagacatcgtcagcacgctgcttgcgctgggttacagcgaacgcgaagcaaaagcggcggtcaaaggcgttccggaggggacggacgtgggcgaaggcgtgcgccttgctttgaaaaacctgctgaaataa

SEQ ID NO: 50179 - DNA, 1497 bp, Neisseria meningitidis; identical to SEQ ID NO: 42847

SEQ ID NO: 50180 - DNA, 2043 bp, Neisseria meningitidis
atgatgtcgcccgaaacccagaaacagctcaaaatcaccgatgtttccgccaagaagctcgacaaactcaacctccataccgcgtgggatttggtgttgcacctgccgctgcgttacgaggacgagacgcacattatgccgattaaggacgcgccgattggcgtgccgtgccaggtcgagggcgaggttatccatcaggaagtaacgttcaaaccgcgcaagcagttgattgtccaaatcgccgacggttccggcagcgtcctttttctgcgcttcatccacttttacgccagccatcagaaacagacggcggtcggcaaacgcatccgcgccgtgggcgaaatcaaacacggcttttacggcgacgagatgattcatcccaaaatccgcgatgccgagggcggcggtttggcggaaagcctcacgccggtttacccgaccgtaaacggtttgaaccagcccactttgcgccgtattattcagacagcgttggacgttacgccgctgcacgacacgctgcccgatgccctgctgtgccgtctgaagctgccacacctcgccgaaagcctgcgtcttttgcattcgccgccgccgagtttcacgattcatcagctttcagacggcacgctgcctgcatggcaacggctcaaattcgatgaacttttggcgcaacagctttcgatgcgcttggcgcgacagaagcgtatcggcggcacggcggcggcattgggcggcgacggcacattgacccaagccctgcgccaagccctgccgtttgccctgaccgatgcgcaagaaaaagttgtttccgaaatctgccgcgatatggcgcaaacctacccgatgcaccgcctgctgcagggcgatgtcggcagcggcaaaaccattgtggctgctttgtctgctttgacggctatcgaatccggtgcgcaggtggctgtaatggcgcccactgaaatccttgccgaacagcattttattaaatttaaacaatggctcgaacctttgggcattgaagttgtccgcctttttggcagtttgcgtaaaaaagccaaagacgaagccaaagccaaactcgctgacggcagcgtcaaaatcgccgtcggcacgcacgccctgttttcagacggcgtggcgtttcacaatttgggcttgaccattgtggacgaacagcaccgtttcggcgttgcccaacgcctcgccctcaaaaacaaagggcgcgaagtccatcagctgatgatgtccgccacgcccatcccgcgcacgcttgcgatgagttttttcgccgatttggacgtgtccgtcatcgacgaattgccgcccgggcgcacaccgattaaaacgcgcctcgtcaacaacgtccgccgcgccgaagtcgaaggcttcgtcctcggcacttgccgaaaagggcggcaggcgtattgggtctgcccattgattgaagaaagcgaaaccctgcaactgcaaaccgccgccgaaaccctcgcccggcttcagacggcattgcccgaactcaatatcggactggtacacgggcgcatgaaggccgccgaaaaggccgaagtgatggcgcggttttcttcgggggggctgaacgtcttggtcgccaccaccgtcatcgaagtcggcgtagatgtgcccaatgccgccctgatggtcatcgaacacgccgagcgcatgggcttggcgcagcttcaccaattacgcggacgggtagggcgcggcgcggcggaaagcgtgtgcgtcctcctgtttgccgaacccttgggcgaactcgccaaagcgcggctgaaagtcatctacgaacacaccgacggctttgaaatcgcccgccaagacctcaacatccgcggccccggcgaatttctcggcgcgcgccaaagcggcgtgcctatgctgcgtttcgccaagctcgaagaagacctgcacctcttggaacaagcgcgcgaaaccgccccgatgctgattgaacaaaaccccgaaatcgtcgaagcgcatttggcaaggtggctttccggcagggaagggtatttgggcgtgtga

SEQ ID NO: 50181 - DNA, 2037 bp, Neisseria meningitidis
atgactgacaacgcactgctccacttgggcgaagaaccccgttttgatcaaatcaaaaccgaagacatcaaacccgccctgcaaaccgccattgccgaagcgcgcgaacaaatcgccgccatcaaagcccaaacgcacaccggctgggcgaacaccgtcgagcgtctgaccggcatcaccgagcgcgtcggcaggatttggggcgtggtgtcgcacctcaactccgtcgccgacacgcccgaactgcgcgccgtctataacgaactgatgcccgaaatcaccgtcttcttcaccgaaatcggacaagacatcgagctgtacaaccgcttcaaaaccatcaaaaactcccccgagttcgacaccctctcccccgcgcaaaaaaccaaactcaaccacgatctgcgcgatttcgtcctcagcggcgcggaactgccgcccgaacagcaggcagaactggcaaaactgcaaaccgaaggcgcgcaactttccgccaaattctcccaaaacgtcctagacgcgaccgacgcgttcggcatttactttgacgatgccgcaccgcttgccggcattcccgaagacgcgctcgccatgtttgccgccgccgcgcaaagcgaaagcaaaacaggctacaaaatcggcttgcagattccacactacctcgccgtcatccaatacgccgacaaccgcgaactgcgcgaacaaatctaccgcgcctacgttacccgcgccagcgaactttcagacgacggcaaattcgacaacaccgccaacatcgaccgcacgctcgcaaacgccctgcaaaccgccaaactgctcggcttcaaaaactacgccgaattgtcgctggcaaccaaaatggcggacacgcccgaacaagttttaaacttcctgcacgacctcgcccgccgcgccaaaccctacgccgaaaaagacctcgccgaagtcaaagccttcgcccgcgaaagcctgaacctcgccgatttgcaaccgtgggacttgggctacgccagcgaaaaactgcgcgaagccaaatacgcgttcagcgaaaccgaagtcaaaaaatacttccccgtcggcaaagtattaaacggactgttcgcccaaatcaaaaaactctacggcatcggatttaccgaaaaaaccgtccccgtctggcacaaagacgtgcgctattttgaattgcaacaaaacggcgaaaccataggcggcgtttatatggatttgtacgcacgcgaaggcaaacgcggcggcgcgtggatgaacgactacaaaggtcgccgccgtttttcagacggcacgctgcaactgcccaccgcctacctcgtctgcaacttcgccccgcccgtcggcggcagagaagcgcgtttgagccacgacgaaatcctcatcctcttccacgaaaccggacacgggctgcaccacctgcttacccaagtggacgaactgggcgtatccggcatcaacggcgtagaatgggacgcagtcgaactgcccagccagtttatggaaaatttcgtctgggaatacgacgtcttggcacaaatgtccgcccacgaagaaaccggcgttcccctgccgaaagaactcttcgacaaaatgctcgccgccaaaaacttccaacgcggcatgttcctcgtccggcaaatggagttcgccctctttgatatgatgatttacagcgaagacgacgaaggccgtctgaaaaactggcaacaggttttagacagcgtgcgcaaagaagtcgccgtcatccaaccgcccgaatacaaccgcttcgccttgagcttcggccacatcttcgcaggcggctattccgcaggctattacagctacgcgtgggcggaagtattgagcgcggacgcatacgccgcctttgaagaaagcgacgatgtcgccgccacaggcaaacgcttttggcaggaaatcctcgccgtcggcggatcgcgcagcgcggcagaatccttcaaagccttccgcggacgcgaaccgcgcatagacgcactcttgcgccacagcggtttcgacaacgcggcttga

SEQ ID NO: 50182 - DNA, 990 bp, Neisseria meningitidis
atgagcaccttctttcagcaaaccgcacaagccatgattgccaaacacatcgaccgcttcccgctattgaagttggaccaggtgattgattggcagccgatcgagcagtacctgaaccgtcaaaaaacccgttacctccgagaccaccgcggccgtcccgcctacccgctgttgtccatgttcaaagccgtcctgctcggacaatggcacagcctctccgatcccgaactcgaacacagcctcatcacccgcatcgatttcaacctgttttgccgttttgacgaactaagcatccccgattacagtactttatgccgttaccgcaattggctggcgcaagacgacaccctgtccgaactgctcaaactgattaactgccaactgaccgaaaaaggtttaaaaatagagaaagcatccgccgctgttgttgatgccaccattattcagaccgccggcagcaaacagcgccaggccatagaagttgacgaagaaggacaaatcagcagccaaaccacaccgagtaaggacagcgatgctcgttggatcaagaaaaacggcctctacaaactcggttacaaacaacatacccgtaccgatgcagaaggctatatcgagaaactgcacattacccccgccaatgccaatgagtgcaaacacctgtcgccgttgttggaaggactgcccgaaggtacgaccgtctatgccgacaaaggctatgacagtgcggaaaaccggcaacatctggaagagcgtcagttgttagacggcattatgcgcaaagcctgccgcaaccgtccgctgtcggaaacgcaaaccaaacgcaaccgttatgtggtcgaacaaagcttcggtacgttacaccgtaagttccgctatgcgcgggcagcctatttcggactgattaaagtgagtgcgcaaagccatctgaaggcgatgtgtttgaacctgttgaaagccgccaacaggctaagtgcgcccgctgccgcctaa

SEQ ID NO: 50183 - DNA, 2151 bp, Neisseria meningitidis; identical to SEQ ID NO: 42592

SEQ ID NO: 50184 - DNA, 1227 bp, Neisseria meningitidis; identical to SEQ ID NO: 43663

SEQ ID NO: 50185 - DNA, 474 bp, Neisseria meningitidis
ttgatagataccatacaggacaagatggaacaggtaaaaatagccatatccgaacaaatcaaaaaacaaacggacaataaccattaccgcaatcttcaaaccatcccgagcataggcaaagacaccgcatcagttctttatgcgcaactgacagaaaaacattttaaaaccgcaaaccagtttgtatcctatgccggattaagtcccgccatcatgcaatcagggacaagcgtaagaggtcggggcagattgagccgatacggaaacagacgattaaaaagtacgctgtatatgcccgccctttgtgcttaccgttttaacgcatttccgaaattaataaataatctgaaaaaagcgggtaagccaaagatggtaatcatcgttgccatcatgcgcaaactggcgaagctcgcctattacattgttaaaaccggccagccttacgatgcggaaagacaccgattgaatcaataa

SEQ ID NO: 50186 - DNA, 693 bp, Neisseria meningitidis; identical to SEQ ID NO: 40219

SEQ ID NO: 50187 - DNA, 321 bp, Neisseria meningitidis; identical to SEQ ID NO: 41574

SEQ ID NO: 50188 - DNA, 405 bp, Neisseria meningitidis; identical to SEQ ID NO: 43748

SEQ ID NO: 50189 - DNA, 738 bp, Neisseria meningitidis; identical to SEQ ID NO: 40223

SEQ ID NO: 50190 - DNA, 438 bp, Neisseria meningitidis
atgatagggcttttaatcatcacacacgaaaccataggcgaagcctaccgcaagctggcacatcatttttttccgggcggactgcctgaaaacgtccgcatactcggcgtgcaaccgacggaagaccaagacgatatcatcaacaacgccattgccgcgcttcaggagtttcccgacaacgacggcgtgctaattatgaccgatattttcggcgcgaccccctgcaatgcagcccgccgcctcgtgcgcgaaaacaaatcggcgattttgaccgggctgaacgcgccgatgatggttaaggccgtccaatattcgccggcggcggaagaccttgccgcctttaccgaatgcgtcagggaggcggcggtaaaaggcattttcgccatcacgtccgcgcccgaagatttggtgtgccggcgcagcggcgatgccgtctga

SEQ ID NO: 50191 - DNA, 942 bp, Neisseria meningitidis
atgaaaaccctgctcctcctcatccccctcgtcctcacagcctgcggcacactgaccggcatacccgcccacggcggcggcaaacgctttgccgtcgaacaagaactcgtcgccgcatcgtcccgcgccgccgtcaaagaaatggatttgtccgccctgaaaggacgcaaagccgccctttacgtttccgttatgggcgaccaaggttcgggcaacataagcggcggacgctactctatcgacgcactgatacgcggcggctaccacaacaaccccgaaagtgccacccaatacagctaccccgcctacgacactaccgccaccaccaaagccgacgcgctctccagcgtaaccacttccacatcgcttttgaacgcccccgccgccgccctgacgaaaaacagcggacgcaaaggcgaacgctccgccggactgtccgtcaacggcacgggcgactaccgcaacgaaaccctgctcgccaacccccgcgacgtttccttcctgaccaacctcatccaaaccgtcttctacctgcgcggcatcgaagtcgtaccgcccgaatacgccgacaccgacgtattcgtaaccgtcgacgtattcggcaccgtccgcagccgtaccgaactgcacctctacaacgccgaaacccttaaagcccaaaccaagctcgaatatttcgccgtcgaccgcgacagccggaaactgctgattgcccctaaaaccgccgcctacgaatcccaataccaagaacaatacgccctttggaccggcccttacaaagtcagcaaaaccgtcaaagcctcagaccgcctgatggtcgatttctccgacatcaccccctacggtgacacaaccgcccaaaaccgtcccgacttcaaacaaaacaacggtaaaaaccccgatgtcggcaacgaagtcatccgccgccgcaaaggaggataa

SEQ ID NO: 50192 - DNA, 387 bp, Neisseria meningitidis
atgaaaaacgttcaaaaaggctttacgctgctcgagctgatgattgccgtcgccatcctcggcatcctgacgctcatcacctacccttcctataaaacctacatccggcgcgtccgcctgtcggaagtcaaatccaccctgctgatgaacgcgcaaaacttggagcgttactaccgccaaaaagggacgtttgacaactacgaccaaaccaaactgaaacaaaacaaatatttcaagattaccttaagcaaaagccccgaccacttcacccttcaggccgcccccgatccgatgaccaacgaaggcgaaacctgcatcgttacgctcaacgacggcggcacactgtccgccgccggcagcgggcaggactgcccggacttcgactaa

SEQ ID NO: 50193 - DNA, 549 bp, Neisseria meningitidis
atggactataaccaaactgttttatctcacttgcaaaaattttggaaacatcatgatattaaaggatttacttggactttaggaagaattgttgaagaacttcccgatttccaagttttccaagtgattcctaatcatgaagatgagccttgggtttatgtcagctctgggataggtcaatttttagggcaggagttttttatcatcagcccgtttgaaacacctgaacatattgagaccttggcaatgctggcatctgcaagtatgcattatcctgatcaatttcaattagggaaaaccgtcaatatcggtagaccgtgggtcgagcaatcatccttccggcattttctgatttctctgccttatccttatgggcaagagttggaatatatggataatgtccgatttttctggttattgccaattacccagacagaaagacttttcttgaatactcattcggtagaagaattggaaacgaaatttgatgaagcgggtattgattatttagatataaatcgtgcgagtactgtctggcaggcaggataa

SEQ ID NO: 50194 - DNA, 288 bp, Neisseria meningitidis
  misc_feature 265, 266, 267, 268, 269: 'n' is a, c, g or t
atggaaaaacatagcctgtttttccggttttatcgtattattccaaaacttaccccattgataagggagcggtttatgctgcaaagaactttggcgaaatccatcagcgttaccggagtcgggctgcattccggcgaacgggtcgcactgaccctgcaccccgcgcctgaaaacagcgggatttccttccgccgtaccgatttggacggcgagatgggcgaacaaatcaaactgaccccttatttgatcaacgatacccgccttnnnnncacacacttaattaattaa

SEQ ID NO: 50195 - DNA, 4179 bp, Neisseria meningitidis
atgagctattcgtttaccgagaaaaaacgtatccgtaagagttttgcaaagcgggaaaatgttttggaagttcctttcttgctggcaacccaaattgattcttatgcgaagtttttgcagctggaaaatgcttttgacaaacgtaccgatgacggtctgcaggcagcatttaattctattttcccgattgtgagccataacggttatgcgcgattggagtttgtgcattacacattgggcgagcctttgttcgatattcccgaatgtcagttgcgcggaatcacttatgcagcccccttgcgcgcgcgtatccgtttggtgattttggataaggaagcatctaaaccgacggtaaaagaagttcgtgaaaacgaagtgtatatgggcgaaattccgttgatgaccccgagcggttcttttgtgattaacggcacagagcgtgtgattgtctcccagttgcaccgttcgcccggcgtattcttcgagcatgacaaaggtaagacgcactcttccggcaaattgttattctccgcccgcatcattccctaccgtggttcatggttggattttgaatttgatccgaaagatttgctgtatttccgtatcgaccgccgccgtaaaatgccggtaacgattttgttgaaggctttgggctacaacaatgagcaaatcttggatattttctacgacaaagaaacgttctatttgtcttcaaacggtgttcaaaccgatttggtcgcaggccgtctgaaaggcgaaactgccaaggtcgatatcttggataaagaaggcaatgtattggttgccaaaggtaagcgtattactgcgaaaaatatccgtgatattaccaatgcaggcctgacccgtttggatgtagaaccggaaagcctgctgggcaaagcattggctgccgatctgattgattcggaaaccggcgaggtattggcttctgccaatgatgaaattacagaagagttgttggccaaatttgatatcaacggcgtaaaagaaattacgaccctttacatcaatgagttggatcagggtgcttatatctccaataccttgcgcacggatgagactgccggccggcaggcggcgcgtgttgcgatttaccgtatgatgcgtccgggcgaaccgcccaccgaagaggcagtcgagcaattgtttaaccgcttgttcttcagtgaagacagctacgatttgtcccgcgtaggtcgtatgaaatttaatacgcgcacatacgaacaaaaactgtccgaagcccaacaaaactcttggtacggccgcctgctgaacgaaacgtttgccggtgctgccgaaaaaggcggttatgtcctgagcgtcgaagatattgtcgcctcgattgcgactttggtcgagttgcgtaacggccatggtgaagttgacgatatcgatcacttgggcaaccgccgagtacgttcggtaggcgagctgactgaaaaccaattccgcagcggtttggcccgtgtggaacgtgctgtaaaagaacgtttgaatcaggcggaatcagaaaacttgatgccgcacgatttgattaatgcaaaacctgtttctgccgctattaaagaattcttcggctccagccaattgagtcagtttatggatcagaccaaccccttgtctgaagtaacccataaacgccgcgtatctgcattgggtccgggcggtttgacccgcgaacgtgccggcttcgaggtacgggacgtgcatccgacccactacggccgcgtatgtccgattgaaacgcctgaaggtccgaacatcggtttgatcaactcattgtccgtttatgcgcgcaccaatgattacggtttcttggaaacgccttaccgccgcgttatcgacggcaaagtaaccgaggaaatcgattacttgtctgccatcgaagaaggccgctatgtgattgcacaggcgaatgccgatttggattcagatggcaatctgattggcgatttggttacctgtcgtgaaaaaggcgaaaccattatggcaacgcccgaccgcgtccaatatatggacgtggcaaccggccaggtggtatccgttgcggcatccctgattccgttcttggaacatgatgacgcgaaccgcgcattgatgggtgccaacatgcaacgtcaggcagtgccttgcttgcgtcctgaaaaaccgatggtcggtaccggtatcgagcgttccgttgccgttgactctgctactgcaatcgttgcccgccgaggcggcgtggtcgagtatgtcgatgccaaccgtgttgtgattcgtgtccatgacgacgaagcgactgccggcgaagtgggtgtcgatatttacaacttggttaaatttacccgttccaaccagtctaccaatatcaatcagcgtcctgccgtcaaagccggcgatgttttgcaacgcggcgatttggtggccgatggcgcgtccaccgatttgggcgaattggctttgggtcaaaatatgaccatcgccttcatgccgtggaacggttacaactacgaagactcgattctgatttccgaaaaagtggctgcggatgatcgttacacttcgattcacattgaggaattgaatgtcgttgcccgcgataccaagctgggtgcggaagacattacccgcgatattccgaacttgtccgagcgtatgcaaaaccgcttggacgaatccggtatcgtttacatcggtgcagaagtagaagccggcgatgtgttggtaggcaaagtaacgcctaaaggcgaaacccaactgacgccggaagaaaaactgttgcgcgccatcttcggcgaaaaagcgtctgacgtaaaagatacttcactgcgtatgcctaccggtatgagcggtacggttatcgacgttcaagtcttcactcgtgaaggtattcaacgcgacaaacgcgcccaatccattatcgattccgagttgaaacgctaccgtttggatttgaacgaccaattgcgtattttcgacaacgacgcattcgaccgtatcgaacgtatgattgtgggtcaaaaagccaatggtggtccgatgaagctggctaaaggcagcgaaattactaccgaatatttggcgggtctgccgagcaggcacgattggttcgatatccgtctgaccgatgaagatttggccaagcagttggaactgattaaagtgagcctgcaacaaaaacgcgaagaagcggacgagttatacgaaatcaagaagaaaaaactgacccaaggcgacgaattgcaacccggcgtacaaaaaatggtgaaagtttttatcgccatcaaacgccgtctgcaagccggcgacaaaatggcgggccgccacggtaacaaaggcgtggtatcgcgcattctgccagtggaagacatgccttacatggcggacggccgtccggtagacatcgtactgaacccattgggcgtaccttcccgtatgaacatcggtcagattttggaagttcacttgggttgggcagcaaaaggtatcggcgagcgtatcgaccgtatgctgaaagagcaacgcaaagcaggcgagttgcgcgagttcttgaacagactctacaacggcagcggtaagaaagaagatttggacagcctgacagatgaagaaatcatcgaattggcttccaacctgcgtaaaggtgcatctttcgcttctcctgtattcgacggtgcgaaagagtctgaaatccgcgaaatgttgaacttggcttacccaagcgaagatcctgaggttgagaaactgggcttcaacgacagtaaaactcaaatcacgctgtatgacggccgttcaggcgaagcatttgatcgcaaggttacagtcggtgtgatgcactatctgaaactgcaccacttggttgacgaaaaaatgcacgcccgttctaccggtccatacagtctggttacccaacagcctttgggcggtaaagctcagttcggtggccaacgtttcggtgagatggaggtttgggcattggaagcatacggtgcggcatacacgctgcaagagatgctgactgtgaagtctgatgacgtgaacggccgtaccaaaatgtacgagaacatcgtcaaaggcgaacacaaaatcgatgccggtatgcccgagtccttcaacgtattggtcaaagagattcgctcactgggcttggatatcgatttggaacgttactaa

SEQ ID NO: 50196 - DNA, 1071 bp, Neisseria meningitidis
atgaccaaacatatcgccatcctccgaggtgacggcatcggtcccgaaatcgtcgccgaaaccgtccgcgtactcgacaaactcatcgcccaaggtttggatgccggctacgaatacgccccattgggcggcgaagcctatgacgaatacggtcatccttatcccgaatttacgcaaaacctctgccgcaaagccgatgccgtcctgcttggtgcagtcggttctcctcaatacgacaacctcgaccgtccgttgcgccctgagcgcggcctgttggcaatccgtaaggatttgaacctgtttgccaatttgcgtcctgctgttttatatcccgaattagccaacgcctccacgctgaagcctgaaatcgttgctggtttgaatattttgattgtgcgcgaactcaccggcgacatctatttcggcgaaccgcgcggcatccgcgttctggaaaacggcgaacgcgaaggctacaacaccatgaaatacagcgaaagcgaaatccgccgcatcgcccacgtcgctttccaatccgcccaaaaacgcagcaaaaaagtctgctccgtaggcaaagccaacgttttggaaaccaccgaactgtggcgcgaaatctttgaagaaatcggcaaagagtaccctgatgtcgagctttcccatatgtacgtcgacaacgccgccatgcagctcgtgcgtgcgcccaaacaattcgacgtcattgccaccggcaacatcttcggcgacattctctccgacgaagcctccatgctgaccggctccatcggtatgctaccttccgcctcgctggacgaaaacggcaaaggcctgtacgaaccgtctcacggctccgcccccgacatcgccggacaaaacaaagccaacccgctggccaccatcctctcgctcgcaatgttgctgcgttacagcctgaacgacgaagcgcgcgcgcaacaagttgaaaacgccgtccaaaaagtgctgcaacaaggcttgcgtaccagcgacatttacgaagaaggcacaaaactcgtttcctgctccgaaatgggcgatgcggtactcgccgccttgtaa

SEQ ID NO: 50197 - DNA, 216 bp, Neisseria meningitidis
atgatggaaacccttatcctcgacatcggcggcatgagctgcggcggctgcgtcaaaagcgttacccggatattggaaggcgtaaaaggcgtggcaagcgtcgaagtcagtcttgaaaacaaaagtgcgaccgtcggatacgaccccgcgcaaaccgatgcaggggcgttgattgaagccgttgaagacggcggctatgatgccgcgttgaaataa

SEQ ID NO: 50198 - DNA, 4518 bp, Neisseria meningitidis
atgaatgagggtgaagttgttttaacaccagaacaaatccaaaccttgcgtggttatgctttccgtggcgatacctatggcggttggcgttatttggctaatttgggtgaccgttatgcggatgatgctgctgcaattgtcggtaaggatgcaaacttaaatggtttgaatttatggatgaaaaaaggtgtggaaaacctatgggatgatacggtcggtaaaaagacccgtttagagaaatttgatcgggttgcattgcaacatttcagccaatatgtagatctaattaatgaaaataatggtagattacctaacactagtgaaattgagagaagttactataaagccgttaccgaaaatggtgtttcttctagtgcagctattgatttagttattaatcgctcacttccggatatggcagatggttattgggcattaggtttggggatagaagccgaacgtatccacaatgcgcaagcagtaaataatccgaacggtagcgaatgggataatagaaagcagttaatatctgctttagataaaggatttgatggatcttttaaagagaagcattttacttttttacaatctgtgataatggatgtaacaaagttaggtgttgaatatacaatagatggttggcaaaaaattggaggttggggtaatgggataatcaatgatttatataaaagtgttgcaaaaagagagtggactggaatatttgagatcgttaataataacatcaagcaatttagagatctgttcccaaatccggaaggctggatcgatgatggtcaccaatgtttcgctccttgggttaaagaaactaaaaaacgcaatggcaaatatcatgtctacgaccccctcgccctagatttggacggagacggtatagaaaccgttgccaccaaaggctttgcaggcagcttatttgatcacaccaacaacggtatccgcaccgccaccggttgggtttctgccgatgacggtttactcgtccgcgatttgaacggcaacggcatcatcgacaacggtgcggaactcttcggcgacaacaccaaactggcagacggttcttttgccaaacacggctacgcggctttggccgaattggattcaaacggcgacaacatcatcaacgcggcagacgccgcattccaaaccctgcgtgtatggcaggatctcaaccaggacggcatttcccaagctaatgaattgcgtacccttgaagaattgggtatccaatctttggatctcgcctataaagatgtaaataaaaatctcggtaacggtaacactttggctcagcaaggcagctataccaaaacagacggtacaaccgcaaaaatgggggatttacttttagcagccgacaatctgcacagccgcttcaaagacaaagtggaactcactgccgaacaggcaaaagccgccaatcttgcgggcattggtcgtctgcgcgatttgcgcgaagctgccgcattgtccggcgatttggccaatatgctgaaagcttattctgccgccgaaactaaagaagcacagttggcattgttagataatttgattcacaaatgggcggaaaccgattcgaactggggcaaaaaatcgccaatgcgactttcaaccgattggacgcaaacggctaatgaaggtattgcactgacaccatcccaagtagcacaactaaaaaagaacgctttagtttccctttctgataaagctaaagcagctattgacgccgcccgcgagcgcattgccgtgcttgatgcctacacggggcaggattccaacacactctattacatgagcgaggaagatgcgcttaatatcgtcaaagtaaccaacgatacatacgaccatctcgccaaaaacatctaccaaaacctgttattccaaacccgtttgcagccatatttgaatcaaatcagtttcaaaatggaaaatgatacgttcactttggattttagtggtcttgttcaagcatttaaccatgtcaaagaaactaatccgcaaaaagcttttgtggatttggccgagatgcttgcatatggcgaacttcgttcttggtatgaaggccgaagactaatggccgattatgtggaggaggcaaaaaaagcaggtaaatttgaagattaccagaaagtgttgggtcaggagaccgttgcattattagctaaaacatcgggtacgcaagcagatgatatcctgcaaaatgtaggctttggtcataataaaaatgtttctttatatggtaatgacggcaacgacactctgatcggcggtgcaggcaatgattacttggagggcggcagcggttcggatacttatgtcttcggcgaaggcttcggtcaggatacggtctataattacgactacgctaccggacgcaaagacatcatccgctttaccgacggtattacagccgatatgctgacttttacccgagagggcaaccatcttcttatcaaggcaaaagacggcagtggacaagtgactgttcagtcctatttccagaacgatggctcaggtgcttaccgtatcgatgagattcatttcgataacggcaaagtactggatgttgccactgtcaaagaactggtacagcaatccaccgacggttcggacagattgtatgcctaccaatccggaaataccttaaatggcggattgggcgatgactatctgtacggtgccgacggggatgacctgctgaatggtgatgcaggcaacgacagtatctacagtggcaatggcaatgatacgctcaatggaggagaaggcaacgacgccctgtacggctataatggtaacgatgcactgaatggtggcgaaggcaatgatcatttgaacggcgaagacggtaacgacactctgatcggcggtgccggtaatgattacttggagggcggcagcggttcggatacttatgtcttcggcaaaggcttcggtcaggatactcaggatacggtctataattacgactacgctaccggacgcaaagacatcatccgctttaccgacggtattacagccgatatgctgacttttacccgagagggcaaccatcttcttatcaaggcaaaagacggcagtggacaagtgactgttcagtcctatttccagaacgatggctcaggtgcttaccgtatcgatgagattcatttcgataacggcaaagtactggatgttgccactgtcaaagaactggtacagcaatccaccgacggttcggacagattgtatgcctaccaatccggaaataccttaaatggcggattgggcgatgactatctgtacggtgccgacggggatgacctgctgaatggtgatgcaggcaacgacagtatctacagtggcaatggcaatgatacgctcaatggaggagaaggcaacgacgccctgtacggctataatggtaacgatgtactgaatggtggcgaaggcaatgatcatttgaacggcgaagacggtaacgacactctaatcggcggtgcaggcaatgattacttggagggcggcagcggttcggatacttatgtcttcggcaaaggcttcggtcaggatgcggtctataattacgactacgctaccggacgcaaagacatcatccgctttaccgacggtattacagccgatatgctgacttttacccgagagggcaaccatcttcttatcaaggcaaaagacggcagtggacaagtgactgttcagtcctatttccagaacgatggctcaggtgcttaccgtatcgacgagattcatttcgataacggcaaagtactggatgttgccactgtcaaagaactggtacagcaatccaccgacggttcggacagattgtatgcctaccaatccggaaataccttaaatggcggattgggcgatgactatctgtacggtgccgacggggatgacctgctgaatggtgatgcaggcaacgacagtatctacagtggcaatggcaatgatacgctcaatggaggagaaggcaacgacgccctgtacggctataatggtaacgatgtactgaatggtggcgaaggcaatgatcatttgaacggcgaagacggtaacgacactctgatcggcggtgccggtaatgattacttggagggcggcagcggttcggatacttatgtcttcggcaaaggcttcggtcaggatacggtctataattaccatgtggataaaaactctgacactatgcactttaaaggatttaaagcagcagatgttcattttatccgttccggaagtgatttggtgcttagcgcttctgaacaagacaacgtacgtatttccggattcttctatggtgaaaaccatcgtgtagatacatttgtctttgatgatgcagctatcagtaatccagattttgccaagtatattaatgctggcaataatttggtacagtctatgtctgtgttcggttctaatactgctgcgacaggaggaaatgtggatgccaatacacaatccgtacagcagccgttattggtaacgccatctgcataa

SEQ ID NO: 50199 - DNA, 1518 bp, Neisseria meningitidis
atggtgatttccaacccccgcgaacttgaaaaactcaaagaccggattcccaatctgatcaacatcatccgcgtcgccatcgtttttccgctgatgattatgcacatcctcgggctggaaaccggcagccgtgcgaacctgcacgcttcgtggacggcgtgggcgttttatgtttggctcgccattgcctgctggctgattttcttttccatcatccatccgcattggcaatggcaggctttgaagataccgagtttcagcgccgtgtccgacattaccatgattggcatactgacctacctgttcggcggcatcaactcggggttcggcatcctgatcctgcccttcgtgggcagctcctgcctgctcagttacgggcgttaccccctgctctatgccagctacgccgccatcctgctgatattgaatgcccttgcagacagcaatatcaatatgtatccgctgattttggatgcaaaaaccgtcaccaacaccttcgtcctcgtgaccggctcctatttcgtcgccatgattgcctcgctgtcggtcagatacatcgaccgtgccggcaaacttgcccatgaaaaccacgccgcctaccgccgcatcaggggcttgaaccaaatcgtgctcaaccgcgttcaggaagcggtcgtcatcatcaacgtcgagtatcagaccgtactgttcaataaaaaggcaaaagatctgctccccacgcttgaaatcggacagcataccgccctgttcgaccctattaccgttttatgggacaaggccccttcgcgtactttcgaacgcaatatcgacacgcccgccctgaccgcccgcatccgcgccgtgccgatgaacaaagagcagaacaagctgctcatcctctacatccgcccgcaaagcgaaattcaggcagaagccctgtccgtcaaacttgccgcgctcggacaactgaccgccaacatcgcccacgaaatccgcaaccccatgtccgccatccgccatgcaaacgacctgttgcgcgaaaatatggaagcgggggcggcagatccgttcaacgccaaattgtgcaaaatcatcgacggcaacgtctgccgtatcgacaaaatgctcgaagatatttcctcgctcaacaagcgcaacaaaaccgaacgcgaaaccatcggcctgataccgttttgggaagaattcaaacaagagttcctgctcggccatcccgatgccgccggctgcatccgcctagatatgcagggcaatcacctgactgcctatttcgatcctgcccacctgcggcaaattatgtggaacctcgccaacaacgcgtggcggcacagccgcaaacagcccggctcgatttccgtcaccatccgccccgcgcaaaaaaacaccgtctgtatcctctttgccgaccgcccgaagtgcaggaacacctgttcgaacccttttacaccacggcggaaaacggcaccggcctcgggctgtatgtcgcccgcgaactggcgcacgccaatttcggcgatttga

SEQ ID NO: 50200 - DNA, 225 bp, Neisseria meningitidis; identical to SEQ ID NO: 42454

SEQ ID NO: 50201 - DNA, 222 bp, Neisseria meningitidis
atgaacttcctattgtccaaactcctgctgggactgatacggttctaccaatattgcatcagcccgctgattccgccgcgctgccgttatacgccgacctgttcgcaatacgcggtcgaagcggtcaaaaaatacggcgcattcaaaggcggccggctcgccatcaagcgcattgcacgctgccaccctttcggcggacacggacacgaccccgttccctga

SEQ ID NO: 50202 - DNA, 1404 bp, Neisseria meningitidis
atgaacaatcccgacttaccctatcggcaggccttagaatgcctgtctcaaaaacaatataactttaccgaagtccgccgactgctgacagaagcgttctcggcaggtcatcccgccgccgcattcgagttggcaaaacacctgatggacgcggacagcccctaccaagaccgcgaacaaggtatggaaatgctccgcatcgccgccgaacaggggcatccctatgcgcgttacaatctggcatatatccaagaattggaaggcgcgcccccggaaaccctgataccgctttacagaccgttggcagaggaaggactgcctgaagcacaagtccgcctgatgtaccttctgtatgcgtcccgacattttgaagaagccctgaaatgggcaaaaacaagcgcaaaaaacaacaacccccacgggcaatacctgcttgcccaatactgccggtacggcacgccgccggattttgaaacggcgcacctgctctaccgcaaagcggcggcacaaggcttggcggcggcacactggcagctcgggctgcaataccgtttcggacaagggacgaaagtcgacacggcacaggccgtcaatcatttgcgcgccgccgcacaacaaggatacattcccgcctacaccccgcttgccgagctcatcctacctacggctcctgatgaagccgttcactggtttcaacaggcggcacaggaaaatgaccccgatgcccatgccgcacttgccgacatctacctgcaaggcaagcatccggaaagaaactacaaacttgccctgcatcacgccgaagcagcagccgccgaacgccatcccgaaggtttgcggatactgggcgacatctaccgctacggactgggcatgacttccgataaagaaaaagccctgcattattaccggcaggcagccgaagccggcagccttgccgcgtatcagaaactcatatccgacagcgcgttaaaccatcccgaccaatatggcggcattaaagattccgccatcaggcggcaaagggcagaacggctttatcaaaaagcccaagccctgcattacggattacaatgcgcgcccgaatatgcagccgcactcaaactctacacagaagccgcagaactcggccacagcaaagcccaaaccaatctgggcagcatgtattacttcggacagggtatgaccgccgactacaatgaagcacgcaaatggtttgaaaaagccgccgcgcaaaaagacagcatggcactttataacctcgcctgcatccattacaacggacacggcgtcgagccggacaaagaaaaagcctgccgctacctgcaagaagccataaacaacggatacgggcaaaaaagcgtcctgcaagaactgctgcaacaatggcaaaatgccgtctga

SEQ ID NO: 50203 - DNA, 279 bp, Neisseria meningitidis; identical to SEQ ID NO: 36778

SEQ ID NO: 50204 - DNA, 951 bp, Neisseria meningitidis
atgaccaaacaggaaaagcaagaagaccgcgaaaaaaaatataaaattatttctttatttagcggttgtggcggaatggatttgggttttctggggggctttgagtttttaaaccgtacttatgacaaacatgattttgatattatttgggcgaacgaaatcgacgaacacgctgttagaacctaccgccacaacttaggaaatcacattgtacatggtgatatttggcagtatttggatgaaatacccactagcgcagacatcattatcggtggctttccttgtcaggatatttctattaatggtaaaggtgcaggtatttcaggcagccgcagcgggctgtataaagccatgttgtctgctgttgaacgcgttcgccccaaaatatttgttgctgaaaatgtcaaagggctactgatgaagcatcatcggaaagatttggaaacagtgctttcagattttcgcaatttgggttatcaggtagattactacttgctgaatgcagccgattacggtgttccacagactcgggagcgagttatcatcgttggaaggctacctgaaattcccgaaatacagattgaaaaaacaaataccagcaacagctatgtaacagctagacaggctataggcgatttggtcgacaaagtagaagacgaaattgccaaccatatttggagtagagcagaaaaaagccccgatcaaggtagtcgaaaattggatgccgaaagggcgggctacactattagggcagaatgccatggaaacatacagtggcattacgaattaccccgccgcatctccatgcgtgaggcggcgcgcatccaatcgtttcccgacaattttattttccaggcaaaattgcgtgccacagaacggcaaattggcaacgccgtccctcctgttttagggtggcacatcgccgccgccgttagtaaggcacttaaataa

SEQ ID NO: 50205 - DNA, 387 bp, Neisseria meningitidis; identical to SEQ ID NO: 43260

SEQ ID NO: 50206 - DNA, 1428 bp, Neisseria meningitidis
atgaacgagaactttaccgaatggctgcacggctgggtcggcgccatcaacgatccgatgtggtcatacttggtttatatgcttttgggtacggggcttttcttcaccgtaaccacgggctttgtccaattccgcctgttcgggcgcagcatcaaagaaatgctcggcggccgcaaacagggggacgaccctcacggcatcacgccgtttcaggcatttgtaaccggccttgccagccgcgtgggcgtgggcaatatcgcgggcgtggccatcgccatcaaagtcggcggaccgggcgcggtgttttggatgtgggtaaccgccttaatcggtatgagttcggcgtttgtcgaatcttcgctggcgcagctctttaaagtccgcgactacgacaaccaccatttccggggcggccctgcctactacatcacgcaagggctggggcagaaatggctgggcgtgttgttcgccctgagcctgattttctgtttcggctttgtgtttgaagcggttcagaccaataccattgccgataccgtcaaagcggcatggggttgggagcctcattatgtcggcgtcgccctggtgattttaaccgcgccgattatcttcggcggcatcaggcgcatatctaaagcggcggaaatcgtcgtccccctgatggcggttttgtacctctttatcgcgcttttcatcattttgaccaatattccgatgattccggacgtgttcggtcagattttttcgggcgcgttcaaattcgacgcggcagcaggcggcttactcggcggtctgatttcgcaaacgatgatgatgggcatcaaacgcggcctgtattccaacgaggcgggtatgggttccgcgccgaacgccgccgccgccgccgaagtgaaacaccctgtttcgcaaggtatgattcaaatgctgggcgtgtttgtcgataccatcatcgtttgttcttgcaccgccttcatcatcttgatttaccaacagccttacggcgatttgagcggtgcggcgctgacgcaggcggcgattgtcagccaagtggggcaatggggcgcgggcttcctcgccgtcatcctgtttatgtttgccttttccaccgttatcggcaactatgcctatgccgagtccaacgtccaattcatcaaaagccattggctgattaccgccgttttccgtatgctggttttggcgtgggtctatttcggcgcggttgccaatgtgcctttggtctgggatatggcggatatggcgatgggtattatggcgtggatcaaccttgtcgccatcctgctgctctcgcccttggcgtttatgctgctgcgcgattacaccgccaagctgaaaatgggcaaagaccccgagttcaaactttccgaacatccgggcctgaaacgccgtatcaaatccgacgtttggtaa

SEQ ID NO: 50207 - DNA, 537 bp, Neisseria meningitidis
gtggatttgagggaagtaaaattaggcggcgaaaccatttacgagggcggtttcgtcagcatcagcaaggataaggtcaggttgcccaacggcaatgaagggcagcgtatcgtcatccgccatccgggtgcggcatgcgtgttggcggttacggacgaggggaaagtggttttggtgcggcagtggcgttatgcggcaaatcaggcgacattggaacttcctgcgggcaagctggatgtggcgggcgaggatatggcagcgtgtgcgctgagagaactggctgaagaaacgccttatgttgccgacagcgtgcgcctgctttacagtttttatacggcggtcggtttttgcaacgaaaaaatgtatctgttcgaagcggaaggcgtgcgtttgggcagtacgcttgccaatgacgaagacgagattacggaaaccgtattgatgtcgaaagaagaagtccgtcaggcattagcaaacgatgaaattaaagacggcaagacattaatcggtttgcaatactggctgatgaaggattga

SEQ ID NO: 50208 - DNA, 936 bp, Neisseria meningitidis
atgaacccgaaaaaactcgtcatcgccagccgcgaaagcctgcttgctatgtggcaggcaaagcatatccaaggccgtctgaaggctctgtatcccgattgcgaagtcgagattttgggcatgaccacgcgcggcgatcagattttggacaaaactttgtcaaaagtcggcggtaaaggcttgtttgtcaaagagttggaacaggctttatatgacgggcgcgccgatttggcggtgcattcgattaaagacgtaccgatggatttgcctgaaggtttcgcgcttgcggccatcggcgaacgcgccaatccgtttgacgcatttgtgtccaaccaatacacgcgtttggaagaaatgcccgaaggcgcggttgttggcacatccagcctgcgccgcgaagcccagttgcgtgcgcgctatccgcatttgcttatcaaacctttgcgcggcaatgtgcaaacccgtttgtccaaactcgataacggcgaatacgatgcaattatcttggccgccgccggtttgcagcgtttagaattggacggacgcatccgcatgattttgtcggaatccgagagcctgcctgccgccggacaaggcgcattgggtatcgaaattgccgcgcaccgcgaagatttgtatgaagttttgaaacccttgaaccacggcgttaccaatgcctgcgttaccgccgaacgcgccctcgcacgcgctttgggcggaagctgccaagtgcctttggccgcatattgcacagaagaaaacggcttgctgaccttgcgcggactggtcggacatcccgacggttcggttgtgttgcgggcggacgcgcaagcccctgccgaatatgccgacgcgctcggacgcgctgtcgctaagaaattggcggacgacggtgcgcgggaattgattggagcagtattgaatacggaaaattga

SEQ ID NO: 50209 - DNA, 1314 bp, Neisseria meningitidis
atgatgagcgtaactgttgaaactttagaaaatctggaacgcaaagtagtgttgtccctgccttggtccgaaatcaacgcagaaaccgataaaaaactgaaacaaacccaacgccgtgcaaaaatcgacggtttccgtccgggtaaagcacctttaaaaatgattgcccaaatgtacggtgcgagcgcacaaaacgacgtgatcaacgagctggtgcaacgccgcttctacgatgttgccgttgcccaagagttgaaagtggcaggcttcccccgttttgaaggcgttgaagaacaagacgataaagagtctttcaaagttgccgccatttttgaagtgttccccgaagtcgttatcggcgatttgtctgcacaagaagttgaaaaagtaaccgcttccgtcggtgatgccgaagtggaccaaaccgtagaaatcctgcgcaaacaacgcacccgcttcaaccatgtcgaacgcgaagcccgaaacggcgaccgcgtcatcattgactttgaaggcaaaatcgacggcgaaccttttgccggcggcgcatccaaaaactacgccttcgtattgggcgcaagtcaaatgctgcctgaatttgaagccggcgtagtcggcatgaaggctggcgaaagtaaagacgttaccgtcaatttccctgaagactaccacggtaaagacgttgccggtaaaactgccgtgttcaccattacgctgaacaacgtttccgaagcgactctgcctgaagtcgatgcagattttgcaaaagccttgggtattgcggatggcgacgttgccaaaatgcgcgaagaagtgcagaaaaacgtaagccgcgaagtggaacgccgcgtaaacgaacaaaccaaagaatccgtaatgaacgcgctgctcaaagccgtagagctgaaagcacctgttgctttggtcaatgaagaagccgcacgcttggcaaacgaaatgaaacaaaattttgttaaccaaggtatggctgatgctgccaacttggatctgcctttggatatgttcaaagaacaagccgaacgccgcgtgtctttgggtctgattttggccaaactggttgatgaaaacaaactggaaccgactgaggagcaaatcaaagccgttgtcgccaacttcgcagaaagctacgaagatcctcaagaagtaatcgactggtactacgcagagccttcccgcctgcaagccccgacttctttggcgatagaaagcaacgtcgttgatttcgttttgggtaaagccaaagtaaacgaaaaagctttgtcttttgacgaagtgatgggcgcgcaagcctga

SEQ ID NO: 50210 - DNA, 1194 bp, Neisseria meningitidis
atgaaccccaaacacctcatcgcattttccgccctgttcgccgccacgcaggcagaagccctgcccgtcgcctccgtcagcctcgacaccgttaccgtttccccgtccgccccctacaccgatacaaacgggctcttgaccgactacggcaacgccgccgcctcgccttggatgaaaaaactccgatccgtcgcacaaggcagcggcgagaccttccgcatcctgcaaatcggcgactcgcataccgccggcgacttctttaccgacagcctgcgcaaacgcctgcaaaaaacttggggcgacggcggcataggctgggtttaccccgccaacgtcaaagggcagcgcatggcggccgtccggcacaacggtaactggcaaagcctcaccagcaggaacaatagcggagacttcccgctcggcggcatcctcgcccacaccggcagcggcggcagcatgaccctgaccgcatcggacggcaagaccggcaaacagcgcatttccctgtttgccaaacccctgctcgccgaacaaaccctgaccgtcaacggcaacaccgtctccgccaacggcggcggctggcaggtactggatacccgcgcggcactgcccttgaccatacagaccgaaatgccgtgggacatcggcttcatcaacatcgaaaatcccgccggcggcattaccgtttccgccatgggcatcaacggcgcacaattgacccattggtcgaaatggcgtgccgaccgtatgaacgaccttgcccaaaccggcgccgatttggttatcctttcctacggcaccaacgaagccttcggcgacaacatcgacattgccgacaccgaacaaaaatggctggataccgtccgccaaatccgcgacagcctgcctgccgccggcatcctcatcatcggcgcacccgaatccctgaaaaacacgctcggcgtatgcggcacacgccccgtccgcctgaccgaagtccaacagatgcagcggcgcgtcgcccgacaggggcagacgatgttctggtcttggcaaaacgccatgggcggcatatgcagcatgaaaaactggctcaaccaaggatgggccgccaaagacggcgtacacttctccgccaaaggctaccggcgcgcggcggaaatgctcgccgacagcctcgaagaactcgtccgcgccgccgcaatcaggcaataa

SEQ ID NO: 50211 - DNA, 330 bp, Neisseria meningitidis
atgtcccgatgttgtctgaagcggcttcagacggcatcggctgtttcggcgttctccggcggcgttttggaggtggtaagattgtgctgccggcggctatccgtccttttcaatccgggcgtgatgctgtttgtgccggactgtcccgtcggcggcgcggccgggtttttccaatatgaaatgctttgcccgtttttctggcaggggcggttgcagaccggttcgaatcttgcttacgatgtttttatgtctgccggacgtttgaatggcgggcggaaccccccgcacagccgccgttttcttgccctgctttgctccgttgccttataa

SEQ ID NO: 50212 - DNA, 1179 bp, Neisseria meningitidis; identical to SEQ ID NO: 43491

SEQ ID NO: 50213 - DNA, 903 bp, Neisseria meningitidis
atggacagcctgatgacattgctttcggtattgataccgatgtttgccggattttttatccgtgtgcccaagccttacctgcccgctttggataaggtgctatcggtcttggtgtatgccgtgctgctgctgatcggcgtatcgttgtcgcgcgtggaggatttgggttcgcggttggacgatatggcgttgacggttctgtggctgtttgtttgtacggtcggggcgaacctgcttgctttggcagtgttgggaaagttattcccgtggcggataaaggggaaagggaagggcgtttcggtcggtgtgtcgggcagtgtggggcagctcggatgcgtgctgctcggatttgcatccggcaaactgatgcgcgatatttggatgccgtctgaaaacgcgggtatgtattgtctgatgctgctggtgctcctcatcggcgtacagctcaaaagcagcggcgtatcgttgcggcaggttttggtcaaccgcaggggtattcggttgtcggtctggtttatgctttcatctctttcaggcgggctgctgtttgccgcatcggcagacggtgtgtcgtgggtgaaaggtttggcgatggcttccggcttcggttggtattccctctcgggtttggtgatgaccgaggcttacggcgcggtatggggcagtatcgcgcttttgaacgatttggcacgagagctgttcgcgctggcatttattccgctgctgatgaagcgttttcccgatgcggcagtgggggtcggcggcgcgaccagtatggatttcacattgcccgtgattcggggtgcgggcggcttggaagccgtaccggtagcggtcagcttcggcgtggtggtcaatatcgccgctccgtttctgatggtggtgttttccgctttgggctga

SEQ ID NO: 50214 - DNA, 294 bp, Neisseria meningitidis; identical to SEQ ID NO: 42632

SEQ ID NO: 50215 - DNA, 1929 bp, Neisseria meningitidis
atgtccagaaaccaaaatcacgaagaatatcaagacgacacccgtccgttaagcattgaagagcaacgcgcgcgcctgcgtcagctcatcatcatgggtaaagaacgcggctacatcacctactccgaaatcaacgacgccctgccagacgatatgtctgatgccgaccaaatagacaatatcgtcagcatgatttccggtttgggcatccaagttaccgaacacgcccccgatgcggaagacatattgttaagcgacaatgccgccgttaccgacgatgatgccgtcgaagaagccgaggccgccctttccagtgcagattccgagttcggcagaaccaccgaccccgtccgtatgtatatgcgcgaaatggggcaggtcgacctgctgacccgcgaagacgaaatcatcatcgcaaaaaaaattgaaaacgccctgaaaaatatggttcaggccatctccgcctgcccgggatccattgcggaaatcttagaactcatcgaaaaaatccgcaaagacgaaatccgcgtcgacgaagtcgtagaagccattatcgacccgaatgaagtattgctcaacgaattgggcttggggcacttggaaaccacagcgcccgagaaaccttccaacgacaattcggacgaaaacgaagacgacgaagaatcggaagaagatgcggatgaaatctcggcagccaatctcgccgaattgaaacaaaaagtcatcggccactttgcccaaatcgaaaaagactacaaaaaaatgattggccgtttggaaaaacaccacagccggcacaaagactatctcgcctaccgcgacgcgattgccaacaaactgctggaagtccgtttcgccacccggcaaatcgacagcctcagcagcagcctgcgcgggaaagtagaaaacatccgcaaactcgaacgcgaaatccgcgacatctgcctcgaccgcgtccatatggaacgcgactacttcatccaaaacttcctgcccgaaatcaccaatctagaatggattgaagaagaaatcgccaaaggcagggtttggagcgacgcgctcgaccgcttccgccacgccatcctcgaaaaacaaaccgagttggcggatatggaaaaagaaacccgcatttccatcgaagagttgaaagaaatcaacaaaaatatggtgtcgagcgaaaaagaaaccgcagccgccaaacaggaaatgattcaggcaaacttgcgcctcgtgatttccatcgccaaaaaatataccaaccggggcttacaattccttgatctgattcaggaaggcaacatcggtttgatgaaagcggtcgataagttcgaataccgcagaggctataaattctccacctacgcaacctggtggatccgccaggcaattacacgctcgattgccgatcaggcgcgtaccatccgcattccggtacatatgattgaaaccatcaacaagatgaaccgcatctcgcgccaacaccttcaagaaaccggcgaagaacccgattccgccaaacttgccgaactgatgcagatgcccgaagacaaaatccgcaaaatcatgaaaatcgccaaagagccgatttcgatggaaacccccatcggcgacgacgacgattcgcacttgggcgacttcatcgaagatgccaacaatgttgcgccggccgatgcggcaatgtacaccagcctgcacgaagtaaccaaagaaatcctcgaaagcctgacaccgcgtgaggcaaaagtcctgcgtatgcgtttcggcatcgatatgaacaccgaccacacgctggaagaagtcggcagacagtttgacgtaacgcgcgaacgcatccgacaaatcgaggcaaaagcactccgcaagctgcggcatccgacaagaagcgaccgtttgagaagtttcttggacagcgaagacagcaagctgtaa

SEQ ID NO: 50216 - DNA, 633 bp, Neisseria meningitidis
atgctcaacattcaaaatccgatgtttctgatgctgatgagcgacagcccacagctgcgcgagtttctggtgcgcaatatcgacaacatcgccaacgatacagaagcctttataaaccgctacgacctcaaccgtcatatgatttacaatactctgctgatggtagagggtaagcagcttgatcggttgaaacaacgtagcgagaaagtcttggcgcatcccacccctagcaaatggctgcaaaagcggttgtacgattaccgcttcttcctcgctttcgccgaacaggatgccgaggcgatgaaggccgccttagagccgcttttcgataaaaaaactgcgcgtatggctgccaaagaaacattgtcctatttcgatttctacctgcagccgcaaatcgttacctatgccaaaatcgcatccatgcacggtttcgatttgggcatagaccacgaaatcgcaccgagggatttgattgtttacgatccgctgccggcagacgaatatcaagacatcttcgattttatgaaacagtatgacttgtcttacccgtatgaatatctgcaggattggatagattactatacgttcaaaaccgataagctggtatttggtaacgcgaagcgagagtga

SEQ ID NO: 50217 - DNA, 717 bp, Neisseria meningitidis
atgacaatgcacgagacaactgacagactttttgagatagccaaagagcagggagttttaaagccggctgacatagcagagcgtctgaatatcagccaacaggctttgaaaaactgggaaagtcgtggcatagcggcaaaggcgctgcctgaagtagcaaaagcattcggtgtatctgaaacatggctgagaacaggtgaaggcagccgaaccgcgcccgtccttattgaccccgacctaccccacgaagtcaaagacatccaccgcccgatgacgtggagcagcaacgacccgctgcccgacgatgattatgttttcgtcccctacctcaaagagagctgcttcaaaggcggagtaggcacgtatgaaatccccgattacaacggctaccgcctgccgttcggcaaatccacgcttaaacgcaaaggcatcaatcccgacaacgtgttttgctgcaccctgaccggcgacagtatggaggaaaaaatcgcagaagacgcggcaattgccgtagatacgggcgaaaccgccatacgcgacggcaaaatctacgccttcgcccaggacggtatgttccgcgtgaagtacctgatacggcagcctggcaacagcgttctgatacgcagccacaacagcggtttctatggcgacgaaaacgcccccttggacagcctgaccgttatcggcagggtattttggtggagcgtgctggattga

SEQ ID NO: 50218 - DNA, 462 bp, Neisseria meningitidis
atgtctgatttaccctctatctcccgattccttgccgacgaagccgccacactcgatttgggcgcggcgtggtcttcccgtttaaacgcaccgctggtcatttacctcgaaggggatttgggtgcgggcaaaaccacgctgacacgcggcatcctgcgcggattgggtcatcagggcgcagtcaaaagcccgacctacgccatcgtcgaatcttatccgctggaacgcttcaccctgcaccatttcgacctctaccgcttcaccacgcctgaagaatgggaagatgccggattggacgaactgtttgccgcaaacagcgtctgcctgatcgaatggccgcaacagggcggggaatttacgccgcctgccgacatcaccgcaacattgacacacgacggcggcggcagaaaatgcctgctgaccgcccataccgaacgaggacgtgaaagcctgccgctatga

SEQ ID NO: 50219 - DNA, 924 bp, Neisseria meningitidis
atgccgtccgaacacccgttttcagacggcatttccacacccaaccccaaagaaaccatgaacgacaccgcccaaattaccgccagctacggccgccgctacatcgtccgcacgcccgacggcacaacctacgaagccagcacccgcaaaaaacgcgtcgatttcgcctgcggtgaccgcgtccgcatcagccccgtcaacgccgaacaagttgtgattgaagattttttaccgcgccaaagcctgctctaccgccaagacgcgtggaaaaccaaactcattgccgccaacgttacccaactcctcatcgtaaccgccgccgtcccgagtccgagcgtgcggctgctacagcgcgccctgcttgccgccgaagccgccggcatccgcgccgtcatcgtcctgaacaaagccgacctgcccgaaaccgccctttggcgcgaaaaactcaaattctacgaaacgctgggttatcccgtcatcgaaacccgcgcactggaaaacgccggcagcctgcgccccgccctgcaagggcacagcaacatcctgctcgggcagagcggtatgggcaaatccaccctgaccaacgcccttttgggcagccaaaccgcccgcaccggcgacatttccgccgcactcgactcgggaaaacacaccaccacccacgcccggctttatgatttgaacggcgaaacccaactcatcgactccccgggtttgcaagaatttggtttacaccacctccaagccgccgatttgccgcgctatttccccgatttccgccaccttgtcgggcaatgccgcttccacaactgcacccaccgcgccgaacccggctgcgccttcaaagccgccgccgaaaccagggcggcaagccccgaacgcctcgcctttttgcagggcatcaccgacgaactgcccgggtaa

SEQ ID NO: 50220 - DNA, 606 bp, Neisseria meningitidis
atgatgaccctctattccggcattacctgccccttcagccaccgctgccgcttcgttttgtacgaaaaaggcatggattttgaaatcaaagacgtcgatatttacaacaagcccgaagacctcgccgtcatgaacccgtataaccaagttcccgtgctggtcgagcgcgatttggtactgcatgagtccaacatcatcaacgaatacatcgacgaacgcttcccccatccgcagcttatgcccggcgatcccgttatgcgcggccggggccggctggtgctgtaccgtatggaaaaagaattgttcaaccacgtccaagtgttagaaaaccccgccgccaccaacaaggaacaggcaaaagcgcgcgaagccatcggcaacggtctgaccatgcttgccccttcgttcagcaaaagcaaatacatcctcggcgaagatttttctatgattgatgtcgcccttgctccgctgctgtggcggctcgaccactacgatgtcaaactgggcaaaagtgccgcgccgctgctcaaatacgccgagcgcatcttccagcgcgaagcctttatcgaagcactgacacccgccgaaaaagccatgcgcaaataa

SEQ ID NO: 50221 - DNA, 651 bp, Neisseria meningitidis
atgataactatttcaaatgaagataacatgatcctaatgtctcggtatcctgacaagtattttgatttggcaattgtagatcctccttatgggattttgaataaaactaaacgtggtggtgattataaattcaatatgaatgaatactcacaatgggatattaagccagaccaaacttactttaatgaattatttcgcgtgtcaaaaaatcaaattatttggggtgggaattattttggcgagttatggttgagaagtgaatataataaaggatttattatttgggataagaatcaaccagagacattaaataatttttctatggcggaaatggcttggtcgtcattcgataggccatctaaaattttccggtttagtgtgcggaaaaatcgtaataaaactcacccaacacaaaaaccagtcgaattatatcagtggttgttaaaaatgtatgcaaagcagggtgataagattttagatacacatttaggaagtggaactcttgctattgcatgctgcattgcacagtttgatttgacagcttgtgaaatcaattccgattattaccaacaatcgattgagaaaataaaaaataatttacctgaagctagaatcagttttgggcatccaggttattgtattattgaataa

SEQ ID NO: 50222 - DNA, 2379 bp, Neisseria meningitidis
gtgctggcattgggcctctgcttcggcacgcattgcgccgccgccgatgccgttgcggcggaggaaacggacaatccgaccgccggaggaagcgttcggagcgtgtccgaacccatacagcctaccagcctgagcctcggttcgacctgcctgttttgcagtaacgaaagcggcagccccgagagaaccgaagccgccgtccgaggcagcggcgaagcatccatccccgaagactatacgcgcattgttgccgacaaggtggaaggacagtcgcaggtgcaggtgcgtgccgaaggcaacgtcgtcgtcgaacgcaaccggacgaccctcaataccgattgggcggattacgaccagtcgggcgacaccgttaccgcaggcgaccggttcgccctccaacaggacggtacgctgattcggggcgaaaccctgacctacaatctcgagcagcagaccggggaagcgcacaacgtccgtatggaaaccgaacacggcggacggcggctgcaaagcgtcagccgcaccgccgaaatgttgggcgaagggcattacaaactgacggaaacccaattcaacacctgttccgccggcgatgccggctggtatgtcaaggccgcttccgtcgaagccgatcgggaaaaaggcataggcgttgccaaacacgccgccttcgtgttcggcggcgttcccattttctacaccccttgggcggacttcccgcttgacggcaaccgcaaaagcggcctgcttgttccctcactgtccgccggttcggacggcgtttccctttccgttccctattatttcaaccttgcccccaatctcgatgccacgttcgcgcccagcgtgatcggcgaacgcggcgcggtctttgacgggcaggtacgctacctgcggccggattatgccggccagtccgacctgacctggctgccgcacgacaagaaaagcggcaggaataaccgctatcaggcgaaatggcagcatcggcacgacatttccgacacgcttcaggcgggtgtcgatttcaaccaagtctccgacagcggctactaccgcgacttttacggcaacaaagaaatcgccggcaacgtcaacctcaaccgccgtgtatggctggattatggcggcagggcggcgggcggcagcctgaatgccggcctttcggttctgaaataccagacgctggcaaaccaaagcggctacaaagacaaaccgtatgccctcatgccgcgcctttcggtcgagtggcgtaaaaacaccggcagggcgcaaatcggcgtgtccgcacaatttacccgattcagccacgacagccgccaagacggcagccgcctggtcgtctatcccgacatcaaatgggatttcagcaacagctggggctatgtccgtcccaaactcggactgcacgccacctattacagcctcaaccgcttcggcagccaagaagcccgacgcgtcagccgcactctgcccattgtcaacatcgacagcggcgcaacttttgagcggaatacgcggatgttcggcggagaagtcctgcaaaccctcgagccgcgcctgttctacaactatattcctgccaaatcccaaaacgacctgcccaatttcgattcgtcggaaagcagcttcggctacgggcagctctttcgcgaaaacctctattacggcaacgacaggattaacaccgcaaacagcctttccgccgccgtgcaaagccgtattttggacggcgcgacgggggaagagcgtttccgcgccggcatcggtcagaaattctatttcaaggatgatgcggtgatgcttgacggcagcgtcggcaaaaaaccgcgcaaccgttccgactgggtggcatttgcctccggcagcatcggcagccgcttcatcctcgacagcagcatccactacaaccaaaacgacaaacgcgccgagaactacgccgtcggtgcaagctaccgtcccgcacagggcaaagtgctgaacgcccgctacaaatacgggcgcaacgaaaaaatctacctgaagtccgacggttcctatttttacgacaaactcagccagctcgacctgtccgcacaatggccgctgacgcgcaacctgtcggccgtcgtccgttacaactacggttttgaagccaaaaaaccgatagaggtgctggcgggtgcggaatacaaaagcagttgcggctgctggggcgcgggcgtgtacgcccaacgctacgttaccggcgaaaacacctacaaaaacgctgtctttttctcacttcagttgaaagacctcagcagtgtcggcagaaaccccgcagacaggatggatgtcgccgttcccggctatatcaccgcccactctctttccgccggacgcaacaaacgaccctga

SEQ ID NO: 50223 - DNA, 471 bp, Neisseria meningitidis
atgtacgatgtcaatacccacgatgtccgccgctttttcgcccgcgtgtggcagcagcggctcaatccgctgcaactgagcgcactggaacagaaagccctccgcattatcgaagcccatcccgaataccaccgttatctcgaacgcatcgaagaccatctggacaccgactggctacccgaaaacggcgaaagcaaccccttcctgcatatgtcgctgcatttgtccgtccaagaacaggcgggcatagaccagccgcacggcatacgcgcaatccacgacaccctgtgcgccaaacgcggctggctggaagccgaacacgaaatgatggaggcactggcggaaacactgtggacggcgcaacgctacggcaccggtttggatgtcaatttctacatgacccgactgcgcaaactcatcggcttgggtgcagaagatcaagccaggttgaacccacatgaaatcgcctga

SEQ ID NO: 50224 - DNA, 270 bp, Neisseria meningitidis; identical to SEQ ID NO: 43524

SEQ ID NO: 50225 - DNA, 234 bp, Neisseria meningitidis; identical to SEQ ID NO: 40733

SEQ ID NO: 50226 - DNA, 1248 bp, Neisseria meningitidis
atgttgaaacaaacgacacttttggcggcttgcgcctcctttgccgcactgttgggcggttgtgctacccagcagcctgcccccgtcattgcaggcaattcaggtatgcaggacgcgccgtcttcggcagtttacaacaacccctatggagcaacgccgtacagcccggctcctgccggcgatgcgccttatgtgccgccggtgcaaagcgcgccggtttatacgcctcctgcttatgttccgccgtctgcacctgccgtttcgggtacatacgttccttcttacgcacccgtcgacatcaacgcggcgacgcatactattgtgcgcggcgacacggtgtacaacatttccaaacgctaccatatctctcaagacgatttccgtgcgtggaacggcatgaccgacaatacgttgagcatcggtcagattgttaaagtcaaaccggcaggatatgccgcaccgaaagccgcagccgtaaaaagcaggcccgccgtaccggctgccgcgcaaccgcccgtacagtccgcacccgtcgacattaacgcggcgacgcatactattgtgcgcggcgacacggtgtacaacatttccaaacgctaccatatctctcaagacgatttccgtgcgtggaacggcatgaccgacaatatgttgagcatcggtcagattgttaaagtcaaaccggcaggatatgccgcaccgaaaacctcagccgtagaaagcaggcccgccgtaccggctgccgtgcaaacccctgtgaaacccgccgcgcaaccgcctgtgcagtccgcgccgcaacctgccgcgcccgctgcggaaaataaagcggttcccgcgcccgccccgcaatctcctgccgcttcgccttccggcacgcgttcggtcggcggcattgtttggcagcgtccgacgcaaggtaaagtggttgccgatttcggcggcaacaacaagggtgtcgatattgccggtaatgcgggacagcccgttttggcggcggctgacggcaaagtggtttatgcaggttccggtttgaggggatacggcaatctggtcatcatccagcataattcttccttcctgaccgcatacgggcacaaccaaaaattgctggtcggcgaaggccagcaggtcaaacgcgggcagcaggtcgctttgatgggcaataccgacgcttccagaacgcagcttcatttcgaggtgcggcaaaacggcaaaccggttaacccgaacagctatatcgcgttctga

SEQ ID NO: 50227 - DNA, 198 bp, Neisseria meningitidis; identical to SEQ ID NO: 36305

SEQ ID NO: 50228 - DNA, 1263 bp, Neisseria meningitidis; identical to SEQ ID NO: 45630

SEQ ID NO: 50229 - DNA, 246 bp, Neisseria meningitidis
atgctcaaatccatcgaattcaattcccacatccgcaaccgccttgcagcatatctgaaaggcaggggtttggattttcagacggcgatgcgggaggaaaaaggcaacaaagaaattgcctcaattattcatggcggcctgcccgtactggttcgcaaactgtattccgaacaaaaaatgcagaaatttttttgggaaaagcgggatttgattgccgactacatcagccgccggatgcagggatag

SEQ ID NO: 50230 - DNA, 492 bp, Neisseria meningitidis
atgagtaccgaaaccaaaaactacattacgcccgccggatggcaggcattgaaagacgagctttatcaactggtcaacaaagaacgccccgaaatcgtccaaatcgtcaactgggcggcaggcaacggcgaccgcagcgaaaacggcgactatctttacggcaaacgccgtatgcgcgaaatcgaccgccgcatccgtttcctgaccaagcgtttggagtccgccgtcgtcgtcgatcccgaattgcgcgaagcgaccgaccaagtatttttcggcgcgaccgtcggcctgttgcgcggcgacgggcgcgagcaaaccgtcaaaatcgtcggcatcgatgaaatcgataccgcgcaaaacaaaatttcttggatttcgccgctggctcgttgtctgattaaagcgcgcgaaggcgacgaagtggttttgaacacgccggaagggcgtgaggaaattgaaatcctttctgtcgaatacatcaaaatcgactga

SEQ ID NO: 50231 - DNA, 1188 bp, Neisseria meningitidis; identical to SEQ ID NO: 49497

SEQ ID NO: 50232 - DNA, 729 bp, Neisseria meningitidis; identical to SEQ ID NO: 43072

SEQ ID NO: 50233 - DNA, 366 bp, Neisseria meningitidis; identical to SEQ ID NO: 42928

SEQ ID NO: 50234 - DNA, 750 bp, Neisseria meningitidis
atgaaagcactggtcgcagtaaagcgcgtagtggactacaacgtcaaagttcgtgtaaaagccgatggttcggatgtggatatcggcaatgtcaaaatgtcgatgaatccgtttgacgaaatcgctgtggaagaagctgtccgtttgaaagaagccggaaaagtaagcgaaatcgtagcggtttctttgggtgagaaaaaatgcgaagaaaccttgcgtacagctttggcgatgggtgccgaccgtgccattcatgttgaaaccgatactaaactggagtctctggccgttgctaagttgctgaaagccgttgcggacaaagaaaatccgcaaattttctttttgggcaaacaagcgattgatgatgatgccaatcaagtggcgcaaatgctggcagctttgctgaatgcggcgcaaggtacgttcgcgtccaaagtacaaattgaaggcgacgaagtgcagattgtgcgggaaatcgatggcggcgaagaaaccatcgcattgaaactgcctgctgttatcagcgcggatttgcgtttgaacgagccgcgctttgtcaaactccccaatattatggcggcaaagaaaaaacctttggaaaaactgactcctgacgatttggttgccgacatttcacctcgtttgaaaacggtgaaatttgccgaacctaaggcgcgtcaggcaggcgtaaaagtagcaggcgttgccgaattggttgaaaaattgaaaaacgaagccaaagtgatttga

SEQ ID NO: 50235 - DNA, 435 bp, Neisseria meningitidis; identical to SEQ ID NO: 38693

SEQ ID NO: 50236 - DNA, 1200 bp, Neisseria meningitidis
atgcaggcggcccgtccgtccctgcaatgttttttatttttgaacgaaaggtcgaaaaccatgaaaaaaacactggtggcggcggcgatcctgagcctcgccttgactgcgtgcggcggcggaagcgataccgccgcccaccccccctccgccaagcccgaagccggacaatcgggcaaactcaatatctacaactggtcggattatgtcgatcccgaaaccgtcgccgcctttgaaaaagaaaccggcatcaagacgcgttccgattattacgacagcaacgaaacactggaggcaaaagtcctgaccggcaaatccggctacgacctgaccgcgccgtccatcgccaacgtcggccggcaaatcaaagcgggcgcgtatcagaaaatcgacaaggcgcaaatcccccattacggcaacatcgataaagatttgctgaaaatgatggaagccgtcgatccgggcaacgaatatgccgtgccttatttctggggaatcaatactttggcaatcaatacccagcaggtgaaaaaggcattgggtacggacaagctacccgaaaacgagtgggatttggtgttcaaacccgaatacaccgccaaactcaaatcctgcggcatcagctatttcgacagcgcaatcgaacagattcccttggcgttgcactatttgggcaaagaccccaacagtgaaaatcctgaagacatcaaagccgccgtcgatatgatgaaagccgtccgaggcgacgtgaaacgcttcagctcttccggctatatcgacgatatggcggcgggcaacctgtgtgccgccatcggttacggcggcgatttgaacattgccaaaacccgtgccgaagaagccgcaaacggcgtggaaatcaaagtattgaccccgaaaaccggcgtgggcgtgtgggtggattcctttatgattccgcgcgacgcgcaaaacgttgccaacgcccaccgctatatcgactacacgctcctgcccgaggtggcggcgaaaaacggcagcttcgttacctacgcacccgccagccgccccgcgcgcgagctgatggatgaaaaatacacctccgacgcatcgattttcccgaacaaagaactgatggaaaaaagtttcatcgtatcgcccaaatccgcagaatccgccaaactgggcgtgaagctgtggcaagggctcaaggccggaaaataa

SEQ ID NO: 50237 - DNA, 2091 bp, Neisseria meningitidis
atgcgttccatgatttacggctcaatgccgtctgaaaagctcacaatttttcagacggcatttgttatgcaagtaaatattcagattccctgtatgctgtacagacgcgggagtgttaagccccccttgtttgaagctccgcggctcctgccgagcttcaccgaccccgttgtgcccaagctctctgctcccggcggctacattgtcgacatccccaaaggcaatctgaaaaccgaaatcgaaaagctggccaaacagcccgaatacgcctacctgaaacagcttcagacggccaagaacgtcgattggaaacaggtgcagctggcctacgacaaatgggactataaacaggaaggcttgaccggagccggtgcagcgattgtggtgattattgtaaccgctctaacttatggatacggagcggctgcagcgggtagcgtaactgccgcaggaagtagtacagccgcagctgcaacaacgacagcggcagcaactaccactgtttctactgcagctgccatgcaaaccgcagctttagcctccttgtatagccaagcagctgtagccatcatcaataataaaggcgatgtaggcaaagcattaaaagatctcggcaccagtgatacggtcaagcagattgttacttccgcactgacggcgggtgcattaaaccagatgggcgcagatattgcccaattgaacagcaaggtaagaaccgaactgttcagcagtacgggcaatcaaaccattgccaaccttggaggcagattggccaccaacctcagcaatgcaggtatctcagctggtatcaataccgccgttaacggcggcagcttgaaagacaacttaggcaatgccgcattgggagcattggttaatagcttccaaggggaagccgccagcaaaatcaaaacaaccttcagcgacgattatgttgccaaacagttcgcccacgctttggcgggttgtgttagcggactggtacagggaaaatgtaaagatggggcaattggcgcagcagttggggaaatcgtagctgaatccatacttggcggcagaaaccctgctacactcagcgatgcagaaaagcataaagttatcagttactcgaagattattgcgggcagcgtggcggcactcaacggcggcgatgtgaatactgcggcgaatgcggctgaggtagctgtggtgaataatgctttgaattttgacagtacccctaccaatgcgaaaaagcatcaaccgcagaagcccgacaaaaccgcactggaaaaaatcatccaaagtattatgcctgcacatgcggcaggtgcgatgactaatccgcaggataaggatgctgccatttggataagcaatatccgtaatggcatcacaggcccgattgtgattaccagctatggagtttatgcagcaggttggacagctccgctgatcggtacagctggtaaagcagctatcagcacctgtatggctaatccttctggttgtactgtcatggttacgcaggctgctgaagcgggcgcgggaatcgtcacgggtgcggtaacggtaggcaacgcttgggaagctccagtaggagcgttgtcgaaagcgaaggcggctaagcaagctgctcctaaagaaacaataaacaatttggcaaatttagccaaagcagaacagcagattttattccgtattgcccaacgcgatacgcaactggatgcatggaagacgggatttaacaatagagtaaggaaaggagcaggcttgcttgatgcaagtaatattccgataaccattaacggaaaaaccatcaaacctgtacaagccataagcttaaagggagcacccgtttacagcggcgtaagcgaacaggagatttttgcgctttatcggcagatgactggccagaatccgaattttagagttttgcctgacggaagattagcaaatggcattatcagtactggagaatgggcaggaacaaaaattgcattaagaaatttttcaaaaacagagaattcaactcaagcacgatggacattagatttgcagaatcctccatcatttattaaaggtactaaattggagcttaaattccaataa

SEQ ID NO: 50238 - DNA, 1002 bp, Neisseria meningitidis
atgcagtttccttaccgcaatgttccggcttcgcgtatgcgccgtatgcgcagggacgatttttcacgccgcctgatgcgcgaacacacgctgaccgccgatgatttgatttatccggtgttcgtattggaggggtcggcgcgcgaggaggatgtgccttctatgccgggtgtgaagcgtcaaagtttggacaggctgctgtttacggcggaagaggcggtaaagctcggtattccgatgttggcactctttcccgtggttacggcaaacaaaaccgagcgtgcagaggaagcgtacaatcccgaaggactcgtgccggcagccgtccgcgccctgcgcgagaggtttcccgaactgggcattatgacggatgtcgcgctcgatccttatacggttcacggtcaggacgggctgacggacgaaaacggttatgtgatgaacgatgaaaccgtagaggttttggtcaagcaggctttgtgccacgctgaagcgggcgcgcaggtggttgccccttccgatatgatggacgggcgtatcggtgcgattcgcgaggcgttggaggatgccgggcatatccacacgcggattatggcgtattccgccaaatatgcttcggcgttttacggaccgttccgcgatgcggtgggcagttcgggcaatttgggcaaggcggacaagaaaacctaccagatggatccggcaaataccgatgaggcgttgcacgaagtggcgttggacattcaggaaggtgcggatatggtaatggtcaagcccggtttgctgtatttggacgttgtccgccgcgtgaaggacgagttcggtgtgccgacttatgcctatcaggtttcgggcgaatatgcgatgttgcaggcggcggttgccaacggatggctggatggcgataaagtggttttggaaagcctgctggcattcaaacgtgcgggcgcggatgggattttgacctattatgccattgaggcggccaagatgctgaagcgttga

SEQ ID NO: 50239 - DNA, 1413 bp, Neisseria meningitidis
ttgttgtttgaatttaaagagaataaaatgattgttgcttcccgctggcccttgctggaaaaggtatttttacggtttggaatgcctgttgccgtggtcgatttggaatcgacgggcggcaatctgtatgaagacagggtaaccgaagtggctttggtcaagtttgagcagggaagggtggtgaggcatgagtggttggttaatcctcaaaaaccgattccgcagtttgtggcggggctgacggggatttcagacggcatggttgccgatgcgcctgtttttgcagagattgccggcgagttgttttcggtattgaagggttgtgtgctggttgcacataacagccgtttcgactatacgtttttaaagcatgagtttcatcgtgcgggtatcggattttcatcgcctgctttgtgcagtgtgcagctgtcccggtgtctgtatccgcaattttacaagcacagcctggacagtatcatcgaaaggttggggattgttgtggaagacaggcatcgtgcgatggcggatgtgtcggcgttgtgtgattatttggaatacagcctgtcggaacacggggtcgaggagtggatcaggcagtgtttccgtttgatgaatccgaaaccgttgcctgccgcgctgcccgaacggttgagggaacagttgtacggtttgcctgacggtatgggggtgctggcctgtttcgacggcggagggaaagtaaattacatcggtacgtttgaacgggtatatagcgaggtttcggctttattggactccggaaaagccccgtttgattggtgcaatacggaggaagtccgtttttttcccgcattgggcaggctgcatgcccataaggttaaagcggaattggtcaggcattatggggtggattgttacgtatctgccaaaaatctgcttaaaacatttacgaccgtcaggtttgaaaaaggttcagacggcatattgaatgcgaaaacagcagatttaaaaaacggtgtgacggataatccgcctaccggattatttgccaataaaaaggcggcgagacgggctttgtcgtcgtgggcggaaacatacggattgtgtcctgccgcagccggtatcctgccggacggttatgcagaggatgagccttgtcccgtatatgtttcaggccgatgcgataaggcgtgcggccgttctgacgaacaggttttggcgtttgcacacaagttgcctattttggattggggaaaaatgcatgaggtagaaattaccgaaactgatcctttaacgggggaaaaagttgttctgcatggaatgggcggcgcattggaaatgggtgacgggctttggtatttcgataaagatttaccggatgcgtttaaggcgaagtttaaaacggacaggaaaaatattaaggaaatcggttaa

SEQ ID NO: 50240 - DNA, 2751 bp, Neisseria meningitidis
atgcaacagcaacatttgttccgattaaatattttatgcctgtcgctgatgactgcgctgcctgcttatgcagaaaatgtgcaagccggacaagcacaggaaaaacagttggataccatacaggtaaaagccaaaaaacagaaaacccgccgcgataacgaagtaaccggtttgggcaaattggtcaaaaccgccgacaccctcagcaaggaacaggtactcgatatccgtgacctgacgcgttacgaccccggcatcgccgtcgtcgaacaggggcgcggcgcaagctctggctactcgatacgcggtatggacaaaaaccgcgtttccttgacggtggacggcttggcgcaaatacagtcctacaccgcgcaggcggcattgggcgggacgaggacggcgggcagcagcggcgcaatcaatgaaatcgagtatgaaaacgtcaaggctgtcgaaatcagcaaaggctcaaactcggtcgaacaaggcagcggcgcattggcgggttcggtcgcatttcaaaccaaaaccgccgacgatgttatcggggaaggcaggcagtggggcattcagagtaaaaccgcctattccggcaaaaaccgggggcttacccaatccatcgcgctggcggggcgcatcggcggtgcggaggctttgctgatccacaccggccggcgcgcgggggaaatccgcgcccacgaagatgccggacgcggcgttcagagctttaacaggctggtgccggttgaagacgacagcaaatacgcctatttcatcgttgaagaagaatgcgaaagcaaaaattacgaaacgtgtaaagcgaatccgaaaaaagatgttgtcggcaaagacgaacgtcaaacggtttccacccgagactacacgggacccaaccgcttccttgccgatccgctttcatacgaaagccgatcgtggctgttccgcccgggttttcgttttgaaaacaaacggcactacatcggcggcatactcgaacacacgcaacaaactttcgacacgcgcgatatgacggttccggcattcctgaccaaggcggtttttgatgaaaatagaaaatacggaccgataagaggcaacggcaaatacgcgggcaaccacaaatacggcggactgtttaccaacggcgaaaatggtgcgctggtgggcgcggaatacggtacgggcgtgttttacgacgagacgcacaccaaaagccgctacggtttggaatatgtctataccaatgccgataaagacacttgggcggattatgcccgcctctcttacgaccggcagggcatcggtttggacaatcattttcagcagacgcactgttctgccgacggttcggacaaatattgccgtccgagtgccgacaagccgttttcctactacaaatccgaccgcgtgatttatggggaaagccacaggctcttgcaggcggcattcaaaaaatccttcgataccgccaaaatccgccacaacctgagcgtgaatctcgggtttgaccgctttggctctaatctccgccatcaggattattattatcaacatgccaaccgcgcctattcgtcgaaaacgccccctaaaaccggcaacggcggctcaaacgccagccccaacggcagccaagacaacccctattgggtcagcataggcgggggaaatgtggttacggggcaaatctgccgcttgggcaacaatacttatacggactgtacgccgcgcagcatcaacggcaaaagctattacgcggcagttcgggacaatgtccgtttgggcaggtgggcggatgtcggcgcggggttgcgctacgactaccgcagcacgcattcggacgacggcagcgtttccaccggcacgcaccgtaccctgtcctggaacgccggcatcgtcctcaaacctgccgactggctggatttgacttaccgcacttcaaccggcttccgcctgccctcgtttgcggaaatgtacggctggcgggcgggtgttcaaagcaaggcggtcaaaatcgatccggaaaaatcgttcaacaaagaagccggcatcgtatttaaaggcgatttcggcaacttggaggcaagttggttcaacaatgcctaccgcgatttgattgtccggggttatgaagcgcaaattcaaaacggcaaagaaacagccaaaggcgacccggcttacctcaatgcccaaagcgcgcggattaccggcatcaatgttttgggcaaaatcgattggaacggcgtatgggataaattgcccgaaggttggtattctacatttgcctataatcgtgtccgtgtccgcgacatcaaaaaacgcgcagaccgcaccgatattcaatcacatctgtttgatgccatccaaccttcgcgctatgtcgtcggcttgggctatgaccaaccggaaggcaaatggggtgtgaacggtatgctgacttattccaaagccaaggaaatcacagagttgttgggcagccgggctttgctcaacggcaacagccgcaatacaaaagccaccgcgcgccgtacccgcccttggtatattgtggatgtgtccggttattacacgattaaaaaacacttcaccctccgtgcgggcgtgtacaacctcctcaactaccgctatgttacttgggaaaatgtgcggcaaactgccggcggcgcagtcaatcaacacaaaaatgtcggcgtttacaaccgatatgccgcccccggccgaaactacacatttagcttggaaatgaagttttaa

SEQ ID NO: 50241 - DNA, 186 bp, Neisseria meningitidis; identical to SEQ ID NO: 38793

SEQ ID NO: 50242 - DNA, 453 bp, Neisseria meningitidis; identical to SEQ ID NO: 38407

SEQ ID NO: 50243 - DNA, 510 bp, Neisseria meningitidis; identical to SEQ ID NO: 42435

SEQ ID NO: 50244 - DNA, 210 bp, Neisseria meningitidis; identical to SEQ ID NO: 39306

SEQ ID NO: 50245 - DNA, 378 bp, Neisseria meningitidis; identical to SEQ ID NO: 37228

SEQ ID NO: 50246 - DNA, 516 bp, Neisseria meningitidis
atgtacacttgcacttcctgcggcgaaaaacatgaagatatgcccgcaatcggctttaccgcccccgatccctataatcaactcagtgaagaagaacgcattgcttaccaagctgaatgcggcggcgatttctgcatcatccgctatcccgaccaaaccgaccgttttatccgcgcggtgctgcttattccgattatcgggcatgaggaaacgctggaatatggggtgtgggtatctgtcagcgaaaagagttttaacgactatcaaagccactttcacgacaatccggaaaatgtcgtttatttcgggatgatctgcaaccggctgcccccttacgaatccgacaccttcggtttgcattgcaatgtcgttacccaacccgatggtcaacgccctttgctgcaacttcatcaaagcggcggacatccgctggtacgcgacttttatcacggcatagaatatgccgaggcacaggcaaggataggagcggtatccgaatcggattgttcaggataa

SEQ ID NO: 50247 - DNA, 891 bp, Neisseria meningitidis; identical to SEQ ID NO: 43240

SEQ ID NO: 50248 - DNA, 1635 bp, Neisseria meningitidis
atggcagcaaaagacgtacagttcggcaatgaagtccgccaaaaaatggtaaacggcgtgaacattttggcaaacgccgtgcgcgtaaccctgggtcccaaaggccgcaacgtagtggttgaccgcgctttcggcggcccgcacatcaccaaagacggcgtaaccgtcgctaaagaaatcgaactgaaagacaagtttgaaaatatgggcgcgcaaatggtaaaagaagtcgcgtccaaaaccaacgacgtggcgggcgacggtacgactaccgccaccgtactggcgcaatccatcgttgccgaaggtatgaaatacgttaccgccggtatgaacccgaccgacctgaaacgcggtatcgacaaagccgtcgccgctttggttgaagagctgaaaaacatcgccaaaccttgcgacacttctaaagaaatcgcccaagtcggctctatttccgccaactctgacgaacaagtcggcgcgattattgccgaagcgatggaaaaagtcggcaaagaaggcgtgattaccgttgaagacggcaaatctttggaaaacgagctggacgtggttgaaggtatgcaattcgaccgcggctacctgtctccttacttcatcaacgatgcggaaaaacaaatcgccggcttggacaatccgtttgtattgctgttcgacaaaaaaatcagcaatatccgcgacctgctgcctgttttggaacaagtggccaaagccagccgtccgctgttgattatcgctgaagacgtagaaggcgaagccttggcgactttggtcgtgaacaacatccgcggcattctgaaaaccgttgccgttaaagctccgggcttcggcgaccgccgcaaagcgatgctgcaagacatcgctatcctgaccggcggcacagtgatttccgaagaagtcggcctgtctttggaaaaagcgactttggacgacttgggtcaggccaaacgcatcgaaatcggtaaagaaaacaccaccatcatcgacggcttcggcgacgcagcccaaatcgaagcgcgtgttgccgaaatccgccaacaaatcgaaaccgcaaccagcgattacgacaaagaaaaactgcaagagcgcgtggccaaactggcaggcggcgtggcagtaatcaaggtcggtgccgctaccgaagtcgaaatgaaagagaaaaaagaccgcgtggaagacgcgctgcacgctacccgcgcagccgttgaagaaggcgtggttgcaggcggcggcgtagccctgttgcgcgcccgtgccgctctggaaaacctgcacaccggcaatgccgaccaagacgcaggcgtacaaatcgtcttgcgcgccgttgagtctccgctgcgccaaatcgttgccaacgcaggcggcgaacctagcgtggtggtgaacaaagtgttggaaggcaaaggcaactacggttacaacgcaggcagcggcgaatacggcgacatgatcgaaatgggcgtactcgaccccgccaaagtaacccgctccgcgctgcaacacgccgcgtctatcgccggcctgatgctgaccacagactgcatgattgccgaaatccctgaagaaaaacctgctatgcctgacatgggcggcatgggcggtatgggcggcatgatgtaa

SEQ ID NO: 50249 - DNA, 648 bp, Neisseria meningitidis
atgaaacctttgattttagggcttgccgccgtgttggcgctgtctgcctgccaagttcaaaaagcgcccgatttcgactacacgtcattcaaggaaagcaaaccggcttcaattttggtggttccgccgctgaacgaatcgcccgatgtcaacggaacatggggtgtactggcttcgaccgccgctccgctttccgaagccggctattacgtcttccccgccgcagtcgtggaggaaaccttcaaagaaaacggcttgaccaatgccgccgatattcacgccgtccgaccggaaaaactgcatcagattttcggcaatgatgcggttttgtacattacggttaccgaatacggcacttcatatcaaattttagacagcgtgacgaccgtatccgccaaagcacggctggtcgattcccgtaacggaaaagagttgtggtcgggttcggccagcatccgcgaaggcagcaacaacagcaacagcggcctgttgggggctttggtcagcgcagtggtcaatcagattgccaacaacctgaccgaccgcggttatcaagtttccaaaaccgccgcatacaacctgctgtcgccctattctcacaacggcatcttgaaaggtccgagattcgtcgaagagcagcccaaataa

SEQ ID NO: 50250 - DNA, 651 bp, Neisseria meningitidis
atgccgtctgaaaacacaaaaggaacaaccatgaccacacatcatgtcgaattgaggaaggtaaccaaacggttcggggcgcaaaaagccgtcaaccaagtcgatttggttttgaaggcaggagaaagcgtcgggcttgccggacacaacggcgcgggcaagtccaccattatgaagctgatactcgggctgattaccccgaccgaaggcgaagtgatgcttttgggcgaacgtaccggtagcaaagcgggggcgcggcttcgcagccaaatcggctacctgcccgaaaccgttgcgctgcacccttcgctgatcggcatcgaaacgctggatttttatgccaaacttaaaaaacagccgctcacgcagaaccgggggctgcttgagcgcgtcggcatttcacaggcggcacaccgccgcgtcggcacttattctaaagggatgcgccaacgccttgccttggcacaagccctgctgggcgagcccaaagtcctgctgtttgatgaaccgacaaccggtcttgaccatgcatcacgacaaatgttttacgaagtcgtgcgcgaactcaacgggcgcggcgcgaccgtattgctcagcacccacgcccttgccgagttggacgggcacgccgaccgcattatcgtggattaa

SEQ ID NO: 50251 - DNA, 1536 bp, Neisseria meningitidis
atgaatttgcctattcaaaaattcatgatgctgtttgcagcagcaatatcgttgctgcaaatccccattagtcatgcgaacggtttggatgcccgtttacgcgatgatatgcaggcaaaacactacgaaccgggtggtaaataccatctgtttggtaatgctcgcggcagtgttaaaaatcgggtttacgccgtccaaacatttgatgcaactgcggtcggccccatactgcctattacacacgaacggacaggatttgaaggcattatcggttatgaaacccatttttcaggacatggacatgaagtacacagtccgttcgataatcatgattcaaaaagcacttctgatttcagcggcggcgtagacggtggttttaccgtttaccaacttcatcggacagggtcggaaatccatccggaggatggatatgacgggccgcaaggcagcgattatccgccccccggaggagcaagggatatatacagctactatgtcaaaggaacttcaacaaaaacaaagagtaatattgttccccgagccccattttcagaccgctggctaaaagaaaatgccggtgccgcctctggttttttcagccgtgctgatgaagcaggaaaactgatatgggaaagcgaccccaataaaaattggtgggctaaccgtatggatgatattcgcggcatcgtccaaggtgcggttaatccttttttaatgggttttcaaggagtagggattggggcaattacagacagtgcagtaagcccggtcacagatacagccgcgcagcagactctacaaggtattaatcatttaggaaatttaagtcccgaagcacaacttgcggctgcaaccgcattacaagacagtgcttttgcggtaaaagacggtatcaattccgccagacaatgggctgatgcccatccgaatataactgcaacagcccaaactgcccttgccgtagcagaggccgcaggtacggtttggcgcggtaaaaaagtaaaccttaacccgaccaagtgggattgggttaaaaataccggctataaaacacctgctgcccgacctatgcagactttagatggggaaatggccggtgggaataagccagcgaagcaagctactcctaatggcaaagctggcgtttctacacaacaatctttgcaaaatagtctcgttccacaaaaaaattatacgcatactacctataatggtggatcagctattacagatggtaaatatattactgaccctctcagtatggtacgacacaaacctgatgcatctagtctagacaagatagatagcaaaagtttatttaaatcagatgttgatgcggaaaaagctacattagatgctgctagatatgcagataaacataatttatgggatagtcaaaataaggcaaaagttccaacgaacgacgtagttggctatacagacggaaaaccgacacatataattaacatttatcgtagaaagccgaataaagatgggtttagacctgtgcatggaacaccaggtaaggaacgttga

SEQ ID NO: 50252 - DNA, 987 bp, Neisseria meningitidis
atgcaataccgaatcagaagagaaaacgaagcacccgaagcaaaaaatgcgggggaaaccttatgggagcgcgacatcatgcgcgaagtgctgctgtccgcctatcaggacaggcgcagggagcggatgtggaaaaacatctggcgcgccgtcagcaccctgattctggttgccctgattgcaggcattttccgaaaagacgaagccgcattgcagttggcgggcaacacgccgcataccgcagtcgtcaatctgtacggcgaaatcggcaacggcgtagaagaccaggtcaaaaaactcaaagacggtatggaagctgcctacaaaaacccgcaggcaaaagccatcgtcatccgcgccaacagccccggcggttcgcccgtcgtgtccaacaccgcttttgaagaaatacgccgtctgaaggcgcagcaccccggcatccccgtttatctcgtggcggaggatatgtgcgcgtccggctgctactacatcgcggcggcggcggacaaaatctatgccgactcgtccagcatcgtcggcagcatcggcgttatcggcagcagtttcgacgcgaccggcctgatggaaaaaatcggcgtgaaacgcagggttaaaattgcgggcagcaacaaaggcatgggcgatccgttttcgcccgaaacgcccgaacagtcgaaaatctgggaagaaatgctgaccggcatacacggcgagttcatcaaagccgtcaaaaccggacgcggcgaccgcctcaaattccgacaatatcccgacgtgttcagcggtcgcgtgtacacaggcgcggatgcgctgaaagtcgggctggtggacggactcggcaatatttacagcgtggcgcgagacgtggtcaaagcccccgatgtggtggattacactccgaaggacgatttcggcagaatcttgggcagacgcttcggcgcagaactcaaagcaagcgtgcgcgaagccctgcaggccgtccggtag

SEQ ID NO: 50253 - DNA, 612 bp, Neisseria meningitidis
atgaaattacaacaattggctgaagaaaaaatcggcgttctgattgtgttcacgctgcttgtagtcagtgtcggtctgttgattgaagttgtgcccttggcctttaccaaggcggcaacacagccggcgccgggcgtgaagccttacaatgccctgcaggttgccggacgcgatatttacatccgtgagggctgttacaactgccactcgcaaatgattcgtccgttccgtgcggaaaccgagcgttacggtcattactctgttgccggagagtcggtttacgaccatccgttccaatggggttccaaacgtaccggtcctgatttggcacgtgtgggcggtcgttattccgacgaatggcaccgtatccacctgctgaatccccgtgatgtcgtgcctgagtccaatatgccggcattcccgtggcttgcacgcaataaagtcgatgtcgatgcaaccgttgccaacatgaaggctttgcgtaaagtaggtactccttacagtgatgaggaaattgcgaaagcgcctgaggctttggcaaacaaatccgagctggatgctgtagtcgcctatctgcaaggattgggtctggctttgaaaaacgtaaggtaa

SEQ ID NO: 50254 - DNA, 1500 bp, Neisseria meningitidis; identical to SEQ ID NO: 48324

SEQ ID NO: 50255 - DNA, 2025 bp, Neisseria meningitidis; identical to SEQ ID NO: 43581

SEQ ID NO: 50256 - DNA, 402 bp, Neisseria meningitidis
atgcagcaacatattgaaaaatggcaacacttgagccgggaagaacagaaaatccttgctgaagtatggggtctcgtgcaaaacgacaatcaggaggttcactatgaaatgctcaaattgaacgcacccgacgaagccagtggcgaattttggttcagaatggcagaaacactcagcaccctgccgcccaaccgttccctcgaccttagaatgaacggcggcaggctggcgaccgccgtatccatcctttccgtcatgattgaagacaatcccgacataccgcagctttgggcgcaaaaaattaccgcgctcaattatagtggattaaatttaaaccagtacggcgttgcctcgccttgtcgtactatctgtactgtctgcggcttcgtcgccttgtcctga

SEQ ID NO: 50257 - DNA, 1392 bp, Neisseria meningitidis
atgcaattgtttttagacaatctcaaagcctttttcgaaaccgtcagcggctgggtctggggatctgttatgttgatgctgctggtcggcaccggcattgtgctgaccgttatgctgaaaggcttacagttcactatgttgggctatgcgctgaaacaggcgtttgtgccgtcaaagaagtatgaaggcggcgaaggccacgaaggcgatatttcccattttgcggcgttgatgaccgcgctgtccgccaccatcggtacgggtaacatcgccggcgtggcgactgcggtggtaaccggcggcccgggcgcggtattttggatgtggatgaccgccattttcggcatggccaccaaatacggcgaaggcgtgttggcggtgaaataccgcgtcaacaattccaaaggcgaaatgtccggcggcccgatgtattacatcgaaaaaggcttgggcaaaaactggaaatggatggccgttgcatttgcgctgttcggcacattcgcttccttcggtatcggcagctcggtgcagtccaactcggttgcacaggcggtgcaaaccagcttcggtatcgaacctgcctataccggcattacgttgaccgttctgactgccgttgtcgttttaggtggtattaaaggcatcgccaaagccgcttctttcatcgtgcctgctatggcggtgttttatgtgttgggcggtctttccattatcgcgattaattccgatgcactgatgcctgccgtcaagctaattttctccgatgcgttcagcgcgcaggcagtggcgggcggcgctatcggtacggtcatccgctacggcgtggcgcgcggcgtgttctccaatgaggcgggtatgggttctgcgcctattgccgccgcagccgcgaaaaccgaccatcccgtccgtcaggccttggtttctatgaccggtacgtttttggataccatcgtcgtttgctcgattaccggcatcgtgttggtaatgggactgctcggcgcgggcggcgagtttgtcaaacctgaagtgagcggcgcggcactgacaaccgtcacattccaaaaaatgctgcccggcatcggcggctggattgtcaccatcggcctgattttctttgcctactcaaccattctcggctggtgctattacggcgaaaaatgcgcggtgtatgttttcggcgagaaatttgccggtttgtaccgcgtcggttatgtttcttccgttatgctgggtaccgtgttgagccttgatttggtgtggctggcttcggacacattcaacggcttgatggcattgcccaacctgattgcacttttattgatggcgaaagtcatcgtcaatgaaacgcgcgacttcaaacaaaaaatcacaaacggcgaattgccgcattaa

SEQ ID NO: 50258 - DNA, 1188 bp, Neisseria meningitidis; identical to SEQ ID NO: 49497

SEQ ID NO: 50259 - DNA, 1005 bp, Neisseria meningitidis
atgagcattaaagtagcgattaacggtttcggccgcatcggccgcctcgcattgcgtcaaattgaaaaagcccacgacatcgaagtcgtcgccgtcaacgacctgacccctgccgaaatgctgctgcaccttttcaaatacgacagcacgcaaggccgtttccaaggtactgccgaattaaaagacgatgccatcgtggtaaacggcaaagaaatcaaagtttttgccaatccgaatcccgaagaattgccttggggcgagttgggtgtggatgtcgtcctcgaatgtaccggcttctttaccaacaaaaccaaagccgaagcccacatccgtgccggcgcgcgcaaagttgtgatttccgcacctggcggcaatgatgtgaaaaccgtcgtatatggcgtaaaccaagacattttggacggcagcgaaaccgtcatttcctccgcttcctgcaccaccaactgccttgccccgatggcggcagtcctgcaaaaagagttcggcgtagtcgaaggtctgatgaccaccatccacgcctacaccggcgaccaaaacacccttgacgcgccgcaccgcaaaggcgatttgcgccgcgcccgagccgccgcgctcaacatcgtgcccaacagcaccggtgccgccaaggccatcggtctggttatccccgaattgaacggcaaactcgacggctccgcccaacgcgtccctgttgccaccggctcgctgaccgaattggtttccgtcctcgaacgccctgtaaccaaagaagaaatcaacgccgcgatgaaagccgccgccagcgaatcttacggctacaacgaagatcaaatcgtttcttccgacgttgtcggcatcgaatacggctcgctctttgacgcaacccaaacccgcgtgatgaccgtgggcggcaaacaactggtgaaaaccgttgcctggtacgacaacgaaatgtcctacacctgccaactcgtccgcactttggaatacttcgcaggcaaaatctaa

SEQ ID NO: 50260 - DNA, 309 bp, Neisseria meningitidis; identical to SEQ ID NO: 39572

SEQ ID NO: 50261 - DNA, 1296 bp, Neisseria meningitidis
atgcccgcgcctgatttgggatttgccttaagtctgccgccaaaaaaggcaatcgagtggctggaaagtaaaaaggttacggcggagagctaccgcaatctgacagcctccgaaattgccaaagtctatacgattgcccgcatgaccgacttggatatgctcaacgacatcaaaacttcgatggttgaatcggcaaaaagtggacagtcgtttgacgattggcgaaaaggtatcttgaatctgctcggcaacaagggctggctgcatccgaacgggcataacggtaaggatatcatcgacccagccaccggcgaggtattcggttcgccgcggaggttggagacgatttaccgtaccaacatgcaaactgcctacaacgccggtcaatatcaaggatatatggcaaatattgatgcacggccttattggatgtatgacgcggtaggcgacagccgcacccgtccggcgcattcggcaatagacgggctggtgtaccgctacgacgacccgttttgggcaacgttttacccgcccaacggctacaactgccgctgctcggtcattgctttatcagagcgcgatgtcgaacgtcaggggcggattgtcgggcaaagcacggcggacaatctggtcgagacccataaaatctacaacaaaaaaggcgacagctacccgacgactgcctacaaagccccggacggcagcctctacacagctgacaaaggcttcggctacaacgccgggcgaatgaactaccgccccgatttagacaagtacgaccgcgcgttggcgcatcaatttgccaaagcggaaatgggtggtgcggattttaaaaccagctttaaacagcttgaaaaagagttttatgaagtcaagcaacgtttgaatattgatggcaagcccgataaagagcagaaaatcaaaatccgaaacgcgctatcaagacagcttaaatttgctgcgggtgtattgagcaaggaaatgcaagaactggcaggtatgactcgagcgacggtgtggctgtctgatgatacgttggttaaacaggtagacagccgtgaggggcagaatttcgatgactcctactatgcttttttgccggatatgctgcaaaaccctgaacatgtcatccgcgacaatcgtgaattgattttcacagctcgctataaaggctcggcattgtgggcagttttaaaatatattaaggaggtggatgagatttatctacagtcgtaccgaatcagcaacgacaaagagattgccaaatttatggcgaagaagaaagtattgaaatag

SEQ ID NO: 50262 - DNA, 510 bp, Neisseria meningitidis; identical to SEQ ID NO: 36289

SEQ ID NO: 50263 - DNA, 627 bp, Neisseria meningitidis
atgaacgttaacgttatcaaccatccgctcgtccgccacaaattaaccctgatgagggaggcggattgcagcacctacaaattccggacgcttgccatcgagctggcgcgcctgatggcatacgaggcaagccgtgattttgaaatcgaaaaataccttatcgacggatggtgcggtcagattgaaggcgaccgcatcaagggcaaaacattgaccgtcgttcccatcctgcgtgcaggtttgggtatgcttgacggcgtactcgacctgattccgactgccaaaatcagcgtagtcggactgcagcgcgacgaggaaacgctgaaacccgtttcctacttcgagaaattcgtggacagcatggacgaacgtcctgccctgattatcgacccgatgctggcgacaggcggttcgatggttgccaccatcgacctgttgaaagccaagggctgcaaaaacatcaaggcactggtgctggttgccgcgcccgagggtgtgaaggcggtcaacgacgcgcatcccgacgttacgatttacaccgccgcgctcgacagccacttgaacgagaacggctacatcatccccggcttgggcgatgcgggcgacaagattttcggcacgcgctaa

SEQ ID NO: 50264 - DNA, 1047 bp, Neisseria meningitidis
atgtcagacgacaaaagcaaagcccttgccgccgcactggcgcaaatcgaaaaaagtttcggcaaaggcgccatcatgaaaatggacggcagccagcaggaagaaaacctcgaagtcatttccaccggatcgctcggattagacctcgcactcggagtcggcggtctgccgcgcgggcgcatcgtcgaaatcttcggtcccgaatcttccggcaaaaccacattatgcttggaagccgtcgcacaatgccagaaaaacggcggcgtgtgcgcctttgtcgatgccgaacacgccttcgatcccgtttacgcccgcaaactcggcgtaaaagtcgaagagctttacctctcccagcccgataccggcgaacaggctttggaaatctgcgatacgctcgtgcgctccggcggcgtagatatggtagtcgtcgattccgtagccgcacttgtccccaaagccgaaatcgaaggcgatatgggggacagccacgtcggactgcaggcgcgcctgatgagccaggctttgcgtaaactgaccggacacatcaaaaaaaccaacacgctggttgtgttcatcaaccaaatccggatgaagatcggcgtaatgttcggcagccccgaaaccaccaccggcggcaacgcgctgaaattctattcttccgtccgcctcgacatccgccgcaccggatccatcaaaaaaggcgaagaagtattgggcaacgaaacccgcgtcaaagtcatcaaaaacaaagtcgcccccccgttccgtcaggcagagtttgacatcctctacggagaaggcatcagttgggaaggcgaattgatcgacatcggcgtaaaaaacgacatcatcaacaaatccggcgcgtggtacagctacaacggcgcaaaaatcggtcagggcaaagacaacgtccgcgtctggctgaaggaaaatcccgaaattgctgatgaaatcgacgcaaaaatccgcgccctcaacggcgtagaaatgcacatcaccgaagggacgcaggacgaaaccgacggcgaacgccccgaagaataa

SEQ ID NO: 50265 - DNA, 696 bp, Neisseria meningitidis; identical to SEQ ID NO: 38171

SEQ ID NO: 50266 - DNA, 660 bp, Neisseria meningitidis
atggacacttggcacgatgcactcggcggcgaaaaacagcagccgtattttcaggaaattttaaatgcagtcaggcaggaacgtttgtcgggacaaatcatctatccgccggcggcggatgtattcaacgcattccgcctgacagcgttcgaccgggtcaaagccgttattctcggacaagacccgtatcacggggcagggcaggcgcacggtttggcattttccgtcaggcagggcgtccgcatacccccgtctttactcaatatctacaaagaattggaaaccgacatcgaaggtttttccattcccgcgcacggctgtctgacagcgtgggcggagcagggcgtattgcttctgaacacggttttgacggtgcgtgcaggacaggcgcattcgcacgcccttttaggctgggaacgctttaccgataccgtcatcaggcagcttgcgacacaccgcaagcaccttgtcttcatgttgtggggtgggtatgcacaacaaaaagggaggctgatagacagtcaaaatcatttgatattgaccgcaccgcatccatctcctctgtcggcatatcgcggttttttcggctgccgacatttttcacaggcaaacagctatttgagccggcacggtatcgatccgataaactggaagctgtga

SEQ ID NO: 50267 - DNA, 1869 bp, Neisseria meningitidis
atgcaagctgtccgatacaggcctgaaattgacggattgcgggccgttgccgtgctatccgtcattattttccacctgaataaccgctggctgcccggagggtttttgggggtggacattttctttgtcatctcgggattcctcattaccggcatcattctttctgaaatacagaacggttctttttctttccgggatttttatacccgcaggattaagcggatttaccctgcctttattgcggccgtgtcgctggcttcggtgattgcctctcaaatcttcctttacgaagatttcaaccaaatgcggaaaaccgtggagctttctgcggttttcttgtccaatatttatctggggtttcagcaggggtatttcgatttgagtgccgacgagaaccccgtactgcatatctggtctttggcagtagaggaacagtattacctcctgtatcctcttttgctgatattttgctgcaaaaaaacaaaatcgctacgggtgctgcgtaacatcagcatcatcctatttctgattttgactgccacatcgtttttgccaagcgggttttataccgatattctcaaccaacccaatacttattacctttcgacactgaggtttcccgagctgttggcaggttcgctgctggcggtttacgggcaaacgcaaaacggcagacggcaaacagcaaatggaaaacggcagttgctttcatcactctgcttcggcgcattgcttgcctgcctgttcgtgattgacaaacacaatccgtttatcccgggaatgaccctgctccttccctgcctgctgacggcactgcttatccggagtatgcaatacgggacacttccgacccgcatcctgtcggcaagccccatcgtatttgtcggcaaaatctcttattccctatacctgtaccattggatttttattgctttcgcccattacattacaggcgacaaacagctcggactgcctgccgtatcggcggttgccgcgttgacggccggattttccctgttgagttattatttgattgaacagccgcttagaaaacggaagatgaccttcaaaaaggcatttttctgcctctatctcgccccgtccctgatacttgtcggttacaacctgtacgcaagggggatattgaaacaggaacacctccgcccgttgcccggcgcgccccttgctgcggaaaatcattttccggaaaccgtcctgaccctcggcgactcgcacgccggacacctgcgggggtttctggattatgtcggcagccgggaagggtggaaagccaaaatcctgtccctcgattcggagtgtttggtttgggtagatgagaagctggcagacaacccgttatgtcgaaaataccgggatgaagttgaaaaagccgaagccgttttcattgcccaattctatgatttgaggatgggcggccagcccgtgccgagatttgaagcgcaatccttcctaatacccgggttccaagcccgattcagggaaaccgtcaaaaggatagccgccgtcaaacccgtctatgtttttgcaaacaacacatcaatcagccgttcgcccctgagggaggaaaaattgaaaagatttgccgcaaaccaatatctccgccccattcaggctatgggcgacatcggcaagagcaatcaggcggtctttgatttggttaaagatatccccaatgtgcattgggtggacgcacagaaatacctgcctaaaaacacggtcgaaatacacggctgctatctttacggcgaccaagaccacctgacctatttcggttcttattatatggggcgggaatttcacaaacacgaacgcctgcttaaatcttctcgcgacggcgcattgcagtag

SEQ ID NO: 50268 - DNA, 921 bp, Neisseria meningitidis
atgagaatcaggctggggcggcacaacgcgcccgactttccacagggtgccgccgtaaccataggcaatttcgacggcgtacacctcggacacaaacacatcctccaaaaactccgcctcgaagccgatgcgcgcggcctgcccgtcgttgccgtcatctttgagccgcaacccaaagaattttttgcaagccgcaccggcaaaaccccgccgtgccgcatcagccccctgcgcaccaagcttgaattattggaaggcacaggctgcgtcgatgccgtctgggttttacgtttcgatcaaaatttttccgaaatatccgcgcaagggtttatcgaccgcctgctgcgtcaaaccttgaatacgcgttatttgctcgtcggcgacgatttccgtttcggcgcggggcgcgaaggctgttttgaacttttggcacaacagcccgatatgcagaccgaacgcacgccttccgtcatcgtcgaagacatccgcaccagcagtaccgccgtccgccaagccctttcagacggcaacctcgcttatgcgaaaaaacttttgggacacgactacgttttggggggcagggtggtgcacggcagaaaactcggacgcaccctaaacgccccgactgccaacatccgcctgcccgaccaccgttatgccctcggcggcgtgttcgtcgtcgatgcggacggcgcattcggcacgcggcgcggcgtggcgagcttcggcttcaatcccaccgttgatagcggctgttctcaaaagcttgaagtccacctgttcgactttcaaggcgacctgtacggacaacggctgaacgtccgcttcctgcacaaactgcgcgatgaggaaaagtttgacggtatggaagaactgaaaaggcagattgaagccgatatggaagccgcaaagtgttggtag

SEQ ID NO: 50269 - DNA, 1329 bp, Neisseria meningitidis
  misc_feature 6, 7, 8, 9, 10: 'n' is a, c, g or t
gtgtgnnnnnagacccagcgcagccgcaacaatttcaaaatcggcggcgaaaccctgccgcagccgctgatttatgctttggcgttggtgaaaaaagccgctgccgcgaccaatgtttccctcggcaggattaagccggaacaggcggatttgattacgcaggcggcggatgatgtgttgaacggcaggcttgacggacagtttcctttagtggtttggcagaccggctccggcacgcagtccaatatgaacatgaacgaagtgctggcaaaccgcgccaacgaaatcgccggtacgggtttggcggcttatcagcccgtccatcccaacgaccatgtgaaccacgcgcaatcgaccaacgacgcattcccgaccgctatccacgttgccgccgcgattgaaatcaaccgccacctcatccccgccgtaaaagccctgcgcgataccttggacaaaaaagcccaagctttcgcccccattgttaaaatcggccgcacccacttgcaagacgcgacgccgctgactttgggacaggaattttccggctacgtttcccagcttgatcacggtttaggccgtctgaacgatgcgcttaaagacttgtatgaacttgctttgggcggtacggcggtcggcacgggtttgaacagccatcccgaatacgccgaaaaagctgctgctaaactcgccgaactgtctggcttgccgtttgtcagcgcgccgaacaaatttgaagccttgggcggacgcgatgccgccgttgccgcttcgggcgcattgaaaacgctggcggcaagcctgaataaaatcgccaacgacatccgctggctggcaagcggcccgcgttgcggtttgggcgaaatcaaaatccccgaaaacgagccgggttcgtccatcatgccgggcaaagtcaacccgacccaatgcgaagcaatgacgatggtgtgctgccaagtgttcggcaacgacgttaccatcggtatggcgggcgcgtcgggcaatttcgagctgaacgtctatatgcccgttatcgcctacaacctcttgcaatccatccgcctcttgggcgacgcgtgcaacagcttcaacgaacactgcgccgtcggcatcgaacccgtaccggaaaaaatcgactatttcctgcaccattccctgatgctcgttaccgcgttaaaccgcaaaatcggttacgaaaacgccgccaaagtcgccaaaaccgcctacaaaaacaacaaatcgttgcgcgaaaccgccgttgagttgggcttgctgacgggcgaagaatttgacgaactggtcgttcctgccgatatggttcatccgcgctaa

SEQ ID NO: 50270 - DNA, 618 bp, Neisseria meningitidis; identical to SEQ ID NO: 43073

SEQ ID NO: 50271 - DNA, 852 bp, Neisseria meningitidis
atgacattactcggaataaagctcaaacagacccagcagctcaaccagcggctgcaacaatctttgcgcgtattgcagatgtcgggtatcgaacttgaacgcgagatcgaaaactggctgtcggacaatcccctgctcgaacgcaaagacacggatgaattttccgatgccgggttttcccattacaccgcgcccgcgcgccaaatcggcggagacgaaggcgaagatatgctgtccaacatcgccggcgaagaagatttcaagcaatacctgcacgcgcaagtgtgcgaacacccgctttccgatcaagaatccgcctgtgtccacatccttatcgatttccttgacgagcagggctacctgaccgacagcatcgaagacatcctcgaccatacgcccttggagtggatgttggatgaggcaatgctgaaacaagccctgaccgcattgcaaaaattcgacccggcaggcgtggccgccgccgatttgaacgaatcgctgatactgcagatagaaagatcgggcgaatgtgctgccaaacccgccgccctgcatatcgtccgaaacgccctcgacagcattaacggcaaccgcagccaaaccctcgcacgaataaaaaaacacctgccccaaaccgacagcggcacactcgaagccgcactcgacctcattgcttcgctcaatccctttcccgccgccggttttgcctcgtccacgcccacgccgtattctgacgaggcgctcgccaacctgctggctttccgcggcatggaggtttctcgccgcaccattgccaaatacagagaatcctttgagattccggcagcacacaaacgcaaaaccgcagaataa

SEQ ID NO: 50272 - DNA, 1221 bp, Neisseria meningitidis
atggcacagacacacgatactcgattacaaaaaactttgctctttcccagtcaacaaggttggaaatctaaaacttttcttaaacctgattcacatattagattagcaaccgtattcagcgggattggtgcggttgaacaggcattccaccgattaaatttaaaccataccattgttttttcaggagatattgatccatacgttaaaaaaagttatcttggaaactataaattaaatgaagatttttggcataacgacattactcaatttgatgcgagaaagtttagaaatcaagttgatattttagttggaggcagtccttgccaagcattttccatggttggcaaacgtgcaggattagaagatacacgaggaacattattctatgaatttgctcgcgttgtggatgaagtccaaccaaagatatttatttatgaaaatgtaaagggcttgcttaatcatgataatggaaaaacttggaaagttgtaaaaagtgttttttattcacttggttatgacttatatttccaaataatgaatagtaaggattatgggattcctcaacatcgtgagcgtatttttgttgttggctttcatacccctcctataaatggttttcagtttcctgaaaagattgaattagaacatactatgcaagattttttggaggactatactgatagcaaatattttttacgtgaaaagggtgcgaaatttgttaccagttctaaaaatagacaaaaacgttatacacagattaatggagaaattgccttatgccaaaaagcaaatcaacaatttaattggcatggtgattttatttttcaggcagcccgcgaatctgaatttgatgactttatttttgatgtaaataacgttgaggaaaaatattatctttctgaaaaaatcaaaaattatgttttggcaggaggaacaaaaaattttaaaaccagtacggaaactgatttgcctgtagctcgcccattattgcaaactatgcataaaatgcatcgtgccggggttgataattatgttactcataatcgtggacgtattcgtaaattaacacctagggaatgtttgcggctaatgggttttagagatgattttaaaattttagttagtgatactcaaatgtatcgccaagcgggaaacagtattgttgttgatgtattaatcgctatattaaaacaaatggatattacgctttatggagagtaa

SEQ ID NO: 50273 - DNA, 1257 bp, Neisseria meningitidis; identical to SEQ ID NO: 43860

SEQ ID NO: 50274 - DNA, 957 bp, Neisseria meningitidis; identical to SEQ ID NO: 50089

SEQ ID NO: 50275 - DNA, 864 bp, Neisseria meningitidis
atgaaaaccttcttcaaaaccctttccgccgccgcactcgcgctcatcctcgccgcctgcggcggtcaaaaagacagcgcgcccgccgcatccgcttctgccgccgccgacaacggcgcggagaaaaaagaaatcgtcttcggcacgaccgtcggcgacttcggcgatatggtcaaagaacaaatccaagccgagctggagaaaaaaggctacaccgtcaaactggtcgagtttaccgactatgtacgcccgaatctggcattggctgagggcgagttggacatcaacgtcttccaacacaaaccctatcttgacgacttcaaaaaagaacacaatctggacatcaccgaagtcttccaagtgccgaccgcgcctttgggactgtacccgggcaagctgaaatcgctggaagaagtcaaagacggcagcaccgtatccgcgcccaacgacccgtccaacttcgcccgcgtcttggtgatgctcgacgaactgggttggatcaaactcaaagacggcatcaatccgttgaccgcatccaaagcggacatcgccgagaacctgaaaaacatcaaaatcgtcgagcttgaagccgcgcaactgccgcgtagccgcgccgacgtggattttgccgtcgtcaacggcaactacgccataagcagcggcatgaagctgaccgaagccctgttccaagaaccgagctttgcctatgtcaactggtctgccgtcaaaaccgccgacaaagacagccaatggcttaaagacgtaaccgaggcctataactccgacgcgttcaaagcctacgcgcacaaacgcttcgagggctacaaatcccctgccgcatggaatgaaggcgcagccaaataa

SEQ ID NO: 50276 - DNA, 1224 bp, Neisseria meningitidis
atgtcgggcaatgcctcctctccttcatcttcctccaccatcgggctgatttggttcggcgcggcggtatcgattgccgaaatcagcacgggtacgctgcttgcgcctttgggctggcaacgcggtctggcggctctgcttttgggtcatgccgtcggcggcgcgctgttttttgcggcggcgtatatcggcgcactgaccggacgcagctcgatggaaagcgtgcgcctgtcgttcggcaaacgcggttcagtgctgttttccgtggcgaatatgctgcaactggccggctggacggcggtgatgatttacgccggcgcaacggtcagctccgctttgggcaaagtgttgtgggatggcgaatcttttgtctggtgggcattggcaaacggcgcgctgattgtgctgtggctggttttcggcgcacgcaaaacagacgggctgaaaaccgtttcgatgctgctgatgctgttggcggttctgtggctgagtgccgaagtcttttccacggcaggcagcaccgccgcacaggtttcagacggcatgagcttcggaacggcagtcgaattatccgccgtcatgccgctttcctggctgccgcttgccgccgactacacacgccaagcacgccgcccgtttgcggcaaccctgacggcaacgctcgcctatacgctgacgggctgctggatgtatgccttgggtttggcagcggcgttgttcaccggagaaaccgacgtggcaaaaatcctgctgggcgcaggtttgggtgcggcaggcattttggcggtcgtcctgtcgaccgttaccaccacttttctcgatgcctactccgccggcgtaagtgccaacaatatttccgccaaactttcggaaacacccatcgccgttgccgtcgccgttgtcggcacactgcttgccgtcctcctgcccgttaccgaatatgaaaacttcctgctgcttatcggctcggtatttgcgccgatggcggcggttttgattgccgactttttcgtcttgaaacggcgtgaggagattgaaggctttgactttgccggactggttctgtggctggcgggcttcatcctctaccgcttcctgctctcgtccggctgggaaagcagcatcggtctgaccgcccccgtaatgtctgccgttgccattgccaccgtatcggtacgccttttctttaaaaaaacccaatctttacaaaggaacccgtcatga

SEQ ID NO: 50277 - DNA, 684 bp, Neisseria meningitidis
atgacgggatttaatgatgccgccggcgtggcatccgtctccaccgacatcaaaggcaaatatgttcaaagcgttacagtcgcaaacggcgtcattaccgcccaaatggcttcaagcggcgtaaacaacgaaatcaaaggcaaaaaactctccctgtgggccaagcgtcaagacggttcggtaaaatggttctgcggacagccggttacgcgcgccgccaaagccaaagacgacgttaccgccgacaccaccaccaacaccaagatcgacaccaagcacctgccgtcaacctgccgcgacgcagcatctgccgtttgcacaaaaacacccgagtattacccgaatcacggcgaatggccgtccgacaatagtgccgccggcgtggcatcttcttcaacaatcaaaggcaaatatgttgagaaagttgaagtcaaaaacggcgtcattaccgccgaaatgaaatcaagcggcgtaaacaaagaaatccaaggcaaaaaactctccctgtgggccaagcgtcaagacggttcggtaaaatggttctgcggacagccggttacgcgcaacgccgccaacgccaaagccggcaccgacgaagtcaccgccgccacacccgacaccgacaaaatcaacaccaagcacctgccgtcaacagcaccgacaagaaaatcgacaccaaactag

SEQ ID NO: 50278 - DNA, 390 bp, Neisseria meningitidis
atgtggaaaatcataaaagaggatagtgatgatttaggatttgcaattaaatgcttattctctcaatctattgatttaaatgaattcaagttatggattgaacaagtaatacgcgatatgcccattgaggacatccctttttatatttttgacttggcggatttcgatgtaggaattggcgatattggcaatattgtaggttttgctccgagttccagcctgccgaaatcgaaaaaaaatgccttgaccggcattgccttcttaagggggatagatgtctatgaccctcccgtttcaaaagaaaaagcattaaaagccttagagaaatatcctgaaatttatcagaaatttcagcatttctttccgtttgtagagctgccgccgctttaa

SEQ ID NO: 50279 - DNA, 411 bp, Neisseria meningitidis
atgaaaatttataatttagataatattataacttcatcagcattgagtctgtataaatccacttgggttaagttagatttaatatcttgtgctaaatttatcataaaaggaacggattttacttttgattgggatgaaggaattgaaaattggatagttttttttcataaaaacaaagttattggttatttgtgtgcaaaattaccttttgctatattagacaacgaacaattaaaaaatcagctatatcacaaatatcctcatgtattaaccttacaaattaaaaatattgaaactgaaaaaatatctttaaatgtaaacatttgtagattaacgttatgcccatcatttcatgatgaacatgatacgcttgtttgttcagtgcaagatttttatgtaaatactgtttaa

SEQ ID NO: 50280 - DNA, 234 bp, Neisseria meningitidis
atgtggcacatcgtcgccatcggctatctttttgttgccgttatgtattccgccgcgcagccgagtattgcgcgcgccttgatttatttggttttttgggcggtgctgcccaccgtgttcacggtcttcgtcgtaaccgtccgccgccgcaaccgcttgatgaagcaacaggaacaggcagaattcgaacagcagcgtgcacaacggcaaaaagacagcggcacaaaaccctga

SEQ ID NO: 50281 - DNA, 351 bp, Neisseria meningitidis; identical to SEQ ID NO: 40802

SEQ ID NO: 50282 - DNA, 1227 bp, Neisseria meningitidis
atgaataccgataacctgcacgacatcttggacgaaatggttcaagtgtattctcaaaaaaaacaaagccgatccgaaaccccggccgaaatcagcgcacacttccacccgctgctcgaccgcctgtgcgaaaccgcagaagcacaaaacgcgtccgacatccttatcagcaaaggattcccgccctcgttgaaaatcaacagcgcattaaccccgcagccgcaaaaggcgctgacgggcgaggaaaccgccgccatcgccgcatcgacgatgaacgccgaacaatcggaaatattccggcgcgacggcgaaatcaactactccgtccagtcgcgcagcggcacgcgctaccgcgccaacgcctaccacagccaaggcagcgcaggtttggttttgcggcgcatcaaccacgtcatcccgcaaatgcaggaattaggcctgcccgaaaaactcaaagacctcgccgtcgcaccgcgcgggctgctgattatcgtcgggcctaccggttcgggcaaatccaccacgatggcgactatgctcgaacaccgcaacaaaaccctgcccagccatatcgttaccatcgaagacccgattgagtttatctacaaaccgcgccgctgcatctttacccagcgcgaaatcggcgtcgacaccataaactggcagacggcggtacaaaacgctatgcgccaatcccccgacgtggtctgcatcggcgaagtccgcagcagggaaagtatggaatacgcgatgcagctcgcccaaaccggccacctgtgcatttttacgctccacgccaacaccgcgccgcagtcgctcgaacgcatactcaacttctaccccaaagaacagcacaaccaaatactgatcgacatcgccctcaacctgaccggcatcatctgccaacgcctcgccctcaaacaagacaaaacgggcaggacggcggttgtcgacttgctcatcaacacgcccgccatccaagacttcatcctgaagggcgacctgatgaacatcagtaaaatcatggaaaccgccaaaaccgacggaatgcagacgatggatcaaaaccttttcgaactgtaccgtcacggcatcatcagttacgaagaagccctgcgccagtccgtttccgccaacaacctgcgattgcacatccaactgcacaaagaaggcaaaacgcccgaactcctttacgacagggtcaacggtctcaacctcatttcctga

SEQ ID NO: 50283 - DNA, 954 bp, Neisseria meningitidis
atgacacataccgtccacctgcatttagaagaaaccgacaacttggcgttgcagcgtctgtgcggttcttttgacaacaaccttgatttacttgctaaagcactcgatatccacatcagccgccgttttgaacatttcactttcaacggcgcatttgcacacgccggcaaacgcgcactgctcaaactcttggaaacggcgcagacgcgcgacctaaacgacggcgacatcaggcttgccgccgtcgaagcccaaaccgaagatgccggtcatcaagaaaaaaaccatgaccacgcctattatttccgcaccaagcgcggcagcatcggcggcagaacgccacggcagaacggctatatccgcgccctactcaaccacgacatcgtattcggtctcgggccggcaggtacgggcaaaacctatctcgccgtcgccgccgccgtcgatgcgatggaaaaacaccaagtcgaacgcatcattttagtgcggcctgccgtcgaagccggcgagaaactgggttttctgcccggtgacctgacccagaaagtcgatccctaccttcgtccgctttatgatgccctctatgacctgatgggctttgaccgtgtcaccaagctgattgaaaaaggcctgattgaaatcgccccgctcgcctatatgcgcggcaggacgctcaacggcgcatacatcatcctcgacgaagcgcaaaacaccacgcccgaacaaatgaaaatgttcctgacccgcatcggcttcggcgcgaaagccgtcattaccggcgacaccagccaaatcgacctgcccaaaaacatcaaatcgggattaaaagatgcgcgtgagaaactgcacggcgtggaagggctgtatttccacacctttaccggcgaagacgttgtccggcatcctttggtgcaaaaaatcgtcgaagcctacgaatcggcagaacacgactga

SEQ ID NO: 50284 - DNA, 1224 bp, Neisseria meningitidis
atgaaaacggtagtctggatcgtcgtcctgtttgccgccgccgtcggactggcactggcttcgggcatttacaccggcgacgtgtatatcgtactcggacagaccatgctcagaatcaacctgcacgcctttgtgttaggttcgctgattgccgtcgtggtgtggtatttcctgttcaaattcattatcggcgtattcaatatccccgaaaagatgcagcgtttcggttcggcgcgtaaaggccgcaaggccgcgcttgccttgaacaaggcgggtttggcgtattttgaagggcgttttgaaaaggcggaactagaagcctcacgcgtgttggtcaacaaagaggccggagacaaccggactttggcattgatgttgggcgcacatgccgccgggcagatggaaaacatcgagctgcgcgaccgttatcttgcggaaatcgccaaactgccggaaaagcagcagctttcccgttatcttttgttggcggaatcggcgttgaaccggcgcgattacgaagcggcggaagccaatcttcatgcggcggcgaagatgaatgccaaccttacgcgcctcgtgcgtctgcaacttcgttacgctttcgacaggggcgacgcgttgcaggttctggcaaaaaccgaaaaactttccaaggcgggcgcgttgggcaaatcggaaatggaacggtatcaaaattgggcataccgccgccagctggcggatgctgccgatgccgccgctttgaaaacctgcctgaagcggattcccgacagcctcaaaaacggggaattgagcgtatcggttgcggaaaagtacgaacgtttgggactgtatgccgatgcggtcaaatgggtcaaacagcattatccgcacaaccgccgccccgagcttttggaagcctttgtcgaaagcgtgcgctttttgggcgagcgcgaacagcagaaagccatcgattttgccgatgcttggctgaaagaacagcccgataacgcgcttctgctgatgtatctcggtcggctcgcctacggccgcaaactttggggcaaggcaaaaggctaccttgaagcgagcattgcattaaagccgagtatttccgcgcgtttggttctagcaaaggttttcgacgaaatcggagaaccgcagaaggcggaggcgcagcgcaacttggttttggaagccgtctccgatgacgaacgtcacgcagcgttagagcagcatagctga

SEQ ID NO: 50285 - DNA, 1179 bp, Neisseria meningitidis
atggcatttttaaaactgaccgaacaaaacgtgcagggcaaaaccgtcctcatccgcgccgatatgaacgtgccgttcaaagacggcaaaatcagcgacgacacccgtatccgcgcctcgctcgcgtccatccaatactgcatggacaacggcgcatccgttatcgtgatgacccacttgggccgcccgaccgaaggcgagttccaccccgaagacgacgttgcgcccgttgccgcgcatttgggcggcctgttgggcaaaaacgtgaaagtattgaacgactggcgcgaaaacaaaccggctttgaacgcgggcgatgtcgtgatgctgcaaaacgtgcgtatcaacaaaggcgagaagaaaaacgatttggaactgggcaaagcctacgcttctttgtgcgacgtgttcgtcaatgacgcgttcggcaccgcgcaccgcgcccaagcctcgaccgaagccgtcgcccaagccgctcccgttgcctgcgccggcgtattgatggcgggcgaactcgacgctttgggcaaagccttgaaacagcccgcgcgcccgatggttgccatcgttgccggcagcaaagtgtccaccaagctgaccatcctcgaatcgctggcggacaaagtcgaccaactcatcgtcggcggcggtatcgccaacaccttcctgttggcggaaggtaaagccatcggcaaatctttggcggaacacgatttggtggaagaatccaaaaaaattatggcaaaaatggcggccaaaggcggttctgtgccgctgccgaccgatgtcgtcgttgccaaagcctttgccgctgatgaggaagcggtggtaaaagacattgccgacgttgccgaagacgagatgattttggacatcggcccgaaatctgccgccgcgcttgccgatttgcttaaagccgccggtacggtcgtatggaacgggccggtcggcgtgtttgagtttgaccagttcgcaggcggtacgaaagcccttgccgaagccattgcccaaagcaaagcgttctcgattgcgggcggcggcgacacgctggcggcgattgccaaattcggcgttaccgaacaaatcggctacatctccaccggaggcggtgcgttccttgagttcttggaaggcaaagagctgcctgccgtagccgctttggaaaaacgcggcgcgtaa

SEQ ID NO: 50286 - DNA, 219 bp, Neisseria meningitidis; identical to SEQ ID NO: 40879

SEQ ID NO: 50287 - DNA, 486 bp, Neisseria meningitidis
atggacgcgctgcacaccatcgcccgaaacctgacgaaaaaacgtcaaaccgtaagctgtgccgaatcctgtacgggcggaatgcttgccgccgcattcacaagcgttgcaggcagttcgcaatggttcgaccagagttttgtaacatacagcaacaaagccaaagaagaccgcttgggcgtgttgcccgaaaccctgctcgaacacggcgcggtcagccgccaaaccgtctatgagatggcgcgcggcgcgaaagccgtggcgcaggcggattacgccgtcggtatttccggcatcgccggtccgggcggcggcagcgaaagcaaacccgtcggcacggtttggttcgggtttgcctttccgggcggaagttgcgaagcaatgcgccgttttgacggcaaccgcgaatccgtccgcgcgcaggcggtcgccttcgcgttggaacggttggcggggctgattgaaaacggcggcgatgccgtctaa

SEQ ID NO: 50288 - DNA, 531 bp, Neisseria meningitidis; identical to SEQ ID NO: 39309

SEQ ID NO: 50289 - DNA, 1821 bp, Neisseria meningitidis
atgccttgtatgaatcatcaatcaaactcaggcgaaggagtgcttgtggctaaaacatatttattgactgcattgataatgtctatgacaatctctggatgtcaagtcatccatgccaatcaaggtaaggttaatactcattctgctgtcatcacaggtgcagacgctcacacgcctgaacatgcaacgggactgatcgaacaaaagcaggtgattgcaagtgattttatggtagcgtcagccaatccattagcaacacaagctggctatgatatcttaaagcaaggcggtagcgctgcagatgcgatggtggcggtgcagacgacactaagcttggtagagccacagtcgtcaggcttgggcggtggtgcatttgtgttgtattgggataataccgccaaaacattgaccacatttgatgggcgtgagacggcaccgatgcgtgcgacgccggaattatttttggataaagatggtcaaccattgaaatttatggaagcggtggtcggtggtcgctcggtgggtacgcctgctatccctaaactgatggagacaatacatcagcgatacggtgtattgccttggggaaaattatttgatacaccgatccgcttggcaaaacaaggctttgaggtgtcgccaaggcttgccatctcggttgagcaaaatcagcagcatttggcacgctatccaaaaacagccgcttattttttgccgaatggtgtgccgctacaagcaggcagcttgctgaaaaatttagaatttgctgacagtgttcaggcgttagcagctcaaggtgcaaaagctctgcatactggtaaatatgcccaaaatatcgtttcagttgtccaaaatgctaaggataaccccggtcaattatccttacaagatttatctgattatcaagtggtggaacgcccgcctgtttgtgtgacttatcgtatttatgaagtatgcggtatgggtgcaccaagctcaggtgggattgctgtgggtcaaattttggggattttaaatgaattttcacccaatcaggtggggtatgatgctgaaggtttacgtctcttgggcgacgcttctaggcttgcgtttgcggatcgtgatgtatatttgggcgaccctgattttgtaccagtacccattcgccagttgatttctaaagactacctaaaacatcgcagccagctgcttgagcagtcggataaggcattgcctagcgtatctgcaggcgattttattcatgagtgggtgtcctcacaagcgattgagttaccttctaccagtcatatatcaattgtggataaggcgggcaatgtgctatcaatgacgacttccattgaaaatgcgtttggctcaactttgatggcaaatggctacctgctgaataatgagctgacagactttagttttgagccaataaagcagggcaaacaggtcgccaatcgtgtcgagcccggcaagagaccacgctcctcaatggcaccaaccatcgtatttaaagcaggcaagccttatatggcaatcggctccccaggtggtagccgtatcattggctatgtcgctaagacgattgtggcacatagtgactggaatatggatatccaagatgccatcagtgcacccaatttattaaatcgctttggtagctatgaactagaaacgggtacaaccgccctccagtggcaacaagcattaaatgatttgggctataagactgacgtgcgtgagctaaattcaggtgttcaagccattattatcgagccaagcaggctggttggtggtgccgatccacgccgagaaggtcgagtgatgggtgattag

SEQ ID NO: 50290 - DNA, 498 bp, Neisseria meningitidis
atgactgcgcttacccttccggaagacatccgccaacaagaaccatccgttctgctctataccctcgtttccgcctacctcgaacacaccgcccaaaccggcgacgaatccctctcctgcctgtccgacgaccagcacacgctgaccgcattctgctacctcgacagccaagtcgaagaaggcggcttcgtgcaactcatcgcctccggttacggcgaatatattttccgcaacccgcttgccgacagcctgcgccgctggaaaatcaaagccgtgccgaaagtcttggacaaagccaaagccctctacgaacaacacggcgaaaccatcgaaacgctcgccgacggagggcgggacatcccttccctgcgcaaacagttccccgactttgaagaatgggacggcgcatactacgaagccgccgaacaagacctgcccctgcttgcagaacacatacagtcaaactgggaaaccttcgcccatatcgggcaggcgtga

SEQ ID NO: 50291 - DNA, 1413 bp, Neisseria meningitidis
  misc_feature 8, 9, 10, 11, 12, 1390, 1391, 1392, 1393, 1394: 'n' is a, c, g or t
gtgtgtgnnnnntgtcgacatccccaaaggcaatctgaaaccgaaatcgaaaagctggccaaacagcccgaatacgcctacctgaaacagcttcagacggccaagaacgtcgattggaaacaggtgcagctggcctacgacaaatgggactataaacaggaaggcttgaccggagccggtgcagcgattgtggtgattattgtaaccgctctaacttatggatacggagcggctgcagcgggtagcgtaactgccgcaggaagtagtacagccgcagctgcaacaacgacagcggcagcaactaccactgtttctactgcagctgccatgcaaaccgcagctttagcctccttgtatagccaagcagctgtagccatcatcaataataaaggcgatgtaggcaaagcattaaaagatctcggcaccagtgatacggtcaagcagattgttacttccgcactgacggcgggtgcattaaaccagatgggcgcagatattgcccaattgaacagcaaggtaagaaccgaactgttcagcagtacgggcaatcaaaccattgccaaccttggaggcagattggccaccaacctcagcaatgcaggtatctcagctggtatcaataccgccgttaacggcggcagcttgaaagacaacttaggcaatgccgcattgggagcattggttaatagcttccaaggggaagccgccagcaaaatcaaaacaaccttcagcgacgattatgttgccaaacagttcgcccacgctttggcgggttgtgttagcggactggtacagggaaaatgtaaagatggggcaattggcgcagcagttggggaaatcgtagctgaatccatacttggcggcagaaaccctgctacactcagcgatgcagaaaagcataaagttatcagttactcgaagattattgcgggcagcgtggcggcactcaacggcggcgatgtgaatactgcggcgaatgcggctgaggtagctgtggtgaataatgctttgaattttgacagtacccctaccaatgcgaaaaagcatcaaccgcagaagcccgacaaaaccgcactggaaaaaatcatccaaagtattatgcctgcacatgcggcaggtgcgatgactaatccgcaggataaggatgctgccatttggataagcaatatccgtaatggcatcacaggcccgattgtgattaccagctatggagtttatgcagcaggttggacagctccgctgatcggtacagctggtaaagcagctatcagcacctgtatggctaatccttctggttgtactgtcatggtcactcaggctgccgaagcgggcgcgggaatcgccacgggtgcggtaacggtaggcaacgcttgggaagcgcctgtggggnnnnncacacacttaattaattaa

SEQ ID NO: 50292 - DNA, 1809 bp, Neisseria meningitidis
atgcgtaccaactattgcggtctgatcagtgagcaatacttagaccaaaccgttaccgtcaaaggctgggtacaccgtcggcgcgaccacggcggtgtgatttttatcgacctgcgcgaccgcgaaggcatcgtccaagtcgtgattgatcccgacacgcccgaagcgtttgccgctgccgattccgctcgcaacgaatacgttttgagcattaccggccgcgtacgcaaccgtcccgaaggtacgaccaacgacaaaatgatttccggcaaaatcgaaatccttgccaaagaaatcgaagtcttgaacgccgccgccacgccgccgttccaaatcgacgatgaaaacatcagcgaaaacgttcgcctgaccaaccgcgttatcgacttgcgccgtccggtgatgcaacgcaacctgcgcctgcgttatcaagtcgctatgggcgttcgccgttatctggacgcgcaaggcttcatcgacatcgaaacgccgatgctgacccgctccactccggaaggcgcgcgcgactacctcgtgccgagccgcgttcatccgggcgagtttttcgcgctgccgcaatcaccgcaattatttaagcaactgttgatggtggccggtttcgaccgttactatcaaattaccaaatgtttccgtgacgaagacttgcgtgccgaccgtcagcctgaattcactcaaatcgacttggaaacctcgttcttgaacgaggatgaaattatggacatcaccgaaggtatggcgaaacaagtcttcaaagatgctttaaacgtagatttaggcgacttcccgcgtatgccttacgccgaagccatgttctactacggctctgacaaaccggatatgcgtatcaacttgaaatttaccgagttgaccgacctgatgaaaacggaagaattcaaagtcttccgtggcgcggcagatatgaaaggcggccgtgtagtcgccctgcgcgtaccgaacggcgcaaaattcagccgcaaagaaatcgacgaatacactaaatttgtcggcatctacggcgcgaaaggtctggcatacatcaaagtaaacgatgtgggcaacctctcaaacggcgaagacagcggcctgcaatctccaatcgtaaaattcctgtctgagaatgccctgaaagaaatcatcgagcgtaccggcgcacaaaacggcgatattattttcttcggtgcggacaaaaccaaagttgtgaacgaagccatcggcgcattgcgtatcaaagtcggcttggaacacggcaaagacaacggctacttcacagacgaatggaaacctttgtgggttgtcgatttcccaatgttcgaatacgacgaagaagccgaccgctacgttgccgtacaccatccgtttactgcgccaaaagaaggtcatgaagacctgatggtttccgacccggcaaattgtttggcacgcgcctacgacatggtattgaacggctgggaaatcggcggcggctctatccgtatccaccgtgcagacgtacaagagaaagtgtttgccgcgctgaaaatcagccctgaagagcaacaagagaaattcggcttcctcttggacaacctgaaattcggcgcacctccgcacggcggccttgcattcggcctcgaccgtttggttaccctgatgaccggcgccgaatctatccgcgacgtgattgccttcccgaaaacacaacgtgcccaatgcatgctgaccaacgcgcccaacagcgtggacgacaagcagttgcgcgaattgagcttgcgcctgcgtcaaaaggtggctgaaaccaaagaagcataa

SEQ ID NO: 50293 - DNA, 1770 bp, Neisseria meningitidis
atgaccgtacagaccaagacaaaaggtttggcgtggcaagaaaaaccgctatccgacaacgaacgtctgaaaaccgaaagcaattttttacgcggcacgattttggacgatttgaaagacccgctcacgggcggcttcaaaggcgacaacttccaactcatccgcttccacggtatgtatgagcaggacgaccgcgacatccgcgccgaacgcgccgaggcaaaactcgagcccttgaaatttatgcttttgcgctgccggctgccgggcgggatcatcaaaccgtcccaatggatagaactggacaaatttgcccgggaaaacagtcattaccgctccatccggctgaccaaccggcaaaccttccaatttcacggcgtgccgaaagccaagttgcagacgatgcaccgcctcttgcacaaactgggtttggattccatcgccacggcggcggatatgaaccgcaacgtgctttgcacgtccaacccgatcgagtccgaactgcaccggcaggcttacgaatacgcgaaaaagatttccgaacacttgctgccgcgcacgcgcggttatctggatgtgtgggtggacggcaaaaaagttcaaagttctgacgacttccttcaagaagacgagccgattttgggcaaaacctatctgccgcgcaaattcaaaaccgcagtcgtcatcccgcccttaaatgatgtggactgctacggcaacgacttggattttgtcgccatttcagacggcaacggacagcttgccggattcaatgttttggcgggcggcgggctttcgatggaacacggcaacaccaaaacctatccgaacatttcactggaactgggtttcgtgcctccggaacacgcgctgaaggccgccgaagcggtggtaaccacgcagcgcgacttcggcaaccgcagcgaccgcaaaaacgcccgcacccgctacaccattcaaaatatgggcttggacaacttccgcgcggaagtcgaacgccgtatgggtatgccgttcgaacccatacgcccgttcaaatttaccgggcgcggcgaccgcatcggctgggtgaaaggcatagacggcaactggcatttgacccttttcatcgaaagcgggcgtttggttgacgaaggcgggaaacagcttctgaccggcgtgttggaaatcgccaaaatccacaaaggcgacttccgcatcaccgccaaccaaaacctcatcgtggcaaatgtacccgaaagaggcaaagcccggatcgaacagctcgcccgctcatacgggctgatacacgacggtgtcagcaaactgcgcgaaaatgcgatgtcgtgcgtttccttcccgacctgcccgctggcaatggcggaagccgaacgcgtgctgccggacttcatcggcgagctggataagattatggcgaaacacggcacgtcggacgactacatcgttacccgcattaccggctgcccgaacggctgcggacgggcgatgttggcggaaatcggactggtcggcaaagccgtcggacgctacaacctccacatcggcggcgaccgcgaaggcgtacgcatcccccgtctttacaaagaaaacatcaccctgcccgaaatccttgccgaattggacgacctgatcggcaaatgggcggcagaacgcaatatcggcgaaggtttcggcgatttcgccatacggacgggcatcgtcaaacccgtattaaatgcacccgttgatttttgggacgcatccaaagccgtcgcgattgcccgcgcctga

SEQ ID NO: 50294 - DNA, 702 bp, Neisseria meningitidis; identical to SEQ ID NO: 43219

SEQ ID NO: 50295 - DNA, 159 bp, Neisseria meningitidis
atggaattacacgacaggcaggaaatgccgtctgaaaggattttccggtcaatcttgcgattggtcggggtttcatcggaaacggtgaaacaaaagtttgccggcgtagagttgagctacgcgggcaaagccgcaggcgaaagcctgtattgtttgtga

SEQ ID NO: 50296 - DNA, 687 bp, Neisseria meningitidis
atggaaacctttaaagacagactggtttttttatggaaaagcgaagcgaagcaggcaaaaatcgcatccgatattgaaatgacgattgcgggcttcagcaggatatggaatgaaggcggtttgccgaagtctgaaacattaaaaaaaatcaagcagttgaaggggtgtagtatcgattggctgctgaccggggagggtaatccgtttccggatgaagccccaaaaaaatcccttgcttacgatactttgggcaatgaagtcgatacggacgagtttgtcttcgtgccgagatatgatattcgggcggctgcgggatacgggcagtttgtcgatcatgaggaaccggtatttacaatggcgttcagacggcattggattgagaattatgttacccgcgatacgaaaaacctgtctgtaatttccgtcaagggggattcgatggagggggttttgaatgacggcgattcgattttggtcaatcatggtgaaaatacgccgagggacggtctgtatgtgttgcggattaatgaaaatctgctggttaaacgtttacagattgtaccgggcgggattatcaatgtgatttctgcaaacgaggcttatcctgcttttgaaatcaatttgaacgatttgaccgatgatgtggagattatcgggcgtgtcgagtggttcggcaggacgatttga

SEQ ID NO: 50297 - DNA, 1410 bp, Neisseria meningitidis; identical to SEQ ID NO: 42274

SEQ ID NO: 50298 - DNA, 807 bp, Neisseria meningitidis
atgaatatgaaaaaatggattgccgccgcccttgcctgttccgcgcttgcgctgtctgcctgcggcggtcagggtaaagatgccgccgcgcccgccgcaaatcccgacaaagtgtaccgcgtggcttccaacgccgagtttgccccctttgaatctttagactcgaaaggcaatgtcgaaggtttcgatgtggatttgatgaacgcgatggcgaaggcgggcaattttaaaatcgaattcaaacaccagccgtgggacagccttttccccgccttgaacaacggcgatgcggacgttgtgatgtcgggcgtaaccattaccgacgaccgcaaacagtctatggacttcagcgacccgtattttgaaatcacccaagtcgtcctcgttccgaaaggcaaaaaaatatcttcttccgacgatttgaaaaacatgaacaaagtcggcgtggtaaccggctacacgggcgatttctccgtatccaaactcttgggcaacgacaatccgaaaatcgcgcgctttgaaaacgttcccctgattatcaaagaactggaaaacggcggcttggattccgtggtcagcgacagcgcggtcatcgccaattatgtgaaaaacaatccgaccaaagggatggacttcgttaccctgcccgacttcaccaccgaacactacggcatcgcggtacgcaaaggcgacgaagcaaccgtcaaaatgctgaacgatgcgttggaaaaagtacgcgaaagcggcgaatacgacaagatttacgccaaatattttgcaaaagaagacgaacaggccgcaaaataa

SEQ ID NO: 50299 - DNA, 915 bp, Neisseria meningitidis; identical to SEQ ID NO: 42445

SEQ ID NO: 50300 - DNA, 201 bp, Neisseria meningitidis
atgtttgtctgcatctgcaatgccgttaccgaccatcaaatcaaggaaaccatcgccgccggcgcgaccacaatgggcgatttgcagtcgcaattgggcgtagcgagctgctgcggctgctgcggggagcttgccgcttcgtttctgacggcgcacaatgcgcaaccgacggttacggcggttatcaacgttcaagcgtaa

SEQ ID NO: 50301 - DNA, 567 bp, Neisseria meningitidis
atgggtttttatgctttgctcttgattgctctggggatgtcgatggatgcgtttgccgtcgcattggcaaagggtgcggcggtcagaatgcctccgcgcaaaattgcggcaacggctttggtgttcggcacggttgaagcgctcacgccgctggcaggctgggtaggcggtttttatgccaagccgtttatcagcgaatgggaccattgggtggctttcgtcctgctgggcgggctgggtctgaaaatgatgcgcgaagggctgtccggcgaggcggaagatgtgcgcgaaagcaaacgggaaagcctatggatgacggttttgactgcttttggaaccagtattgattccatgatagtcggggtgggcttggcgtttatggaggtaaacatcgcctttgccgccgcaatcatcggtatggcgacgacggtgatggttacggtcgggctgacggcgggaagggctttgggcgtattgttcggcaaacgcgccgagtttgccggaggtttggtgttgattgccatcggtacatggacgctcttgtcgcatttgggtttgattcaatga

SEQ ID NO: 50302 - DNA, 561 bp, Neisseria meningitidis; identical to SEQ ID NO: 43439

SEQ ID NO: 50303 - DNA, 774 bp, Neisseria meningitidis
atgaaaccgaaaatccaaaggcacggagagattttaagccttgtccgccggcatcagtttatgtcggtggacgagcttgccgccgcattggacgttaccccgcagacgatacgccgcgacatccgcgaattggaggatgctggcagcctgaaacgccaccacggcggcgcatcctcgggcggaaacttgccggaggggctgcctgccagccgccaaattcaatgtcaaaacgaaaaaaacgccattgcccggctgattgcggaacatattcccgacgagtcatcgctgtttgtcagtatcggcacgacgatggaagccgtggcatcggagctggtgagacggcgcggcagcctgcggattattaccaacaatatccacgtcgcctccatcgtttcggcgcggacggattacacggtcatcatcacttccggagtcgtccgccctttggacggcggtattaccggcgtggcaaccgtcgattttatcaaccagttcaaagtcgattatgccgtgatgagtacgcacggcgtggaaagcgacggttcgcttttggacgacgactacaaagaagtcagcgtgatgcaggcgatgattgccaacgcgcgcgtccgcttcctcggcgtggaccacagtaaattccgcagcaacgcgctggtcaggctcggcgacattacggcgtttgacaaagtatttaccgaccggctgcccgataccgcgatgcagaagatgctgaaagaggcgggggtggaatgcctgattgccgatgccgtctga

SEQ ID NO: 50304 - DNA, 645 bp, Neisseria meningitidis
atgattgttttagtcggtttgggaaataaaaaaatgaagaataatgattgcttccgcctgaaaaacccccagtccggtatggcgctgatagaagtcttggttgctatgctcgttctgaccatcggtattttggcgttactgtctgtgcagttgcggacagtcgcttccgtcagggaggcggagacacaaaccatcgtcagccaaatcacgcaaaacctgatggaaggaatgttgatgaatccgaccattgattcggacagcaacaagaaaaactataatctttacatgggaaaccatacactatcagctgtggatggcgattttcaggttgatgccataaaaactaagacgcagttggcagaggcacaattgaagagatttagttatgagctgaaaaatgccttgccggatgcggcagccatccattacgccgtctgcaaggattcgtcgggtgttgcgccgacattgtccgccggcagtactttttcttcaaattgcgatgctagtgcaaatggggatactttgattaaagtattgtgggtaaatgattcggcaggggattcggatatcaaccgtacggatcttgagacgaacggcaacaatatcgtatatacctatcaggcaagggtcggaggtcgggaatga

SEQ ID NO: 50305 - DNA, 558 bp, Neisseria meningitidis
atgaatatgaaaaccttattagcactagcggttagtgcagtatgttcagttagtgttgcgcaagcacacgagcataatacgatacctaaaggtgcttctattgaagtgaaagtgcaacaacttgatccagtaaacggtaacaaagatgtgggtacagtgactattactgaatctaactatggtcttgtgtttacccctgatttacaaggattaagcgaaggcttacatggtttccacatccatgaaaacccaagctgtgagccaaaagaaaaagaaggtaaattgacagctggtttaggcgcaggcggtcactgggatcctaaaggtgcaaaacaacatggttacccatggcaagatgatgcacacttaggtgatttacctgcattaactgtattgcatgatggcacagcaacaaatcctgttttagcaccacgtcttaaacatttagatgatgttcgcggtcactctattatgatccacacgggtggtgataatcactccgatcatccagctccacttggcggtggcggcccacgtatggcatgtggcgtgattaaa

SEQ ID NO: 50306 - DNA, 639 bp, Neisseria meningitidis
atgtccaaactgaccccccgcgaaattttgaccgccggcgcagttgtgccggtaatggcgattgacgacttaagcaccgccgtcgatttgtcccacgcccttgtcgaaggcggcatccccaccctcgaaatcaccctgcgcacccctgtcggcctcgatgccatccgcctgattgccaaagaagtgcccaacgccatcgtcggcgcgggtacggttaccaaccctgaacagctcaaagccgtcgaagacgcaggcgcggttttcgccatcagcccgggtttgcacgaatccctcgccaaagccggccacaacagcggcatccccctgattcccggtgttgccaccccgggcgaaatccaactggctttggaacacggcatcgacaccctcaaactcttccctgccgaagtcgttggcggcaaagccatgctcaaagccctgtacggcccttacgccgatgttcgcttctgcccgacaggcggcatcagcctcgccaccgcgcccgattacttggcactgcccaacgtcctgtgcgtcggcggctcatggctgacgccgaaagaagccgtgaaaaacaaagactgggacaccatcacccgtctcgccaaagaagcggcggcattgaaacccaaagcctga

SEQ ID NO: 50307 - DNA, 348 bp, Neisseria meningitidis
atgcgcctaaaccacaaacagggcgaggcaggcgaagatgccgcgcttgccttcctccaatcccaaggctgcacgctgcttgcccgcaactggcactgcgcctacggcgaaatcgacctgattgtcaaaaacggcggcatgattctgtttgttgaagtaaaataccgcaaaaatcggcaattcggcggtgtcgcatacagcatttccccatccaaattattgaaactgcaacgaagtgtagagtattatctgcaactgaacaggctgacaaacgtaccgtgccgtctcgacgcggtactcatcgaaggcagccgcccgcccgagtggatacagaatattacaggttga

SEQ ID NO: 50308 - DNA, 942 bp, Neisseria meningitidis
atggcaatccaatggtttcccggccatatgaacaaagcgaaaaaagccatcgccgagcgcgccaaaagcgtagacatggtgattgaaatgctggatgcgcgaatgcccgcctccagcgaaaaccccctgcttgcccaactttccaaaggcaaacctaaacttaaaatcctcaacaaacaagatcttgccgaccccgagcgcaccaaaatctggctcgaacactataacagccgccccgacacctgcgccatcgccctcgattcctccgaaacaggcgcacacggcaaaattacccaagcctgtcgtgccatgattccccaccgccaaggcatagataaacccctgcgcgtcctcatctgcggcatccccaacgttggcaagtccaccctcatcaacggcatgataggcaaaaaatccgccaaaaccggcaacgaacccggcatcaccaaagccgaacaacgccttttccttgccgacgacttctggctgtacgacacccccggaatgctgtggccgaaaatcattgtcgaagaaagcggctacaacctcgccgccggcggcgcagtcggacgcaacgcattggacgaagaagaagtcgccctcgaacttttagactacctccgccgccactacctccctatgctgcaagaacgctaccaagccgacaaagaccccagcagccactgggacgaaaacgtttggctcgaatggatagccaaaaaacgcggcgcagtcctcagcggcggacggatcaactaccaaaaagccgccgaaaacatcctcaccgacttccgtgaaggcaaaatcggcagaatcaccctcgaaacgccgaaccaatgggaaacttggctcaaaaaagcccgtcagaaagaagccgaactcaaagccatacgcgaagccagaaaagcagagcgtaaagggcagaagccttcggaagcataa

SEQ ID NO: 50309 - DNA, 723 bp, Neisseria meningitidis
atgccgtctgcaccgtcggcgcctgttcagacggcattattgtttcaaccgacaaaggacatccacaccatgcaggataatgctttgaccatcgccttatccaaggggcgcatttttgaggagacgctgccgctgcttgccgctgccggcattgttccgactgaagagcctgaaaaatcgcgcaagctgattatcgggacgaaccatgaaaacatccgccttgtcattgtccgcgcaaccgatgtgccgacttatgtccgctacggcgcggcggacttcggcattgcgggcaaagacgtgctgatcgaacacggcggcacggggctttaccggcctttggatttggagattgccaagtgccgcatgatggttgctgtgcgtaaagggtttgattacgaagcagcttcgcaacccggatgccgtctgaagattgccacgaagtatcctgaaatcgcggcatctcattttgccggcaagggtgtccatgtggacattatcaaactgtacggctcgatggaacttgcgccgctggtcggcttgagcgatgcgattgtggacttggtttcgacgggcaacaccttgaaggcaaacggcttggaagcagtcgaacacatcgtcgacatttccagccgcctggtggtcaacaaggctgctttgaaaacgaaatacgcgctgctggagccgattattcaggcgttcggcggcgcagtgaaggcgaagtaa

SEQ ID NO: 50310 - DNA, 642 bp, Neisseria meningitidis
ttgggaacgtgcgcccctccaaacaaagcaagccctgccgccttcacggaaaacggggattcaaccgataaggaaattttgatgaacagactgctactgctgtctgccgccgtcctgctgactgcctgcggcagcggcgaaaccgataaaatcggacgggcaagtaccgttttcaacatactgggcaaaaacgaccgtatcgaagtggaaggattcgacgatcccgacgttcaaggggttgcctgttatatttcgtatgcaaaaaaaggcggcttgaaggaaatggtcaatttggaagaggacgcgtccgacgcatcggtttcgtgcgttcagacggcatcttcgatttcttttgacgaaaccgccgtgcgcaaaccgaaagaagttttcaaacacggtgcgagcttcgcgttcaagagccggcagattgtccgttattacgaccccaaacgcaaaaccttcgcctatttggtgtacagcgataaaatcatccaaggctcgccgaaaaattccttaagcgcggtttcctgtttcggcggcggcataccgcaaaccgatggggtgcaagccgatacttccggcaacctgcttgccggcgcctgcatgatttccaacccgatagaaaatcccgacaaacgctga

SEQ ID NO: 50311 - DNA, 1248 bp, Neisseria meningitidis
ttgaataccagaagggtcgcagtaacaggcataggcggcattaccgccttcggccgggattggcaaagcatacaggcagcattcaaagccgaaaaaaacgccgtcaaatatatggattggcacgaacgtttccccgaattggaagcgcaactgggtgcgccgattgaaaattacgcgccgccgaaacattggacgcgcaagcagctcagaagtatggggcgtgtgtcgtatttgtgcgtcgatgcggcggagcaggctttgacggatgccggtttgctcggggacgaaagcattaccgacggacggatgggcgttgcctgcggctcttccagcggcagcaccaaagacatcggcgatgtgggcgaattgttgctgaccggcacgtcgcgcaacttcagtgccaacacctatgtgcgtatgatgccgcacaccaccgccgccaatatcggcatctttttcgggctgaaaggacgcatcatcccgacatcgagcgcgtgttcgtccggcagccaaggcataggttatgcctacgaagccatcaaatacggtctgaccgatatgatgctggcgggcggaggcgaagaatttttctcgtccgaagtgtatgttttcgactcgctttatgccgccagccgccgcaacggcgaaccggaaaaaaccccgcgcccatacgacgcgaaccgcgacgggctggtcatcggcgaaggcgcggggattttcgtgctggaagaattggaacacgccaaacggcgcggtgcgataatttacgccgaactcgtcggctacggagccaacagcgatgcctaccatatttccacgccccgccccgacgcgcaaggcgcaatccttgcctttcagacggcattgcaacacgcaggtcttgcgcccgaagacatcggctggattaatctgcacggcaccgggacgcaccacaacgacagtatggaaagccgtgccgttgcagcggttttcggcaacaatacgccctgcacgtccaccaagccgcaaaccggacacacgctgggtgcggcgggcgcaatcgaagccgcgttcgcgtggggcattgccgaccggcaaagcaatcccgaaggaaaacttccgccccagctttgggacgggcagaacgatccgaaccttcccgccatcaacctgaccggcagcggcagccgctgggaaaccgaaaaacgcattaccgccagctcgtcgtttgccttcggaggaagcaactgcgtcttaatcatcggatga

SEQ ID NO: 50312 - DNA, 1440 bp, Neisseria meningitidis
gtgttttaccacagtaaaacaggcgataaaaaatcagccgctaccgatgtgtccgccgcccgaatattaacgaaagtaaatatgaaaccactggacctaaatttcatctgccaagccctcaagcttccgatgccgtctgaaagcaaacccgtgtcgcgcatcgtaaccgacagccgcgacatccgcgcgggcgatgtgtttttcgcattggcgggcgggcggtttgatgcgcatgattttgttgaagacgtattggctgctggtgcggcggcggttgtggtttcgcgcgaagattgcgttgcaatggatggcgcgttgaaagtcgatgacacgcttgccgcattgcaaacgttggcaaaggtgtggcgtgaaaatgtgaatccgtttgtgttcggcattaccggttcggtcggcaagacgacggtgaaggagatgctggctgcggtattgcgccgccgtttcggcgataatgccgttttggcgacggcaggcaacttcaacaaccacatcggattgccgttgactttgttgaaattaaacgaaaaacaccgctatgccgtgattgaaatgggtatgaaccattttggcgaactggcggttttgacacaaatcgccaaacccgatgccgcattggtcaacaacgccatgcgcgcccatgtcggctgcggtttcgacggagtgggcgatattgccaaagcgaaaagcgagatttatcaaggcttatgttcagacggcatggcgctgattcctcaagaagatgccaatatggctgtcttcaaaacggcaacgcttaatttgaatacgcgcactttcggcatcgatagcggcgatgtccacgcggaaaatatcgtgctgaaaccgttgtcgtgcgaatttgatttggtgtgcggcgacgaacgcgccgccgtggtgctgcctgttcccggccgccacaatgtccacaacgccgccgctgccgccgcgctgtctttggctgcgggtttgagtctgaacgatgtggcggaaggtttgcaaggcttcagcaatatcaaaggccgtctgaacgtcaaatccggcatcaaaggcgcaaccctgattgacgatacctacaacgcgaaccccgacagtatgaaagccgcgattgacgtgttggcgcgtatgcctgcgccgcgtattttcgtgatgggcgatatgggcgaactgggtgaggacgaagccgccgccatgcacgccgaagtcggcgcgtatgctcgcgaccaaggcatcgaagcggcttattttgtcggcgacaacagcgtcgaagcggcggaaaaatttggcgcggacggtttgtggttcgccgccaaagacccgttgattcaagtgttgcgccacgatttgcccgaacgcgccaccgtgttggtgaaaggttcgcgctttatgcagatggaagaagtggtcgaggcattggaggataagtga

SEQ ID NO: 50313 - DNA, 1497 bp, Neisseria meningitidis
atgaccacggaaaaccaagccggcagtccggcatccggaatcggcacgtccgaacaaacaaaagccgcgctgaaagcgaaaaaaacgtttgatccgcgtgccagcgtgattcaaatccatcccgaaggcgaacgcatccatccgaaaaaagcggaaggacggttcgccaaactgcgtatcgccgccgtattggcgacgcagtttgtgttttatgtgattccgtggttcaactggagcggcaggcaggctgtcgttttcaatatccccgaacggcatttcttcattttcggattgtcgttgggggtgggcgatttgatttaccttgccttgctgctgatgatttgcgccttcgggctgttttggtggacgacgattgccgggcgactgtggtgcggctattcctgcccgcaaacggtttacaccgaaattatgctgtggatcgacaacctggtcgaaggcgatagaaacaaacggctgaaactggaaaaatcgccgtggaatttcactaaaatccgcatcaaagccaccaaatacctgctgattttccttgtctgcgcgtggacgggcatcacgtttgcaggctggtttgtccctatccgccagttcgttcccgatttattcaccggagcagcaggcggcggcgcggtgtttgccgcagcgttttacggctttatgaccttcttcttcgcccacatcatgcgcgaaaaagtgtgcctgcatatgtgcccgtacgcacgtttccaaagcgcgatgttcgacaaggacacgctgattgtttcttatgacgcggaacgcggcgaaccgcgcggagcccgcaagaaaacggtcaacaaggaagaggcgggtttgggcgactgcatcaactgtgcgatgtgcgtccaagtctgccccgtcggcatcgacatccgcaacggtctgcaataccaatgtatcggctgcgccgcctgtatcgacgcgtgcgatgagattatggacaaaatgggctatccgcgcggattaatccgttatacgaccgaaagcgcgttggaacacgaatatgccgaaaaagacattaaaaaacggctgctcagaccgcgcgtggcaggttacggcgcggtgttggcgttagttatcattgccttcctggccggtttgtccacgcgcaaaatggtcgaggtcgatattttgaaagaccgtggcgtactggtgcgcgaaaacgccaaaggctggctggaaaacgcatacagcctgcgtatcatcaacaaaagtgaaaaagaacagctcattaccgcaagtgtcaaaggctttgacgaaatcgccctgaccgggctgcccgaaggcggtatcaaggttgccccgcgcgaaacggtaacccttcccgtccaagtgtccaccattccggaatacgcggacaaaggcagccaccctatcgaatttaccttccaataccgcgaaagcggcgcgcccgacggcaagccggtcgtcttggaagaagatgcaacctttatcggagaataa

SEQ ID NO: 50314 - DNA, 1071 bp, Neisseria meningitidis
atggcggcttgcccgaacgagagtgtaaaaatggatatttcagattttgattttaccctgcccgaaaagctgattgcccagcatccgcccgaagtgcgcggcagcagccgccttttggttgcgttgcccgatatgccgctgcaagaccgggtgttcggcgatttatccgattatgtcggtgagggcgacgttttggtgttcaacaacaccaaagtcatgaaagcgcggctgtttgggcagaaagacagcggcggcaggatcgaagccctgattgagcgcgtgttggacaaccataccgcactggcgcacatccgttcgtccaagtcccccaagcccggtatggggctggtgtttgaaggcggcatccgtgccgtgatggtcgggcgtgagggcgaactgttctgcctgcgttttgaaggcggtcaaaccgtttacgaacttttggaacagaacggacacctgcccctgccgccttatatcgaacgtgccgccgatgcggatgacgacagccgttatcaaaccgtttatgccaaatatcagggtgcagtcgccgcgccgacggcgggtctgcattttacggaagaacttttgcgccgcctgaaagacaaaggcgcggtaaccgcagaagtaaccctgcacgtcggtgcggggacattccaacccgtgcgtgtggaaaaaatcgaagaacacaaaatgcacagcgaatggtttgaagtgccgtctgaaaccgccgccgccgttgaggcggcaaaagcccgggggaacaaagtctgggcggtcggcacgacttccatgcgcgccctcgagtctgccgcgcgtgcgacgggtcgtctgaaagcggggcagggcgacaccgatattttcatcacgccgggctaccgttttaatgttgccgacaggctggttaccaatttccatctgccgaaatcgacgctgctgatgcttgtcagcgcgttttcgggtatgggtcatatccgcgccgcgtatcgttatgcggtcgaacgcgaataccgtttcttcagctacggcgatgcgatggttttggggcggaacgaaggggtggtacgttag

SEQ ID NO: 50315 - DNA, 867 bp, Neisseria meningitidis; identical to SEQ ID NO: 42936

SEQ ID NO: 50316 - DNA, 1632 bp, Neisseria meningitidis
ttgaaaaagattaaaggaactcaaatgagtatcgtagaaatcaaagtccccgatatcggcggtcacgaaaacgtcgacatcatcgccgtagaagttaaagcgggcgacaccatcgccgttgacgacaccctgattacactggaaaccgacaaagccacgatggatgtgcctgccgatgcggccggtgtcgtgaaagaagtaaaagtcaaagtcggcgacaaaatctccgaaggcggcgtaattttgaccgttgaaaccggtgccgccgctgccgaagccgctcctgctgctgccgaagcacaacctgcacctgctgccgcacccgttgccgcaggcggtgcaaccgttcaagtagccgttcccgacatcggcggccataccgatgtggatgtaatcgccgtcgagatcaaagtcggcgataccgttgccgaagacgacacgctgattactttggaaaccgacaaagcaacgatggacgtaccttgtaccgctgccggtgtcgttaaagccgtattcttaaaagtcggcgacaaagtgtccgaaggtactgccattatcgaagtagaaaccgccggctctgccgcagcagcccctgctcaagccgctcaagctgccgcaccggctgccgctccgcctccgactgctgccgccgcacccgccgccgcgcctgcaccttctgcacctgccgctgccaaaatcgacgaggccgctttcgccaaagcacacgccggcccttccgcacgcaaactggcgcgcgaattgggcgtggatttgggccaagtcaaaggtaccggcttgaaaggccgtatcgtgggcgacgacatcaaagcctttgtgaaatccgtaatgcagggtggcgcggcaaaacctgccgcagccggcgcatctttgggcagcagtctggacttgctgccgtggcctaaagtggacttctccaaattcggcaatgtcgaagttaaagaattgtcccgcattaagaaaatctccggtcaaaacctgtctcgcaactgggtggtgattccccacgttaccgtacacgaagaagcagatatgaccgagctggaagaattccgcaaacaactgaacaaagaatgggaacgcgaaggcgtgaaactgtcaccgttggcgttcatcatcaaagcctccgtttccgcgctgaaagccttccccgaattcaacgcttctctggacggcgacaacctggtgctgaaaaactacttcaacatcggtttcgcagccgatacgccgaacggcttggttgttcccgtcatcaaagacgtggatcaaaaaggcttgaaacaaatcagccaagagctgaccgaattgtccaaaaaagcccgcgaaggcaagctcaaaccgcaagaaatgcaaggcgcgtgctttaccatttccagcttgggcggtatcggcggcacaggcttcacgccgattgtaaacgctcccgaagtcgccatcttgggcgtgtgcaaatcccaaatcaaaccgatttggaacggcaaagagtttgccccgcgcctgatgtgcccgttgagcctgtccttcgaccaccgcgtcatcgacggtgcggccggtatgcgctttaccgtattcttggcgaagctgttgaaagacttccgccgcattaccctgtaa

SEQ ID NO: 50317 - DNA, 1794 bp, Neisseria meningitidis
atgcaattagatatagaccgcttggttgcttatttcggcggcgtgaacgcgcttgccgaagcgttgaaacagcacgatcccgaaaatgccgcgacgaccgccgccatctataaatggcgcacgcgcggctcgctgcctctggtgcaactgcaaaagctgaccgcgttggcggaagcgcaaggcaggccgctggatttgaatgcttttttacaaaaaaacgaatctctggagagaacagaaatgacacaggccaaccgcgttatcattttcgacaccaccctgcgcgacggcgagcagtcgcccggcgccgctatgaccaaagaggaaaaaatccgcgtcgcccgccagctggaaaaattgggtgtggacatcatcgaagcgggttttgccgctgccagcccgggcgatttcgaggcggtcaatgcgattgcgaaaaccattaccaaatcaacggtctgttcattgtcccgcgccatcgagcgggacatccgtcaggcgggtgaggccgttgcgcccgcgccgaaaaaacgcatccacaccttcatcgccaccagccccatccatatggagtacaaattgaagatgaagccgaagcaggtgattgaggcggcggtcaaagcggtgaaaatcgctcgtgaatacaccgacgatgtggaattttcctgcgaagacgcgttgcgttcggaaatcgatttccttgccgaaatctgcggcgcggtgattgaagcgggcgcgaccaccatcaatattcccgataccgtcggctattccatcccgtacaaaaccgaagaatttttccgcgaactgattgccaaaacgcccaacggcggcaaagtcgtttggtcggcacactgccacaacgatttgggcttggcggttgccaattcgcttgccgcattaaaaggcggcgcgcgtcaggtggaatgtactgtcaacggcttgggcgaacgtgcaggcaatgcttcggttgaagaaatcgtgatggcgttgaaagtgcgccacgacttgttcggcttggaaaccggcatcgataccacgcaaatcgtgccttcgtccaaactggtgtccaccattacgggctatcccgtgcagcccaacaaagccattgtcggtgccaatgccttttcgcatgaatcgggcatccatcaggatggggtgctgaaacaccgcgaaacttacgagattatgtccgccgaatcggtcggctgggcaacaaaccgtttgagcttgggcaaattgtccggccgcaacgccttcaaaaccaagctggcggatttgggcatcgagttggaaagcgaagaggcactgaacgccgcgtttgcccgcttcaaagaactcgccgacaaaaaacgcgaaatcttcgatgaagacctgcacgcactggtatccgacgaaatgggcagcatgaatgccgagagctacaaattcatctcccaaaaaatcagcactgaaaccggcgaagagccgcgcgccgacatcgtgttcagcatcaaaggcgaagaaaaacgcgcttccgccacaggctccggccccgtggatgcgattttcaaagcgattgaaagcgtggcgcaaagcggcgcggctttgcagatttattccgtcaacgccgtcacgcaaggtacggaaagccagggcgaaaccagcgtccgtctggcgcgcggcaaccgcgtcgtcaacggtcagggcgcggataccgacgttttggtcgccaccgccaaagcctacctttccgctttgagcaaactggaatttagtgccgccaaaccgaaagcgcaaggcagcggtacgatttga

SEQ ID NO: 50318 - DNA, 693 bp, Neisseria meningitidis
gtgcaggcggatttagcttatgccgccgaacgcattacccacgattatccgaaagcaaccggtgcaaacaacacaagcacagtaagcgattatttcagaaacatccgtgcgcattccatccacccccgggtgtcggtcggctacgacttcggcgactggaggatagcggcagattatgccagttacagaaaatggaacaacaataaatattccgtcaacacaaaagagttgcaaagaaacaataacgctggcaactggatagaactgaagacggaaaatcaggaaaacggcagcttccacgccgtctcatcgctcggcttatccgccatttacgatttcaaactcaacgataaattcgataaattcaaaccctatatcggtgtgcgcgtcgcctacggacacgttaaacatcaggttcattcggtggaaacagaaaccaagattattttcactacaccaacgggaggcgctaaagttggaggcacgatcccaaacaaatcgatgagcaaacctgcctatcacgaaagaaacagcatcagcagcgtgggtcttggtgtcatcgccggtgtcggtttcgacatcacgcccaagctgaccttggacaccggataccgttaccacaactggggacgcttggaaaacacccgcttcaaaacccacgaagtctcattgggcatgcgctaccacttctga

SEQ ID NO: 50319 - DNA, 177 bp, Neisseria meningitidis; identical to SEQ ID NO: 37081

SEQ ID NO: 50320 - DNA, 276 bp, Neisseria meningitidis; identical to SEQ ID NO: 42734

SEQ ID NO: 50321 - DNA, 198 bp, Neisseria meningitidis
atgagcgacccgattttggatgccttggcgcgtattgaaaacaagactgatcaaacgctgaaaaatcagaaggaaatgcaggcggaaattgcgcaaattcgccaagacacgaaacgcacggccattacattcggcgcactgggcggcggcgtgattacggtcggctgggaattgcttaaagcgaaaatggggctgtaa

SEQ ID NO: 50322 - DNA, 1074 bp, Neisseria meningitidis
atgagcattactattcaaaatctaaataaacacttcggagcgttccacgcgctgaaaaacatcaacctcaacgtccccaccggcaaactcgtttccctactcggcccttcaggctgcggcaaaactacacttttacgcattatcgccggactggaaaacgccgacggcggcaatattctctttgacggacaagacgtaaccgccaaacatgtgcgcgagcgcaaagtcggcttcgtgttccaacactacgctcttttccgccatatgaacgtgtttgacaacgtcgctttcggtttgaccgtattgcccaagtccgaacgcccgtccaaaggacaaatctgcactaaagtcgaagaattgctgaaactcgtacaactctcgcatttggcaaaatcctatccgcaccaactctccggcgggcaacgccagcgcatcgccctcgcccgtgcgcttgcggtcgaaccgaaactcctgcttttggacgaacccttcggcgcgttggatgccaaagtacgcaaagaattacgcacctggctgcgcgacatccatcacaacctgggtgtaaccagcattttggttacacacgaccaagaagaagccctcgaagtttccgacgaaatcgtcgtgatgaaccacggcaaaatcgaacaaaccggcagcgccgaagccatttaccgcaaacccgaaaatgccttcgttaccgagttcctcggcgaaaccgacgcatttgaaggacgcatcgaaaaaggcttctggcattataacggcttcgcgtggaaattggacgcacaatacaaatggcaggagcaaaccgccatcggctacatccgtccgcacgaatggcagatcgccgccgaacacgaaacaccgatgatttgtgccgaaatcgaaaaagtccacgccgtcggggcattgacgcatattttggtgaaacacggcaaacaagacgtgcacatcacgctggctggcagcgatgccgcgcgttacccaatcgccgaaggcaaagaattgaagctgattccaaaacaggtttatgtcttctctcaaaacgaactgattgaatattcgatttaa

SEQ ID NO: 50323 - DNA, 1914 bp, Neisseria meningitidis
atgaacccaagccccctactcgacctgattgacagcccgcaagatttgcgccgtctggacaaaaaacagctgccgcgccttgccggcgagttgcgcacctttctgctggaatctgtcgggcagaccggcgggcatttcgccagcaatttgggcgcggtcgaactgaccatcgccctgcactatgtgtacgacacgcccgaagacaagctggtgtgggatgtcggacaccaaagctatccgcacaaaatcctgacaggcaggaaaaaccagatgcacaccatgcgccaatatggcggtttggcgggttttccgaaacgttgcgagtccgagtacgacgcgttcggcgtggggcattcctccacctccatcggcgcggcgttgggcatggcggcggcagacaaactcttgggcagcgaccgccgcagcgtcgccatcatcggcgacggcgcgatgacggcggggcaggcgtttgaagccttgaattgcgcaggcgatatggatgtggatttgctggtcgtcctcaacgacaacgaaatgtcgatttcccccaacgtcggcgcgctgccgaaataccttgccagcaacgtcgtgcgcgatatgcacggcctgttgagtaccgtcaaagcgcaaacgggcaaggtattagacaaaatacccggcgcgatggagtttgcccaaaaagtcgaacacaaaatcaaaacccttgccgaagaagccgaacacgccaaacagtcgctgtctttgtttgaaaacttcggcttccgctacaccggccccgtggacggacacaacgtcgaaaatctggtggacgtattgaaagacttgcgcagccgcaaaggccctcagttgctgcacgtcatcaccaaaaagggcaacggctacaaactcgccgaaaacgaccccgtcaaataccacgccgtcgccaagctgcctaaagaaggcgcggcgcaaatgccgtctgaaaaagaacccaagcccgccgccaaaccgacctatacccaagtgttcggcaaatggctgtgcgaccgggcggcggcagattcccgactggttgcgattacccccgccatgcgcgagggcagcggcttggttgagtttgaacaacgattccccgaccgctatttcgatgtcggcatcgccgagcagcacgccgttacctttgccggcggtttggcttgcgaagggatgaagcccgtcgtggcgatttattccacctttttacaacgcgcctacgaccaactggtgcacgacatcgccctgcaaaacctacccgttttgtttgccgtcgaccgcgcgggcatcgtcggcgcggacggcccgacccatgccggtctgtacgatttgagctttttgcgctgcgtgccgaacatgattgtcgccgcgccgagcgatgaaaacgaatgccgcctgttgctttcgacctgctatcaggcagacgcgcccgccgccgtccgctatccgcgcggcacgggtacgggcgcgccggtttcagacggcatggaaaccgtggaaatcggcaagggcattatccgccgcgaaggtgagaaaaccgcattcattgccttcggcagtatggtcgcccccgcattggcggttgccgaaaaactgaacgccaccgtcgccgatatgcgcttcgtcaaaccgatagacgaagagttgattgtccgccttgcccgaagccacgaccgcatcgttacccttgaagaaaacgccgaacagggcggcgcaggcggcgcggtgctggaagtattggcgaaacacggcatctgcaaacccgttttgcttttgggcgttgccgataccgtaaccggacacggcgatccgaaaaaacttttagacgatttgggcttgagtgccgaagcggtggaacggcgtgtgcgcgcgtggctgtcggatcgggatgcggcaaattaa

SEQ ID NO: 50324 - DNA, 1032 bp, Neisseria meningitidis
atgggcatcaaagtcgccatcaacggctacggacgcatcggccgccaggttttgcgcgccatctacgattatcagattcaagaccaactccaaatcgtcgccgtcaacgccagcggcagccttgaaaccaacgcccacctcaccaaattcgacaccgtgcacggacgctttgaagccgacgtatcccacgacggcggcaacctcatcgtcaacggcgacaaaatccccttcttctcgacccgcaaccctgccgaactgccgtggaaagaactcggtgtcgatttggtcatggaatgcaccggcgcgttcaccagcaaagaaaaagccaaagttcatctggaaagcggcgcaaaaaaagtcctcatttccgcaccgggcggcgacgatgtcgatgcaaccgtcgtgtacggcgtgaacgacagcgtcctgaccgccgacatgaccgtcgtttccaacgcttcctgcaccaccaactgcctctcgccggttgccaaagtgttgagcgaaagcgtcggcatcgtcaaaggcgcgatgaccaccatccacgcgctgaccaacgaccaaaccgttaccgacgtgcgccacaaagacctgcgccgcgcccgcagcggcgtggaaaacatgattccgaccaaaaccggcgcggcaaaagccgtcggtttggtactgcccgaattgaaaggcaggctcgacgggcttgccatccgcgtgccgaccgtcaacgtatcattggtagatttgagcttccaagccgcgcgcgacacgacagtcgaagaaatcaacgcactgatgaaagccgcctcggaagcaggcgcactcaaaggcgttttgggctacaacaccctgcccttggtttccatggacttcaaccacaccaccgaagccagccacttcgacgcaacgctgaccaaagttgttgacggcaacatggtcaaagtgttcgcttggtatgacaacgaatggggcttcagctgccaaatgctgaacaccgcacgccgtatgttcggacttgaagtgcgcccgctcaaataa

SEQ ID NO: 50325 - DNA, 1110 bp, Neisseria meningitidis; identical to SEQ ID NO: 43018

SEQ ID NO: 50326 - DNA, 441 bp, Neisseria meningitidis; identical to SEQ ID NO: 42980

SEQ ID NO: 50327 - DNA, 1395 bp, Neisseria meningitidis
atgaacaaacaacccctttccctcgccgtcgtcggacacaccaacaccggcaaaacctcgctcctgcgtacccttttgcgcgacagcggtttcggcgaagtcagaaacgccccatcgaccacgcgtcatgtcgaagaagccgccatcagcgacggcgcagacacgctggttttcctgtacgacacgcccggactcgaagacgcgggcggcgtgctggaatggctggaaaaccatacggacaatcgttcagacggcatcgaacggctgcaacagtttctcggcagccacggcgcgcaccatgatttcaatcaggaagccaaagtcttacggcaagtcttgcaaagcgatatggcaatgtacgtcatcgacgcgcgcgaacccgttctcgacaaatatcgggatgaattgattatcctttcatggtgcgccaaaccggttatgcccgtgttcaactttaccggcggacagcctcccgaatcgtggacaaccatgctggcgaggagaaacctgcacgttttcgcagggttcgacaccgtcgcctttgattttgaaggcgaactacgcctgtgggaaaacctcgccaccatgttgcccgaacgcagcacacttgaccgcctgacagccatgcgccggcgcgaatggcagcggctggacggcgaagcgcgccgcgaaatcgccgactttttaattgatgccgccgccttcaggcaggaagtggacgaaaacgaggataccgccaccgtgctgcaaaccatgcaggcggaaatacgccaactcgaacggcagatgcagcagcggctgtttgccctctaccgtttctaccacagcgaaatcgacggcggcgactggatgccgcaagccttccgccaagacccgttcgacagcgaattgctcaaacaatacggcatccgcaccggcacgggcgcggcaaccggcgcactcatcggcttggggctggacatcgccacactcggcggctcgctcggattgggtacggcaatcggcggctttttgggcggcatcctgcccaatacccgcaccatttccgacaaactcgccggccgccaaaccttgcacaccgaccccgaaaccctgaccctgctcgccgcccgcgccctcgatctgctccacgtcctgcaaacgcgcggacacgcggcacagtcggatattgagctgcacagccgcaaagccccgtgggacgccgccagactcccgcccgaactcaacaaagcccgcagtcattggaaatggtcgtcgctcaatacgcaccgccccgaaaccagccgcgccgaacgcgccggatatgtggagaaacttcaaatccgcctgtcgggaaaatatagtgaattaaatttaaatcaggacaaggcggcgagccgcagacagtacaaatag

SEQ ID NO: 50328 - DNA, 603 bp, Neisseria meningitidis
atgaccgacaaaatttctcccgacgcactaattgaagccgcactgctgacccaaaccgaaccgctgaccgaaaaatctatgcgcgaattgtgtgtgccgccactgtcgcaggacaaactgattgatgtgttggcgcagttgaaaacgcgttggcaggatagggcgttgcaactggtgcatacgcaagagggctggcgttttcagattgttcagacggcattcgagcggctgggcagcctgcaagaacagcgtgcgccgcgttactcccgcgccgtgatggaaacactggcgattatcgcctaccagcagcccgtaacgcgcggcgacatcgagggcatacgcggcgtggcggtgtcgcagaacgtgatgcagaccttgcaggatcgggggtggattgaagtcatcggacatcgggacacattgggaaaacccgcattgtgggcaacaacggcaacgttcctcagcgatttgcgcttggacggtttggaagaacttcctccgctgaccgaactgggcgaactggttttgcccgatttaatggaaatgccgcctacggatgaagaagagccggaagccgtaccgtccgataccctgcccaactga

SEQ ID NO: 50329 - DNA, 843 bp, Neisseria meningitidis
atgcaaaaccacgttatcagcttagcttccgccgcagaacgcagggcgcacattgccgataccttcggcgcgcacgacattccgtttcagtttttcgacgcactgatgccgtctgaagcactggagcaggcaatggcggaactcgtacccggtttgtcggcgcacccctatttgagcggagtggaaaaagcctgctttatgagccacgccgtattgtggaaacaggcattggatgaaggtctgccctatgttgccgtatttgaggatgatgtcctgcttggcaaagacgcagaaaagttccttgccgaagatacttggttggaagagcgttttgataaggattctgcctttatcgttcgtttggaaacgatgtttgcgaaagttattgtcagaccggataaagtcctgaattatgagaaccggtcatttcctttgctggagagcgaacattgggggacggctggctatatcatttcgcgtgaggcgatgcggtttttcttggaaaggtttgccgttttgccggcagagtggattaaagcggtagattggatgatgtttacttatttctttgataaggaggggatgcctgtttatcaggttaatcccgccttatgtacccaagaattgcattatgccaagttcctcagtaaaaacagtatgttgggtagcgatttggaaaaagatagggaacaagaaagaagacaccgccgttcgttgaaggtgatgtttgacttgaagcgtgctttgggtaaattcggtagggaaaagaagaaaagaatggagcgtcaaaggcaggcggagcttgagaaagcttacggcaggcgggtcatatcgttcaaatag

SEQ ID NO: 50330 - DNA, 885 bp, Neisseria meningitidis
atgagcagcggaaatatccacatccacagcatgaccggatttgccaacgcggcggcagagtgcggcagcaaacgcatcaatctcgacatccgcgccgtcaaccaccgctttttggacattcaaatcaggatgccggatgatttgcgctatttggaaagcggtatccgcgagaaaatttcatcccatatcgcgcgcggcaaagtcgaatgcaaaatccaaattcaagatacggaaaacagcagacagtccttggaactcaactcggatttggtgaaccagcttgccgaaatcaacaaaaacctccgcaagcatcacgatttggcaaaactgggcgttgccgacatcctgcgtttccccggcgtattggcaagccaaagggaaaatacggaggaattggcaaaaagcattaccgaactgaccgaaaaagcgttaaaagactttactgccgcacgccggcgcgaagggaaaaaattgggcgagcacctgttacaacgcctcgaaagcatggaagaaatcatagatgcattgagcgaactctttcctaccctgctggaaacacataaagaaaaaatccgcgcccgcctcgtcgaagcagtcggcgacatcaataatgacaggctgcaacaggaatttgccctctttattcaaaaatccgacatcgacgaagaattcagccgcctgcgcacgcatatcgacgaagtacgccgcatcgttaccgaacacaaaggcagcagcggaaaacgcttggatttcctgatgcaggaattaaaccgcgaagccaacactttgggcagcaaatccattgccgccgaatgcacccaagcctcggtcgaactgaaagtcttaatcgagcagatgcgggaacaagtgcagaatatcgaataa

SEQ ID NO: 50331 - DNA, 600 bp, Neisseria meningitidis; identical to SEQ ID NO: 37200

SEQ ID NO: 50332 - DNA, 1092 bp, Neisseria meningitidis
atgagtttgaaatgcggcatcgtcggtttgcccaacgtcggcaaatccaccctctttaacgcgctgacccaatcgggtatcgaagcggcaaactatcctttctgcaccatcgaacccaacgtcggcatcgttgaagtccccgatccgcgtatggctgaattggcaaaaatcgtcaatccacaaaaaatgcagcctgccatcgtcgaatttgtcgacatcgccggtttggttgcaggtgcaagcaaaggcgaaggcttgggcaaccagttcctcgccaacatccgcgaaaccgatgcgattgtgaatgtcgtgcgctgctttgacgacgacaacatcgttcacgttgcaggcaaagtcgatccgattgccgacatcgaaaccatcggtacggagttggcgcttgccgacttggccagcgtcgaaaaagccatcgtccgcgaagaaaaacgcgcacgctcaggcgacaaagacgcacaaaaactggtcgatctgtgcaaaaaactgctgcctcatctggacgaaggcaagcctgtacgctccttcggtttggacgcagaagaactcgccatgctcaagccgctgttcctgctgactgccaaaccggccatgtatgtcggcaacgtttccgaagacggttttgaaaacaacccgcacctcgaccgcctgaaagaattggctgcaaaagaaaacgcgccggttgtggctgtatgcgccgcaatggaaagcgaaatcgccgaattggaagaggacgaaaaagccgaattcctcgccgaaatgggcttggaagaaccgggcctgaaccgcctgatccgcgccggctacgacctcttgggcttgcaaacctactttaccgccggcgtaaaagaagtccgcgcctggaccatccacaaaggcgacaccgcaccacaagccgccggcgtgattcacaccgactttgaacgcggcttcatccgcgcccaagttatctcctacgaagatttcatcgctttaggcggcgaagccaaagccaaagaagccggcaaaatgcgcgtagaaggcaaggaatatgtcgtgcaagacggcgatgtgatgcactttttgtttaacgtgtaa

SEQ ID NO: 50333 - DNA, 924 bp, Neisseria meningitidis
atgacgaaaaccgaaccgaacaacgcccaactcgactggttggaatccgaatccatccacatcatccgcgaagtggcggcggaatgcgaaaaccccgccctgctcttttccggcggcaaagattccgtggtcctgctcgccctcgcctgcaaagccttccggctgggcagcaggccggtaaaactgcccttcccgctggtgcatatcgacacggggcacaactaccccgaagtgattgctttccgcgacgcgcaggcggcaaaactcaatgcccgcctgatagtggggcgcgtggaagactccattgccaaaggcacagtagttttacgcaaagaaaccgattcgcgcaatgcggcgcaggcggttacgctgttggaaaccatcgaggcaaacggctttgacgcgctgatgggcggcgcgcggcgcgacgaagaaaaagcccgcgccaaagaacggattttctcgttccgagacgagttcggacaatgggatccgaaggcgcaacgccccgagctgtggtcgctgtacaacaccaggctgcacaaaggcgaaaatatgcgcgtcttcccgatttccaactggacggaactcgacatctggcaatacatcgcccgcgaaaacctcgagctgccgccgatttattacagccacaggcgcgaagtggtcagacgcagggggctgctggtccctgtaacgccgctcaccccgaaaatgccatctgaaacctccgaaatccttgatgtccgcttccgcaccgtcggcgacatcagctgcacctgtccggtagaaagcaccgcgtccacgccgacggagattatcagggaaacggcagttaccgacatttccgaacgcagcgcgacccggctggacgatcaggcaagcgaggcggcaatggaaaaacgcaaaaaagaaggctatttctaa

SEQ ID NO: 50334 - DNA, 2151 bp, Neisseria meningitidis
atgaaaaccccactcctcaagcctctgctcattacctcgcttcccgttttcgccagtgtttttaccgccgcctccatcgtctggcagctaggcgaacccaagctcgccatgcccttcgtactcggcatcatcgccggcggccttgtcgatttggacaaccgcctgaccggacggctgaaaaacatcatcaccaccgtcgccctgttcaccctctcctcgctcacggcacaaagtaccctcggcacagggctgcctttcatcctcgccatgaccctgatgaccttcggctttaccattttaggcgcggtcgggctgaaataccgcaccttcgccttcggcgcactcgccgtcgccacctacaccacacttacctacacccccgaaacctactggctgaccaaccccttcatgattttatgcggcaccgtactgtacagcaccgccatcatcctgttccaaatcatcctgccccaccgccccgtccaagaaagcgtcgccaacgcctacgacgcactcggtggctacctcgaagccaaagccgacttcttcgaccccgatgaggcagcctggataggcaaccgccacatcgacctcgccatgagcaacaccggcgtcatcaccgccttcaaccaatgccgttccgccctgttttaccgccttcgcggcaaacaccgccacccgcgcaccgccaaaatgctgcgctactacttcgccgcccaagacatacacgaacgtatcagctccgcccacgtcgactaccaagagatgtccgaaaaattcaaaaacaccgacatcatcttccgcatccaccgcctgctcgaaatgcagggacaagcctgccgcaacaccgcccaagccctgcgcgcaagcaaagactacgtttacagcaaacgcctcggccgcgccatcgaaggctgccgccagtcgctgcgcctcctttcagacagcaacgacaatcccgacatccgccacctgcgccgccttctcgacaacctcggcagcgtcgaccagcagttccgccaactccgacacagcgactcccccgccgaaaacgaccgcatgggcgacacccgcatcgccgccctcgaaaccggcagcctcaaaaacacctggcaggcaatccgtccgcagctaaacctcgaatcaggcgtattccgccatgccgtccgcctgtcccttgtcgttgccgccgcctgcaccatcgtcgaagccctcaacctcaacctcggctactggatactgctgaccgcccttttcgtctgccagcctaactacaccgccaccaaaagccgcgtccgccagcgcattgccggtaccgtactcggcgtaatcgtcggctcgctcgtcccctactttaccccctccgtcgaaaccaaactctggatcgtcatcgccagtaccaccctctttttcatgacccgcacctacaaatacagtttctcgacatttttcatcaccattcaggcactgaccagcctctccctcgcaggtttggacgtatacgccgccatgcccgtgcgcatcatcgacaccattatcggcgcatcccttgcctgggcggcagtcagctacctgtggccagactggaaatacctcacgctcgaacgcaccgccgcccttgccgtatgcagcaacggtgcctatctcgaaaaaatcaccgaacgcctcaaaagcggcgaaaccggcgacgacgtcgaataccgcgccacccgccgccgcgcccacgaacacaccgccgccctcagcagcaccctttccgacatgagcagcgaacccgcaaaattcgccgacagcctgcaacccggctttaccctgctcaaaaccggctacgccctgaccggctacatctccgccctcggcgcataccgcagcgaaatgcacgaagaatgcagccccgactttaccgcacagttccacctcgccgccgaacacaccgcccacatcttccaacacctgcccgaaaccgaacccgacgactttcagacagcactggatacactgcgcggcgaactcgacaccctccgcacccacagcagcggaacacaaagccacatcctcctccaacagctccaactcatcgcccggcagctcgaaccctactaccgcgcctaccgacaaattccgcacaggcagccccaaaacgcagcctga

SEQ ID NO: 50335 - DNA, 918 bp, Neisseria meningitidis
atggaaaaagcagaacatttgaacagcagccggttcgtcaatctagtcaaaagcggcggcggcagctatgtggagggcagctaccgtttcgatactttgtccaacggcatttccatccacggcggcacagtaacggcacggtgtgatttttgcagcagccgcctcgccgaaccttatgtgtcgttcgtgctcttgctggaaggcagtttggacttcggcatcaaccgctgccgcttccaaatcgatgcggacggcggcaagattgtcctaattgctgtcggggaagaagtcctgttcagccgctatctttaccgaggcggcaaaacggtcaaaatgaccattaaaggtatggaacaatggctgctgcgtccggaatacgcgcgtttcgcacccctgctttaccgcgaaccggtcaggatatgggatttgcccccgaacctgcgcggcttggcggcatcctgcctgaaagccgtcccaaaggggcatttgggcgaaacattgcgccgcgaggcggacgtgttgcggctgctgtcggacttgtgggacacggtttcagacggcatcgggccggcggcggggcaaacggcggaagcagacgctatgccgtctgaagacttcagccgcaccctaaatgccgcgtttgccgacggcgcacaccaagtcaaccggctgacagacgcgctgaacatcagcgaaaggacgctgcaacgccgtatgcgcgaccatttcggcattaccgcaagcgagtggctgcaccacaaacaaatgcagcacgcgctctatctgttgcaaaacggggggaaaagcataggcgaaactgcatatttatgcggctaccgccacgtttccagctttactcaggcattcaggcaatatttcggcagcacgccggcggaaaccaaaaaagaaaaccggtaa

SEQ ID NO: 50336 - DNA, 1104 bp, Neisseria meningitidis
atgttgattttacaagccgagcgcgacagcctgctcaagccgttgcaagccgttaccggcattgtcgaacgccgccacaccctgcccatcctgtccaacgtcctgattgagggaaaaggcggtcagaccaaactcttggcaaccgatttggaaatccaaatcgacactgcgggtcccgagggcggcgcgggcgacttccgcatcaccaccaatgccaagaaatttcaggacattttgcgcgcgctgcctgccggtgcgctggtgtcgctggattgggacgacagccgtctgacgctgaaggcgggcaaatcgcgttttgccctgcagaccctgcctgccgccgattttccgatgatgaatgtcggcgaggacatcagcgcgactttctcgctggagcaggagcgtttcaaaaccatgctgtcgcaagtgcagtacagcatggcggtgcaggacatccgctattatctcaacggtctgctgatgcaggttgagggcagccagttgcgccttgtggcgaccgacggacaccgccttgcctatgcagcctgcgcgattgatgcggatttgccgcgcgccgaagtgattttgccgcgcaaaacggtgctggaactgttcaaactgttgaacaaccccgacgatccgattcaaatcgagctgctggacaaacaggtgcgtttccaatgcaacggcacgaccatcgtcagcaaggtcatcgacggcaaattccccgatttcaaccgcgtgattcctttggacaacgacaagattttcgtgttgtcgagggcagaattgttgggcgcgttggaacgtgcatcgattcttgccaatgaaaaattccgcggtgcgcgattgtttttgcaacccggcctgttgagcgttgtgtgcagcaacaacgagcaggaagaagcgcgcgaagaaatcgaaatcgcctatcagggcggcgaactcgaagtcggtttcaatatcggctatctgatggacgtgttgcgcaacatccattccgacgatatgcagcttgccttcggcgatgccaaccgctcgacgctgtttaccgtgccgaacaatccgaatttcaaatatattgtgatgccgatgcggatttga

SEQ ID NO: 50337 - DNA, 615 bp, Neisseria meningitidis
atgacgcaatgccgtctgaaaggacaggctttcagacggcatacggcgttccggcacgcggcgcaacatcgggcgcggcgcgtgccgccccgtccgaagcctgataaacaaaccgaaaaggaaaaaggaaatacgatgaaacacatactccccctgattgccgcatccgcactctgcatttcaaccgcttcggcacatcctgccagcgaaccgtccacccaaaacgaaaccgctatgaccacgcataccctcacctcaaaatacagttttgacgaaaccgtcagccgccttgaaaccgccataaaaagcaaagggatggacatttttgccgtcatcgaccatcaggaagccgcccaccgaaacggcttaacgatgcagccggcaaaagtcatcgtcttcggcacgcccaaagccggcacgccgctgatggtcaaagaccccgccttcgccctgcaactgcccctgcgcgtcctcgttaccgaaacagacggcaaagtacgcgccgcctataccgatacgcgcgccctcatcgccggcagccgcatcggttttgacgaagtggcaaacactttggcaaacgccgaaaaactgatacaaaaaaccgtaggcgaataa

SEQ ID NO: 50338 - DNA, 864 bp, Neisseria meningitidis
atgaataacgctttcgcattacccgccatccaaagcggcaacggcagcctcgaacaatacatccacaccgtcaacagcatcccgatgctgtcccaagaagaagaaacccgcctcgccgaacgccggataaagggcgacctcaacgccgccaaacaactcatcctgtcccacctgcgcgtcgtcgtttccatcgcgcgcggctatgacggctacgggctgaatcaggcagacctgattcaggaaggcaatatcggactgatgaaggcggtcaaacgctacgagccaggtcgaggcgcgcgtctgttttcatttgccgtacactggattaaagccgaaatccacgagtttattttgagaaactggcgtttggttcgcgttgccaccaccaaaccgcaacgcaagctgtttttcaatttacgcagtatgcgtaaaaacctcaacgccctgtctcccaaagaggcacaagacatcgccgacgatttgggtgtcaaactttccgaagttctggaaatggaacagcgcatgacgggacacgacatcgccatcatggcagacaacagcgacgacgaggacagtttcgcccccatcgactggcttgccgaccacgattccgaaccgagccgacaactatcgaaacaggcgcattacgccctgcaaacagaaggtttacaaaacgctttggcgcaactggatgacaggagccgccgtattgtggaaagccgctggcttcaagatgacggcggtctgacgctgcaccagcttgctgcagaatacggcgtctctgccgagcgcatccgccagattgaagcgaaagccatgcagaaactgcgtggtttcctgaccgaagaagccgaagcggtttga

SEQ ID NO: 50339 - DNA, 450 bp, Neisseria meningitidis
atgagtatttatgccgtcgcgcacatcgtccacctgtattgcgccattgcctttgtcggcggcgtgttttttgaagtgctggttttgtccgtcctgcatacgggacgggtgtcgtgcgaggcgcggcgcgaagtggaaaaggcaatgtcttaccgcgccgtcagggtgatgccgtttgtggtcggactgctgttcgccagcggcatcgtgatggcggcaaaccgctatctttctatattgggcgaaccgtttgccacttccttcggtacgatgctgacgctgaaaatcctgttggcgttcagcgtgttggcgcacttcgccatcgccgtcgtcaaaatggcgcgttccacactgaccgtcggctggtcgaaatacatacacaccgtcgtctttacccatatgctgctgattgtctttttggcaaaagcgatgttttatatcagctggtaa

SEQ ID NO: 50340 - DNA, 1827 bp, Neisseria meningitidis
ttgtctgaaacggattcgattatgaaaaaactgatttgcctgttcgccgtatttttgatgttgtgcggacgagctttcgcgctggatgcgaacgatctgctgccgccggaaaaggcattcgtgccggagcttgccgttgccgacgacggtgtgaacgtccgtttcaggattgccgacggatactatatgtatcaggcgaaaatcgtcggcaagaccgatccggcggatttgttgggacggccttctttcagcaagggtgaagagaaggaagacgagtttttcggcaggcagacggtttaccatcacgaagcgcaggttgcctttccttatgcaaaggctgtcggcgaaccgtataaattggttttgacctatcagggctgtgccgaagccggcgtgtgctatccgcccgtggataccgagtttgatatttccggcaacggcacttaccatccgcaaaccgacgaaccggcatccgccaaagaccgctttttgcagccttcctctcaaaacggcagcggggtgctgccgcccccgaagggggatgagggcggcgacagccgtttcaagctgtcttgggatacgctcaacgccaatcttttggcgttttttctcgccggtttgggtctgagttttaccgcctgtatgtatcccctgttgccgattgtttccagtattgtggtcggcgacaaaaaggcgggcaaggcgcgggcgtttgtgctgtccgtcgtttatgttcagggtttggctctgacttatacgctggtcggcattgttgccggactgacgggcgcactgctgaccgtatggttgcagcaggcttgggtggtgttggcggcatcggctttaatggtcgtcttggcactgtctatgttcgggctgttcaacatccagcttcccaacgccgtgcagtcgtattttcagaatcaaagcagcaggctttcaggcggtaaaatcgtttccgtctttattatgggcatattgtccgcgctgattgtcgggccgtgcgtcgccccgccgctggcatttgctttgggctacatcggtcagacgggcgatgcggttttaggcggtttggcactttacactttggcgttgggcaccggcgttccgctgattgccatcggcacgttcggcgggcatatcctgcctagggcaggcgattggatgaatgccgtcaaatacgctttcggctttatcctgcttgccgtcgccgtttacctcgccacgccgcacttgccctattatctcgtcgtcgcgctgtacacgctgctgatgctggttcctgcctgtatgctgctggtcaacggacgcaggcagaaacgccgtccgaaagctgtggcattcgcattgggcggcatattgctgataggcggcgcgtggttcggctggcagggcgcaaacggcaaaacgaccgcgctgcaccatttcctgaccctcaatccgccggccgaagcaggcaaatcttcggaacacggaaaaatgtttgccgatactgccgcgctgaaggcagcgatggatacggcgttgaaagaacatcccgacaaacccgtcgttttggatttttatgccgactggtgcatttcctgcaaagaaatggcggcttacacgctcaatcagccggaagtgcatcaggcagtcgatatggaacgctttttccaaatcgacgtaaccgccaacacgcccgaacatcaggcgttgttgaaagaatacggtctgttcggaccgccgggcgtgtttgtcgtccgctccgacggcagccgcagcgagccgctgctgggttttgtcaaagcagacaagtttatcgagtggtatgaacaaaaccgctga

SEQ ID NO: 50341 - DNA, 876 bp, Neisseria meningitidis; identical to SEQ ID NO: 43311

SEQ ID NO: 50342 - DNA, 900 bp, Neisseria meningitidis
atgtggttcaagcagattagtttttatccgctcaacaaagaaaagctgcctgaggcagacgtacttgccgacaaacttgctgaagctgaatttacccattgccaaggcttagactggttcagcgaaggctttgccgcaccggtttcgttctctcccgaactcgttttccctgccgactttaccttgcgcgtcgccctgaaaaaagaagaaaaagtcctgcctgccggcgtcatccgcgatattttggaagagaaggtggcggaaatccaaaacaatgaagcccgcaatgtcggtcgcaaagaaaaacaagagcttaaagagcaaattacagacgacctgctgccccgagcgtttacccgcagcagccgtacagaagcggtgtttaacacccgccacggctacctgctcgtcaataacgcggcttccgccaaagcagaaaacatcctgaccaagctgcgcgaagctttgggcggtttggaagcctcgctgccgaataccaagcaatcgccctcttccttgatgaccggctggctgttgcaagggcattgcgaaggcggttttgaattggacagcgattgcgaactcaaaggtacgggcgatattgttcccgtcgtcaaagtatccaaacaagatttaaccgccgacgaagtggttcaacacgtcaaaaacggtaaaaccgttacccaactgggcttggtgtggcgcgaacaaattgcctttatcctcactcaagacttcacactcaagcgcatccaatacctcgacgtattgcaggaagaagccgaaagcaacggcgacgatgccgccagccttgccttcgcctcgcaaatcctgatggcggaatccgtcagcaccatgttggaagagctggtttcctatttaggcggctggcaagattga

SEQ ID NO: 50343 - DNA, 1593 bp, Neisseria meningitidis
atgagggcgttcgccgtccgcaaccataaaggaagtttcatgaaccggacttatgccaatttctacgaaatgctcgccgccgcctgccgcaaaaacggcaacggcacggcagtgttcgacggcaaggaaaaaaccgcctaccgcgcgctcaagcaggaggccgaagccgtcgcggcgtatctgcaaaatatcggcgtgaagttcggcgacacggtcgcgctggcggtttccaattccacagaatttattaccgcctatttcgccgtctccgccatcggcgcggtcgccgtaccgatgaacacatttttgaaaaacagcgaatacgcgtatatcctgaacgactgcaaggcgcgcttcctgttcgcctcggcgggcctgtcaaaagagttggcgggcttgaaggcgcaaacgcccgtcgaaaaaatcatttggacggacaaaagccgtccggccggcgaaatggcggaaggcgatgccttttttgaagacgtgcgccgcttccccgaaaaacccgacttgggccgccaaccccggataaatgatttggcacacatcatctacacctccggcacgacggggcatcccaaaggcgcgctaatcagttacgccaacctgttcgccaacctgaacggcatcgaacgcatctttaaaatctccaagcgcgaccgctttatcgttttcctgccgatgttccacagcttcacgctgacggctatggtgctgctgccgatttatatggcgtgttcgattattttggtcaaatccgttttcccgttttccaacgttttgaaacaggccctgctcaaacgcgcgaccgtgtttttgggcatacccgcgatttacaccgcaatgagcaaggcgaaaatcccttggtatttcagatggttcaaccgcattcgcctgtttatcagcggcggtgcgcctttggcggaacaaaccatcctcgatttcaaagccaagttcccccgcgccaaattgctggaaggctacggactgagcgaagcctctcccgtcgtcgccgtcaatacgcccgagaggcaaaaagcccgcagcgtcggcatccccctgcccggtttggaagccaaagccgtcgatgaagaattggtcgaagtgccgcgcggcgaagtgggcgaactgatcgtcaggggcggttcggtgatgcggggctacctcaatatgcctgccgccaccgatgaaaccatcgtcaacggctggttgaaaacgggcgatttcgttaccatagacgaagacggctttatctttatcgtcgaccgcaaaaaagatttgattatttccaaaggtcaaaacgtctatccgcgcgaaatcgaagaagaaatctacaaactcgatgccgtcgaagccgccgccgtcatcggcgtgaaagaccgttatgccgacgaggaaatcgtcgccttcgtccaattgaaggaaggtatggatttgggcgagaacgaaatccgccgccacctgcgtaccgtgctggcaaatttcaaaatccccaaacaaatccactttaaagacgggctgccgcgcaacgctacgggcaaggtattgaaacgggtgttgaaggagcagtttgacggaaacaaatga

SEQ ID NO: 50344 - DNA, 792 bp, Neisseria meningitidis
atgaatgtttattttctcggcggcggcaatatggcggctgccgttgcgggcggattggtcaaacaaggcggttaccgcatctatatagccaatcggggtgcggaaaaacgcgaacgtttggaaaaagagttgggggtcgaaacttcggcaaccctgccggagcttcattccgacgatgttttaatccttgccgtcaaaccgcaggatatggaagccgcgtgcaaaaatatctgcaccaacggcgcattggtgctttctgtcgcagccggattgtcagtcggtacgctcagccgttacctcgggggaagccgccgcattgtccgggttatgccgaatacgcccgggaaaataggactgggcgtatccggtatgtatgccgaagcggaagtatcggaaacagaccgcaggattgccgatcgaatcatgaaatcagtcggtttgaccgtttggttggaagatgaagcgcaaatgcacagcattaccggtatcagcggcagcggaccagcttatgtgttttatctgctggacgcattgcaaaatgccgccatccgacaagggtttgatatggcagaagcacgcgcgctcagtctggcaacgtttaaaggagcggttacccttgccgagcagacgggtgaagatttcgagaagcttcaaaaaaatgtaacgtcaaaaggcgggacaacccacgaagccgtggaagctttcaggcggcatcgtgtcgccgaagccataagcgagggcgtttgtgcctgtgtgcgccgttcgcaggaaatggaacggcaatatcaataa

SEQ ID NO: 50345 - DNA, 522 bp, Neisseria meningitidis; identical to SEQ ID NO: 47947

SEQ ID NO: 50346 - DNA, 966 bp, Neisseria meningitidis
atgagctacacgcaactgacccagggcgaacgataccacatccaatacctgtcccgccactgcaccgtcaccgaaatcgccaaacagctgaaccgccacaaaagcaccatcagccgcgaaatcagacggcaccgcacccaagggcagcaatacagcgccgaaaaagcccagcggcaaagccagactatcaaacagcgtaagcgacaaccctataagctcgattcgcagctgattcagcacatcgacacccttatccgccgcaaactcagtcccgaacaagtatgcgcctacctgtgcaaacaccaccagatcacgctccaccacagcaccatttaccgctaccttcgccaagacaaaagcaacggcagcacgttgtggcaacatctcagaatatgcagcaaaccctaccgcaaacgctacggcagcacatggaccagaggcaaagtacccaaccgtgtcggcatagaaaaccgacccgctatcgtcgaccagaaatcccgtatcggcgattgggaagccgacaccattgtcggcaaaggacagaaaagcgcattattgaccttggtcgaacgcgttacccgctacaccatcatctgcaaattggatagcctcaaagccgaagacactgcccgggcagctgttagggcattaaaggcacataaagacagggtgcacaccattaccatggataacggcaaagagttctaccaacacaccaaaataaccaaagcattgaaagcggagacttatttttgtcgcccttaccattcttgggagaaagggctgaatgagaacaccaacggactcatccggcaatacttccccaaacaaaccgatttccgtaacatcagtgatcgggagatacgcagggttcaagatgagttgaaccaccgaccaagaaaaacacttggctacgaaacgccaagtgttttattcttgaatctgttccaaccactggtaccttag

SEQ ID NO: 50347 - DNA, 1323 bp, Neisseria meningitidis
atggcggaaacaataccggctgccttgaatatgaaggggatgatgatgtttgaacgcagtgtgattgcaatggcttgtatttttgccctttcagcctgtgggggcggcggtggcggatcgcccgatgttaaatcggcggacacgctgtcaaaaccggccgctcctgttgttgctgaaaaagagacagaggtaaaagaagatgcgccacaggcaggttctcaaggacagggcgcgccatccacacaaggcagccaagatatggcggcagtttcggcagaaaatacaggcaatggcggtgcggcaacaacggacaaacccaaaaatgaagacgagggaccgcaaaatgatatgccgcaaaattccgccgaatccgcaaatcaaacagggaacaaccaacccgccgattcttcagattccgcccccgcgtcaaaccctgcacctgcgaatggcggtagcaattttggaagggttgatttggctaatggcgttttgattgatgggccgtcgcaaaatataacgttgacccactgtaaaggcgattcttgtaatggtgataatttattggatgaagaagcaccgtcaaaatcagaatttgaaaatttaaatgagtctgaacgaattgagaaatataagaaagatgggaaaagcgataaatttactaatttggttgcgacagcagttcaagctaatggaactaacaaatatgtcatcatttataaagacaagtccacttcatctgcgcgagttaggcgttctgcacggtcgaggaggtcgcttcctgccgagatgccgctgattcccgtcaatcaggcggatacgctgattgtcgatggggaagcggtcagcctgacggggcattccggcaatatcttcgcgcccgaagggaattaccggtatctgacttacggggcagaaaaattgtccggcggatcgtatgccctcagtgtgcaaggcgaaccggcaaaaggcgaaatgcttgctggcacggccgtgtacaacggcgaagtgctgcatttccatacggaaaacggacgttcgtacccgactagaggcaggtttgccgcaaaagtcgatttcggcagcaaatctgtggacggcattatcgacagcggcgatgatttgcatatgggtacgcaaaaattcaaagccgccatcgatggaaacggctttaaggggacttggacggaaaatggcggcggggatgtttccggaaggttttacggcccggccggcgaggaagtggcgggaaaatacagctatcgcccgacagatgcggaaaagggcggattcggcgtgtttgccggcaaaaaagagcaggattga

SEQ ID NO: 50348 - DNA, 2028 bp, Neisseria meningitidis
ttgtccctgtctgaatttatagaacgccgaacgtcatttaatccgatggttattttgacgactttgttttttgtgtgtgttttggcggtattggttttaaccgtgccggatcaggtgcagatgtggctcgatcgggcaaaagaagtcatttttaccgagttcggctggttttatgttttaacgttttccatttttctgggtttcctgctgatactctcggtcagcagtttgggaaacatcaggctcggacgggatgaagatgtgccggaattcggcttcctgtcgtggctggcgatgctgtttgcggccgggatgggcgtgggtctgatgtttttcggcgtggcagagccgttgatgcattatttttcggacattacggccggcacgccggaacacaggcagcagcaggcattgctgcacacggtgttccattggggcgttcacgcttggtcggtgtacggtacgattgcattggctttggcttatttcggtttccgctacaagctgccgcttgccctgcgttcttgtttttaccccctgttgaaagaaaaaatttccggaaggttcggcgatgccattgatattatggcgttgcttgctacttttttcggcatcatcaccacattggggttcggggcttcgcaactgggcgccggattgcaggaaatgggctggattgccgaaaacagcttcagcgtgcaggttttgattatcgccgccgtcatgtccctcgccgtcgtttcggcaatatccggcgtggggaagggcgtgaaggtgttgagcgagttgaacctgagccttgcgtttttgctgctgttttttgttttggcggcgggccccactgtttacctgttgtcggcattcggcgacaacatagggaactacctcgaaaatctggtgcgcctcagttttaaaacttatgcgtacgaacgggaacacaagccgtggtttgaatcttggacggtgctttattgggcgtggtggtgttcttgggcgccgtttgtgggtttgtttatcgcgcgtatttcaaaggggcgcaccatccgcgagtttgtcttcggggttttgctcatccccggcctgttcggcgttttgtggtttaccgtcttcggcaatacggcgatttggctgaatgacggggttgcggggggaatgctcgaaaagatgacctcctctccggaaacgctgctttttaaattctttaattacctccccctgcccgaattgacgagcatcgtcagcctgctggtcatttccctgttttttgtaacttctgccgattccgggatttatgtcctgaacaatattacctctcgggacaagggcttgagcgcaccacggtggcaggcggttatgtggggcgtgctgatgtctgccgttgccgttttgctgatgcgctcgggcgggctaggcaacctgcagtctatgaccctgattgtttccctgccgtttgccctgctgatgctgataatgtgtttcagcctgtggaaaggattgagtgcggataagaaatattttgagacccgggttaaccctaccagtgtattttggacgggcggcaagtggaaagaacggctggtgcagataatgagccagacgcaggagcaggatattttaaaattcctcaaacataccgcatcgcccgctatgcacgagttgcaacgggagctttcggaagaatacggcttgagcgtccgggtcgataagatgtttcatcaggacgagcccgcaatcgagttcgtcattcggaaagagacgatgcgcgattttatgtacgggattaagtctgtcgggcaggatgtatccgaccagttgattaacgacggcaacctgccgcatatccggcatcagacaacttacaaaccctacgcttattttttcgacgggcgcgtcgggtacgatgtgcagtatatgaacaaggacgagctgattgccgacattttgaaaaactacgaacgttatttgatgttgttggatgatgtcggtcaggaactgatggcgcacgagcaggtggaattggcagagtaa

SEQ ID NO: 50349 - DNA, 1380 bp, Neisseria meningitidis
atgtttgctttcaaatccttactcgatatgccgcgcggtgaggcacttgccgtcgtcgtcgctctgattgccgcgatgggctataccatcatttcattggagtggctgccgcatatgtccattattgccgccatcgtcgtgctgattttgtacggcttggtgcgcggtttgaaatacaacgatatgcagcagggcatgataggcgcgttgaatcagggtatgggcgcgatttacctgtttttcttcatcgggctgatggtcagcgcgctgatgatgagcggcgcgattccgacgctgatgtattacggtttcggactgatttccccgacttatttttatttttccgccttcgcgctgtgttccgtcatcggcgtgtccatcggcagcagcctgaccacctgcgccactgtcggcgttgcctttatggggatggcggcggcgtttcaggccgatatggcgatgacggcgggcgcgattgtttcgggcgcattttttggcgacaaaatgtccccgctttcggatacgacgggtatttccgcgtccatcgtcggcatcgacttgtttgagcacatcaaaaatatgatgtacaccaccatccccgcgtggctcattagtgcggcactgatgctttggcttttgccgaatgtcgccgcgcaggatttgaacagcgtcgaatccttccgcagccagcttgaagccacgggattggtgcacggctattcgctgattccgtttgcgctgttggtcattttggcattgatgcgcatcaacgccgtcgtcgccatgctctttaccgtcatggttgccgttgctgtaacgtatctgcacagcacgcccgatctgcgtcagctcggtgcgtggttttacggcggctacaaactcgaaggcgaagcgtttaaagatgttgtcaaactgatttcgcgcggcggtttggaaagtatgtttttcacgcaaaccatcgtgattctcgggatgagtttgggcggactgttgtttgcgctcggtgtgattccttccctgttggaggccatccgtaccttcttgacgaatgccggacgcgcgacgttcagcgttgccatgacttcggtcggggttaatttcctgattggcgaacaatatttgagcatcctgctttctggagaaacgtttaaacccgtttacgacaggctcggactacattcccgcaatctgtcgcggacgctggaagatgcggggacggtgattaacccgctcgtaccgtggagcgtatgcggcgtgttcatcagccacgcgctgggcgtgccggtttgggaatatctgccgtatgcctttttctgctatttgagtttggctttgaccctgttattcggttggacggggctgactttgagcaaaaaataa

SEQ ID NO: 50350 - DNA, 807 bp, Neisseria meningitidis
atgaagaaaacattgacactgctcgccgtttccgccctatttgccacatccgcccacgcccaccgcgtctgggtcgaaaccgcccacacgcacggcggcgaataccttaaagccgacttgggctacggcgaatttcccgaactcgaacccatcgccaaagaccgcctgcacatcttcagcaaaccgatgcagctggttaccgaaaaaggcaaggaaaacatgattcaacgcggcacatacaactaccagtaccgaagcaaccgtcccgttaaggacggcagttacctcgtcatcgccgaatatcagcctactttctggtcaaaaaacaaagcaggctggaaacaggcgggcatcaaagaaatgcctgacgcaagctattgcgaacaaacccgtatgttcggcaaaaacatcgtcaacgtcggacacgaaagcgcggacaccgccatcatcaccaaaccggtcggacaaaacttggaaatcgtcccgctggacaatcccgccaacattcacgtaggcgaacgcttcaaagtccgcgttctgttccgtggcgaaccgctgcccaatgccaccgttaccgccacctttgacggcttcgacaccagcgaccgcagcaaaacgcacaaaaccgaagcacaggctttctccgacagcacagacgacaaaggcgaagtggacatcatccccttgcgccaaggcttctggaaagccaatgtcgaacacaaagccgacttccccgatcaaagcgtgtgccaaaaacaggcgaactactcgactttaaccttccaaatcggccattcgcaccattaa

SEQ ID NO: 50351 - DNA, 633 bp, Neisseria meningitidis
atgagaaaaaccaaaaccgaagccttaaaaaccaaagaacacctgatgcttgccgccttggaaaccttttaccgcaaagggattgcgcgcacctcgctcaacgaaatcgcccaagccgccggcgtaacgcgcggcgggctctattggcatttcaaaaataaggaagacttgttcgacgcgctgttccaacgtatctgcgacgacatcgaaaactgcatcgcgcaagatgccaaagatgccgaaggagaatcttggacggtattccgccacacgctgctgcactttttcgagcggctgcaaagcaacgacatctactacaaattccacaacatcctgtttttaaaatgcgaacacacggagcaaaacgccgccgttatcgccattgcccgcaagcatcaggcaatctggcgcgagaaaattaccgccgttttgaccgaagcggtggaaaatcaggatttggctgacgatttggacaaggaaacggcagttatcttcatcaaatcaaccttggacgggctgatttggcggtggttctcttcctgcgaacgtttcgatttgggcaaaaccgccccgcgcatcatcgggataatgatggacaacttggaaaaccatcccgacctgcgccggaaataa

SEQ ID NO: 50352 - DNA, 432 bp, Neisseria meningitidis; identical to SEQ ID NO: 42220

SEQ ID NO: 50353 - DNA, 2121 bp, Neisseria meningitidis
atgcgccgttttctaccgatcgcagccatatgcgccgtcgtcctgttgtacggactgacggcggcaaccggcagcaccagttcgctggcggattatttctggtggattgttgcgttcagcgcaatgctgctgctggtgttgttcgccgttttggcacgttatgtcatattgctgttgaaagacaggcgcgacggcgtattcggttcgcagattgccaaacgcctttccgggatgtttacgctggttgccgtactgcccggcgtgtttctgttcggcgtttccgcacagtttatcaacggcacgattaattcgtggttcggcaacgatacccacgaggcgcttgaacgcagcctcaatttgagcaagtccgcattgaatctggcggcagacaacgcccttggcaacgccatccccgtgcagatagacctcatcggcgcggcttccctgcccggggatatgggcagggtgctggaacattacgccggcagcggttttgcccagcttgccctgtacaatgccgcaagcggcaaaatcgaaaaaagcatcaacccgcacaagctcgatcagccgtttccaggtaaggcgcgttgggaaaaaatccaacaggcgggttcggtcagggatttggaaagcataggcggcgtattgtacgcgcagggctggctgtcggcaggtacgcacaacgggcgcgattacgccttgtttttccgtcagccggttcccaaaggcgtggcagaggatgccgtcttaatcgaaaaggcaagggcgaaatatgctgagttgagttacagcaaaaaaggtttgcagacctttttcctggcaaccctgctgattgcctcgctgctgtcgatttttcttgcactggtcatggcactgtatttcgcccaccgtttcgtcgaacccgtcctatcgcttgccgagggggcgaaggcggtggcgcaaggcgatttcagccaaacccgtcctgttttacgtaatgatgagttcgggcgtttgaccaagttgttcaaccacatgaccgagcagctttccatcgccaaagaatcagacgagcgcaacaggaggcgcgaagaagccgccagacattatctcgaatgcgtgctggaggggctgaccacgggcgtggtggtgtttgacgaacaaggccgtctgaaaaccttcaacaaagcggcggaacagattttggggatgccgcttacccccctgtggggcagcagccggcacggttggcacggcgtttcggcgcagcagtccctgcttgccgaagtgtttgccgccatcggcgcggcggcaggtacggacaaaccggtccatgtgaaatatgccgcgccggacgatgccaaaatcctgctgggcaaggcaaccgtcctgcccgaagacaacggcaacggcgtggtaatggtgattgacgacatcaccgttttgatacacgcgcaaaaagaagccgcgtggggcgaagtggcgaagcggctggcacacgaaatccgcaatccgctcacgcccatccagctttccgccgaacggctggcgtggaaattgggcgggaagctggatgagcaggatgcgcaaatcctgacgcgttcgaccgacaccatcgtcaaacaggtggcggcattgaaggaaatggtcgaagcattccgcaattatgcgcgttccccttcgctcaaattggaaaatcaggatttgaacgccttaatcggcgatgtgttggcattgtatgaagccggtccgtgccggtttgcggcggagcttgccggcgaaccgctgatggtggcggcggatacgaccgccatgcggcaggtgctgcacaatattttcaaaaatgccgccgaagcggcggaagaagccgatgtacccgaagtcagggtaaaatcggaagcggggcaggacggtcggattgtcctgacggtttgcgacaacggcaaagggttcggcagggaaatgctgcacaacgccttcgagccgtatgtaacggacaaaccggcgggaacgggattgggtctgcctgtggtgaaaaaaatcattgaagaacacggcggccgcatcagcctgagcaatcaggatgcgggtggcgcgtgtgtcagaatcatcttgccaaaaacggtaaaaacttatgcgtag

SEQ ID NO: 50354 - DNA, 285 bp, Neisseria meningitidis; identical to SEQ ID NO: 42876

SEQ ID NO: 50355 - DNA, 336 bp, Neisseria meningitidis
atgccgtctgaagcattatccggccttcagacggcattttgttttccgacagtttataaactgtcgttgtttcttgacagaaacaacgaccttatttatttgaaacgattggaggacatgattatgggtttttgggatagcgcggcaaatttggcaaaagaagcaggagaaggcgtaaagcgatttaacgagagaagccgtaaattgcagaacgaatatcagcaggaatccagtgaaaaattacgccgcgtcgtaaacagcgaaggttttttcggtaattcggcacaagaaaaagccattgcccgcaaagttctgaaagaacgtggcgaaggctaa

SEQ ID NO: 50356 - DNA, 1245 bp, Neisseria meningitidis
atgtttgttccgctggcaatgcttgcaggtatgttttcctactacgaaaccttccacgaaacggaagcgttgcaggacgacctgctccgtcaggcggcattgtacgtcgcacccgattctaaacccgaaactttgcccgagggcgacggcgatacgcgcattttcgtgcagatgccgcagcaggaagaccctgttgtcagcctgcctgcgcatctggcggacggtctgcacacgcttcaggcggacggggacgacgattattaccgcgtctatatccgcacgaccgaacagggacggattgccgttatgcaggaaaacgaataccgtgaagatttggcggcggatgcggcacggcaaagcgtgttgcccctgctggcggcactgccgctgatgatactgctgaccgtgtggattacgcacaaagccatgcgccccgtccgcaaattgtcgcaaagtctcgaacaacgccgaatcaatgacctgtctgctttgagtgtggacaatattcccagtgaaatcagagggttcgtaaccgccatcaacctgcttttgaaacgtgcggatgaagacatccgccaccgtcagcggtttgtcgccgacgcggcacacgaattgcgtacgccgatgacagccctttcccttcaggcggaacggctcaacaatatgtcgctcccacccgatgcagcgcggcagcctgccgttttgcagcagagcatcaggcgcaacaaacacctgctcgaacagcttttggcactggcgcgttcgcagtcggatgaaacccctctgacgaaaacgacattcggtctgcaaagccgtttccgccaagtgttgcaggaactgatgccgctggctttggaaaaacgtcaggacatcggcgtggcggtcggaggcgatgtcgaagtgtctgccgacgaaacggaaatctatacgctgattaaaacctttgccgacaacgcggtacgttacacgccgcccgaaggcaggatcgatttgggtttcacggacgaagggaaatatctcgccgtgtgggtggaagataacgggaacggcattcccgaatccgaacgcgcccgcgtcctcgatccgttttaccgtattttgggaacggagcagcaggggccggggctgtccatcgccgacacgcttgccaaaaaatacggcggacatttggaattgaccgacagccgacgttttggacacggtctgttgatacgggcgttgttggacaaggaaaccctgaaatag

SEQ ID NO: 50357 - DNA, 486 bp, Neisseria meningitidis
atgagatttttcggtatcggttttttggtgctgctgtttttggagattatgtcgattgtgtgggttgccgattggttgggcggcggttggacgctgtttctaatggcggcaacctttgccgccggcgtgctgatgctcaggcatacggggctgtccggtcttttattggcgggcgcggcaatgagaaacggcggaagagtatccgtttatcagatgttgtggcctatccgttatacggtggcggctgtgtgtctgatgagtccgggattcgtatcctcggtgttggcggtattgctgctgctgccgtttaagggaggggcagtgttgcaggcaggaggtgcggaaaattttttcaacatgaaccaatcgggcagaaaagagggcttttcccgcgatgacgatattatcgagggggaatatacggttgaagagccttacggcggcaatcgttcccgaaacgccatcgaacacaaaaaagacgaataa

SEQ ID NO: 50358 - DNA, 528 bp, Neisseria meningitidis
atggtactcttttaccggctgttgaaaaatatgtcttcatctgtttcaagtaaaacgcgctattgggtattggcacttgccgccatcgtgctggaccagtggtcgaagtgggcggtgctgtcgtcgtttcagtatcgggaacgcgtcaatgtcattccttcctttttcgatttgaccttggtgtacaacccgggtgcggcgttcagcttccttgccgatcagggcggctggcaaaaatacttttttttggtgctggcggtggcggtgagcgcgtatttggtacgcgccatcttgcgcgatgagtttgcaaccctcggcaaaacgggtgcggcgatgattatcggcggtgcgttaggcaatgtcatcgaccgcctgatacacggtcatgtcgtcgatttcttattgttttattggcaaaattggttttatcccgcctttaatattgccgacagctttatctgcgtcggcgcggtgttggcagtgttggacaacatcgtccaccgtaaaacccaagaagaaaaatattga

SEQ ID NO: 50359 - DNA, 1638 bp, Neisseria meningitidis
atggattttaaaagactcacggcgtttttcgccatcgcgctggtgattatgatcggctgggaaaagatgttccccactccgaagcccgtccccgcgccccaacaggcagcacaacaacaggccgtaaccgcttccgccgaagccgcgctcgcgcccgcaacgccgattaccgtaacgaccgacacggttcaagccgtcattgatgaaaaaagcggcgacctgcgccggctgaccctgctcaaatacaaagcaaccggcgacgaaaataaaccgttcatcctgtttggcgacggcaaagaatacacctacgtcgcccaatccgaacttttggacgcgcagggcaacaacattctaaaaggcatcggctttagcgcaccgaaaaaacagtacagcttggaaggcgacaaagttgaagtccgcctgagcgcgcctgaaacacgcggtctgaaaatcgacaaagtttatactttcaccaaaggcagctatctggtcaacgtccgcttcgacatcgccaacggcagcggtcaaaccgccaacctgagcgcggactaccgcatcgtccgcgaccacagcgaacccgagggtcaaggttactttacccactcttacgtcggccctgttgtttatacccctgaaggcaacttccaaaaagtcagcttttccgacttggacgacgatgccaaatccggcaaatccgaggccgaatacatccgcaaaaccccgaccggctggctcggcatgattgaacaccacttcatgtccacctggattctccaacctaaaggcagacaaagcgtttgcgccgcaggcgagtgcaacatcgacatcaaacgccgcaacgacaagctgtacagcaccagcgtcagcgtgcctttagccgccatccaaaacggcgcgaaagccgaagcctccatcaacctctacgccggcccgcagaccacatccgtcatcgcaaacatcgccgacaacctgcaactggccaaagactacggcaaagtacactggttcgcctccccgctcttctggctcctgaaccaactgcacaacatcatcggcaactggggctgggcgattatcgttttaaccatcatcgtcaaagccgtactgtatccattgaccaacgcctcttaccgctctatggcgaaaatgcgtgccgccgcacccaaactgcaagccatcaaagagaaatacggcgacgaccgtatggcgcaacaacaggcgatgatgcagctttacacagacgagaaaatcaacccgctgggcggctgcctgcctatgctgttgcaaatccccgtcttcatcggattgtattgggcattgttcgcctccgtagaattgcgccaggcaccttggctgggttggattaccgacctcagccgcgccgacccctactacatcctgcccatcattatggcggcaacgatgttcgcccaaacctatctgaacccgccgccgaccgacccgatgcaggcgaaaatgatgaaaatcatgccgttggttttctccgtcatgttcttcttcttccctgccggtctagtattgtactgggtagtcaacaacctcctgaccatcgcccagcaatggcacatcaaccgcagcatcgaaaaacaacgcgcccaaggcgaagtcgtttcctaa

SEQ ID NO: 50360 - DNA, 789 bp, Neisseria meningitidis
atgaatccgcaggacaaatgctggcaggttcaccgccatctcgccgaatatgccgaccaacgcctgacactcgtccgcaacgcgcccaagtatatcctgcttgcaggtgcggatgcggacatcagccgcagcctgctggcgaaacgctatccgcaggcggtatttgaagaatacgattcccgtgcggattttttggcggctgccgctgccgcccgcaaaggcggtttttggcaaaggtttacgggtaagggcgtggtgcaacactgccaatccccgatcgcgccgctgcccgaagcgtgtgccgatatgttgtggtcgaatctcggactgttggcggcggaacaaatccttcctgtgctgcacaactgggcgcgcgccttgaagacggacgggctgctgttttttacctgcttcgggcgcgacacttttaccgaactgaaatgccgtctgaaagaaaacggcattgaaagccgcagcgtgatgtttcccgatatgcacgacttgggcgatatgcttgctgaaaacggcttttacgaccccgttaccgatacggcgaagctggtgttggattacaaaaaggcggaaacgttttgggcggatatggacacgctgggcgtttggcgggcgatggcgtggaacgatgaaaacgccgcgcgttcgtgtgtcgggacaatatttgagcgggaaggcggtttgggcattacgctggaaacggtgtacggacacgccgtgaaaaaactgatgctgccgcaaggggagaacgtggtgcagttttttccgaagagatga

SEQ ID NO: 50361 - DNA, 2397 bp, Neisseria meningitidis
atgattaaaaaaattttaacgacttgttttggtttggtttttgggttttgtgtatttggagtgggtttggttgccattgctattttggtaacgtatccgaaactgccgtctttggattctttgcagcattaccagcctaaaatgccgttgactatttattcggcggatggggaagtcatcggtatgtatggggagcagcggcgcgaatttacaaaaatcggcgatttcccagaggtgttgcggaatgcggttatcgccgccgaggataaacgcttttaccggcattggggggtggatgtttggggtgttgcccgcgctgccgtcggcaatgtcgtgtccggcagcgtgcagtcgggtgcgagtacgattacgcagcaggtggcgaaaaatttttatttgagcagtgaaaaaacgttcacacgcaaattcaatgaggtgttgcttgcctataaaatcgagcagtctttaagcaaagacaaaatcctcgagttgtatttcaatcagatttacctcggtcagcgcgcctatggttttgcatctgccgcgcaaatctatttcaataagaatgtccgagatttgactttggcggaagccgccatgcttgcgggactgcccaaggctccgtctgcctataatccgattgttaatccggaacgtgccaagttgcgccagaagtatattttgaacaatatgctcgaggagaagatgattaccgtgcaacagcgcgatcaggcgttgaatgaggaactgcattacgagcggtttgttcggaaaatcgatcagagtgctttatatgtggcggaaatggtgcgtcaggaactgtatgagaaatacggtgaagatgcctatacgcagggttttaaggtttataccacggtccgcgccgatcatcagaaggtggcaaccgaggcattgcgcaaggctctacggaatttcgatcgcggcagcagctaccgcggtgcggaaaactatatcgatttgagtaagagtgaagatgtcgaggagactgtcagccagtatctgtcgggactctataccgtcgataaaatggttcccgccgttgtgttggatgtgactaaaaagaaaaatgtcgtcatacagctgcccggcggcaggcgggttacgcttgataggcgcgccttgggctttgcggcccgcgcggtcaataatgaaaaaatgggggaggaccgtatccgcaggggcgcggtcatccgtgtcaaaaacaacggcgggcgttgggcggtggttcaagagccgttgctgcagggggctttggtttcgctggatgcaaaaaccggagctgtgcgcgcgctggtcggcggttatgattttcacagcaaaacattcaatcgtgccgttcaggcaatgcggcagccgggttcgacctttaagccgtttgtctattcggcggcattatctaaggggatgaccgcgtccacagtggttaacgatgcgccgatttccctgccggggaaagggccgaacggttcggtttggacacctaaaaattcagacggcagatattccggctacattactttgagacaggctctgacggcttccaagaatatggtttccatccgtattttgatgtctatcggtgtcggttacgcgcaacagtatatccggcgtttcggcttcaggtcgtccgagctgccggcaagcctgtctatggctttaggtacgggcgagacaacgccgttgaaagtggcggaggcatatagcgtatttgcgaacggcggatatagggtttcttcgcacgtaatcgataagatttatgacagagacggcaggttgcgcgcccaaatgcaacctttggtggccgggcaaaatgcgcctcaggcaatcgatccgcgcaatgcctatattatgtataagattatgcaggatgtggtccgtgtcggtacggcaaggggggcagctgcgttgggaagaacggatattgccggtaaaacgggtacgaccaatgacaataaggatgcgtggtttgtcggttttaaccctgatgtggttactgccgtatatatcggcttcgacaaacctaagagtatggggcgtgtcggctacggcggtacgattgcggtgccggtttgggtggactatatgcgttttgcgttgaaaggaaagcagggcaaggggatgaaaatgcctgaaggtgtggtcagcagcaatggcgaatactatatgaaggaacgtatggtaaccgatccgggcttgacgctggacaacagcggtattgcgccgcaaccttcccgacgggcaaaagaagatgacgggggcgcggcagaaggcggacggcaggcggcggatgacgaagtccgccaagatatgcaggaaacgccggtgcttccgagtaatactggttccaaacagcagcagttggattctctgttttaa

SEQ ID NO: 50362 - DNA, 2277 bp, Neisseria meningitidis
atggcacaaactacactcaaacccattgttttatcaattcttttaatcagcacccccatcctcgcccaagcgcatgaaaccgagcagtctgttgacttggacgaggttaccgtcgtcggcaaaagccgtccgcgcgccacatccgggctgttgcacacttcgaccgcttccgacaaaatcctctccggcgataccttgcgccaaaaagccgtcaacttgggcgatgctttggacggcgtgccgggcattcacgcctcgcaatacggcggcggcgcgtccgctcccgttattcgcggtcaaacaggcaggcggattaaagtgttgaaccatcacggcgaaacgggcgatatggcggatttttcgcccgatcacgccattatggtagataccgccttgtcgcaacaggtcgaaatcctgcgcgggccggttacgctcttgtacagctcgggcaatgtggcggggctggtcgatgttgccgatggcaaaatccccgaaaaaatgcctgaaaacggcgtatcgggcgaactcggattgcgtttgagcagcggcaatctggaaaaactcacgtccggcggcatcaatatcggtttgggcaaaaactttgtattgcacacggaagggctgtaccgcaaatcgggggattacgccgtaccgcgttaccgcaatctgaaacgcctgcccgacagccacgccgattcgcaaacgggcagcatcgggctgtcttgggttggcgaaaaaggttttatcggcgtagcgtacagcgaccgtcgcgaccaatatggtctgcctgcccacagccacgaatacgatgattgccacgccgacatcatctggcaaaagagcttgattaacaaacgctatttacagctttatccgcacctgttgaccgaagaagacatcgattacgacaatccgggcttgagctgcggcttccacgacgacgatgatgcacacgcacacacccacagcggcagaccgtggatagacctgcgcaacaaacgctacgaactccgtgccgaatggaagcaaccgttccccggttttgaagccctgcgcgtacacctgaaccgcaacgactaccgccacgacgaaaaagcaggcgatgcagtcgaaaacttttttaacaaccaaacgcaaaacgcccgcatcgagttgcgccaccaacccataggtcgtctgaaaggcagctggggcgtgcaatatttacaacaaaaatccagtgctttatctgccatatccgaagcggttaaacaaccgatgctgcttgacaacaaagtgcaacattacagctttttcggtgtagaacaggcaaactgggacaacttcacgcttgaaggcggcgtacgcgtggaaaaacaaaaagcctccattcagtacgacaaagcattgattgatcgggaaaactactacaaccaccccctgcccgacctcggcgcgcaccgccaaaccgcccgctcattcgcactttcgggcaactggtatttcacgccacaacacaaactcagcctgaccgcctcccatcaggaacgcctgccgtcaacgcaagagctgtacgcacacggcaaacacgtcgccaccaacacctttgaagtcggcaacaaacacctcaacaaagagcgttccaacaatatcgaactcgcgctgggctacgaaggcgaccgctggcaatacaatctggcactctaccgcaaccgcttcggtaactacatttacgcccaaaccttaaacgacggacgcggccccaaatccatcgaagacgacagcgaaatgaagctcgtgcgctacaaccaatccggcgccgacttctacggcgcggaaggcgaaatctacttcaaaccgacaccgcgctaccgcatcggcgtttccggcgactatgtacgaggccgtctgaaaaacctgccttccctacccggcagagaagatgcctacggcaaccgtcctttcatcgcacaggacgaccaaaatgccccccgtgttccggctgcgcgcctcggcttccacctgaaagcctcgctgaccgaccgtatcgatgccaatttggactactaccgcgtgttcgcccaaaacaaactcgcccgctacgaaacgcgcacgcccggacaccatatgctcaacctcggcgcaaactaccgccgcaatacgcgctatggcgagtggaattggtacgtcaaagccgacaacctgctcaaccaatccgtttacgcccacagcagctttctctctgatacgccgcaaatgggccgcagctttaccggcggcgtgaacgtgaagttttaa

SEQ ID NO: 50363 - DNA, 639 bp, Neisseria meningitidis
atgaaaaaaatcaatgttgcccccgaaaatccccaataccgcatcgtcgaaatctttgaaagcctgcaaggcgaaggctggaacacgggcatgcccgccgttttcgtccgcttgggcaaatgcaacctcgcctgcggctggtgtgataccgattatttgacattcggcatgatgagcctgtccgacatcttaggctgtctgaaaacctatgccgcccgcaacatcatcatcaccggcggcgaaccgaccatacagccgcatctcgatatgctgctggacacgctcaaggcggaaggctatttcctctgtctcgaaaccaacggactcaatcccgcgccgccgcaaatcgactatgtcgccaccagccccaaagcctgctatgccgccaaatacgaaaaaagctgtatcgaaacagccgacgaagtgcggattgttgccgacggcgatgtcgttgcgttctgtgaaaatatggaacgcaaaatccgcgcgcatcattactacctttcgccctgtgagcaagacggtgcgatgaacatctacgacaccatccgccaaatcggtattttaaacagtcgccccgacgcatccgtgcattggcagttgagcgtgcagacgcacaaatgggcgggaatagagtag

SEQ ID NO: 50364 - DNA, 963 bp, Neisseria meningitidis
atgcagtatgccaaaatttccggcacgggcagctatcttcctgccaaccgcgtcagcaatgacgaccttgcccaaaaagtggatacctcggacgagtggattaccgcgcgcacgggcatcaaattccgccatattgcagccgaaaacgaaaaaaccagcgaccttgccgccgaagcggcgcggcgcgctttggcagatgccaaattaaatataaacgacattgatttgattatcgtggcgacggcaacgccggatatgcagtttccttctaccgccaccatcgtgcagcaaaaattgggcatcaccaacggctgtcccgcgtttgacgtacaggcagtgtgcgcaggctttatgtacgcgctgaccacggcaaacgcctacattaaaagcggtatggcgaaaaacgcgctggtcatcggcgcggaaaccttcagccgcatcgtcgattggaacgaccgcacaacctgcgtattgttcggcgacggcgcgggcgcggtggttttgagcgcggcggacaaaccgggcatcatccacagcaaactcaaagccgacggcaattatctgaaactcttaaacgtccccgggcaaatcgcctgcggcaaagtttccggttcgccgtacatttcgatggacggtcccggcgtgttcaagtttgccgtcaaaatgctgtccaaaatcgccgatgacgttatcgaagaagccggttataccgccgctcaaatcgactggatcgtgccgcatcaggcaaaccgccgcattatcgaatcgaccgcgaaacatttaggtttgagtatggacaaagtcgtcctgaccgtccaagaccacggcaacacatccgccgcatcgattccgctggctttggatacgggcatccgcagcggacaaatcaaacgcggtcaaaacctgctgctcgaaggcatcggcggcggtttcgcgtggggcgcggtgctgttgcaatattga

SEQ ID NO: 50365 - DNA, 417 bp, Neisseria meningitidis; identical to SEQ ID NO: 36667

SEQ ID NO: 50366 - DNA, 1149 bp, Neisseria meningitidis
atgaatactcctccttttgtctgttggattttttgcaaggtcatcgacaatttcggcgacatcggcgtttcgtggcggctcgcccgtgttttgcaccgcgaactcggttggcaggtgcatttgtggacggacgatgtgtccgccttgcgtgcgctttgccctgatttgcccgatgttccctgcgttcatcaggatattcatgtccgcacttggcattccgatgcggcagatattgataccgcgcctgttcccgatgtcgtcatcgaaacttttgcctgcgacctgcccgaaaatgtgctgcacattatccgccgacacaagccgctttggctgaattgggaatatttgagcgcggaggaaagcaatgaaaggctgcatctgatgccttcgccgcaggagggtgttcaaaaatatttttggtttatgggtttcagcgaaaaaagcggcgggttgatacgcgaacgtgattactgcgaagccgtccgtttcgatagcggagccttgcgcaagaggctgatgcttcccgaaaaaaacgcccccgaatggctgcttttcggctatcggagcgatgtttgggcaaagtggctggaaatgtggcgacaggcaggcagtccgttgacactgttgctggcgggggcgcaaattatcgacagcctcaaacaaaacggcgttattccgcaagatgccctgcaaaacgacggcgatgtttttcagacggcatccgtccgcctcgtcaaaatccctttcgtgccgcaacaggacttcgacaaactgctgcaccttgccgactgcgccgtcatccgcggcgaagacagtttcgtgcgcgcccagcttgccggaaaacccttcttttggcacatctatccgcaagacgagaatgtccatctcgacaaactccacgccttttgggataaggcacacggtttctacacgcccgaaaccgcatcggcacaccgctgcctttcagacgacctaaacggcggaggggctttatccgccacgcaacgcctcgaatgttggcaaatcctgcaacaacatcaaaacggctggcggcaaggcgcggaggattggagccgttatcttttcgggcagccttccgcatccgaaaaactcgccgcctttgtttcaaagcatcaaaaaatacgctag

SEQ ID NO: 50367 - DNA, 603 bp, Neisseria meningitidis; identical to SEQ ID NO: 43408

SEQ ID NO: 50368 - DNA, 867 bp, Neisseria meningitidis; identical to SEQ ID NO: 43238

SEQ ID NO: 50369 - DNA, 729 bp, Neisseria meningitidis; identical to SEQ ID NO: 40848

SEQ ID NO: 50370 - DNA, 1296 bp, Neisseria meningitidis
atggcacaaaaaattcaatctgtaaaaggtatgaacgaccttttacctgtcgaacaaaaagatttcaaactgacggctgcgttttggcaggcgtttgaagatacggtaaaccgttggacgcgcgcttacggctaccagcaaatccgtacgccgattgtcgagcaaaccggtttgtttgtccgctccatcggcgaagaaaccgatgtggtcggcaaggaaatgtacaccttttccgattcaaacgattctttgagtttgagcctgcgtcctgaaggtacggcttcttgtctgcgtgcggtggtcgaacacaaccttctctacaacagcccgcaaaagctgtggtatatggggccgatgttccgccgcgagcgtccgcaaaaaggccgttatcgtcagttccatcaggtcggtatcgaagctttgggttttgaaggtccggatattgatgcggaaatcatcgcgatgtctgccgacttgtgggaaaaattgggtattcgcgaatacctgactttggaaatcaacagcttgggcaaccgtgaggaacgcgcggcacaccgtgcggcattggttgaatatctgacccgttatgaagataaattggatgaagacagcaaacgccgtctgaaaaccaatcctttgcgcgttttagatacgaaaaaccctgatttgcaggaaatctgcaacgccgcgccgcgtttggtggattacttgggcgaggcttcgcaaaaccactatgcacgcttcaaggcgatgttggatggtttgggtattcaatatattgaaaatccgcgcttggttcgcggtttggattattacaatcagacggtttttgagtggacgaccgacaaactcggcgcgcaggcgactgtgtgtggcggcggccgttacgatggtttgattgaagagcttggcggcaaacctgcgccgtctatcggctttgcaatgggcatcgaacggttgctgtttttggtgagcgaatacggttcgctggaagtgaacgccgcgcctgatgtctatgcaatgcaccaaggcgaaggtgcggacttgcaggtgatgaaatacgcgcaagccttgcgcacgcaaggtttcaatgtaatgcagcattccggctatcaaagcctgaaagcacaaatgaaaaaagccgacaacagcggcgcgcgctttgccctgattgtggcgcaagacgaactggcgaacggtacggttacgctcaaagacatgaacggcgcacacggtcagcaaactgtcgccgccgaggatttaacccatactttacaacaatggaagaacgcataa

SEQ ID NO: 50371 - DNA, 594 bp, Neisseria meningitidis; identical to SEQ ID NO: 36941

SEQ ID NO: 50372 - DNA, 855 bp, Neisseria meningitidis
atggcagaaattactgcaaaaatggttgccgacctgcgcgccgctaccggcctgggcatgatggaatgcaaaaaagccttggttgaagccgaaggcaacttcgacaaagccgaagaaatcctgcgtatcaaatccggtgcgaaagccggtaaactggccggccgtaccgctgccgaaggcgtattggcttacgcgatcaacggcaatgtcggcgcattggtcgaagtaaactgcgaaaccgacttcgttgctaaagacgcgggcttcgtagaatttgccaacttcgttgcgaaaactgctgccgagaaaaaaccggcttctgttgaagaactgagcgaactggttgaagcagaacgcaaagccatcatcgccaaattgggcgagaacatgtctgtccgccgcttccaagtgatcgacactgccaaccaactggttgcctacatccacggcgcattggcgaccgaaggcgtattggttgagtacaaaggctctgaagacgtagcacgcaaaatcggtatgcacattgttgccgctaaaccacaatgcgtaagcgaagccgaagtagatgccgaaaccgttgaaaaagaacgccacatctacaccgaacaagccatcgcttccggcaaacctgccgacatcgccgctaaaatggttgaaggccgtatccgcaaattcttggctgaaatcactctgaacggccaagcattcgtgatgaaccccgatcaaactgttgcccaattcgccaaagaaaacggcactgaagtgatcagcttcgtccgctacaaagtaggcgacggtatcgagaaagccgttgtcgactacgcagccgaagtagccgcagccgccaaagtgtaa

SEQ ID NO: 50373 - DNA, 519 bp, Neisseria meningitidis; identical to SEQ ID NO: 37817

SEQ ID NO: 50374 - DNA, 966 bp, Neisseria meningitidis
atgttacgtttgactgctttagccgtatgcaccgccctcgctttgggcgcgtgttcgccgcaaaattccgactctgccccacaagccaaagaacaggcggtttccgccgcacaatccgaaagtgcgtccgttaccgtcaaaaccgcgcgcggcgatgttcaaataccgcaaaaccccgaacgtatcgccgtttacgatttgggtatgctcgacaccttgagcaaactgggcgtgaaaaccggtttgtccgtcgataaaaaccgcctgccgtatttagaggaatatttcaaaacgacaaaacctgccggaactttgttcgagccggattacgaagccttaaacgcctacaagccgcagctcatcatcatcggcagccgcgcagccaaagcgtttgacaaattgaacgaaatcgcgccgaccatcgaaatgaccgccgataccgccaacctcaaagaaagtgccaaagagcgtatcgacgcgctggcgcaaatcttcggcaaacaggcggaagccgacaagctgaaggcggaaatcgacgcgtcttttgaagccgcgaaaactgccgcgcaaggcaaaggcaagggtttggtgattttggtcaacggcggcaaaatgtccgccttcggcccgtcttcacgactgggcggctggctgcacaaagacatcggcgttcccgctgtcgatgaatcgattaaagaaggcagccacggccagcccgtcagctttgaatacctgaaagagaaaaatcccgactggctgtttgtccttgaccgcagcgcggccatcggcgaagagggtcaggcggcgaaagacgtgttgaataatccgctggttgccgaaacaaccgcttggaaaaaaggacaggtggtttacctcgttcctgaaacttatttggcagccggtggcgcgcaagagctgctgaatgcaagcaaacaggttgccgacgcttttaacgccgcgaaataa

SEQ ID NO: 50375 - DNA, 705 bp, Neisseria meningitidis; identical to SEQ ID NO: 42711

SEQ ID NO: 50376 - DNA, 1584 bp, Neisseria meningitidis
atgccgaacaaaaagaaaaaagccgcctttgcgcgtgctgcaacggagaacggtgtgccggacgtgtccaacatcaaaaattcatatgatgatttgatgtatgaatccggcgcattctctcaaaccgccatcaataatttggaggcgcgcgcccgcctgatgggtttgcagcccgcgcccgccgccaatgccaaggtcttggagctgggctgttcgatgggcggcaacatcatcacgcaggcgctttattacccggatgcggaatttgtcggtatcgacttgtccggcaggcaggttgcgcagggcaacgccatcattgaaagaatgggcttggaaaatgtgcgtctggaagaaaaagatattttgaccatcgatgagtcattcgggaagttcgactatatcatcgtccacggtatttggtcgtgggttcccgatacggttaaagacaaaatcttttcgatttgccggaacaacctgacggaacacggcattgcctatatttcgtacaatgtctaccccggctggaaacggcaggagcagttgcgcgatattatgcagttttccagcagggatgtgcttgaagaacccttggaagcgcgaacgcggaaaggcttggacgcgctcaaggcactggcggaaattttggaaaacgacaagggcttgggcggcggcggcaaacttccggcgattcaaaaaatattgaatcataatttttattacatcgcacacgaatatatggaggcgtttaacgacccgatttacgttaacggcttcatcgaatgggcaaaccgccaccggctggcgtatatcggggataccgatttgcacgcgtcttttgtttcttggatggcggagcatacgcgggagcggattctggcattggcagggggcgattatattgccaaagaattttacagcgatattttatccgaccgccaattccgccgttcgcttttatgccgtgaggaagtcggggatactgtcaggcgtgatgagtcagtttctgtcgaagtgatagaaagtttgaatttccgcccggcaagaggggaaaggattgattttgatgaaaacgataccctgctttcgggcatacgcgatgtgatgaaaaccggagaggcgtttaaaacggaagatgttgcggaaaacctcgcccgccgatttcccggtttgacattcgaccgtatgaaaatcaattcccagcttttattgcaaaccattctcgggcgtttttctgtttcatcagacaatgcgggcaaaccattttttgaagaccataaaacctatgtgccggcgcgttttacagattatgtcgccgcctttgtggaacacggcgcggaagcgtttgtccagcctgccaaccgttacaacgaaagcaccccctcattcgggtacgggcatttgtacattatgcggcaattatcgcggccgacgagcaaacaggcattgattgaaacggttgccgaaaacttgaacatcgtcagcaccacgcccgacggtttgacattccatccgcctgccgaagtgtatgtggaagaaatattggcagacttggcagacaggcattttctcgtttcggtggattga

SEQ ID NO: 50377 - DNA, 498 bp, Neisseria meningitidis
atgaataacctccccgttgccgacctcctcgtctccgccatcatcgccgcctgcatcgtgctatccgcgatgcgcggcgtgattgcggaggctggctcaatggcggcatgggtggttgccttttttttcgccaaactctttgccgcacccttcgccgacatcgcctttgcatcgttccaaccccgcctgtttgcattggctctgtcgttcatttccctattcgtcattgcctgtctgatccagaaaatactccgctcgctgctgaccggggcagtttcggcggtcggtttgggctttgccaaccgcattttgggcggcgtattcggtgcattgaaaggcattttgattattaccctgctggtcatactcgcttcaaaaaccgacctgcccgataccgaagaatggcggcaatcttacacactgccgtttttcgtatcgctttccgaagccgtgttgaaccatagcggcggcacggcggaaactccggaagacgattga

SEQ ID NO: 50378 - DNA, 3105 bp, Neisseria meningitidis
atgaataaaactttaaaaaggcaggttttccgccataccgcgctttatgccgccatcttgatgttttcccataccggcggggggggggcgcaggcgcaaaccagtaaatacgctattatcatgaacgaacgaaatcagctggaggtaaagcaggagggttcatattcaaccttaagggaaaaagacagggaacgcaaatttgactttaatgcgaacagagggggtggaggttctgtctttttcgacaataccgatacccttgtttcccgacaaagcggtactgccgtttttggcacagccacctacctgccgccctacggcaaggtttccggttttgatgccaacgctctgaaagagcgcaacaatgccgtcgattggattcataccacccgggccgggctggcaggctacgcctacaccaacgtcatatgcagaagcagcgaccaatgcccccaacttgtctatgagaccaaatttgccttcagcaacaaagatttggcaaacaatgcgggcaggctggataggcactcggacccaagccgcgaaaattcgcccatttacaaattgaaagatcatccatggttgggcgtatctttcaatttgggcagcgagggtaccgccaaagatggcaaatcattcaacaaattggtatcttcttttgatgaaaacaatagtaatcaaaacctcgtctatacgacaaaaggccaccatatttcccttggcgactggcagcgcgaacataccgccatggcctattatctgaacgccaaactgcacctgctggacaaaaaagggattaaagatatcgcccaaggcaaaacagtggatttgggcaccttgagaccgcgcgtcgaggcaaaggtaaggcgggggggggggaatctgctaaatttttgggctacgtggaagattgaagataaagggaacattacagtccgcctcgacctgccggaagtcaaagccgggcgctgcaccaacgccgcccaccccaatcccaaagtccaagccctttcccccgcactgactgcccccgcgctgtggttcggacctgtgcaaaatggtaaggcgcagatgtattccgcttcggtttctacctaccccgacagttcgagcagccgcatcttccttcaaaatctggaaagaaaaaccgaccccggcagacccggccgctattccctcaaacccttgaatgaggcgcagattaaaagtaaagagccgagtttcacaagtcggcaaacaatcatccgattggatggcggtgtacatgagatcaaacttcaaggcaatgaggtcgccaattttaatggaaatgacggcaaaaacgaaactttcggcattgttagtgaagggagcttcatgcctgatgacagcgagtggaaaaaagtgctgctgccttggacggttcgggtttttgctgatgacagtaaatttaaagaattcaacaaagaagaaaaagacaacaagccaaaatacagtcaaaaataccgcagccgcgacaccaacaacggcaatcgcaatttgggcgacatcatcaacagccccatcgtggcggtcggcgaatatctagctacttccgccaacgacgggatggtgcatatcttcaaaaaaggcaacggcggggacgagcgcaactatagtctgaagctcagttatatcccgggcacgatgccgcgcaaggatattcaaagccaagactccacccttgccaaagagctgcgcgcctttgccgaaaaaggctatgtgggcgaccgctacggcgtggacggcggctttgtcttgcgcgaagtcgaacgggacgggaaaacccgcgtgtttatgttcggcgcgatgggttttggcggcagaggcgcgtatgccttggatttgaccaaagccgacggcagtgacccgaccgccgtttccctgtttgatgtcaaaaatggcaataatggcaagaatagcaataatagcaataatagcgtgcaattaggctacaccgtcggcacgccgcaaatcggcaaaacccacgacggcaaatacgccgccttcctcgcctctggttatgcgactaaagacattaacagcacagaaaatcaaaccgcgctgtatgtatatgatttggaaagcagcggcacgctgattaaaaaaatcgaagtacccaacggcaagggcgggctttcgtcccccacgctggtggataaagatttggacggcatggtcgatatcgcctatgccggcgatcgcggcgggaatatgtaccgctttgatttgagcggtcaagatcctaatcaatggtctgtacgcaccattttcagcggcaacaaaccgattacttccgcgcccgccatttcccaactgaaagacaaacgcgtggttatcttcggcacgggcagtgatttgagtgaggaggatgtactcagtacggatgaacaacatatttacggtatttttgacaatgacacaaacacgggtacggcgcaagacgggcagggcaacgggctgctcgagcaagtgctgaaaaaagacggcaatacgctgttcttaagcgactacaaaaggtctaacggctcgggcgataagggctgggtagtgaaattggaagccggacagcgcgttaccgtcaaaccgaccgtggtattgcgtaccgcctttgtaaccatccgcaaatataaagacaacggctgcggcgcggaaaccgccattttgggcatcaataccgccgacggcggcaagctgacgaagaaaagcgcgcgcccgattgtgccagaagccaatacggctgtcgcgcaatattccggccataagaaaaccgccaacggcaaatccatccctataggttgtatggaaaaagacgggggaaccgtctgcccgaacggatatgtttacgacaaaccggttaatgtgcgttatctggatgaaaagaaaacagacggattttcaacaacggcagacggcgatgcgggcggcagcggtatagaccccgccggcaagcgttccggcaaaaacaaccgctgcttctcccaaaaaggggtgcgcaccctgctgatgaacgatttggacagcttggacattaccggcccgacgtgtggtatgaaacgaatcagctggcgtgaagtcttctactga

SEQ ID NO: 50379 - DNA, 369 bp, Neisseria meningitidis
atgaaaccgttgaaacgacatcccgcccttatcgggctttcgtgtgaccaccaccattcgctttccctgtgcgtgcgtctgttgcggacgccggaagaaaggcatcgggacgaactcgaaccgcatttttccgaattggaaacccattttcgcgaagaagaaaccaagtttgccccaatttggcagaatgtcgcccccgaattgaaacaacgtttcgagaaagaccacgcccgactgcggcagatgatggcaagccccgaatacggtaacgcggcgtggaataccgcttttgccacaaccctgcgcgaccacgcgcgctttgaagaacgcgagctgtttcccgccgccgaaccgtttttgccggcatga

SEQ ID NO: 50380 - DNA, 264 bp, Neisseria meningitidis
  misc_feature 6, 7, 8, 9, 10: 'n' is a, c, g or t
gtgtgnnnnnaatatgttcaaagcgttgaagtcaaaaacggcgtcattaccgccacaatgctttcaagcggcgtaaacaaagaaatccaaggcaaaaaactctccctgtgggccaagcgtcaagacggttcggtaaaatggttctgcggactgccggttcagcgcaacgccaacaacgccgacgacgtcgccgccgacaccgccaagaagatcgacaccaagcacctgccgtcaacctgccgcgatgaatcaactgccagctaa

SEQ ID NO: 50381 - DNA, 756 bp, Neisseria meningitidis; identical to SEQ ID NO: 39133

SEQ ID NO: 50382 - DNA, 720 bp, Neisseria meningitidis
atgacacagcaaatcaaatacaaacgcgtattactgaaactctccggcgaatccctgatgggttccgatccgttcggcatcaatcacgacaccatcgtccaaaccgtcggcgaaattgccgaagtcgttaaaatgggcgtacaggtcggcatcgtcgtgggcggcggcaatattttccggggcgtatccgcccaagcaggcagcatggaccgcgccactgccgattacatgggtatgatggcgaccgtgatgaacgccttggcactcaaagacgcatttgaaactttaggcatcaaagcgcgcgtacaatccgcactgtctatgcagcaaatcgctgaaacttacgcccgtcctaaagccatccaatatttggaagaaggcaaagtcgtgatttttgccgccggtaccggtaacccgttcttcacgaccgacactgccgccgcattgcgcggtgcggaaatgaactgcgacgtgatgctcaaagccaccaacgtcgacggtgtatacaccgcagacccgaaaaaagacccgtccgccacacgctacgaaaccattacttttgacgaagccttgttgaaaaacctcaaagtcatggacgcgaccgctttcgccctctgccgcgaacgcaagctcaatatcgtcgtcttcggcatcgccaaagaaggctcgctcaaacgcgtcattaccggcgaagacgagggaacgctggttcactgctga

SEQ ID NO: 50383 - DNA, 426 bp, Neisseria meningitidis; identical to SEQ ID NO: 43259

SEQ ID NO: 50384 - DNA, 312 bp, Neisseria meningitidis; identical to SEQ ID NO: 38726

SEQ ID NO: 50385 - DNA, 1065 bp, Neisseria meningitidis
atgaaagcagcacgtttttacgacaaaggcgacatccgcatcgaagacatccccgaaccgaccgtcgcccccggcaccgtcggcatcaatgttgcctggtgcggcatctgcggtaccgacctgcacgaattcatggaaggcccgattttcattccgccttgcggtcatccgcacccgatttccggcgagtccgcacccgtcacgatgggacacgagttctccggcgtggtctatgccgtcggcgaaggcgtggacgacatcaaagtcggccaacacgtcgtggtcgagccttacatcgtacacgacgacgtaccgaccggcccgggcagcaactaccacctctctaaagacatgaacttcatcggcttgggcggctgcggaggtggcttgtctgaaaaaatcgctgtcaaacgccgttgggtgcatccgatttccgacaaaatcccgttggatcaagccgctttgatcgaaccgctgtctgtcggacaccacgcctatgtacgcagcggcgcgaaagcaggcgacgtcgcattggtcggcggcgcaggtccgatcggtttgctgttggctgccgtgttgaaagccaaaggcatcaaagtcatcatcaccgagttgagtaaagcacgcaaagacaaagcgcgcgaatccggcgttgccgactacatcctcgacccgtccgaagtcgatgttgtcgaagaagtgaaaaaactgaccaacggcgaaggcgtggacgtggcattcgaatgtaccagcgtgaacaaagtgttggatactttggtcgaagcctgcaaacctgccgccaatttggttatcgtatccatctggagccaccctgcaaccgtcaacgtccacagcgtcgtgatgaaagaactggatgtgcgcggcacgattgcctactgtaacgaccacgccgaaaccatcaaactggtcgaagaaggcaaaatcaacctcgagcctttcatcacccagcgcatcaagctggacgaactggtttccgaaggcttcgagcgtctaatccacaacaacgaatccgccgttaaaattattgtgagtccaaacctgtaa

SEQ ID NO: 50386 - DNA, 552 bp, Neisseria meningitidis
gtgaactattgcgaatttgccgcctcacttcccgaaaacaccgataacccgaacaaacattaccacgacacgcaatacggttttccgattgacagcgacaacggactgtttgaacggctggtgttggaaatcaatcaggcaggattaagctggacgctgatgctgaaaaagcggcaggcgtttcagacggcatttgaaggtttcgacatcgatacggttgccgccttcgacgacaccgaccgcgaacgcctgcttgccgacgcgggcatcgtccgcaaccgcctgaaaatcgatgccgccattttcaatgcacggcaaatccaagcgttgcaacaagaatacggctcgttcaagaactggctcgacgcgcaccatccgcgaagcaaagacgaatgggttaaactctttaaaaaacatttcaaattcgtcggcggcgaaatcgtcggcgaatttctgatgagtaccggctacctcaaaggcgcgcacgccgaaagctgtccggtttaccgtgaaaccctgaaataccacccgaaatggctcgatgccatctga

SEQ ID NO: 50387 - DNA, 720 bp, Neisseria meningitidis
atgctgaccacaccgccgctcgcccccaaaaccgtcgccgccctgcacaggctcggtatccgtacgctcgaagaactgcggcaaaacggttcggtcaaagcctttctgctgctcaaagcatcgggtttgaccctcacgaaaagcacgctgtggcagcttgagtcgctgctgaacggcacactcccgcaagaaatcacgcaacacgacaaaacgcgcctttttgccgaattgaaaaaccatccgcccgtcgccgcctttccgccgcaggaagaaatggaacacttcatgcgcgaagcactgcgccaagcagaacaatccgccgctgacggcgaaatacccgtcggggcagtcatcgtttcagacggcaaaatcatcgcatcggcacacaacacctgcattgccgactgcaatgtcagctgccacgccgaaatcaacgccttggcacaggcaggcagcgaaatgcaaaactaccgccttgacggatgcgacatctacatcaccctcgaaccatgcgccatgtgcgcgtccgcactgatacaggcacgaatcaggcgcgtgatctacggtgcggcagaacccaaaaccggcgcggcaggaagcatcgtcaacctgtttgccgacaaacgcctcaatacgcacaccgccatacggggcggaatcctgcaagaagaatgccgcgccgtattaaaccgttttttccaaaacaaaagaaaaggttga

SEQ ID NO: 50388 - DNA, 669 bp, Neisseria meningitidis
atgaaaaacctcgccatcttcgacctcgacaacaccctcatcaacaccgattccgaccacgcctggccgcaatacctcatcaaaaaaggcttggttgacgctgccgaaaccgaagcgcaaaacgaaaaattctaccgcgactaccaaaacggctgcctcgacatcgacgcattcctcaaattccacctcgccccgctcgcccgttacagcaaagaagagctggcagagtttcaccgcgaatttatggcggaatacatcatcccccgcatctcgcctatgcagcgtatgctggtgcagagccaccaaatggcaggcgacgaaaccctcgtgatttcctcaaccaacgagttcatcatcacccccatctgccaccttttcggcatcaccaacatcatcggcacacaactcgaaaccgatcccgacggtcgctacaccggcaattacatcggtacgcccagcctcaaagaaggcaaaatcacccgcctgaaccaatggctcgccgaacgcggcgaaacgctcgaaagctacggcaaaacctatttttacagtgattccaaaaacgatctgccgctgctgagtctcgtcaacgaacccgttgccgtcaaccctgatgcagaattggaacaagaagccaaagaaaaaggctggccggttttgaatttcaaatga

SEQ ID NO: 50389 - DNA, 297 bp, Neisseria meningitidis
ttgactgtggaatattttatgttgctggcaacagacggggaggatgtgcacgaggcgcgtatggcggcacgtcccgaacacctcaaacggctggagacgctgaagtcggaaggccggctgttgacggcaggcccgaatcctttgccggaggactccaaccgcgtttcgggcagtttgattgtggcgcagttcgagtctttggatgcggcagaggcgtgggcggaagacgatccctatgttcatgcaggcgtgtacagcgaagtgctgatcaagccgtttaaagcggtgttcaaataa

SEQ ID NO: 50390 - DNA, 513 bp, Neisseria meningitidis
  misc_feature 8, 9, 10, 11, 12: 'n' is a, c, g or t
gtgtgtgnnnnncaagacgacacgcaggcgcggctcgaacagcagcagaaacagattgaagccctgcaacagcagctcgcacagcaggcagacgatacggtttaccaactgactcccgaagcagtcaaagacaccattcctgccgaagcacaggcaaacggcaacaacgggcaacccgttaccggtaaagacgggcagcagtatatttacgaccaatcgacaggaagctggctgctgcaaagcctggtcggcgcggcggcaggcgcgtttatcggcaacgcgctggcaaacaaattcacacgggcaggcaaccaagacagtcccgtcgcccggcgcgcgcgtgcagcctaccatcagtccgcacgccccaatgcgcgcaccagcagggatttgaacacgcgcagcctccgtgcaaaacaacaggcggcgcaggcgcagcgttaccgcccgacaacgcgcccgcccgccaattaccgccgccccgctatgcgcggtttcggcaggaggcggtaa

SEQ ID NO: 50391 - DNA, 360 bp, Neisseria meningitidis; identical to SEQ ID NO: 39325

SEQ ID NO: 50392 - DNA, 2061 bp, Neisseria meningitidis
atgacccaaacccttttaatcgaacttctcactgaagaactcccgccaaaagccctgaataatctgggcaaccattttgccgcttccgttgccgaaggcttggaaaaagcgcaactgatagccggcgcggcagaatttaccgcctacgcttctccgcgccgtttggcggttcaagtcaaaaacgtcaaagccgttcaggcagatcagaaaatcgtgaaaaaaggccctgccgtggcgaatgccgtaaaagacggtgcgccgaccaaggctttggaaggtttcgcacgcggtgcaggggcgaaaatcgaagacttgaccatcgtccacgacggcaagcaggacgtgtacgcctacgaatacgtccaaaccggcaaaccgttgggcgagcttttggaagacattatcaatgccgcagtgaaaaaactgccgattccgaaagtgatgcgttggggcagcagcacgtttaccttcgtgcgccccgtccacgggctgattgtgctgcacggcggcgacatcgtaaacgtcagcgttttgggtctgcaaagcggcaatcaaaccttgggacaccgcttcttgtccaacggcgaaatcaccattgaaaacgccgacagctacgccgaacaaatgcgcgggcaaggcaaagtcgtcgcttcgtttgccgagcgcaaagccgcgattcagacggcattggaagggcaggcgcgccgtctgaacgcgaccgttgccgccgatgaagcattgctggacgaagtaaccgcgctggtcgaataccccgttgttttggaagccggttttgaggaacacttcctcgccgtgccgcaggaatgcctgattctgacgatgcagcaaaaccaaaaatacttcccgctgctcgatcaaaacggcaagctgatgaaccgcttcctgctggtctccaacctgcaaaccgcagacccgtcgcacatcatccaaggcaacgaacgcgttttgcgcgcgcgcctgtctgatgccgagttcttctacaaacaagaccaaaaggcgactttggaaagccgcctgcccaagctggcaaacgtggtttatcacaacaaaatcggttcgcaagccgaacgcatcgaacgcctgcaaagcattgccgcccacatcgctaaagcgttgggcgcagatgccgccgccgccgaacgcgccgcgcgtctggcaaaagccgacttggtaaccgaaatggtcggcgagttccctgaattgcaaggcaccatgggcaaatactatgcccgtttggacggcgaaaccgaagaaatcgccgaagccatcgagcaacactaccaaccgcgtttcgccggcgacaatctgccgaatggcaaagttgccaccgccgtggcactggcggacaaactagaaaccttggtcggcatttggggcattggtctgattccgaccggcgacaaagacccctacgccctgcgccgcgccgccttgggtattttgcggatgctgatgcagtacggtttggacgtgaacgaactgattcagacggcattcgacagcttccccaaaggtttgctcaacgaaaaaacgccgtctgaaaccgccgactttatgcaggcgcgccttgccgtgttgctgcaaaacgattatccgcaagacatcgttgccgccgtattggcgaaacagccgcgccgtttggacgacgtagtggcgaaactgcaagccgttgccgcgttcaaacaactgcccgaagccgccgcgctcgccgccgccaacaaacgcgtgcaaaatctgctgaaaaaagccgatgccgagttgggcgcggttaacgaaagcctgctgcaacaggacgaagaaaaagccctctttgccgccgcgcaaggcttgcagccgaaaatcgccgccgccgtcgccgaaggcaatttccaaaccgccttgtccgaactggcttccgtcaagccgcaagtcgatgccttctttgacggcgtgatggtgatggcggaagatgccgccgtaaaacaaaaccgtttgaacctgttgaaccgtttggcagagcagatgaacgcggtagccgacatcgcgcttttgggcgagtaa

SEQ ID NO: 50393 - DNA, 519 bp, Neisseria meningitidis
atgactacgcattttgtcgttatgggcgtatgcggctgcggcaagaccaccgccgcgctgtccctgcagaaacacctcggtcaatgtccctatgccgaaggcgacgagttccacacccaagccaaccgcgacaagatgggcgcgggtattccgctgaccgatgaagaccgctatccgtggttgggcaatctgcgcgactggatgacgaaacaggcgcaaaacggtgcgaaccacaccatcgtaacctgttccgccctcaaacgcggctaccgcgacattctgcgcggagccgaaggcaaagctgccttcatccacctcagtccgccgcaagacatcaacctcgagcgcatgatgtcgcgcaaaggacattacatgaaagcagggatgctcgattcgcaactggaaatcctcgaggaactgggcgaaggcgaatacggggtcaaaatcgccaaccccggcacgcccgaagcggtcgaagccgatattctgaactgggttgcctcggaaaacctgctttga

SEQ ID NO: 50394 - DNA, 159 bp, Neisseria meningitidis; identical to SEQ ID NO: 43473

SEQ ID NO: 50395 - DNA, 459 bp, Neisseria meningitidis
atgcccatcactccacccttaaacatcatctctcctaaactctaccccaatgaacaatggaacgaaagcgaagcactcggtgccatcacttggctatggtatcagtcgcctacgcatcgccaagtacctattgtggagatgatgacgtatatattgcctgtgttaaaaaacgggcagttcgctttgttttgcaagggtacccaaccaatcggttatatctcatgggcttattttgatgaagtggcgcaggcgcattatttagaatctgaccgccatttgcgtgacaacagcgattggaactgtggcgacaatatttggctgattcaatggtttgcgccattgggacacagtcatcaaatgcgctcagctgtgcgccagttatttcctagtacgacagtacgcgccttgtatcataaagggagcgataagggtttgagaattttaacttttaaaacttga

SEQ ID NO: 50396 - DNA, 810 bp, Neisseria meningitidis
atggcaaaaattggggattttgccgccaaatccatgatagagatacggagcaaacgaatgattaccctgccttccttaaacaatctgccgtcaaaatgggatgaaatccgctattggctcgaaacccgggtttgtgagtgcggcgttatgccgcatcccaatttgacggaatgcgaagccgggcagttcgatcgggatttttgggacaatatcggctgcgcgcctgaagaatatgtccgtatccgccgagccatccgtctgttggaagcgcgttatcccgacagtttgaatgagctggtgtgtgccgccattgccacgcctttgggcgagatgttggcggtgtttggaaataagggattgtgtctgctggagtttgtcggacagaaacatatggagcaggaaattgccgccgtccaaaaagccttgcgcggacggtttgtgtttcgggaggatgagcggacgcaacttttgcggcaggaattggacttatacttcaagggtcgtctgaaaacctttgccacgcctttggagcagattggcaccgagtttcaaaagcaggcatgggacgtgctcttggcgattccttacggcgaaacgcgcagctacaaagagcaggcgcagcgtttgggcaaccccaaagccgtccgcgccgttgccgccgccaacgggcagaacaaggtgtctgtcctgattccctgccaccgcgtcattggcagcgacggcaaactgaccggctacgcaggcggtttgaaccgcaaacagtttttactggctttggaacgcggcgaagttcagacggcattgttttaa

SEQ ID NO: 50397 - DNA, 501 bp, Neisseria meningitidis; identical to SEQ ID NO: 37418

SEQ ID NO: 50398 - DNA, 327 bp, Neisseria meningitidis
ttgggcgaaaaaatcaaagacggcaaaaaccaaaaaaccgtactctcccgcgaagaagaacaaaaaatttgcaatactttcacgcacaaacaggcagtggaagatttcagcgtggtggtcggctacgatgaaatcaaagccaagaattacagcctgtcggcggggcagtatttcgaggtgaagattgattatgtggatatttccgccgaggaatttaagcagagaatggcaggattttcggcagatttggacaaactctttgcggaatctgccaaattggaaaaggagattaaggataggctggcaatgttggaattcaattcgtaa

SEQ ID NO: 50399 - DNA, 1218 bp, Neisseria meningitidis; identical to SEQ ID NO: 44261

SEQ ID NO: 50400 - DNA, 942 bp, Neisseria meningitidis
atgaaaaccctgctcctcctcatccccctcgtcctaaccgcctgcggcacactgaccggcatacccgcccacggcggcggcaaacgctttgccgtcgaacaagaactcgtcgccgcatcgtcccgcgccgccgtcaaagaaatggatttgtccgccctgaaaggacgcaaagccgccctttacgtctccgttatgggcgaccaaggttcgggcaacataagcggcggacgctactctatcgacgcactgatacgcggtggctaccacaacaaccccgaaagtgccacccaatacagctaccccgcctacgacactaccgccaccaccaaatccgacgcgctctccagcgtaaccacttccacatcgctcttaaacgcccccgccgccgccctgactagaaacagcggacgcaaaggcgaacgctccgccggactgtccgtcaacggcacgggcgactaccgcaacgaaaccctgctcgccaacccccgcgacgtttccttcctgaccaacctcatccaaaccgtcttctacctgcgcggcatcgaagtcgtaccgcccgaatacgccgacaccgacgtattcgtaaccgtcgacgtattcggcaccgtccgcagccgcaccgaactgcacctctacaacgccgaaacccttaaagcccaaaccaagctcgaatatttcgccgttgaccgcgacagccggaaactgctgattgcccctaaaaccgccgcctacgaatcccaataccaagaacaatacgccctttggaccggcccttacaaagtcagcaaaaccgtcaaagcctcagaccgcctgatggtcgatttctccgacatcaccccctacggtgacacaaccgcccaaaaccgtcccgacttcaaacaaaacaacggtaaaaaccccgatgtcggcaacgaagtcatccgccgccgcaaaggaggataa

SEQ ID NO: 50401 - DNA, 252 bp, Neisseria meningitidis; identical to SEQ ID NO: 41525

SEQ ID NO: 50402 - DNA, 825 bp, Neisseria meningitidis
atgattaagaagacaatcggcggcatcataccgatttttacggcggttttcatccctgcatcagcaggcgcggcggatttgatgctggcgcaggaatacaaagaccaagagattgcaggctgggcaatgagcgagaaactcgacggcgtgcgcgcctattgggacggaaagcacctgataagccgtcagggctacgcgtttacgccccccaaaggctttaccgcgcagtttccgccttatcctttggacggcgaattgtatagcggacgcggtcagttcgagcagatttccgctaccgtgcgttctgtttcttcagactggcgcggtatccgcctgcacgttttcgatgtacccaaggcgcagggcaatctctaccaacgtttggcagtcgcaacgcagtggctgaaaacgcatccgaacgcgccgattaccatcatcccacaaatcaaagtgcgcgaccggcagcacgcgatggactttttaaaacaaatcgaagcgcagggcggcgaaggcgtgatgctgcgtcagcccgaatcccgttacagcggcggcaggagcagccaattattgaagctgaaaagccaatacgacgacgaatgcacggtaacgcggcactatgagggcaaagggcgaaacgccggacggttgggcgcggtcggctgcaaaaaccggtacggcgaattccgcattggcagcggcttcaaagataaagaccgagacaacccgcccaaaatcggcacactgattacctaccgctaccgtggctttacgcagaaaggcacgccgaaattcgccacgtttgtgcgcgtgcgtaccgaccgctga

SEQ ID NO: 50403 - DNA, 1047 bp, Neisseria meningitidis
atgaaaatgcaggcagttgttgtgaataaaaatgtagcgggcgatgtggaaatagtcgaacgcgaggttcgcccgttggaatacggcgaggcgttggtcgaagtcgaatattgcggcgtgtgccacaccgacctgcacgttgcggcaggcgactacggcgaaaaaccgggccgcgtgctgggacacgagggcatcggtttggttaaagaagttgccgacggtgtgaaaaatctgaaagtcggcgaccgcgtcagcatcgcctggctgttccaaagctgcggctcttgcgaatactgcaataccggccgcgaaaccctgtgccgctctgtattgaacgcgggctacaccgccgacggcggtatggcgacccactgcatcgtcaatgcggattatgcggtcaaagtccccgacggtctcgaccccgcccaagcgtccagcatcacttgcgccggcgtgaccacttataaagccattaaagtttccagtgttcgtccgggacagtggattgccatctacggcgcgggcggtttgggcaacttgggggtccaatacgcgaaaaaagtattcggcgcgcacgttgtcgccatcgacatcaacgacgacaaactggcgtttgccaaagaaaccggcgcggatttggttgtcaacgccgccaaagaagacgctgccaaagtgattcaggaaaaaaccggcggcgcacacgctgcggtcgtaaccgccgtatctgctgccgcattcaactctgccgtgaattgcgtccgcgcgggcggacgtgtggttgccatcgggctgccgccggaatcgatggatttgtccatcccgcgtttggttttggacggcatcgaagtggtcggctctttggtcggcacgcgcaaagatttggaagaagccttccaattcggcgcggaaggtttggttgtgccgaaagtccaactgcgtgctttggatgaagcacccgccattttccaagaaatgcgcgaaggcaaaatcaccggccgtatggtgatcgatatgaaaaaagaatgcggctgcggtcatcaccactga

SEQ ID NO: 50404 - DNA, 1110 bp, Neisseria meningitidis; identical to SEQ ID NO: 43553

SEQ ID NO: 50405 - DNA, 789 bp, Neisseria meningitidis; identical to SEQ ID NO: 42135

SEQ ID NO: 50406 - DNA, 312 bp, Neisseria meningitidis
atgaaaaaatccctgtttgccgctgctttgttgtctttggtcctggcagcctgcggcggtgaaaaagccgctgaagctcccgctaccgaagcacctgccgccgaagctcccgctactgaagcacctgccgccgaagctcccgctgctgaagctgccgctaccgaagcacctgccgctgaagctgccgctactgaagcacctgccgccgaagctcccgctgctgaagctgccgctaccgaagcacctgccgctgaagctgccgcttctgaggctcctgccgctgaagctcctgctgccgaagctgcaaaataa

SEQ ID NO: 50407 - DNA, 1302 bp, Neisseria meningitidis
atggctatttaccaatcaggcgtgatttttgaccaagtggataccgccaatcccgattgttggacattggacgaatacgtcaaacgcggcggctataccgccctgcgtaaaatcctgtccggaaacatctctcaaaccgatgtgattgacgaagtcaaaacctccggcttgcgcggtcgtggcggtgcgggcttcccgaccggtttgaaatggagctttatgccccgttcctttccgggcgaaaaatacgtcgtttgcaataccgacgaaggcgagccgggtacatttaaagaccgcgacatcatcatgttcaatccccatgccctgatcgaaggcatgattatcgccggttacgcgatgggcgcgaaagccggttacaactatatccacggcgaaatttttgaaggctaccaacgctttgaggccgctttggagcaggcgcgtgccgcaggctttttgggtaaaaatattttgggttcggattttgaatttgaactcttcgcccaccacggctacggcgcatatatttgcggcgaggaaaccgcattgctcgaatcgctggaaggcaaaaaaggccagccgcgctttaagccgccattccctgcttcgttcggcctgtacggcaaaccgactaccatcaacaatactgaaacgttctcctccgttccattcattatccgtgacggtggacaggcatttgccgataaaggtattccgaatgcaggcggtaccaaattattctgtatttccggccatgtcgagcgtccgggcaactatgaagtgccattgggtacgccgtttgccgaagtcttgaaaatggcgggcggtatgcgcggcggtaaaaaactcaaagccgtcattcccggcggttcgtccgcgcccgtattgcctgccgacatcatgatgcagaccaatatggactacgactcgatctccaaagcaggctccatgctcggttccggcgcgattatcgtgatggatgaagacgtgtgcatggtcaaagccctcgaacgcttaagctacttttactacgatgaatcctgcggccaatgcaccccgtgccgcgaaggtacgggctggctctaccgcatcgtccaccgcatcgtagaaggcaaaggtaaaatggaagatttggatttgctggattctgtcggcaaccaaatggcaggccgcaccatctgcgccctcgccgatgccgccgtcttccccgtccgcagctttaccaagcatttccgtgatgagtttgtgcattacatcgaacacggcggaccgatgaaagagcataagtggggagggtggtaa

SEQ ID NO: 50408 - DNA, 786 bp, Neisseria meningitidis; identical to SEQ ID NO: 42976

SEQ ID NO: 50409 - DNA, 1422 bp, Neisseria meningitidis; identical to SEQ ID NO: 38131

SEQ ID NO: 50410 - DNA, 1815 bp, Neisseria meningitidis
atgagtgaacacgatatgcagaacacaaatccgccattaccgcctctgccgcccgaaatcacgcagctcctgtcggggctggacgcggcacaatgggcgtggctgtccggctacgcttgggcaaaagcaggaaacggggcatctgcaggactgcccgcgcttcagacggcattgccggcggcagaacctttttccgtaaccgtcctttccgcctcgcaaaccggcaatgcgaaatccgttgccgacaaagcggcggacagcctggaagccgccggcatccaagtcagtcgcgccgaactgaaagactataaggcgaaaaacatcgccggcgaacgccgcctgctgctggttacctccacccaaggcgaaggcgaaccgccggaagaagccgtcgtgctgcacaaactgctgaacggcaaaaaagccccgaaattggacaaactccaatttgccgtactgggtttgggcgacagttcctatccgaatttctgtcaggcaggtaaagatttcgaccggcgttttgaagaattgggcgcaaaacggctgctcgaacgcgttgatgcggatttggactttaccgcctccgcaaacgcctggacagataatatcgccgcactcttaaaagaagaagccgcaaaaaaccgggcaacgcccgcgccgcagacaacgccccccgccggccttcagacggcaccggatggcaggtactgcaaggcagccccctttcccgccgccctgctggccaatcagaaaatcaccgcccgccaatccgataaagacgtgcgccacatcgaaatcgatttgagcggttcggatttgcactacctcccgggcgacgcgctcggcgtttggtttgataacgatccggcactggtcagggaaatcctagacctgctcggcatcgatccggcaacggaaatacaggcgggcggaaagatgatgccggttgcgcgcgcactttcatctcatttcgaactcacgcaaaacactccggctttcgtcaaaggctatgccgcgttcgcccattatgaagaactcgataaaatcattgccgataacgccgttttgcaggatttcgtgcaaaacacgcctattgtcgatgtgctgcaccgcttcccggcaagcctgacggcagaacaattcatccgtttactgcgtccgcttgcaccccgtttgtattcgatttcttcagcacaggcggaagtgggcgatgaagtgcatttaactgtcggcgtggttcgttttgaacacgaaggccgcgccagaacgggcggcgcatcgggtttccttgccgaccggctggaagaggacggcacggtgcgcgtgtttgtggaacgcaacgacggcttcaggctgcccgaagacagccgcaagccgattgtgatgatcggctcgggcaccggcgtcgcaccgttccgcgctttcgtccaacaacgtgccgcagaaaatgcggaaggcaaaaactggctgattttcggcaatccgcattttgcccgtgattttctctatcaaaccgaatggcagcagtttgccaaagacggcttcctgcacaggtacgatttcgcctggtcccgcgatcaggaagaaaaaatctatgtgcaggacaaaatccgcgaacaggcggaaggactttggcaatggctgcaggaaggcgcgcatatctatgtgtgcggcgatgcggcaaaaatggcaaaagacgtggaagccgccttgctggatgtgattatcggggcaggacatttggacgaagagggcgcagaagaatatttggatatgctgcgcgaagaaaaacgctatcagcgtgatgtttattga

SEQ ID NO: 50411 - DNA, 1827 bp, Neisseria meningitidis
ttgggcatttcccgcaaaatatcccttattctgtccatactggcagtgtgcctgccgatgcatgcacacgcctcagatttggcaaacgattcttttatccggcaggttctcgaccgtcagcatttcgaacccgacgggaaataccacctattcggcagcaggggggaacttgccgagcgcagcggccatatcggattgggaaacatacaaagccatcagttgggcaacctgatgattcaacaggcggccattaaaggaaatatcggctacattgtccgcttttccgatcacgggcacgaagtccattcccccttcgacaaccatgcctcacattccgattctgatgaagccggtagtcccgttgacggatttagcctttaccgcatccattgggacggatacgaacaccatcccgccgacggctatgacgggccacagggcggcggctatcccgctcccaaaggcgcgagggatatatacagctacgacataaaaggcgttgcccaaaatatccgcctcaacctgaccgacaaccgcagcaccggacaacggcttgccgaccgtttccacaatgccggtagtatgctgacgcaaggagtaggcgacggattcaaacgcgccacccgatacagccccgagctggacagatcgggcaatgccgccgaagccttcaacggcactgcagatatcgttaaaaacatcatcggcgcggcaggagaaattgtcggcgcaggcgatgccgtgcagggcataagcgaaggctcaaacattgctgtcatgcacggcttgggtctgctttccaccgaaaacaagatggcgcgcatcaacgatttggcagatatggcgcaactcaaagactatgccgcagcagccatccgcgattgggcagtccaaaaccccaatgccgcacaaggcatagaagccgtcagcaatatctttatggcagccatccccatcaaagggattggagctgttcggggaaaatacggcttgggcggcatcacggcacatcctatcaagcggtcgcagatgggcgcgatcgcattgccgaaagggaaatccgccgtcagcgacaattttgccgatgcggcatacgccaaatacccgtccccttaccattcccgaaatatccgttcaaacttggagcagcgttacggcaaagaaaacatcacctcctcaaccgtgccgccgtcaaacggcaaaaatgtcaaactggcagaccaacgccacccgaagacaggcgtaccgtttgacggtaaagggtttccgaattttgagaagcacgtgaaatatgatacgaagctcgatattcaagaactatcggggggcggtatacctaaggctaagcctgtgtttgatgcgaaaccgagatgggaggttgataggaagcttaataaattgacaactcgtgagcaggtggagaaaaatgttcaggaaataaggaacggtaataaaaacagtaactttagccaacatgctcaactagagagggaaattaataaactaaaatctgccgatgaaattaattttgcagatggaatgggaaaatttaccgatagcatgaatgacaaggcttttagtaggcttgtgaaatcagttaaagagaatggcttcacaaatccagttgtggagtacgttgaaataaatggaaaagcatatatcgtaagaggaaataatagggtttttgctgcagaataccttggcaggatacatgaattaaaatttaaaaaagttgactttcctgttcctaatactagttggaaaaatcctactgatgtcttgaatgaatcaggtaatgttaagagacctcgttataggagtaaataa

SEQ ID NO: 50412 - DNA, 420 bp, Neisseria meningitidis
atgaaaaaaacgttcctttctgccgtattgcttctgtcggctgcgacccaaaccgtgtgggcagatacggtgttttcctgtaaaacggacaacaacaaatatatagaagttcaaaaaatcaaccgcaatctttacgaatattcgttcggcagtgcggcaaaaaaagaaattgccatacgcaacagcaaagctgacctgttggggcgttccgacaggcaaggcataggcagagcccgttgggcgacgatgaaattccaaaacggcgaatttatgtacaccgtagatgcaggcttcgattccatgactcatacagtaggtagcggtgtccttgtggagcgcaggggcaaggaagtcgcacgggtcgactgtacgccgaaaaccgcgcaggcgaatttcgacgatgacgattttgcctggtaa

SEQ ID NO: 50413 - DNA, 1233 bp, Neisseria meningitidis
atggctaaaaacggaggattttctttgttcgcaaagaaagaaaaacgctttatctttgaaggcaggcattccgcctccgacaaactggtcaacggcgaagtatccgcgtttaccgaagaagaggcgcgcaaaaaactggcaaaacgcggcatccgcccgttgcagattacccgtgtgaaaacaagctccaagcgcaaaatcacacaagaagacatcaccgttttcacccgccagctgtccacgatgattaaagcgggcctgccgctgatgcaggcatttgaaatcgtggcgcgcggacacggcaacccgtctatgacggaaatgctgatggaaatccgaggcgaagtggaacagggcagctcgttgagccgcgcattctcaaaccacccaaaatatttcgaccgcttctactgcaatctggttgcggcgggcgaaacgggcggcgtattggaaagcctgctggacaaattggcaatttacaaagaaaaaacccaggccatccgcaaaaaggtaaaaaccgcgctgacctatccggtatccgtcatcgccgtcgccatcggtttggtattcgtgatgatgattttcgtactgcccgcctttaaagaagtttacgccaatatgggcgcggagcttcccgcactgacccaaacagtgatggatatgtccgactttttcgtctcatacggctggatggtgctgatcgcactgggctttgccatatacggcttccttaaattgaaggcgcgttcgattaaaatccaacggcgtatggatgccatactgctgcgtatgccgattttcggagacattgtccgcaaagggacgattgcccgctggggcaggacgacggcgacgctgattgcggcaggcgtgcctttggtcgatgtattggactccactgccggcgcggcgggcaatttaatctatgaagaagccacccgggaaatccgtacgcgcgtcatccaaggtttgtctatgacttcggggatgcgtgcgacggaactgttccccaatatgatgttgcagatgtcttccatcggcgaggaatcgggttctttggacgatatgctcaacaaagccgccgaattttacgaagacgaggtggacaatgcggtcggcaggctgtccgctatgatggagccgatcattatcgtgattttaggcttggtcatcggcacgcttctggtcgccatgtatctgccgctgtttaatttgggcaacgtggtcgcctga

SEQ ID NO: 50414 - DNA, 492 bp, Neisseria meningitidis
atgaattccctctttgtagacaatactgttttcattacacggctgaaagccgggcatatcggcaggttggttcaggcgttgtttgaggagtggcacggatttgaaccgtggtcttctgtggataagattcatgcctattacggcaggtgtttgaaggatgacgaactgccgctggcatttgcggctgtggatgatttcggaaccctgttgggttcggctgcggtcaagcggcatgatatggaaagttttccacagtatgaatattggttgggtgatgtctttgttttacctgaatatcgcggaaaaggcattggcaggaggctggtcgcccactgcataggcgcagcgcgttcgctggggataaagttcttgtatctttatacgcctgatgtgcaaatattttatgaatcattcggctgggcggttgtcgggcgacatttccataacggtgaatgggttacggttatgcgtttggatatggataaggtttaa

SEQ ID NO: 50415 - DNA, 738 bp, Neisseria meningitidis
atgctgctgatacccgccatcgatttgaaagaaggacgctgcgtccgcctgagacaagggctgatggaagaggcgaccgtcttttccgattcgcccgccgaaaccgcactgcactggttcaaacaaggcgcgcgccgcctgcatctggtagatttgaacggcgcgtttgccggcgttccgcaaaacctgcccgccatcaaagacatccttgccgccgtcgccaaagacatccccgtacagctcggcggcggcatacgcgatttgaaaaccatcggacaatatttggatttgggtctgaacgacgtgattatcggcacggcggcggtcaaaaaccccgacttcgtgcgcgaggcgtgcaaagccttccccggcaggattattgtcgggctggatgccaaagacggtatggccgccatcgacggctgggcaaccgtaaccgggcatcatgtaattgatttggcaaaacgctttgaagacgacggcgtcaacagcatcatctacaccgacatcgggcgcgacggtatgatgagcggcgtgaacatcgacgcgacggtcaaactcgcccaagccgtccgcattcccgtcatcgcctccggcggactgaccggcttggacgacatccgcgccctgtgtgccgccgaaaaacatggcgtagcaggcgcgattaccggccgcgcgatttacgagggcagcatcgattttgcccaagcgcagcaactggcagattccctcgactaa

SEQ ID NO: 50416 - DNA, 132 bp, Neisseria meningitidis
ttgatgcagataaacaaggtaatgccgtctgaagggctttcagacggtattttgcgctattttgcgaaggtagggatgacggttcgggtattcctgacagggtggattttcaaggtgttgtatagggtgtag

SEQ ID NO: 50417 - DNA, 1509 bp, Neisseria meningitidis
atgcaaaccgattgcgacgtattgattgccggaaacgggctggcggcactgacgctcgccctgtcgctgcctgaatcgttccgcatcgttattttgtgcaaaaaccggctggacgacaccgccagccgtcatgcgcaaggcgggattgcggcggcgtggtcgggagaggacgacatcgaaaaacacgttgccgatactttggaagcgggcgcgggtttgtgtgatgaagccgccgtccgcgccatcctgtcgcagggcaaaccggcaatcgaatggctgctggcgcagggcgtggcgttcgaccggaatcataacggcctgcacctgacgcgtgaaggcgggcatacctgccgacgaatcgcccacgtcgccgactacacgggcgaagccgtcatgcagagcctgattgcccaaatacgccgccgcccgaacatccgcgtttgcgagcggcagatggcgttggacattcaaaccgaatcaggcgcggcgtgcggactgaccgtcctcgactgccgaacacaagaaacctaccgcatccgcgcccgccataccgtactcgcaggcggcggcttgggacagatttacgccgccaccaccacgccgcccgaatgcacgggcgacgccatcgccatggcgatacgcgcaggctgcgcagttggaaacctcgaatttatccaattccaccccacaggcttggcaagaccgtctgaaaacggacgcaccttcctcatttccgaagccgtgcgcggcgaaggcggcatcctgaccaaccaagcgggcgaacggtttatgccgcattacgaccgccgcgccgaactcgcaccgcgcgacatcgttgcccgcgccattgccgccgaaaccgccaaacaaacgcaagacttcgtctcgctcgacatcagccatcaacccgcagcgttcgtccgccagcattttccgtccatccatcgacactgtttatcccaatgcggcttggacatcacgcgccaagccatccccgtccgccccgtgcaacactacacctgcggcggcatccaaaccgaccccagcggcagaacttccctgccgcagctctacgccttaggcgaaaccgcctgcacagggttgcacggagccaaccgcctcgccagcaactccctactcgaatgcgtcgttaccgccaggcttgccgcccaaaccatcgcggatggacaagcgttccaaaccgcaccgccccaaaggccgtctgaaaacccattctctgaagcaaacatcttttcagacggcatccaaaacacattcagccgccccgccctgcaagcgttcaaccaacgccatctcggcatcctccgcaacgataccggcctgcgccgcgccatcgcccaactgcggctttggaagcaaaaccaaaccgaaccgcacaccgtgtccgaatacgaaaaccgcaacctgctcgaatgcagcctcgccgtcgcccaagccgcatacaggcggagacagaacatcggcgcgcattttaatagtgattgttaa

SEQ ID NO: 50418 - DNA, 1281 bp, Neisseria meningitidis
atgaaatccctttttattcggctgctcctgttgggttcggcggcaggcgttttctatcatacccaaaaccaatccctgcccgcgggcgaacttgtctatccgtccgcaccgcaaatcagggacggcggcgatgcgctgcactacctcaaccgcatccgcgcccaaatcggtttgcacaagctggcacacgcgccggttttggaaaattccgcccgcaggcacgcacgctatctcacgctcaatcccgaagacggacacggcgaacaccatcccgacaatccgcactacaccgcacaaaagctgaccgaacgcacacgccttgccgggtatctctacaacggcgtgcatgaaaacatcagcacggaagaggaagccgccgaatcgtccgacagcgacatccgcacgcagcaacgccaagtggacggattaatgagcgcaatctaccaccgcctttccctacttgaccgccatacggatgaggcaggagcggcatttgtgcgcgaaaacggtaaaaccgttctcgtattcaatcagggcaacggcaggtttgagcggcattgcgcccaaggcagaaatcagccggaagcaggacggaaatattaccgcaacgcctgccataacggtgcggtcgtgtacaccgacgaagccatgcccgcacaggagctgctctatacagcctatcccgtcggcagcggcgcactgccttatttccacggcgagcgtccagaccccgtgccggaatatgaaatcacgggcaatcctgccagcattgatttttccgaggcggcaggcaaaattacgatgaaaagtttcaagctgtatcagggtaaaaacgaaatccgccccgtcagggttttaaccgccggcaacgaccccaacggcaggctgaccgcgtaccaattcgcgctttttccgctcaaacctttggaatacggtacgctttatacggcggtattcgactatgtccgcaacggacggcgcgcgcaggcgaaatggcagtttagaacccgaaaacccgattacccttattttgaggtaaacggcggcgagacacttgcggttagaaaaggcgaaaaatatttcatccactggcgcggacgctggtgtttggaagcgtgtacccgttatacctaccggcagcgacccggcagccgcctgtccataggaaggcacgaggcgggcggcatcgtcttcagcgttgacggaatggcgggcagccgcatcacgcttgcaccggaaggagaaacggaacgaggcgtaaccctttatttacaggattga

SEQ ID NO: 50419 - DNA, 1251 bp, Neisseria meningitidis
atgccgtctgaaagcccttcagacggcatcgcccggctgcgcggcacaaaggcggaaaaaccgtttgccccgtattttcaaacgcgttacacttgccgccgctgttttcagccatttgattacccgcaaccgccgtcattgcgccggcggtttgcctgtcagcgtcattgcgccgctgtaaatacgaaagaacacattatgaccgtatcccccgtcgccttgcgccgtaagaccgagtgcaagcctcatcccaccgcgcgctattggaaaaaatgcgatgtcgaagccctgttcggacttcccttcctcgacctcatttaccaagccgccgaaatccaccgccaaaatttcaacccgcgcgaaatccagctttccacgctgttgtccatcaaaaccggcggttgtcccgaagattgcgcctactgtccgcaatcggcgcaccacaacaccaatctgggcaaagagcagatgatggatgtggatgaaatcgtcgaaaaagccaaaatcgccaaatcgcgcggcgcaagccggttttgtatgggcgcggcatggcgcggccccaaacccaaagacgtggagacggtttccgcaatcatcaaagccgtcaagggcttgggtatggaaacctgtggcacgttcggtatgctcgaagaaggtatggcggaagacttgaaagaggcgggcttggattattacaaccacaacctcgacaccgaccccgaccgctacaacgacatcatccacacccgccaacacgaagaccgaatggacaccttgggcaaagtccgcaacgccggtttgaaagtctgctgcggcggcatcgtcgggatgaacgaaacccgcgccgaacgcgcagggctgattgccagcctcgccaacctcgacccgcagcccgaaagcgtgccgattaaccggttggtcaaagtggaaggtacgccgcttgccgatgccgaggatttggactggacggaatttgtccgcaccatcgccgtggcgcggattacgatgccgcaaagttatgtccgactgtcggcagggcgcagcaatatgccggaagcgatgcaggcgatgtgctttatggcgggcgcgaactcgattttttacggcgacaagctgctgaccacgggcaatccggatgaagacggcgacagaatcctgatggaaaagcttaacctgtatcccttacagtttgagctggaaggcgaggtcgccgaagtggaaaaagcctctgggattaaagtggattattga

SEQ ID NO: 50420 - DNA, 1092 bp, Neisseria meningitidis
atgaacgcccaaaccctacttaccaacgttgccgaactcgtcaaaaccaagctcaaacccatagtggacgacatcgaccgcaaaggatactaccccgaagcatttatgcgcgaactcggcgcaatcggcggattcggcgcagtcggcacagaagccgaaggcggcaacggcttgggtttggcaacgcaaatcgctgttttgcgcgaaatcggcaaagaatgcggcgcaacctccttcagcgcgtggtgtcaggcggcttgcgcgtggtatctgcatcaaacgcccaaccaagccgtcaaagacaaatacctcgccgacatcctgcaaggcaaagtattggcaggcactggaatgtccaataccgtcaaacaccttgccggtattgaaaaacacaacctccaagccgaacgcgcagacggcggctacacagtcaacggcgcgctgccgtgggtgtccaacatcggcgaagaccacatctgggcgaataccgcccaaatcggcggcggctacatcatgtttatcaccggcggacaatgggaaggcgtaagcctgcaaaactgccccgaattttgcgccctcgaaggcacgcgcaccttcagcctgaacttcaaagacgtatttatccccgacgaagacatcatcgccgcgcccgaacagtttgccgactacatccaaagcatcaaagcaggctttatcctcctgcaaatcggcatcggcgcgggcgtgatagacggcagcctcggcatcatccgcctcgccaacatcgtcaacgccgaagtcaacagctatctcgacgacggctacgacagcctcaaagcaaggttggacggcgcatgggcagaaaccgaacggctcgccggcttggcttggagcggcacgcccgacaaccttgctaccctcaagctgcgcgaagccgccgccgtactggcacttgccgccgcccaatccgccgcactgcattccggcgcaaaaggctacctgatgcgcagtcccgcccaaaggcgcgtccgcgaagcgatgtttgtcgccatcgtaacccccgcaatcaaacacctacgcaaagaaatagcggcaatcgaagccgcaaaataa

SEQ ID NO: 50421 - DNA, 279 bp, Neisseria meningitidis
atgccggccgtcaatttgatccgcgaacgcctgcagacgctcgatccgctggtgttggaaatcggcgatgagagccatctgcacaaaggacacgcgggcaataccggcggcggacattatgccgttttggtcgttagcggccgttttgaaggcgtaagccgcctgaaccgccagaaaacggtcaaatcgctgctcaaagatttgttttcaggcggcatgattcacgcgctcggcatccgggcggctacccctgacgagtatttccatacggcggactga

SEQ ID NO: 50422 - DNA, 441 bp, Neisseria meningitidis; identical to SEQ ID NO: 38836

SEQ ID NO: 50423 - DNA, 777 bp, Neisseria meningitidis; identical to SEQ ID NO: 39763

SEQ ID NO: 50424 - DNA, 114 bp, Neisseria meningitidis; identical to SEQ ID NO: 43789

SEQ ID NO: 50425 - DNA, 1290 bp, Neisseria meningitidis
atgaaaaaactcaacacccaatcgcccgatttccaagccggactcaaagccctgctggcttttgaaaccgcgcaaaaccccgaaaccgaacgcatcgtcgccgacatttgcgccgacgtgcaaaagcgcggcgatgcggctttgattgaatacaccaacaaattcgatcagacaaacgctaaaagcatcgatgatttaatactcacgcaagccgatttgaacgcggcgttcgagcgcattccgaacgacgttcagacggcattgcagaccgccgcccgccgtgtcgaaagctaccaccaacgccaaaaaatggaatcgtggagctacaccgatgaagacggcacgctgttgggacaacaaatcacaccgcttgaccgcgtcggcatttacgtccccggcggcaaggcggcgtatccgagttccgtcatcatgaacgccatgcccgcccacgtcgcaggtgtgaaagaaatcatcatggtcgtgccgacaccaaaaggcgaacgcaacgacatcgtacttgccgccgcatacgtcgccggcgtaaccaaagtcttcaccgtcggcggcgcgcaggcggttgccgccctcgcctacggcacggaaaccatcccccaagtcgataaaatcaccggtccgggcaacgccttcgtcgccgccgccaaacgccgcgtgttcggcgtggtcggcatcgacatggtggcggggccgtctgaaatcctggtcatcgccgacggcacgacacctgccgattgggtggcgatggatttgttcagccaggccgaacacgacgaaattgcccaagccatcctcatcggcacgtcgcaagcgtatctcgacgaagtagaagccgctatggaccgcctgatcgaaactatgccgcgccgcgacatcatcgaagcctcgctcggcaacaggggcgcgatgatactcgccaaagacttggacgaagcctgcgaaatcgccaactacatttcccccgaacacttggaactgtcagtcgaaaacccgcaggaatgggcgaaaaaaatccgccacgccggtgcgattttcatgggacgctacaccggcgaaagcctcggcgactactgcgccggtccaaaccatgtgttgcccaccagccgaaccgcccgcttttcctcgcctttggggacatatgatttccaaaaacgctccagcctgattcaggtttcggaacagggcgcgcaaaaattaggcgaaaccgccagcgtgctggcacacggcgaaagcctgaccgcccacgcccgcgcggcagagttccgtatgaaataa

SEQ ID NO: 50426 - DNA, 474 bp, Neisseria meningitidis
atgaaaaaattattggcggccgtgatgatggcaggtttggcaggcgcggtttccgccgccggagtccacgttgaggacggctgggcgcgcaccaccgtcgaaggtatgaaaataggcggcgcgttcatgaaaatccacaacgacgaagccaaacaagactttttgctcggcggaagcagccccgttgccgaccgcgtcgaagtgcatacccacatcaacgacaacggcgtgatgcggatgcgcgaagtcgaaggcggcgtgcctttggaagcgaaatccgttaccgaactcaaacccggcagctatcatgtgatgtttatgggtttgaaaaaacaattaaaagagggcgataaaattcccgttaccctgaaatttaaaaacgccaaagcgcaaaccgtccaactggaagtcaaaatcgcgccgatgccggcaatgaaccacggtcatcaccacggcgaagcgcatcagcactaa

SEQ ID NO: 50427 - DNA, 555 bp, Neisseria meningitidis; identical to SEQ ID NO: 43391

SEQ ID NO: 50428 - DNA, 510 bp, Neisseria meningitidis
atgaatccgtttgaaacccaaagcgttacctttgccgaaccgattgaaatgctgtatgcctgccacggcaaagtacgccgtttttgcggccaagtcgcgatgctgtcggactacatcgccgaaaacggctgcaatcagcttgttttgcaaaccatccgccaaatcgcccagtatttcaacgttgccgcgccgctgcaccatgaagacgaagaagaaaacttcttcccgctgctgctgcaatatgcgccgcaagcccaagaaagcgtggacgagcttttgcgccaacatatcgggctgcacgacaactgggcggctgtttccgccgaatttgccaaactcgaagcagacaacgcttatgtccccgatgaggaagcgttcaaacgttttgtggcgggatatgatgtgcatttggcgattgaagaacccttgttcgacatgggcaagatgttcatccccaaagagaaactgaccgaaatcggcgaaatcatggcggcgcgccggcgcagataa

SEQ ID NO: 50429 - DNA, 1332 bp, Neisseria meningitidis; identical to SEQ ID NO: 41736

SEQ ID NO: 50430 - DNA, 363 bp, Neisseria meningitidis; identical to SEQ ID NO: 43119

SEQ ID NO: 50431 - DNA, 630 bp, Neisseria meningitidis
atgaacagacacatccgccaagaaatcttcgaacgcttccgcgccgccaacccccatccgaccacagaactcaacttcaactcccctttcgagcttttaatcgccgttttactgtcggcacaggcaaccgacgtcggcgtaaacaaagcgacggcgaagctgtttccggttgccgatacgccgcaggcgatactggatttgggtttggacggcgtgatggaatatacgaaaaccatcgggttgtataaaaccaagtccaagcacatcatgcagacctgccgcatcctgctggaaaaatacaatggcgaagtgccggaagaccgcgaggctttggaatcgttgccgggcgtggggcgcaaaacggcaaacgtggtattgaacacagcgttcggacaccccgttatggcggtcgatacgcatattttccgcgtgtccaaccgaaccaaaatcgcccccgggaaagatgtgcgcgaagtcgaagacaaactgatgcgcttcattcctaaagagttcctgatggacgcgcaccactggctgattttgcacggacgctacacctgcaaggcactcaaaccgcaatgccaaacctgcatcatcaacgatttgtgcgaatatcccgccaaagcctga

SEQ ID NO: 50432 - DNA, 297 bp, Neisseria meningitidis
atgctgttgaaggtagtacctgagcgtaccgtttcggcagatgcaaaaaccagagacccgatgtgggacaatgcggctttacagaccagcgaaggcgtaaattttattgctcgtttcctaggattttttagcgatggggaataccgctatgtggatgtcctgcaacccaaccattccgatattattcggtattcaggtaaagattttcctctaaatcaaatacttaaccatatacaccccgcccgttatgcggtaacgttcgaaaacaatgtcgattccaagctgcgcaggcactga

SEQ ID NO: 50433 - DNA, 780 bp, Neisseria meningitidis; identical to SEQ ID NO: 45496

SEQ ID NO: 50434 - DNA, 1362 bp, Neisseria meningitidis
atgctgaaaaaagttttaatcgccaaccgaggcgaaatcgcattacgcgtactccgtgcctgccgcgaaatgggcattgccaccgtcgccgtgcattccgaggccgacaaagacagcctgcacgtcaaactcgccgacgaatccgtgtgcatcggccctgccgcttccgcgcaaagctaccttaacgtccccgccattatcgccgccgccgaagtaagctgcgcggacgctgtccatccgggctacggtttccttgccgaaaacgccgatttcgccgaacaggtcgagcagtccggctttacctttatcggcccgaaacccgacaccatccgcctgatgggcgacaaagtctccgccaaacacgcgatgatagcggcaggcgtaccctgcgtccccggttctgacggcgcattgcccgacgacggcgaagaaatcctcaaaatcgccgataaagtcggttatcccgtcattatcaaagcctctggcggcggcggcggtcgcggtatgcgcgtggtcgagaaaaaagaagacctcctccaatctgtcgaaatgaccaaggcagaagcaggcgcggcattcggcaacccgatggtttacatggaacgctatttgcaacgtccgcgccacgtcgaaatccaagtgattgccgacgaacacggcaacgccatctaccttgccgagcgcgactgttcgctgcaacgccgccaccaaaaagtcatcgaggaagcaccggctccgttcatcactgaaaaagaacgcgccaaaatcggcaacgcctgtgccgatgcctgcaaacgcatcggctaccggggcgcgggtacgtttgagtttttatacgaagacggcgaatttttctttatcgagatgaacacgcgcgttcaggtcgagcatccggttaccgagctcatcaccggcgtggacatcgtgcaggagcaactccgcatcgccgccggcctgcctttgcaatacaaacaaaaggatattcaagtcgaaggccacgcgtttgagtgccgtatcaacgccgaagacccgtacaacttcattccaagcccgggcctgattgaaagctgccacctgcccggcggcttcggtatccgcgtggacagccacatttaccaaggctaccgcatcccaccgtactacgacagcctgatcggcaaaatctgcgtacacggcaaaacgcgtgaacaggcaatggcgaaaatgcgcgtcgcactcgccgagctggcggtaaccggcatcaaaaccaatacgccgcttcaccgcgacctgttcgccgatgcgggtttccaaaaaggcggcgtcagcatccactatttggaacactggctggaagatcgcaaagccaaacaggacaagtaa

SEQ ID NO: 50435 - DNA, 873 bp, Neisseria meningitidis
atgagctggttagataaaatcctgccacccaaaatcaaaaaccgcagcaaagacggttcttccaatgttcccgagggtttgtggcacaaatgtccgtcttgttcggcaaccgtttattcgaccgagttgcagcagaacaatcaggtttgtccgaaatgcaaccaccacaatccgttgtcggcacgacaacgcctgaatctgcttttggatgaggatggtagagaggagattgccggaaatgtcaaaccgaccgatcctttgaagtttaaagacagcaaaaaatatccggatcgtttgagtgcggcacgcaagctgaccggggaagatgatgctttggtggtaatgaaaggcaagatgaacggtctgcccgtcgtcgttgccgcgtttgaattccgctttatcggcggttcgatgggttcggttgtgggcgaacgattcgtacaaggtatccgtcgggcggttgccgacaattgtccgttcgtctgtgtggcggcttccggcggtgcgcgtatgcaggagggtgtgaactcattgatgcagatgacgaaaaccagtgccgcgctgcatttgctgacggaaaaacgcctgccatttatatcggtgttgaccgatccgactatgggcggcgtatccgccagcttcgcatttttgggcgatgtcgtgcttgccgaaccgaacgcgctgatcggttttgccggtccgcgcgtgattgagcagacggtgcgcgaaacgctgccggaaggcttccaacgcgccgagttcctgctggaaaaaggcgcaatcgaccagattgtcgaccgccgcgatatgaagcggcgcatcagtgatttgattacgctgttgtgccgtcaggacaaagttgccgccgcatga

SEQ ID NO: 50436 - DNA, 378 bp, Neisseria meningitidis
atgggaacattgaatgatataaaaaaaatcttgattaatgtggggctttatcaagggtttgatttgacagatccaaaagtatcagaagaagttaatcatgaaacagctaatatgaaatggattaaagattatacttcagacgggaattgggataatgaatttaaggaggatttaaaaaactttttagattatatggaagtatgccaattagccctaaacgataaaaatttcaaaattgccagtaattctttatttatggctatgatttacgcaggtaatctatctcttatatttgattcaataaaaactgatatatcaacattattgagtgctgagtataaaaagaatagtttttcatggccatctcttgatgaatag

SEQ ID NO: 50437 - DNA, 543 bp, Neisseria meningitidis; identical to SEQ ID NO: 38476

SEQ ID NO: 50438 - DNA, 714 bp, Neisseria meningitidis
ttgagactgtatgaaagcgggcaggtcaacattcctgcggactttttacttgctgctgtccaattaggggtggatattcaatttgtctttacaggcattcattcggcaaatttaaatgctgtttcagacgaccttaataaaaaattggacgacgctattggcaaatcaaacgttgagaatcagattaacggcaacgtcagtaacgctgttatcgcctcatctggttcggttgttcatcaaattaatacccaaaatcacgtcatcagaacccgtgtcgattcaaaacccggcaaggaacatataacgcttgagcaagcttcaaagctgcaacaacttgttaaacaagttgccgcagcagaagagattgccaaacggtcgccaaaatcaatccgtgcaatttgggctagtctgaatgctcactgtaaagttccaagttacaaactaatcgcattgagcgattacgacaaagcagaaacttatctcagaaaatggctgggtaggttgagcaatacagcaacatcaaagaacaacgatcccgactggcgaaaaaagaaatacgcttatatcaaattaaatgtaaaacaacttgagcttgaagattggttgaaaagttacctcgaaaaaaatttcgcagtagaaagcctgactgaattaagtaatgacgatttgcaaaaaacatatgcagcagtatcgactaaaaaacggaaaaaatag

SEQ ID NO: 50439 - DNA, 1296 bp, Neisseria meningitidis
ttggcgggggtcggcaaactcgtccgcttaggcgcgaaattcagcacaagggcagtcccttatgtagggacagcccttttagcccacgacgtatacgaaactttcaaagaagacatacaggcacgaggctaccaatacgaccccgaaaccgacaaatttgtaaaaggctacgaatatagtaattgcctttggtacgaagacgaaagaagtattaatagaacctatggctgctacggcgttgacagttcgattatgcgccttatgtccgattacagcagattccccgaagtcaaagaattgatggaaagccaaatgtataggctggcacgtccgttttggaattggcataaagaagaactgaataaattaagttctttggattggaataattttgttttaaatagttgcacatttagttggaacggcggagattgtgtggtcaataaaggtgatgattacagaaatggggctaatttttcccttatccgcaatccgaaatacaaagaagaaatggatgccaaaaagctggaagagattttatcgttgaaagtcgatgccaatcccgacaaatacataaaggcaaccggatatcccggttattccgaaaaagtagaagtcgcacccggaacaaaagtgaatatgggacccgtcacggacaggaacgggaatcccgttcaggttgtcgcaacattcggcagggattcgcaaggcaacaccacagtggatgttcaagtaattccgcgtcccgacttaacccccggaagcgcggaagcgccgaacgcacagccgctgcccgaagtatcgcccgccgaaaaccccgcaaacaacccggcccccaatgagaaccccggcacgcgtcccaatcccgaacccgaccccgatttgaatcccgatgcaaatcccgatacggacggacagcccggaacaagccccgattccccggccgttccggaccgcccaaacggcagggacggcaaagatggcgggcttttgtgcaaattcttccccgacattctagcttgcgacaggctgcccgagcccaatccggcagaagatttaaatctgccgtctgaaaccgtcaatgtagagtttaagaaatccggaatctttcaagattccgcacagtgtcccgcccccgttacgttcactataaccgtgcttgattcaagcaagcagttcgcgttcagctttgagaacgcatgtaccatagccgaacggctaaggtacatgcttctcgcccttgcttgggcggttgccgcctttttttgtatccgcacagtatcccgtgaagtctag

SEQ ID NO: 50440 - DNA, 288 bp, Neisseria meningitidis; identical to SEQ ID NO: 36916

SEQ ID NO: 50441 - DNA, 1467 bp, Neisseria meningitidis; identical to SEQ ID NO: 43652

SEQ ID NO: 50442 - DNA, 2385 bp, Neisseria meningitidis
atgaataaaaatattaaatctttaaatttacgggaaaaagacccgtttttaagtcgtgaaaaacagcgttatgaacatcctttgcccagtcgggaatggataatcgaattgttggagcgcaaaggtgtgccttcaaaaatcgaatcgcttgcgcgcgagctgtcgattacggaagacgagtatgtcttttttgaacgccgtctgaaggcgatggcgcgggacggtcaggttttaatcaaccgtcggggcgcggtttgcgcggcggacaaattggatttggtcaaatgccgcgtcgaggcgcataaggacggtttcggttttgccgtgccgctcacgcccgccaaagacggtgattttgttttgtatgaacgccagatgcgcggcattatgcacggcgatattgtcactgttcgtcctgccggcatggaccgtaggggccgccgcgaagggacagttctggatattgtcgaacgcgcgcaaagcaaagtggtcggccgtttctatatggataggggcgtggcgattttggagccggaagacaagcgtctgaaccaaagcatcgtattggaaccggacggcgtggcgcgtttcaaacctgaatccggtcaggtcatcgtcggcgaaattgaggtttatcctgagcaaaaccggccggcagtggcaaaaatcatcgaagttttgggcgattatgccgacagcggcatggagattgaaattgccgtgcgcaagcatcatttgccgcaccaattcagtgaagcgtgtgccaaagccgtgaaaaaaattcccgaccatgtacgcaaaagcgatttgaaaggccgcgtcgatttgcgcgacctgcctttggtaacgattgacggagaaacggctcgagattttgacgatgcggtgtttgccgaaaaaatcggacgcaattaccgtctggtcgtggcgattgccgatgtcagccattatgtccgccccgatgacgctatcgacacggacgctcaggaacgcagcaccagtgtttacttcccgcgccgcgtgattcccatgttgccggaaaacctgtccaacggcatctgctcgctcaatcctaatgtcgagcgtttgtgtatggtgtgcgatatggtcatcacttacgcgggcaatattaaagaataccgcttctaccccgccgtgatgcgctctcatgcccgcctgacctacaaccaagtttggaaatggctttcaggcggcatcgggcatccgttcaaagcccaaatcgacacgctttacaaactcttcaaaatccttcagaaaaagcgtttcgaacgcggggcggtggagtttgacagcatcgaaacccaaatgcttttcgacgacaacggtaaaattgaaaaaatcgtccccgtcgtccgcaacgatgcccacaagctgattgaagaatgtatgctggcggcgaatgtttgcgcggcggattttctgttgaaaaacaagcatacggctttgttccgcaaccatttggggcccacgcccgaaaaactcgccgccttgcgcgagcagctcggtctgttggggcttcaacttggcggcggcgacaacccgtcgccgaaagactatgccgcgcttgccggacagttcaaaggcaggccggatgccgaattgctgcaagtcatgatgttgcgctccatgcaacaggcggtttacgaaccgcattgcgacggacactttggtcttgcctacgaagcatacgcccacttcacctcgcccatccgccgctatcccgacctgaccgtacaccgcgccatcaaagccgtgttgaatcagcaaacctacacgccaaaaaaaagctggcaggctttgggcgtgcatacctcgttctgtgagcgccgtgccgacgacgccagccgcgacgtggaaaactggctgaaaacctattatatgcgcgataaggtcggcgaagtattcgaaggtaaaatctccggcatgaccagttttggtatctttgtaacactggacggcatccacattgacggcttggtgcatatcagcgatttgggcgaagactatttcaacttccgccccgaaatcatggcaatcgaaggcgaacgcagcggcatccgtttcaacatgggggacagggttgccattaaagtggcccgtgccgatttggatgatggaaaaatcgattttgtcctgattgccgaggggagcggcagagggcggaaagttaaatcatccgcgtctgccaaaccggcagggacggcggggaaagggaagccgaaaaccgccgccgggaaaaaaacagcccgaggcggcaaagtaaggggaaggggcgcgtctgccgccgcagaatcggggaaaaaggcaaagaaaccgattccgattgaagtacaaaaggtaaaaaaacggaaaggcaaatcataa

SEQ ID NO: 50443 - DNA, 738 bp, Neisseria meningitidis; identical to SEQ ID NO: 47068

SEQ ID NO: 50444 - DNA, 1518 bp, Neisseria meningitidis
atgtctcctaaaaaaatacccatttggcttaccggcctcatcctactgattgccctaccgcttaccctgccttttttatatgtcgctatgcgttcgtggcaggtcggcatcaaccgcgccgtcgaactgttgttccgcccgcgtatgtgggatttgctctccaacaccttgacgatgatggcgggcgttaccctgatttccattgttttgggcattgcctgcgcccttttgttccaacgttaccgcttcttcggcaaaaccttttttcagacggcaatcaccctgcctttgtgcatccccgcatttgtcagctgtttcacctggatcagcctgaccttccgtgtcgaaggcttttgggggacagtgatgattatgagcctgtcctcgttcccgctcgcctacctgcccgtcgaggcggcactcaaacgcatcagcctgtcttacgaagaagtcagcctgtccttgggcaaaagccgcctgcaaacctttttttccgccatcctcccccagctcaaacccgccatcggcagcagcgtgttactgattgccctgcatatgctggtcgaatttggcgcggtatctattttgaactaccccacttttaccaccgccattttccaagaatacgaaatgtcctacaacaacaataccgccgccctgctttccgctgttttaatggcggtgtgcggcatcgtcgtatttggagaaagcatatttcgcggcaaagccaagatttaccacagcggcaaaggcgttgcccgtccttatcccgtcaaaaccctcaaactgcccggtcagattggcgcgattgtttttttaagcagcttgttgactttgggcattattatcccctttggcgtattgatacattggatgatggtcggcacttccggcacattcgcgctcgtatccgtatttgatgcctttatccgttccttaagcgtatcggctttaggtgcgattttgactatattatgtgccttgccccttgtttgggcatcggttcgctatcgcaattttttaaccgtttggatagacaggctgccgtttttactgcacgccgtccccggtttggttatcgccctatccttggtttatttcagcatcaactacacccctgccgtttaccaaacctttatcgtcgtcatccttgcctatttcatgctttacctgccgatggcgcaaaccaccctgaggacttccttggaacaactccccaaagggatggaacaggtcggcgcaacattggggcgcggacacttctttattttcaggacgttggtactgccgtccatcctgcccggcattaccgccgcattcgcactcgtcttcctcaaactgatgaaagagctgaccgccaccctgctgctgaccaccgacgatgtccacacactctccaccgccgtttgggaatacacatcggacgcacaatacgccgccgccaccccttacgcgctgatgctggtattattttccggcatccccgtattcctgctgaagaaatacgccttcaaataa

SEQ ID NO: 50445 - DNA, 822 bp, Neisseria meningitidis
atggctgttttaattaccggtgcttcggcaggattcggcgaagcgatgtgccgtgcgtttgtcggggcgggataccgcgttatcggtgcggcgcgccgtgcggacaggcttcaggccttggcggatgaattgggtgctttgttttaccctttggaaatggacgtgtcgcgacgcgagtcggtggaaaacgccttaaacggcatccccgatgaattttccgacatcgactgcctcatcaacaatgccgggctggctttgggtctggacacggcggacaaggcggattttgaagattgggaaacgatgattcaaaccaatgttttgggtttgacgttcctgacgcgcaaaattttgccgcaaatggtggaacgcggcggcggttatgtgatgaatttgggttcgattgcaggcaattatgcttatgccggcagcaacgtttacggggcgaccaaggcgtttgtgcgccagttcagcctgaatttgcgcgcggagttggcggataagaacatccgcgttaccaatatcgagccgggtttgtgcggcaatacggagttttccaatgtgcgcttcaaaggcgatgacgagagggcggcgggcgtgtatgagggtgtggaatttatccgccccgaagatattgcggaaaccgcattgtggctgtaccagcggccggcgcatatgaatgtgaacacgattgaaattatgcccgtggcgcagacttttgcaggaatgaaagtgataaaaaaagccgtgcccgaagtgcgggaagactttgaaaaacagagtatgtcgctgttttcccgcatcaggtcctggttcaaatga

SEQ ID NO: 50446 - DNA, 456 bp, Neisseria meningitidis
atgcataaaattccaaaaggaacggcactggcattcgacttcggcgaagcgcgtatcggcgtggcacaaggagacgcggaattagggctatcccatcctttgagcaccgttaccggcggcagcaacgatgaaaagttcgcggcaatcgccaagctggttcaagaatggcagccgcgttattttgtcgtcggactgcccgtgcataccgacggcacgaaacatgaaatgacgcacctgtcgcacaagttcggacgcaggctgaacggcaggttcaatctccccgtctattgggttgacgaacggctgtcgtccgtctatgccgaaagcctgctttcggaagcacaggtcttcggcaaaaaacgcaaatcggtgctcgaccaagtggcggcgcaagccatcttgcacggttttttcgagggcggtccggcggaatgtttcaacgggcgtgagggttaa

SEQ ID NO: 50447 - DNA, 636 bp, Neisseria meningitidis; identical to SEQ ID NO: 42737

SEQ ID NO: 50448 - DNA, 2889 bp, Neisseria meningitidis
atgagtaacacaaccgtagaacaatttgccgccgagctgaaacgccccgtcgaagacctgttgaaacagttgaaagaagccggcgtcagcaaaaccggcggcggcgattccctgacgctggacgacaaacagcttctgaacgcctacctgaccaagaaaaacggcagcaacggcggcaccatcagcatccgccgcaccaaaaccgaagtcagcaccgttgacggcgtaaaagtcgaaacacgcaaacgcggacgcaccgtcaacattccttctgccgaagaattggcagcacaggtaaaagccgcccaaacccaagccgcacctgtccggccggagcagacggcagaagacgcggcaaaagcccgagccgaagctgccacacgtgcagaagcccgtgccaaggcagaagcggaagcggcaaaactgaaagcggcaaaagcaggcaacaaagccaaacctgccgcacagaaacccaccgaagcaaaagccgaaaccgcacccgttgcggcggaaaccaaacccgccgaagaaagcaaagcggaaaaagcccaagccgacaaaatgccgtctaaaaaacccgccgagcccaaagaaaaagccgccaagccgaaacacgagcgaaacggcaaaggcaaagatgccaaaaaaccagcgaaacctgccgcacctgccgtgccgcaacccgtggtcagcgcggaagaacaggcgcaacgcgatgaagaagcacgccgtgccgccgcacttcgcgcccaccaggaagccctgttgaaagagaaacaggaacgccaggcacgccgcgaagccatgaaacaacaggcagaacaacaggcaaaagccgcacaggaagccaaaaccggcagacagcgtcccgccaaacctgccgagaaaccgcaggcagccgcgccggccgtcgaaaacaaacctgtcaatccggcaaaagcgaaaaaagaagaccgccgcaaccgcgatgacgaaggtcaaggccgcaacgccaaaggcaaaggcggaaaaggcggacgcgaccgcaacaatgcacgcaacggcgacgacgagcgcgtacgcggcggcaaaaaaggcaaaaaactcaaactcgagccgaaccaacacgccttccaagcaccgaccgaacccgtcgttcatgaagttttggttcccgaaaccattaccgttgccgatttggcgcacaaaatggcggtcaaaggcgtggaagtggtcaaagccctgatgaagatgggcatgatggttaccatcaaccaatccatcgaccaagacaccgccctgattgtcgtcgaagaactcggacacatcggcaaacctgccgcagccgacgaccctgaagcattcttggacgagggcgcggaagcggtggaagccgaagcattgccgcgtccgcccgtcgttaccgtcatgggccacgtcgaccacggcaaaacctcgctgctggactacatccgccgtaccaaagtggtacagggcgaagcaggcggcattacccaacacatcggtgcataccacgttgaaaccccacgcggcgtgattaccttcttggatactccgggtcacgaagcgtttactgccatgcgtgcgcgcggtgcgaaagcaaccgatatcgtgattcttgtggtcgccgccgacgacggtgtgatgccgcaaaccatcgaagcgattgcccacgccaaagcggcaggcgtaccgatggtggttgccgtcaacaaaatcgataaagaagccgccaacccagagcgtatccgccaagagctgaccgcacacgaagtcgtgcctgacgaatggggcggcgatgtacagtttatcgacgtttccgctaaaaaaggcctgaacatcgatgcattgctcgaggcagtcttgctcgaagccgaagttttggaactgaccgcacctgtcgatgcgcccgccaaaggcatcatcgtcgaggcgcgcttggacaaaggccgcggcgcggttgccacattgctggttcaaagcggtacgctgaaaaaaggcgacatgctgctggccggtacggcattcggcaaaatccgcgcgatggtcgatgaaaacggcaaatccattaccgaagccggcccgtccatccccgtcgaaatcctcggcttgtccgacgtaccgaatgcgggtgaagacgcgatggtattggcggacgagaaaaaagcgcgcgaaatcgccctcttccgccaaggcaaataccgcgacgtgcgccttgccaaacagcaggcggcgaagctggaaaatatgttcaacaatatgggcgaaacccaggcccaatctttgtcggtcatcatcaaggcagacgttcagggttcttacgaggctttggcgggcagcctgaaaaaactgtccaccgacgaggtgaaagtgaacgtattacacagcggcgtgggcggcattaccgaatcagatgtcaaccttgccatcgcttcgggcgcgttcattatcggctttaacgtgcgtgcagatgcctcttcgcgcaaacttgccgaaaatgaaaacgtggaaatccgctactacaacatcatctacgatgccatcgacgacgtgaaggcggcgatgagcggtatgctttccccggaagagaaagaacaggttaccggtacggtcgaaatccgtcaggtcatctccgtttccaaagtcggcaacattgcaggctgtatggttaccgacggcgtggtcaaacgcgattcccatgtccgcctcatccgcaacaacgtggttatccacacgggcgaactggcttcgttgaaacgctataaagacgatgtaaaagaagtccgcatgggcttcgagtgcggtctgatgctcaaaggctacaacgaaatcatggaaggcgaccaactggaatgcttcgacatcgtcgaagttgcccgcagcctgtaa

SEQ ID NO: 50449 - DNA, 1104 bp, Neisseria meningitidis
atgtcttcttttatttttcccgataacgggttcgaatggcgcaacgaaagtctgcaaaagccgcccaaaggttggcattatgtccgcgaaagtggtgcaaacggcattttgaaggctgcctatcaaaatattgcaactgtctggcagggcgatttccacaatgccaaacaggtgctttccgcaatgaagaagaaggtccgcaaacctgccgccgtccgttccgatgcggatatcgccgcccttttccacgcccaccgtatgaagcaggcgcagcagagccgtattctgaatatgcttgccgttgaaatccgccccggttttgtgttggacaacaaacgcgcgcccgatatacgctccgctttgctcgacgtgtacggagaggcggacggcaaaccgtttttcctgccgctcaatctgctgctggggtttatgggtgcgcacgagtggcataagaaaggggttgccgttccgcagctgggcggcagcatacacgttcctttcggcgtattctcgccgttgcgcggcgaatacctcgacctgctcgcccatgcgccgtcaacgggttttcagacggcattcgatatcgggacgggctcgggcgtgcttgccgccattttggcgaaacagggcattccttccgtcatcggcacggataccaatccgaaagccgtcgcctgcgcccgtgccaatattgcccgtttgggctttgaaaaacaggttgagatacgggaaaccgatctgtttcccgaagggtttgccgatctgattgtctgcaatccaccctggcttcccgccaagccgacttccgccgtcgaatccgcgttatacgaccccgaatctgcgatgctggctgcgtttttgcgggatgcgccgaaacatctgaatcccgacggagaaatccgcctgatcatttccgatcttgccgaacatctgcacctgcgtccgtccgattttctggataaggcatttgctcaggcgggtttgcgtgttgccgatatgatgaaaaccaagccgaagcacaaaaaagccgcgaatccgagcgatccgcttgcttttgcgcgaacccgggaaaccactttcctataccgtttgaaaaaggcataa

SEQ ID NO: 50450 - DNA, 750 bp, Neisseria meningitidis
atgcttatccaggcagttaccattttccccgaaatgttcgacagcattacccgctacggcgtaacgggacgcgcgaacagacagggaatctggcagtttgaagcagtcaatccccgaaagtttgccgacaacagattgggctacatcgacgaccgcccgttcggcggcggcccgggaatgattatgatggctccgccgcttcatgcggcaatagaacacgccaaaacacaatcctcccaagctgcaaaagtcatctacctcagcccccaagggaaaccgctgacacaccaaaaagcggtagaactggcagaacttccgcatctgattctgctgtgcggacggtatgagggcatagacgaaaggcttctgcaaagcagcgtcgatgaagaaatcagcatcggagacttcgttgtttccggcggagagcttcccgccatgatgctgatggatgcggtattgaggctcgtacccggcgtattgggcgatatgcagtctgccgaacaggattcgttctcaagcggcattttggattgcccccactacaccaaacccttagaatttcaaggcatggctgttccggaagtattgcgttccggcaatcatggcttgatagcggaatggcggttggaacaatcgctgcgccgcaccttggagcgcagacccgatcttttggaaaagcgcgttttaatcccaaaggaatcccgcctcttggaaaccatccggcaagagcaacgggaaatccaatcataa

SEQ ID NO: 50451 - DNA, 837 bp, Neisseria meningitidis; identical to SEQ ID NO: 43139

SEQ ID NO: 50452 - DNA, 216 bp, Neisseria meningitidis; identical to SEQ ID NO: 37181

SEQ ID NO: 50453 - DNA, 2940 bp, Neisseria meningitidis; identical to SEQ ID NO: 43390

SEQ ID NO: 50454 - DNA, 1011 bp, Neisseria meningitidis; identical to SEQ ID NO: 37650

SEQ ID NO: 50455 - DNA, 1380 bp, Neisseria meningitidis
atgctgctcgacctcaaccgcttttccttttccgtcttcctgaaagaagtccgcctgctgaccgctcttgccctgcccatgctgttggcgcaggtcgcgcaggtgggcatcggttttatcgatactgtgatggcgggtggtgcaggcaaggaagacttggcggcggtggctttgggcagcagcgcgtttgccacggtttatattacctttatgggcattatggcggcgctgaacccgatgattgcccagctttacggcgcgggtaaaaccgacgaagtgggcgaaacggggcggcaggggatttggttcgggctgtttttgggcgtgttcggcacggtcttgatgtgggcggcgattacgccgttccgcaactggctgaccttgagcgattatgtggaaggcacaatggcgcagtatatgctgttcaccagcttggcgatgccggcggcaatggtacaccgcgcactgcacgcctacgcctccagcctgaaccgcccgcgcctgattatgttggtcagctttgcggcgtttgtgttgaacgtgccgctgaactatattttcgtttacggcaaattcggtatgcccgctttgggcggcgcaggctgcggcctggcgacgatggcggtgttttggttcagcgcgctggcattgtggatttatatcgccaaggaaaatttcttccgcccattcggactgacggcgaaattcggcaaaccggattgggcggtgttcaaacagatttggaaaatcggcgcacccatcgggctgtcttattttttggaagccagcgcgttttcgtttatcgtgtttttgattgcgcctttcggcgaggattatgtggcggcgcagcaggtcggcatcagtttgtcggggattctctatatgattccgcaaagcgtcggctcggcggggacggtgcgcatcggcttttcgcttgggcggcgcgaattttcgcgggcgcgttatatttcgggcgtgtcactggtgttaggatggatgctcgccgtgattaccgtgctttccttggtattattccgttcgccgctggtaagtatgtacaacaatgatccggcggttttaagcatcgccgccaccgtcttactgttcgccggcttgttccaaccggcagacttcacccaatgtatcgcctcctacgccttgcgcggctacaaagttacaaaggtgccgatgttcatccacgccgccgccttttggggctgcggtctgctgccgggctacctgctcgcctaccgtttcgatatgggcatttacggcttctggacggcattgattgcctcgctcaccatcgccgccatcgccttggtgtggtgcttggaattgtgcagtagggagatggtcagatcgcataaggctgtctga

SEQ ID NO: 50456 - DNA, 477 bp, Neisseria meningitidis
atgcaaaaaatccccctgaccgtacgcggtgcggaattgctgaaacaggaattgcagcagctcaaaagcgtggcgcgtcccgaagtgatcgaagcgattgccgaagcccgttcgcacggcgatttgtccgaaaacgccgaatatgaagccgccaaagaacgccaaggctttatcgaaggccgcatttccgagctggaacacaaactttccgttgcccacatcatcaatccgaccgaaatccacgccgaaggcaaaatcgtgttcggtacgacggttacgctggaagatttggaaacggaagaacacgttacctaccaaattgtcggcgaagacgaagcggatatcaaacagggcaaaatctatgtcggctcaccgattgcccgcgccttaattggcaaggaagagggcgatacggcggaagtccaagccccgggcggcgtgcgcgaatacgacattatcgaagtccgatatatttga

SEQ ID NO: 50457 - DNA, 369 bp, Neisseria meningitidis
atgcgtcattacgagatcgtgtttatcgttcatcccgatcaaagcgagcaagtacccgctatggttgaacgttacaaaaccatgattgccgaagcaaacggtaagattcaccgtctggaagactggggtcgccgccagctggcttacccgattaacaaaatccataaagcccattacgttttgatgaacatcgaaaccactcccgaagtggttgaagagctggaaaccgcattccgcttcaatgatgcagtattgcgtcatctggccatcaaaaccaaacacgccgttaccgaagcatcccctatgttgggtggtgaaaaggctaagaacctgttgagcggtgcgtctgaagaagcggtcgcccaataa

SEQ ID NO: 50458 - DNA, 969 bp, Neisseria meningitidis; identical to SEQ ID NO: 43206

SEQ ID NO: 50459 - DNA, 2307 bp, Neisseria meningitidis
atggcgaaaaacctattaatcgtcgaatccccgtccaaagccaaaaccctgaaaaaatatttgggcggcgattttgaaatccttgcatcctacggacacgtccgcgacctcgtccccaaaagcggcgcggtcgatcccgacaacggctttgcgatgaaataccaattgattagccgcaacagcaaacacgtcgatgccatcgttgccggtgccaaagaagctgaaaacatctacctcgccaccgacccggatagggaaggcgaagccatttcctggcatcttttggaaatcctcaaatccaaacgcggcttgaaaaacatcaagccgcagcgtgtcgtgttccacgaaatcaccaaaaacgccgtgctcgatgccgttgcccatccgcgcgaaatcgaaatggacttggtcgatgcacaacaagcccgccgtgctttggactatttggtcggctttaacctttcgccattgttatggaaaaaaatccgccgaggtttgagcgcggggcgtgtgcaaagccctgctttgcgcctgatttgtgagcgcgaaaacgaaatccgcgcgtttgaagcgcaggaatattggacggtgcatctcgacagccacaaaggccgcagcaagttcaccgccaaactcgcccaatacaacggcgcgaaactcgaacaattcgacctgtcgaacgaagccgcgcaagccgacgtattgaaagaactcgaaggcaaagaagccgtcgttaccgccattgaaaagaaaaagcgcagccgcaatcctgccgcgccgttcaccacttctaccatgcagcaggatgccgtgcgcaaactcggcttcaccaccgaccgcaccatgcgtaccgcccaacagctttatgaaggtatagacgtagggcagggcgcgatcggtctgattacctatatgcgtaccgacagcgtgaatttggcggatgaagcgttaaccgaaatccgccattacattgaaaacaaaatcggcaaagaatatctgccgagtgccgccaaacaatacaaaaccaaatccaaaaacgcccaagaagcccacgaagccatccgtccgacttccgtgtaccgcacgcccgaaagcgtcaaacccttcctgagcgcagaccagttcaaactctatcaaatgatttggcagcgtaccgtcgcctgtcagatgacgcctgccaaattcgaccaaaccaccgtcgatattaccgtcggcaaaggcgtattccgcgtaaccggacaagtgcaaaccttcgcaggcttcttgagcgtttatgaagaaagcagcgacgatgaagaaggcgaagacagcaaaaaactgcccgaaatgagcgaaggcgataaattgcccgtggacaaactctacggcgaacaacactttaccactccgccgccgcgctacaacgaagccacgctggttaaagccctcgaagaatacggcatcggccgcccctcgacctacgccagcatcatctccacgctcaaagaccgcgaatacgttacccttgagcaaaaacgcttcatgcccaccgacacaggcgacatcgtcaacaaattcctgaccgaacacttcgcccaatacgtcgattaccacttcaccgccaaactcgaagaccagcttgacgaaattgccgacggcaaacgccaatggattcccttgatggacaaattctggaaaccgttcatcaaacaagtggaagaaaaagaaggcatcgaacgcgccaaatttaccacgcaggaacttgatgaaacctgcccgaaatgcggcgaacacaaactgcaaatcaaattcggcaaaatgggtcgttttgttgcgtgtgccggttatcccgagtgcagctacacgcgcaacgtcaacgaaactgccgaagaagccgccgagcgcatcgccaaagccgaggctgaacaagccgaactcgacggacgcgaatgtcctaaatgtggtggtcgcctagtgtacaaatacagccgaaccggcagcaaattcatcggctgcgccaactaccccaaatgcaaacacgtcgagccgctggaaaaaccgaaagataccggcgtccagtgtccgcaatgcaaaaaaggcaacctcgtcgagcgcaaatcccgctacggcaaactgttttacagttgcagcacctatcccgactgtaactacgccacatggaacccacccgttgcagaaagctgtccaaaatgcgcatggccggttttgaccatcaaaaccaccaaacgctggggtgtagaaaaagtctgcccacaaaaagaatgcggctggaaagaacagattgaaccgcccgcgccgaaagagtga

SEQ ID NO: 50460 - DNA, 1011 bp, Neisseria meningitidis
atgcacatcggcggctattttatcgacaaccccatcgcacttgcgccgatggcgggcattaccgacaaacccttccgccgcctttgccgcgagtttggcgcgggttgggcagtgtgcgaaatgctgaccagcgacccgacgctcagaaatactagaaaaaccttgcaccgcagcgattttgtcgatgaaggcggcatcgttgccgtgcagattgccggcagcgatccgcagcagatggcggatgcggcgcgttacaacgtcagcctcggggcgcagcttatcgacatcaatatgggctgtcccgccaaaaaagtgtgcaacgtccaagccggcagcgcgctgatgcagaacgagccgctggttgccgccattttggaagccgtcgtccgtgcggcaggcgtacccgttaccctcaaaacccgtttgggttggcacgacgaccatcaaaacctgcccgtcatcgccaaaatcgccgaagattgcggcatcgccgcccttgccgtccacggacgcacgcgtacgcaaatgtacaaaggcgaagcgcgttacgaactcatcgccgaaaccaaatgccgtctgaacatcccggtctgggtcaacggcgacattacttcgccgcaaaaagcccaagccgtcctcaaacaaaccgccgccgacggcattatgatagggcgcggcgcgcaaggcaggccgtggttcttccgcgatttgaaacattatgccgaacacggtgttttgccgcctgccttgagtttggcagaatgcgccgccgctattttgaaccacatccgcgccatacacgcgttttacggcgacaccgccggtgtgcgcatcgcacgcaaacacataggctggtacatcgacgaaatgcccgacggcgaacagacacgtcgtgaaatcaaccgcttggacagtgcggcggcgcaatacgacatgcttgcaggttatcttgaaagacttgccgaaaaaaccgacagttgggcgtgcgcctaccgcccaaatgccttctga

SEQ ID NO: 50461 - DNA, 564 bp, Neisseria meningitidis
atgaaaaaaatcatcttcgccgcactcgcagccgccgccatcagtactgcctccgccgccacctacaaagtggacgaatatcacgccaacgcccgtttcgccatcgaccatttcaacaccagcaccaacgtcggcggtttttacggtctgaccggttccgtcgagttcgaccaagcaaaacgcgacggtaaaatcgacatcaccatccccattgccaacctgcaaagcggttcgcaacactttaccgaccacctgaaatcagccgacatcttcgatgccgcccaatatccggacatccgctttgtttccaccaaattcaacttcaacggcaaaaaactggtttccgttgacggcaacctgaccatgcacggcaaaaccgcccccgtcaaactcaaagccgaaaaattcaactgctaccaaagcccgatgttgaaaaccgaagtttgcggcggcgacttcagcaccaccatcgaccgcaccaaatggggcatggactacctcgttaacgttggtatgaccaaaagcgtccgcatcgacatccaaatcgaggcagccaaacaataa

SEQ ID NO: 50462 - DNA, 2157 bp, Neisseria meningitidis
atgcccgccccccaaccttccgccccttacgaccccctgaccgccgaagcgcgtgccctgcttttccataccgcctcctacctcaagcccgaggaacaggcggagcttgaaaaagctgtcgcctatgcgtttcgcgcccacgacgggcaaacccgcaaaagcggggagccctacatcacgcatccgattgccgttgcgacgcagctcgccctttggcatatggacatacagggtctttgtgcaggcgtgatgcacgacgtattggaagatacgggcgtgacaaaaggggaaatggcggcggtgttcggcaatacgattgccgagatggtggacggtctgtccaaactcgaaaaactcaaatttgaagatcatgcggaacatcaggcggagagtttccgcaaactgattttggcaatgaccaaagatgtgcgcgtgattgtcgttaaacttgccgaccgcctgcacaatatgcggacactcggttcgatgcgcccggacaaacgccgccggattgcaagggaaacccttgaaatctatgcacagattgccaaccgtataggtttgaataacgcatatcaagagcttcaggatttatcgttccaaaacctgcatcccaaccgctacgagactttaaaaaaagcgatggacaagagccggaagaaccggcaggacgttgtcggcaaagtcttgcgcgcattcggccagcggctggtaggcgcgaatatagaggccaaaatcaaaggcagggaaaaaaacctgtacggcatccatcagaaaatgatggcgaaaaagctgcgctttgccgaggttatggatatttacggtttccgcgtcattgtcaacagcattccagcctgttatgccgcactcggcgcattgcacaccctctatcagcccaagcccgggcggttcaaagactatatcgccattccgaaaagcaacgggtatcaaagtctgcatacgactttggtcggtccttacggcttgccgattgaagttcagatacgtaccaaggaaatggatgctgttgccgaaggcggtatcgccggacattggagctataaatcatattctaagacggtcgatcaggcggtgcttcacacaaaccggtggctgaaaaatatcttagatttgcaggcaagcagtgccaatgccattgagtttctcgaacacgtcaaagtcgatttgtttccgaacgaaatctacatccttacgccaaaaggaaaaatcctaactttgcccaaaggggcaacgcctgtcgattttgcttatgcggtgcataccgatatcgggcacaaaaccgttgccgcacgtatcaacaatatcatgatgccgttgcgtacgaagctcaaaaccggtgattctgttgaaattatcacatccgaacacgccaaacccaatcccgcgtggttgaatttcgccgtgtcaggcagggcgcgcagtgccatacgccaatatattaaaaaccttaaccggcacgatgcggtcgttttgggagagagtctcttacaaaaagccctgtccagtttgctgcccaaagatgtcctgctttcagacggcatcaaagaaaaataccttgccgatctcaacgacaaacagacttcatttgaggaagtgctgtacaacgtcggtatggggcataccctgcctgtttatgtcgccatgcacattgccgagttggcaggggagcatttcggtagcgaggtcaggctcagttccattaaagtcgatggtcaggaaagcgggcatattcattttgcagagtgctgccaccctgttcccggtgattccatccgtttgctgttggttaagggaaaaggcatgattatccatagggatacctgcccgacgttgttgaagtccgatcccgaacagcagctggatgcagactgggaaaatatgaacgggcagaactaccgtgtcgggcttcaagtccaatcggaagacagccacggcttgctggcattaatggcgcaagcgatttccgattccggtgcggacattgagtcggtcgaaacaccgtctaaatcccagtcgggaacggaaggttttgtcgaattcaaattcttattgaaagtcaagaatctgaatcaattgaatcagattattcaaaatctgcatagtattccatatatccgcaaagtcatcagaagttga

SEQ ID NO: 50463 - DNA, 1188 bp, Neisseria meningitidis
atgactgaacactataaaacccttccggaacacgagctgctgattcagaagtctttgatcagcaatctgaatctttgggattgggtatttgccgtgctggtttttgcggctacggttttcgtacagacccgttccggtatgcatatggacatttacgaaacggtcatgttgtgggcaagtgccggtattgccgtgtttttgggttggtttttcaaaccgatgcgctggtttgttcctttaagcgtattgcttgcctatgccgccgtcggtttgtatggcggcaacatcaaatcggcagagattttcctgttgcggtatttcctcagcagccagtcggcgatcatgtggcagtgcgcctttgtcttcttcgccctgttcgcctatatttcgggcgcggttttggcaagcgtaaaaaatgtgccgaccaacacgctgttgggtatgggaaccgtgtttgcatgggtgtctgccgtagcaggctttaccggtctgctggtacgttggcacgaaagctatctgctccgtcccgatgcggggcatattccggtttccaacctgtatgaagtgttcatcctgtttttggtgattaccgcgctgatgtatctttattatgaaggtaagttcgccatacagaaattgggcggcttcgtgttcggctttatggcggtcgtggttggatttgtcttgtggtacagcgtgtcccgcgaggcgcataccatccagccgctgattcccgcgctccagtcctggtggatgaaaatccacgttccggcaaactttatcggttacggcgcgttttgcatttccgcgatgctcggtattgccgaactggtttccctgcgtgcggaaggaaaaggcggaaaactgtggctgccgccgtcggcattgatcgacgaggtgatgtataaggcgattgccgtcggctttctgttctttaccattgccaccattttgggtgcgctgtgggcggcagatgcttggggacgctattggagttgggatccgaaagagacgtgggcgttcatcgtctggctcaattacgccgtttggctgcacttgcggctggttgccggttggcgcggcaaagtgctggcgtggtgggcgattatcggtttgttcgtaaccgcatttgcttttatcggcgtgaatatgtttttgagcgggctgcattcttacggaacgctttga

SEQ ID NO: 50464 - DNA, 843 bp, Neisseria meningitidis; identical to SEQ ID NO: 42369

SEQ ID NO: 50465 - DNA, 1308 bp, Neisseria meningitidis
atgaagccagtaaacatcggtcttttaggtttgggtacggtcggcggcggtacggctgccgtgttgcgggacaacgcggaggaaatttcccgccgcttggggcgcgaagtgcgcatcagtgccgtatgcgacttgagcgaagaaaaagcccgccaaatctgcccgtccgcagcctttgtcaaagatccgttcgaactggtcgcgcgtaaagacgtcgatatcgtcgtcgaattgttcggcggcacgggcattgccaaagatgcggtgttgaaagccattgaaaacggcaaacacatcgttaccgccaacaaaaaactgctcgccgaatacggcaacgaaatcttcccgctggcggaagaaaaaaatgtcatggtgcaatttgaagcggcagtagcgggcggtatcccaatcatcaaagccctgcgcgaaggtttggcggcaaacaggattaaatccatcgccggcattattaacggcaccagcaacttcatcctctccgaaatgcgtgaaaaaggcagcgcgtttgccgatgtactgaaagaagcgcaggcactgggctatgccgaagccgacccgaccttcgacatcgaaggacatgacgcgggccataaaatcaccatcatgagcgcgctggcattcggcacgccgatgaacttttccgcctgctacctcgaaggcatcagcaaactcgacagccgcgacatcaaatacgccgaagaacttggctaccgcatcaaactgttgggcatcacccgcaaaaccggcaaaggcatcgagctgcgcgtccaccctaccctgattcccgaaagccgcctcttggcaaacgtcaacggcgtgatgaacgccgtgcgcgtcaacgccgatatggttggcgaaaccttatattacggcgcgggcgcgggcgcattgccgaccgcttccgccgtggttgccgatatcatcgacatcgcccgcctggttgaagccgataccgcccaccgcgtaccgcatctggcgttccaacccgcgcaagtccaagcgcaaaccatcctgcctatggacgaaattaccagcagctactacctgcgcgtccaagccaaagacgaaccgggcacgctggggcaaatcgccgcgctgttggcacaagaaaacgtgtccatcgaagcactgattcaaaaaggcgtgattgatcagaccactgccgaaatcgtgattctgacccacagcacggtcgaaaaacacatcaagtcggcaatcgcagccatcgaagcactggattgcgtggaaaaaccgattaccatgatccgcatggaaagcctgcatgactga

SEQ ID NO: 50466 - DNA, 1164 bp, Neisseria meningitidis; identical to SEQ ID NO: 38788

SEQ ID NO: 50467 - DNA, 144 bp, Neisseria meningitidis; identical to SEQ ID NO: 39918

SEQ ID NO: 50468 - DNA, 360 bp, Neisseria meningitidis
atgccacgcgtaaaacgcggtgttaccgcccgtgcccgtcaccaaaaaatcttcgcgttagccaaaggctaccgcggtcgtcgtaaaaacgtttaccgcgttgccaagcaggcggtaatgaaagccggccaatacgcataccgcgaccgccgccaacgcaaacgccaattccgtcaattgtggattgtccgtatcaatgcaggtgcgcgtgaaaacgggttgtcttacagcaaatttatgaatggtctgaaacgcgcctctatcgaaatcgaccgcaaagtattggctgatttggccgtgttcgataaagccgcttttgcacaattggttgaaaaagccaaagctgctttggctgcttaa

SEQ ID NO: 50469 - DNA, 1407 bp, Neisseria meningitidis; identical to SEQ ID NO: 47564

SEQ ID NO: 50470 - DNA, 1080 bp, Neisseria meningitidis
ttgcccgatacgcgcccgtatccccaaaatccgattaagaaccacctgctgctcaatgcctaccagttggcgcacaattcttcccaggcttcgcgcaaactctcgtccggccaacttcaaaccgaaatcagggggatgcttgagcaaaaccactatatcaacctttccctcgcgctgacgatgtcgcccgatgccggaacttatgccgcgctgctttccagtgtgaacgcggtactcgattgcgagaaagaaggcgaagtgcagtggttcgccctgccggtcgtgctggtgtccggctgcaagaaagaacgggcaatcgagatgaagctgccgacggagggattgtttgcctgtttgcaaaactatccgcacctgcgcgcgttgacgcaagagacgcaatggctgccttatcttgtacattcctccgatttgagtgcggtcgcgccggatgagtggtggcgtgccaaacaaaataccgaagcggcggcgcaacacttacgccgtttcgccccgcgccctttgcttttgcccgaagggcagtccgtccacgtcgtttacgcgctgggtttcggcagcggcaaagttcagacggcattgggtcagaaccttcttcaggcaggtctgcccttgatgcaggtatggcaggaaaatcttgcatcggaaggcgttacgctgtttgccaatccgctttccccggattctccggtacgcgcgctttccgacggcagccacacgcgccagcgcatggcgatggatgtgtttgcggcaaacgcgatacgcgccgtccgtatgcagagtccgcgcgtcggcgtggtcgcagcggcaaaggcgggcggacagattttattcgggtttaatgcgaccgacggcgcgtttgaagtcgtgccgcaggtgttttcgtggcagctttcctttaccgacaatattggcgttattcagcaaaattttttggatttaatggcagaatgccgtgtagaacacgtttacctgttgcacaatcccttgggcgaacaggaaagcatcccgagctatgcggaagcattgaaacgggaagggcacaatccgtttttcagcgcatag

SEQ ID NO: 50471 - DNA, 888 bp, Neisseria meningitidis
atgtacacaggacgttttgcccccagcccgaccgggctgctccacatcggctcgctgctgaccgccgtcgcttcctatgccgatgcgcgcgcgcacggcggcaaatggctgatccgcatggaagacctcgatccgccgcgcgaaatgccgggggcggcaagccatatcctgcacacgcttgaggcattcggattcgagtgggacggagaagtcgcctatcagagccgccgttacgccctgtatgaagaaaccctatgccgcctgaaaaccgccggactggtctatccctgccattgcagccgcaaagactggcagaccggggcaaggcggggcgcagacgggttcgtctataacggacgctgccgcaatccgcagcaacgccctgcaccgcaaggcaaacagcctgcgtggcgcatccgcgtccccgaccgcgacatcggcttttcagacggcatcgtcggcggttacgcccaaaacctcgcccgcgacatcggcgatttcgtcctgcttcgtgcagacggttactgggcataccagctcgccgtcgttgccgacgatgccgaacagggcgttacccacatcgtccgcggacaagacctgctcgtttccacgccgcgccaaatctatttgcagcagtgtttgggcgttccgacaccgcaatatgcccacctgccgctgctgaccaacgcacaagggcagaagtggtcgaaacagacgctcgcccccgcattggatttaaaccgccgcgaacaactcctccgccaagtgttccgttacctcaagctgcccgaagcaccggaaaccgaccgccctgccgaactgctcgactgggcggtggcacactgggatatgggcaaagtgccgaaacacgccattaccaccccctaa

SEQ ID NO: 50472 - DNA, 273 bp, Neisseria meningitidis
atgaagaaaaccggcaaatatcttatctatgctgcggcatttaccgcattctgctttgccttccaagaaaaccgttctgaagccaaacagcctgacatcactttatccgcatccctgtgcgaacaattcaacatactgaacgccaaagatatggatgcagaacaagtcgccctttccaaagaatgcgacatcatcgagtcttcacacgactgggaaaaagagtacggcaacttgaacgaacaggaaatgctcgccggcatcgtctatgaataa

SEQ ID NO: 50473 - DNA, 537 bp, Neisseria meningitidis; identical to SEQ ID NO: 45905

SEQ ID NO: 50474 - DNA, 1356 bp, Neisseria meningitidis
atgtcggaatatacgcctcaaacagcaaaacaaggtttgcccgcgctggcaaaaagcacgatttggatgctcagtttcggctttctcggcgttcagacggcctttaccctgcaaagctcgcaaatgagccgcatttttcaaacgctaggcgcagacccgcacaatttgggctggtttttcatcctgccgccgctggcggggatgctggtgcagccgattgtcggccattactccgaccgcacttggaagccgcgtttgggcggccgccgtctgccgtatctgctttatggcacgctgattgcggttattgtgatgattttgatgccgaactcgggcagcttcggtttcggctatgcgtcgctggcggctttgtcgttcggcgcgctgatgattgcgctgttggacgtgtcgtcaaatatggcgatgcagccgtttaagatgatggtcggcgacatggtcaacgaggagcagaaaggctacgcctacgggattcaaagtttcttagcgaatacgggcgcggtcgtggcggcgattctgccgtttgtgtttgcgtatatcggtttggcgaacaccgccgagaaaggcgttgtgccgcagaccgtggtcgtggcgttttatgtgggtgcggcgttgctggtgattaccagcgcgttcacgattttcaaagtgaaggaatacgatccggaaacctacgcccgttaccacggcatcgatgtcgccgcgaatcaggaaaaagccaactggttcgaactcttaaaaaccgcgcctaaagcgttttggacggttactctggtacagtttttctgctggttcgccttccaatatatgtggacttactcggcaggcgcgattgcggaaaacgtttggtacacgaccgatgcctcttccgtgggttatcaggaggcgggcaactggtacggcgtattggcggcggtgcagtcggttgctgccgttatctgctcgtttattctggcaaaagtgccgaatcaataccataaggcgggttatttcggctgtttggctttaggtgcgctcggtttcttctctatcttcttcattcacaatcaatacgcactgattctgtcttataccttaatcggcatcgcgtgggcgggcatcatcacttatccgctgacgattgtaaccaacgccttgtcgggcaaacatatgggcacttacttgggcttgtttaacggctctatctgtatgccccagatcgtcgcttcgctgttgagctttatcctcttccctatgctgggcagccatcaggcaaccatgttcttggttgcaggcgcggtcctgctgctgggcgcgttttccgtgttcctgattaaagaaacacacggcggggtttga

SEQ ID NO: 50475 - DNA, 1503 bp, Neisseria meningitidis
atggcaaaagtactcatcgtacccgtatctgccggactggacgcctccgccgccgcacaagcctttgcaaaagcactggacgcacaaattttccaagccgttgacgcaaccgccgaaaccctgctcgcgcaaggcaaaagcgacgactggttcgacgcactggtcggcaaagttgccgcactcgatgccgccaacctcgtcatcgaaggcatcgcgcccgatgccgacaaaatctacctcgcaggcaaaaacgtcgaactggcattgtcccttgacgcggcagccgtcttcgccgtccgttccgacaacgccgatgccgacgaactggcaaatcggctgaaccttgccaaacagttcttcgccgccgcgccgggcgtattggaaggttttgtcgtggacggcgcggcagcctccgttgccgaagcggcagccgaaaaaaccggcctgaccttcttcggttcgagcgacgcgctgaaagacgtatccgtattggcaggccgcgaagcaaaacgcctgtcgccggcgcaattccgctacaacctgatcgacttcgcccgccaagccgacaaacgcatcgtcctgcctgagggcgcagaaccccgcaccgtccaagccgccgccatctgccacgaaaaaggcattgcccgctgcgtcctgcttgccaaacgcgaagaagtcgaagccgttgccaaagaacgcggcatcagcctgcccgactctttggaaatcatcgatcccgcctcattggtcgaacaatacgtcgagccgatgtgcgaactgcgcaaatccaaaggcctgacacccgaagacgcgcgcaagcaactgcaagacaccgtggtactcggtacgatgatgatggcgcaaaatgatgtggacggtttggtatccggtgcggttcacaccaccgccaacaccatccgccccgctttgcaactgattaaaaccgcaccgggcgcaagcctcgtgtccagcgtattctttatgctgctgcccaaccaagtcctcgtcttcggcgactgcgcggttaatccgaacccgaccgcgcaacagcttgccgacatcgccatccagtctgccgattccgcaaaagccttcggcatcgacccgaaagtggcgatgatttcctactccaccgtcaactccggcagcggccccgatgtcgataccgtcatcgaagcaaccaaacttgcccgggaaaaacgccccgacctcgccatcgacggcccgctgcaatatgatgcggcaaccgtgccgggtgtgggcaaatccaaagctccgggcagcccggtggcaggacaggcaaccgttttggtcttccccgacctgaacaccggcaactgcacctataaagccgtccaacgcagtgccaacgtcttaagcgtcggcccgctgctgcaaggcctgcgcaaaccggtcaacgacctctcccgcggcgcgctggtggaagacatcgtgttcaccatcgccctgactgccgttcaggcaaaacaaatggaaggctga

SEQ ID NO: 50476 - DNA, 1089 bp, Neisseria meningitidis
atgtcccaaactatcgacgaactcctccttccccaccgcaacgccatcgacaccatcgatgccgaaatcctgcgcctgctcaacgaacgtgcgcaacacgcccacgccatcggcgagctgaaaggcacgggcgcagtgtaccgccccgaacgcgaagtcgccgtgttgcgccgcattcaggatttgaacaaaggcccgctgcccgacgaatcggtagcacgcctgtttcgggaagtgatgagcgagtgcctcgccgtcgaacgcccgctgaccatcgcctatctggggccgcagggcacgtttacccagcaggcggcaatcaaacatttcggacacgccgcgcacaccatggcgtgtccgaccatagacgactgcttcaagcaggttgaaacgcgtcaggcggattatctggtcgcccccgtggaaaattcgaccgaaggctcggtcggtcgcacgttagacctgcttgccgttaccgcgttgcaggcgtgcggcgaaatcgttttgcgcatccaccacaaccttttgcgtaaaaacaacggcagcaccgaaggcattgccaaagtcttttcccacgcgcaggcgttggcgcagtgcaacgactggttgggcagacacctgcccaacgccgaacggattgccgtgtccagcaatgccgaagccgcaaggctggttgccgaatcggacgacggtacggttgccgccatcgccggacgcacggcggcggaaatctacggactcgatatggttgccgagtgcatcgaagacgaaccgaacaacaccacgcgcttcttggtgatgggacatcacgaaaccggtgcaagcggcagcgacaagacttcgctggccgtttccgcgcccaaccgggcaggcgcggttgcctcgctgctgcaaccgctgaccgagtcgggtatttccatgaccaagtttgagagccgtccgagcaaatccgttttgtgggaatacctgttcttcatcgacatcgaaggacaccgccgggacgcgcagattcagacggcattggaacgcttgggcgaacgcgcttcgttcgtcaaagtcatcggttcgtacccgaccgccgttttgtag

SEQ ID NO: 50477 - DNA, 297 bp, Neisseria meningitidis; identical to SEQ ID NO: 38749

SEQ ID NO: 50478 - DNA, 438 bp, Neisseria meningitidis
atggtggaagctaaaatttttattctatacggtgcagccaacaaaggtaagagtacgacactcaatacgctttttaatcagatttgtcggaaattttctaaatttctagtcttttttgaaagacatggaaacggcttagattttgttgcagtatttgatcatgaagatcagaggattggtttttattcatctggtgataatgaatacgaggttaggagaaatttatacaaactttattcgcataattgtgattttatttttggcacgtcaaggacacggggtggtagttgcgatgcagtaggatgttatgcagagttattgcatggcgatgtaaatataattaattggtgtgaaaagtttgagcctacagatgaagacaatgagcgtgctgttaaagagttatttaagtcatttaaaaatataataaataagttatag

SEQ ID NO: 50479 - DNA, 1026 bp, Neisseria meningitidis
atgggcaggcatttcgggcgcaggcgttttttgacggttgccgccgttgcggcggcgggcgcggcggtttctttcctgccgaatccttttgccgccgacggtgaaaaacgaaacggggatgaaaaacgcaatgaaaatgtgtttttctggaaaggtgtcgcgctgggttccggtgcggagctgcgcctgttcggcgtggataacagacaggcggcggatttggtcaacaaggttttggcggaagtggcgcgtttggaaaaaatgttcagcctttaccgtgaagacagcctgatcagccgtctgaaccgtgacggttatttgacttcgccgccggcggattttttggaactgttgagcctgtgccgcgatattcacgcgctgacgggaggcgcgttcgatccgacagtgcaggcgttgtggaaactgtatgccgattattttgccgctcatcccgatgcggaaacaccgccgcctcaaaacagcgtggatgaagccctgaaacgggtaggctttggcaaagtctcgtttgacgaccgtgaaatccgttttgccgaaaagggtatgggtttgtccttgaacggcatcgcgcaaggctatattacggataaggtcgtcgcgttgctgaaagcaaatggcgtgcctgccgcgctggtcgatatgggcgaaatcagggggtttgatacaaacggcaggcggacttggaatgtcggcatccgcaatccggacgacgaagaaggcgtgttggcaaatatcacgatgaaagacaaagcgtttgccacttcgggcggctatgggacggtgatggacaaagcgggcaggtttacccatttgttcgatccgcgaaccggcgtgagtacgccgcgttataaaagcatcagcgtaatggcggatgatgcggcggttgccgatgccttgtcgacggcgttttccattatggatctgcacttgatacggtcggttgccgaaagcaggcagcttaaggtttggctgctgatgccggacaatactttgaacgaaataggctga

SEQ ID NO: 50480 - DNA, 1116 bp, Neisseria meningitidis
atgcttaaatttaccttacacaaaaaagacggatacgcccgacgcggcacgctggagttgaaccacggcaaaattgaaacgccggtatttatgcctgtcggtacttacggctcggttaaggcgatgaacccgcaaaacctgcacgacatcaaggcgcaaattattttgggcaacacttatcatttgtggctgcgtccgggcttggaggtcgtcgaacagtttggagggcttcacggctttatcggctgggacaaaccgattctgaccgactcgggcggttttcaggttttttctttgtcggatatgcgcaagctgacggaagaaggctgtacgttcaaaagcccgatcaacggcgacaagctgtttttatcgcctgaaatttccatgaaaatccaaacggttttgaactcggacatcgcgatgcagctggacgaatgcacgccgggcgaagcaacgcgcgaacaggcgaaaaaatcgctgcaaatgagcctgcgctgggcggaacggagcaaaaaagcctttgaagatttgaaaaacccgaacgcgctgttcggcatcgtgcaaggcgcgatgtatgaggatttgcgcgaagaatcgctgcgcggtttggaacagtttgattttcccggccttgccgtcggcggtttgtccgtcggcgaacccaagcccgaaatgtaccgtatgctgcgcgccgtcggtccgattctgccggaacacaagccgcattacctgatgggcgtaggcacgccggaagacctcgtgtacggcgtggcacacggcatcgatatgttcgactgcgtgatgcccacccgcaatgcacgcaacggctggctgtttacccgtttcggcgatttgaaaatcaaaaacgccaaacacaagctcgacaagcgtccgatagacgaaagctgcacctgctacgcctgccaaaacttcagccgcgcctacctgcaccatctgcaccgcaccggcgaaatcttgggcgcacagttgaacaccatccacaatctgcatttctaccaagtcattatggcggaaatgcgcgaagccgtcgaacaaggcaaatttgccgactggcaggcgcgattccacgaaaaccgcgcacgcggcacagactga

SEQ ID NO: 50481 - DNA, 939 bp, Neisseria meningitidis; identical to SEQ ID NO: 38569

SEQ ID NO: 50482 - DNA, 2262 bp, Neisseria meningitidis
atgttacaaatcgaaatcgacggcaaacaagtatctgtggagcagggcgcgacggtgattgaagccgcgcacaagctcggtacttatattccgcatttctgttaccacaaaaaactttccatcgccgccaactgccgtatgtgtctggtgaacgtagaaaaagccccaaaacccctgcctgcctgtgccacgccggttacagacggcatgattgtgcgtacgcattcggcaaaagcccgagaggcgcaggaaggcgtgatggagttcctgctcatcaaccatccgcttgattgtccgacctgcgaccaaggcggcgaatgccagttgcaggatttggcggtgggctacggcaaaaccaccagccgctataccgaagaaaaacgttctgtcgtcggcaaggacatgggtcctttggtttccgccgaggaaatgagccgttgtatccactgtacccgttgcgttcgtttcactgaagaaatcgccggtttgcaggaaattgcgatggcgaatcgcggcgaacactccgaaatcatgccctttatcagcaaagcagtggaaaccgaattgtcaggcaacgtcatcgatttatgtcccgtcggcgcattgaccagcaaaccgttccgcttcaacgcgcgtacttgggaattgaaccgccgcaaatccgtttccgcccatgatgctttgggcagcaacctgattgtacaaaccaaagaccataccgtccgccgcgtgttgccgttggaaaacgaagccatcaacgaatgctggctgtccgaccgcgaccgttttgcctacgaaggcctgtatcacgaaagccgtctgaaaaacccgaaaatcaaacagggcggcgagtggatggacgtggattggaaaaccgcgttggaatatgtccgcagcgcgattgaatgtatcgccaaagacggcaaccaaaaccaagtcggcgtttgggcgaacccgatgaatacggttgaagagctgtatctggcgaaaaaactcgccgacggcttgggtgttaaaaactttgccacccgtttgcgccaacaagacaaacgtctttcagacggccttaaaggtgcgcaatggttgggacaaagtatcgaatcgctggcggacaacgaagccgtattggtagtcggcgcgaacctgcgcaaagaacagccgctcctgaccgcccgcctgcgccgcgccgctaaagaccgcatggctttgagcgtattggcaagcagtaaagaagaattgtttatgccgcttctgtctcaagaagccgtacatcccgacgagtgggcaggtcgtctgaaaaacctgtctgccgatgcggaacacgccgttaccgccagcctgaaaaacgctgaaaaagcagcggtgattttgggcgcggaagtgcaaaaccatcctgattacgccgccatttatgccgccgcgcaagagctggcggacgcgaccggcgcagtgctgggtattttgccgcaagccgccaacagtgttggtgcggatgtcttgaatgtaaactccggcgagagcgttgccgaaatggcaaacgcgccgaaacaggcagtcttgctgctcaatgtcgagcctgaaatcgatactgttgacggtgcaaaagccatagccgcgttgaaacaggcgaaaagcgtgatggcgtttacgccgtttgtcagcgaaacgctgctggacgtgtgcgacgtgttgttgccgattgcaccgtttaccgaaacctcaggcagcttcatcaatatggaaggccgtctgcaatctttccacggcgtggtacaaggcttcggcgattcgcgtccgatgtggaaagtattgcgcgtattgggcaatctgtttgacctgaaaggttttgaatatcacgataccgctgcgattctgaaagacgcgctggatgcagaaagcctgccgtccaaactggacaaccgcaacgcatggacaggggagggcgttcagacgacctcagaccgcctcgtccgtgtcggcggcgtcggtatttatcacaccgattctatcgtgcgccgttccgcaccgttgcaagaaaccagccatgccgccgtgcctgctgcgcgtgtaaatccaaatacattggcacgcttgggcctgcaagacggacaaaccgctgtcgccaaacaaaacggcgcaagcgtatcggttgccgtcaaagccgatgccggactgcctgaaaacgtggtgcatctgccgctgcataccgaaaatgccgcgctgggtgcgttgatggacactattgaactggcgggagcttga

SEQ ID NO: 50483 - DNA, 366 bp, Neisseria meningitidis
ttgtacggcagccaccgtttgctatgcactcaaacagatggggataacgcgcaaaaaaagaccaccacttacaaagaacaagacccggccaaagtaacgcattatttgacacagccggccgaattttccgactaccaacgtgtttatttggatgaaacaggatttgaccgctacctgttccgtccctatacccgcagcctgaaagggcaaatagtaaaagcgcagataagtggaaaaagataccaacgcttatctttggtgtccgcacaagtcggcaaccggctgattgctccgatggtttatcaaaatacgatgatcggagtctttttgaagcgtggtttcagcaatgcctactgcccgcattga

SEQ ID NO: 50484 - DNA, 774 bp, Neisseria meningitidis
atgccggacaacgggcggcataaggcgggaaaaatggaaacgacactgttcaaacccgccctgtggcagataccgcatatcggatccggcggcgaaaccgcccttgcggaaaaaacggaaaccctcaaacaacgcctgcaccggattgtcggcagccaccgggatgcacggtttgccagcagccttgcggcagaagatatggtgattaccgaccttatcgccggcgaaaatctcaatatcggcatttttaccttggatacggggctgctccacacggaaaccctgaacctgctggacaggctcggacgcgcatatccccatttgcggataaagcgtttccggccggttcgagaagatgccgaccgttatgtggaaagcaaaggcaggtttgccttttacgacagcgttgaagcgcgccgcgaatgctgccgcatccgaaaaatcgaaccgctcaaccgcgccattgcaggcgcggacgcctggcttaccgggcaacgccgcgaacaatccgccacacgcacggaactgccgtttgccgaatacgatgccggacggggcatcggcaaatacaacccgattttcgactggtcggaacacgacgtgtgggcatacatcctcgccaacaatgtgccttacaacgatttgtaccggcaaggatttcccagcataggctgcgacccctgcacccgccccgtcaaggcgggcgaagacatccgcgccgggcggtggtggtgggaaggcagaaacagcaaagaatgcgggctgcacaaataa

SEQ ID NO: 50485 - DNA, 567 bp, Neisseria meningitidis
atgccgtctgaagcctgttggcgtttcagacggcatattctgattgaaaagatgatgacactgaaaaccgccccgctcaaacgccgctttgccgccatgctgtacgaaatgctgctggtcggtgcggcaacctgtttggcagcattgtttgccggtattgccgccatttttctgaatcccgtttctatcgcggtttctgcattggtaacgagtatcctgataatgggatcatggtggctttattttcgcgccaactggcacggtcaggggcagaccttggcgatgaggacatggaaaatcggcttgtgcgaccttaacggcatacagccgtctttgcacctgctgcgcctgcgctttatttgggcgtgcatattcatcgtcttcattcctatgttagcctatgccggattacgccacctgctcggtatttcacccaaggatgcattcggtgcggcattgatttggctgattttaccgtgggggtttgccctgctgaatcccgatcggcagtttctgtatgattttcttgcaggaacaagattggtggcggtcaaaggaaagccttaa

SEQ ID NO: 50486 - DNA, 1185 bp, Neisseria meningitidis
atgggtaaacatattcttttaggtgtaacgggcagtattgcggcgtataagtcttgcgagttggttcgtctgctgaaaaaacaggggcattcggttacggtggttatgagccgctcggcaactgaatttgtttctccgctgacttttcaggctttaagcggcaatcctgtcctgaccgacacgcacggcggcaacggttcaaacggtatggaacatatcaacctgacccggaatgcggatgtttttctgattgcgccggcaagtatgaataccgtggcaaaaatctgtaacggcgtggcagataacctactgaccagtctggcagccgcacggaaatgtccgctcgccatcgctcccgcgatgaatgtggaaatgtggctcaaccctgccaaccaacggaatatcgcacaactggtttcagacggcattactgtctatatgccgggcttgggcgaacaggcttgcggagaaaatggtatgggaaggatgccggaacctgccgaattgctggatttgcttccggacttgtggacaccgaaaattttaaggggcaagaaaatcttgattaccgcaggtgcgacatttgaagccattgaccctgtcaggtgcatcacaaatacctccagcggaaaaatgggggtagctttggcgcgggcgtgccgtgccgccggtgcggaagtcagcctgattcacggacagcttcaaaccgaactgcctttcggcatatccgatacggttcaagccgtcagcgctgaagatatgcatcgcgcagtgcatcgtttgattgaaaaacaagatgcttttatttctgttgccgccgtctcagactataaggttaaaaacaagagtacgcaaaaattcaaaaaagataaaaatgccaaaccgttatccatcgaattggatgagaaccccgatattttggcttctattgcctcattgccgaacccgccgttctgcatcggttttgccgctgaaacggagaatgtaatggcatatgcacgagaaaaacgtattaagaaaaaaataccggtgatagttgccaatgatgtttcaatcgcgatgggcaaaccgaccaaccggattaccattatcggggacgacggggaactatcttttcccgaaacaagtaaagatgaagcggcgatgcagattgttgaaaggcttgccggatatttgaacaaataa

SEQ ID NO: 50487 - DNA, 1647 bp, Neisseria meningitidis
atgaaacaatccgcccgaataaaaaatatggatcagacattaaaaaatacattgggcatttgcgcgcttttagccttttgttttggcgcggccatcgcatcaggttatcacttggaatatgaatacggctaccgttattctgccgtgggtgctttggcttcggttgtatttttattattattggcacgcggtttcccgcgcgtttcttcagttgttttactgatttacgtcggcacaaccgccctatatttgccggtcggctggctgtatggtgcgccgtcttatcagatagtcggttcgatattggaaagcaatcctgccgaggcgcgtgaatttgtcggcaatcttcccgggtcgctttattttgtgcaggcattatttttcatttttggcttgacagtttggagatattgtgtatcggggggggtatttgctgacgtaaaaaactataaacgccgcagcaaaatatggctgactatattattgactttgattttgtcctgcgcggtgatggataaaatcgccagcgataaagatttgcgagaacctgatgccggcctgttgttgaatattttcgacctgtattacgatttggcttccgcgccggcacaatatgccgccaagcgcgcccacattttggaagcagcaaaaaaagcgtcaacatggcatatccgtcatgttgcgcccaagtataaaaattatgttgtggttatcggtgaaagcgcgcgttcggattatatgaatgtttacggtttcccattgcccgatacgccttttttgagtcagaccaaagggctgttgataaacggttaccaatcgaccgcccacgcgacgaatctttcgctgccgcagactttggggctgccgggagaaccgaacaataacatcgtcagcttggcgaagcaggcgggttttcggacggcgtggctgtctaatcaaggaatgttggggcattttgccaacgaaatttccacctatgccctacgcagcgattatccgtggtttacccaaaggggtgattatggcaaaagcgcggggttgagcgaccgccttttgttgccggcgttcaaacgggttttgataggaaatgcaggcacgaagcctcggctgattgtgatgcacctgatgggttcgcacagtgatttttgcacacgtttggataaggatgcgcggcggtttcagtatcaaactgaaaaaatatcctgctatgtttccaccatcgcgcaaaccgataaatttttagaagatacagttaagatattgaatgaaaataaagaaagctggtctttggtttacttttccgaccacggtttgatgcatgtcggtaaaggcggcgagcgaacgttgacacatggtgcgtggaagcgtcaaagctacggcgtgccgctggttaaaatttcgtccgatgacacgcggcgcgaaatgattaaagtgaggcgcagcgcgtttaattttttacgcggattcggcagttggacgggtatcgaaaccgacgagttgcccgatgacggctatgatttttgggggaatgttcccgatgtgcagggcgaaggcaataaccttgcctttatcgacggactgcccgacgaccccgcgccgtggtatgcgggaaaaggcaaatcgactaaaaatacgtctaaaaaatga

SEQ ID NO: 50488 - DNA, 792 bp, Neisseria meningitidis
atggcaagacatccctaccgccgcctgcgtcctgcaaaatccggctttcccgaagtcggcatttccgaagaaggcaatatccgttcgcttcacttgggcagcgacaccgttcaaagctcgatgaacctcgaccacccgtccgagctggtgctctcttacagccgcgcgatgatgggctggctgctgtttaccgacgctcttccgcaacatatcacccaaatcggcttgggcggcggctcgtttgcacgctggatagacacctacctgcccgacacgcgccaaaccgccgtggacatcaatcctcaggtcatcgccattgcccgcaacctgtttgagttgcctttcgagggcgagaaatttgaaattattgaagcggatggtgcagagtacatcaaagtcttccgccacaacaccgatgtgattttggtggacgggttcgacggcgaacaaatcatcgatgcgctggttgaagaaccgtttttccgagactgccgaaacgcactctcttcagacggcatattcgtaaccaactggtggagcggcgacaaacgctaccaacgcttcatcgaacgcctgttaaacgtctttgaagggcgcgtattggaacttcctgccaaaagtcacggcaatgtcgcggtaatggctttccaaagcagccccaaagagcaaaacatagacaaactcaaaaaacgtgccgacaaactgagcaacgcttacggattggacttccaccgcatgctcgccgacctgaaagcatccaaccccaacaacggcaaacatttctacctttaa

SEQ ID NO: 50489 - DNA, 780 bp, Neisseria meningitidis
atgaaaaccatcacagaaaccctaaatctcgccccgaaaggcaaaaacttcctgaccgccgattggcccgcgcccgccaatgtgaaaaccctgattaccacgcgcaacggcggcgtgagccaaggtgcgtatcagagtttgaacctcggtacgcacgtcgacgacaatcccgaagccgtgcgccgcaaccgcgaaatcgtgcaacagcaggtcggattgcccgttgcctacctcaatcaaatccacagtaccgtcgtcgtcaatgctgccgaagcgttgggaggcacacccgatgcggacgcttccgtagacgacacgggcaaagttgcctgtgccgtgatgaccgcagactgcctgcccgttctattttgcgacagggcaggtacggcggttgccgccgcacacgcgggctggcgcggtttggcgggcggcgtattgcaaaacaccattgctgcgatgaaggttccgcctgtcgaaatgatggcgtatctcggccccgccatcagtgcggatgcgtttgaagtcggacaggatgtgtttgatgcgttctgcacgcccatgcccgaagccgccgccgcatttgaaggcataggcggcggcaaattccttgccgacctttacgcgctcgcccgcctgattctgaagcgtgaaggcgtgggcggcgtatatggcggcacgcattgtacggttttggaacgggacactttcttttcctaccgccgcgacggagcgacagggcgtatggcgagcctgatttggctggacggcaatgccgtctga

SEQ ID NO: 50490 - DNA, 813 bp, Neisseria meningitidis
ttgacggcagacgctacacgcttcatcatatggagctcccgtaacgacaacctgcaacggcaaatgccgtctgaaagaaaagacatgatcaaattcaaaaacgtacacaaacatttcaaagacctgcacgtcatcaacggcgtgaacttggaaatcaaaaaaggcgaagtggtcgtcgtctgcgggccttcgggcagcggcaaatccacactcatccgcaccgtcaaccagcttgaaagcatcgaaagcggcgagatttgggtggacggtgtcaacgttgccgacccaaaaaccgatttgaacaaaatccgcgaagaagtcggctttgtgtttcaaagtttcaacctctacccgcacctgaccgtgttggaaaacattaccctcgcaccgatgaaggttaaggggcaaaatgcggaacaggcggagaaaaaggcaatggagcttttggaacgcgtcggactggcacacaaaaaagacgccttcccttcccaactttccggcggccagcagcaacgcgtggcgattgcacgcggtttggcgatggaaccgcgcgtaatgttgtttgacgaaccgacctccgcactcgaccccgaaatggtcggcgaagtgttgaaagtgatgaaagacttggcagaaagcggcatgaccatgatgtgcgtaacccacgaaatggggtttgcccgcgaagttgccgaccgcgtgattttcgtcgataaagggcaaatcctcgaagacgaaacgccggaagcgttttttaccaacccgaaacacgaacgcgccaagcagttcctgcaacaggtcatgacccattga

SEQ ID NO: 50491 - DNA, 603 bp, Neisseria meningitidis
ttggtttataattttccttttaccgaccgattccgacatatgaccgatttagaaaccaaacgccttgaaacacaggcgatgcttgaaaacgccgatcttttgttcgaccaaggccaatgccgtgccgcactgcaaaaagtggcggacgagattacgcgcgatttgggcggcaaatatccgctgctgctgcccgtgatgggcggcgcggtggtgtttacggggcagttgctgccgctgttgcgttttcccttagattttgattatgttcacgtttcccgttacggcgacaagctggagggcggcgcgttcaactggaagcgtatgcccgatgcggaacaaatccggggcaggcacgtcgtcgtgctggacgatattttggacgaagggcatacgatgtccgccattcaagccaaacttttggaaatgggtgcggcaagctgccgtgcggcggtgttcgccaacaagctgattgacaaacccaagcctatccgagccgattatgtcggactggatgtgccgaaccgttatgttttcggttacggcatggatgcggcgggctgctggcgcaatctgggcgagatttacgcattggacggaaaataa

SEQ ID NO: 50492 - DNA, 1611 bp, Neisseria meningitidis
atgccgtctgaaatgccgtccattatttatcagacggcattttaccctccctctttatggcctcttgccgtgaagaacctatttaccgtgtccaacggacacctgctcgtgttcagttctcccgaacggcacttgacacagaaagacccaataatgaaacccaccatcgcgcttgtcggccgccccaacgtcggcaaatctactttattcaaccgtttgacgcgcaccaaagacgcgctcgtacacgacctgcccggtctgacgcgcgaccgccattacggacacggcaaagttggcagcaaaccttatttggtcatcgataccggaggtttcgagccggttgtggacagcggcattttgcacgaaatggcaaaacaaaccttgcaggctgtcgatgaggccgatgcggttgtgtttttggtggatggtcgcaccggtttgacaccgcaagacaagattattgccgaccgtttgcgccaaagtccgcgccctgtttatctggcggtaaacaaaggcgaaggcggcaacagggccgtgcttgctgccgagttctacgaacttgctttgggcgacccttatgttatttccggtgcgcacggcgacggcgtgtattacctgattgaagaaattttagaaaacttccccgagccggaagtcgaagaagccgatgcaaaacatcccgtttttgccgtcatcggtcgtccgaacgtcggcaaatccacgctggtaaacgccattctcggcgaagagcgcgtgattgccttcgatatggccggcacgacgcgcgacagtatccatatcgatttcgagcgcgaaggcaaaccgttcaccatcatcgataccgcaggtgtgcgccgtcgcggcaaagtcgatgaagcggtggaaaagttctccgttatcaaagcgatgcaggcggttgaagcggcaaacgtcgctgttttggtattggacgcgcagcaggacatcgccgaccaagatgcgacgattgcaggtttcgctttggaggcaggccgtgctttggtggtggcggtcaataaatgggacggcatcagcgaagaacgtcgcgagcaagtgaaacgcgatatcaaccgcaaactgtatttccttgattttgctaaattccactttatttccgcattgaaagaacgcggcatagacggattgttcgacagcattcaggctgcctacaacgcggcgatgattaagatgccaacaccgaaaatcacgcgcgtcctgcaaagcgcgatcgagcgtcagcaaccgccgcgtgccggcttggtgcgtccgaaaatgcgctatgcccaccaaggcggcatgaatccgccggtgattgtggtacacggcaattcgctgcacgcaatttccgacagctatacgcgctacctgacccaaacattccgcaaagccttcaatctgcaaggcacgccgctcagaattcaatacaatgtttcagaaaacccctatgaaaatgcggaagacaaaccgaagaaaaaaccgctgcgccgtgtcagcctgagcaaccgtattgagaaacgcgaagaccgcaaagaagagaaaaaccgcttcaagaagaaaaccaaagtcagtgtgaaaaaacaattcagcaaataa

SEQ ID NO: 50493 - DNA, 933 bp, Neisseria meningitidis; identical to SEQ ID NO: 36892

SEQ ID NO: 50494 - DNA, 1284 bp, Neisseria meningitidis
atgactgcatcgaaatcaggttttatcgggcaaatcttttcccgcaatatgcttgtctgtatttttacggggtttacctcggggctgccgctgtactttctgattaacctgattccggcgtggttacgcagcgagcaggtggatttaaaaagcatcgggctgatggcgttaatcggtctgccgtttacttggaaatttttgtggtcgccgctgatggacgcggtcaggctgcccgttttggggcggcggcgcgggtggatgctgctgacgcaggcagggttgctggcggctttggcggcatatgcctttttaaaccctcggaatcatctgccgctgattgccggcttgtcggtgcttgtcgcttttttttccgccagtcaggacattgtattggatgcgttcaggcgcgagattttgtcggacggagaattgggtttgggcaattccgttcacgtcaacgcctaccgggttgccgccctgattcccggttcattgagtttggtgttggcagacaggatgccgtggtcggaagtatttgttatcacttcattatttatgctgcccggccttctgatgacgctgtttctcgcgcgcgaacccgtgttgccgcctgccgttcctaaaacgttgaagcagaccgtggtagagccgtttaaagaattttttacgcgcaagggcatcgcttcggctgtatgcgtgctgctgtttatcttcctttacaaactcggcgacagtatggcaaccgcgttggcaacgccgttttatttggatatgggtttcagcaagacagacatcggtttgattgcgaaaaatgcaggactgtggccggcagtggcggcaggtatcttgggcggcgtgtggatgctgaaaatcggcgtaaacaaagccttatggctattcggctcggtgcaggctgtaaccgttttggggtttgtatggctggcagggttcggacatttcgatacagtcggtacaagcgagaggctgatgctggcggcagttatcggcgcagaggcagtcggcgtgggtttggggacggcggcgttcgtatcgtatatggcgcgcgagaccaatcccgcatttaccgcaacgcagctcgcactgtttaccagcctatccgctgttccccgtacggtcatcaattcctttgccggctatctgatcgaatggatgggctatgtgccgtttttccggctgtgtttcatacttgccctgccgggtatgctgctgctgctgaaagtcgcaccgtggaatgaagaaaaaatcacggttatcaataaatga

SEQ ID NO: 50495 - DNA, 804 bp, Neisseria meningitidis
atgaaaaaaattcttttaacggtttcattaggtttggcactgagtgcctgtgccaccaaaggtacggtagataaagatgcccaaattacccaagactggagtgtggaaaaactctatgccgaagcccaggacgaattgaacagcagcaattatacgcgggctgtcaagttatacgaaatcttggaatcgcgcttccccaccagccgccatgcccggcagtcgcaactggataccgcatacgcctattataaagacgatgaaaaagacaaagctctggcggcaatcgaacgcttccgccgccttcacccgcaacacccgaatatggattacgcgctgtatctgcgcggcttggtgctgttcaacgaagaccagtccttcttgaacaaactggcctcgcaagactggtccgaccgcgacccgaaagccaaccgcgaagcgtaccaggcgtttgcggaactcgtccaacgcttcccgaacagcaaatacgccgccgatgcaaccgcacgcatggtcaaactggtcgatgcactgggcggcaatgaaatatcggtggcgcgctactacatgaaacgcggtgcatacatcgccgccgccaaccgcgcccaaaaaatcatcggcagctaccagaatacgcgttatgtcgaagaatcgctcgccatattggaacttgcctaccaaaaactcggcaaaccacagcttgccgccgatacgcgccgcgtgttggaaaccaacttcccgaaaagcccgtttttgacgcacgcttggcagcccgacgatatgccctggtggcgttactggcattaa

SEQ ID NO: 50496 - DNA, 192 bp, Neisseria meningitidis; identical to SEQ ID NO: 43532

SEQ ID NO: 50497 - DNA, 951 bp, Neisseria meningitidis
atgaaattacaacaattgaaatacgccttagaagtttaccggcacaacctgaacgtttccgaagcggccgaagccttgtttacttcgcaacccggcatctccaaacaaatcaaattgctggaagaagaaatcggcattcagatttttatccgcagcggcaagcgcgtggtttcggtctcgcagccgggcaaggtggttttggatattgcagaacgtattttgcgcgatgttcagaacattaaaaatatcggcagcgagtttaccggacaggacagcggttcgctgacggttgccacgacgcatactcaggcacgctatgccctacccttgattgttgccgattttgtgaaacgctatccgaaagtcaacctgaccatcaaacaggggagccctgccgccatcgcccaaatggttacttcgggagagtctgatttggcaattgttacggaacgtatagacgaccaccccgaactgggaagactttcctgctacgactggacacacgcggttatcgtaccgaacgaccaccccttgctcgaatgcagaaaccccctccgtattgaagatttggcgaggtttccgctgattacttatgaatttgcattcaatgcgggcagcagcatcgcgcgggcattttccaaagcccgtttggaacagccggatgtcgcattggcggcggcggatacggacgtattgaagacttatgtgcgcttgggtttgggcgtgggactgatggcgaaaatggcgtacaacccggatacggacggcgatttgcagcttgtggatgcggcacacctgttcgagccgtcgccgacgtggattgctttgcgcagcgatacttatttgcgcggatatgcctacgactttatccaagcgtttgcgccgcacctgacacgcgagaaggtggataggattctgtacacgcccatcagcgaggatttttcgatttag

SEQ ID NO: 50498 - DNA, 303 bp, Neisseria meningitidis; identical to SEQ ID NO: 37654

SEQ ID NO: 50499 - DNA, 1065 bp, Neisseria meningitidis
atgttggtattgggaatcgaatcttcttgcgacgaaacaggcgttgcgctgtatgacaccgaacgaggattgcgggcgcactgcctgcacacgcagatggcaatgcacgccgaatacggcggggttgtgccggagctggcaagccgcgaccatatccgccgccttgttccgttgacggaaggctgtttggcgcaggcgggcgcatcgtatggcgacattgacgcggttgcctttacgcaggggcccggtttgggcggtgcgctgctggcgggttcgagctacgccaacgcgctggctttagcgttggacaagcctgttattcccgtccatcatttggaaggacatctgctgtcgccgctgttggcggaggaaaaacccgactttccttttgtcgcgctgttggtttcgggcgggcatacgcagattatggcggtcaggggcataggcgactacgcgcttttgggcgagagcgtcgatgatgcggcgggcgaggcattcgacaaaacggcgaaactgctgggcttgccgtatccgggcggtgcgaaactgtcggaacttgcggaatcgggcaggttcgaagcgtttgtttttccgcgcccgatgattcattccgacgatttgcagatgagtttttcaggtttgaaaaccgccgtattgaccgccgtcgagaaagtgcgcgcggaaaacggggcggatgacattcctgagcagacacgcaacgacatctgccgtgcgtttcaagatgcggtagtcgatgtgttggcggcgaaagtgaaaaaagccctgttgcagacagggttcagaaccgtagtggtcgccggcggggtcggtgcaaaccgcaagctccgtgaaactttcggcaacatgacggtgcaaatcccgacccccaaaggcaagccgaaacatccgtccgaaaaagtcagcgtgtttttcccgccgacggcatactgcacggacaacggtgccatgattgcctttgccggtgcgatgcacctgggcaagggcagggaggtcggtgcgttcaatgtccgtccgcgctggccgctgtcggaaatcgtcaaatga

SEQ ID NO: 50500 - DNA, 435 bp, Neisseria meningitidis; identical to SEQ ID NO: 36184

SEQ ID NO: 50501 - DNA, 501 bp, Neisseria meningitidis
atgagaaaaagtcgtctaagccagtataaacaaaataaactcattgaactgtttgtcacaggtgtaactgcaagaacggcagcagagttagtaggcgttaataaaaataccgcagcctattattttcatcgtttacgattacttatttatcaaaacagtccgcatttggaaatgtttgatggcgaagtagaagcagatgaaagttattttggcggacaacgcaaaggcaaacgcggtcgcggtgctgccggtaaagtcgccgtattcggtcttttgaagcgaaatggtaaggtttatacggttacagtaccgaatactcaaaccgctactttatttcctattatccgtgaacaagtgaaacctgacagcattttttatacggattgttatcgtagctatgatgtattagatgtgcgcgaatttagccattttagcttcgctgaaacttcgttttcgtatcaatcacagcacacattttgccgaacgacaaaaccatattaa

SEQ ID NO: 50502 - DNA, 1662 bp, Neisseria meningitidis
atgctgacctatactccgcccgatgcccgcccgcccgccaaaacccacgaaaaaccgtggctgctgctgttgatggcgtttgcctggttgtggccgggtgtattttcacatgatttgtggaatcctgccgaacctgccgtctataccgccgtcgaagcactggcaggcagccccacccccttggttgcccatctgttcggtcaaaccgatttcggcataccgcccgtgtatctttgggttgccgccgcgttcaaacatttgctgtcgccgtgggctgccgactcatacgatgccgcacgctttgcaggcgtgtttttcgccgttgtcggactgacttcctgcggctttgccggtttcaactttttgggcagacaccacgggcgcagcgttgttttaatccttatcggctgtatcgggctgattccgaccgtacactttctcaatcccgctgccgccgcctttgccgccgccggactggtgctgcacggttattctttggctcgccggcgcgtgattgccgcctcttttctgctcggtacgggctggacgctgatgtcgttggcagcagcttatccggcagcatttgccctgatgctgcccttgcccgtactgatgtttttccgtccgtggcaaagcaggcgtttgatgttgacggcagtcgcctcacttgcctttgccctgccgcttatgaccgtttacccgctgctcttggcaaaaacgcagcccgcgctgttcgcgcaatggctcgacgatcacgttttcggtacgttcggcggcgtgcggcacgttcagacggcattcagtttgttttactatctgaaaaacctgctttggtttgcactgcccgcgctgccgctggcggtttggacggtttgccgcacgcgcctgttttcgaccgactgggggattttgggcattgtgtggatgcttgccgttttggtgctgcttgccgtcaatccgcagcgttttcaggataacctcgtctggctgcttccgccgcttgccctgttcggcgcggcgcaactggacagcctgaggcgcggcgcggcggcgtttgtcaactggttcggcattatggcgttcggactgtttgccgtgttcctgtggacgggctttttcgccatgaattacggctggcccgccaagcttgccgaacgcgccgcctacttcagcccgtattacgttcccgacatcgatcccattccgatggcggttgccgtactgttcacacccttgtggctgtgggcgattacccgcaaaaacatacgcggcaggcaggcggttaccaactgggcggcaggcgttaccctgacctgggctttgctgatgacgctgttcctgccgtggctggacgcggcgaaaagccacgcgccggtcgtccggagtatggaggcatcgctttccccggaattaaaacgggagctttcagacggcatcgagtgtatcgacataggcggcggcgacctgcacacgcggattgtttggacgcagtacggcacattgccgcaccgcgtcggcgatgtacaatgccgctaccgtatcgtccgcttgccccaaaatgcggatgcgtcgcaaggctggcagacggtttggcagggtgcgcgcccgcgcaacaaagacagtaagttcgcactgatacggaaaatcggggaaaatatataa

SEQ ID NO: 50503 - DNA, 693 bp, Neisseria meningitidis
atgaacgaaatcctcaggcagcccagcgttctgcttttcctcacgcttgccgtgtacgcgcttgcgattatcgtgcgcacgcgcacgggcaatatcttctgcaaccccgtactcgtcagcactatcgtgctgattgcctacctgaaaatcctcgacatcgattatgcggtgtaccacaacgccgcgcaattcattgatttttggctgaaacccgccgtcgtcgtgcttgccgtgccgctctaccaaaaccgccgtaaaatcttcaaccagtggctgcccgtcatcgtttcacagcttgcgggcagcgttacgggcattgttacggggatgtattttgccaaatggctgggcgcggaacgcgaagtcgtcctctcgctcgcgtccaaatctgttaccaaccccatcgccattgaaatcacccgctccatcggcggcattcccgccattaccgccgccaccgtcatcattgccggtctggtcggacagattgccggttacaaaatgctgaagaacacagtcgtcatgccctcgtccgtgggtatgtcgctcggcacggcttcgcacgcgatggggattgccgcctcgctcgaacgcagccgccgcatggcggcatacgcgggactggggctgacgttcaacggcgtactgaccgcgctgattgcgccgctgctcatccccgttttgggattttga

SEQ ID NO: 50504 - DNA, 465 bp, Neisseria meningitidis
atgtttaccatcgttttataccagccggaaatcccgccgaacacgggcaacatcatccgcctgtgcgccaataccggcgcggatttgcaccttgtcaaaccgctcggcttcccattggattccgccaaaatgaaacgcgccgggctcgactaccacgagttcgccagcctgacggtgcacgaaaacttcgacgactgcctcaaggcactcgcaggcaggcgcattttcgccctgaccaccaaaggcacggcgcgccccgatgaaaccgcgtttcaaaaaggcgacgttttactgttcgggccggaaacgcgcggactgcctgccgacatcctcgacagcctgcccgccgcgcaaaaaatccgcctgcccatgcagcccggcagtcggagtatgaacctttccaataccgttgccgtgattctctttgaagcgtggcggcaacacggttacgcaggcggcgtttga

SEQ ID NO: 50505 - DNA, 780 bp, Neisseria meningitidis; identical to SEQ ID NO: 43687

SEQ ID NO: 50506 - DNA, 660 bp, Neisseria meningitidis; identical to SEQ ID NO: 43147

SEQ ID NO: 50507 - DNA, 384 bp, Neisseria meningitidis; identical to SEQ ID NO: 38550

SEQ ID NO: 50508 - DNA, 1221 bp, Neisseria meningitidis; identical to SEQ ID NO: 44162

SEQ ID NO: 50509 - DNA, 1254 bp, Neisseria meningitidis
atgcagacttacctcgtcggcggcgccgtccgcgattatcttttgggcttgcccgtcaaagaccgcgattgggtggtcgtcggcgcagacgcacaaaccatgctggcgcaaggcttccagccggtcggcaaagattttcccgtgtttctccatcccgaaacgcacgaagaatacaccctcgcccgcaccgagcgcaaaaccgccaaaggttacgtcggtttcagtttccacgccgacaaagacgttacgctggagcaggacttgatgcgccgcgacctgaccatcaacgcgatggcgcaagatgcggacggcaagattatcgaccctttcggcggacaacgggatttggcggcaggcattttgcgccacgtttccccggccttcgccgaagaccccgtccgcatcctgcgtactgcccgctttgccgcgcgttacaggtttgaaatcgccgaagaaaccataaagctgatgcggcagatggtggaaaacggcgaagcggacgcattggttgccgaacgcgtctggcaggagtttgcgaaaggtttgatggaaaaaaatccgcgcaaaatgattgaagtgttgcgcgaatgcggcgcgctcaaagtcttgctgcccgaagtcaatgccctcttcggcgtgccgcaacgcgccgactaccatcccgaaatcgacagcggcatccataccctgatgacgctgcaacgcgccgctgatatgggtttgagcctgcccgaacgctatgccgccctgctgcacgacttgggcaaagccaaaacaccgtccgacatcctgccgcgccaccacggacacgacctcgccggtgtcgaacccgtgcgcgaagtcaatcagcggctgcgtgcgccgaaacattgcgccgagcttgccgaattggtttgccgttggcacattattttccaccaagtcggacagcttaaaagccaaaccattctgaacgtattgaaaaaaaccgatgccttccgccgtcccgaacgctttcagacggcattgaacgtctgcattgccgacacgcaaggccgtctgaaccgcgaacacacgccctacccgcaacgcgcacactggttcgccctgctcgaagccgccaatcaggcggattcgggcaaaatcgccgccgaatgccgcgcgcagggaaaagcgcaccttatcgccgaacaaatcgaccgggcgcggctggcacaaatcgccccattgcaaaaagcgtttcgagcggcgcaagacaaaacagaaaaacattaa

SEQ ID NO: 50510 - DNA, 690 bp, Neisseria meningitidis
atgaaacgcaaaaatatcgccctgattcccgccgccggcatcggggcgcgtttcggtgcggacaaacccaagcagtatgtcgaaatcggaagcaaaaccgttttagaacatacgcttgggatttttgaacggcatgaggccgtcgatttgaccgtcgttgtcgtctcgcccgaagacacgtttgccgataaggttcagacggcatttccacaggttcgggtgtggaaaaacggcggacagacccgcgccgaaaccgtccgcaacggtgtggcaaaactgttggaaaccggtttggcggcggaaaccgacaatattctggtacacgatgccgcgcgttgctgcctgccgtctgaagctttgacgcggttgatagaacaggcgggcaacgctgccgaaggtgggattttggcaattcccgttgccgatacgctcaagtgcgcggacggtgggaacattagtgcaaccgtcgagcggacgagcctttggcaggcacaaacgccgcagcttttccgcgccgggctgctgcaccgcgcattggctgcggaaaacttggacggcattaccgatgaagcgtccgccgtggaaaaattgggtgtgcgtccgctactgatacagggcgacgtgcgcaatttgaaactgacgcagccgcaggacgcatacatcgtcaggctgctgctcgatgccgtctga

SEQ ID NO: 50511 - DNA, 321 bp, Neisseria meningitidis
atgaatttccaagactatctcgccacatttccttcaatcgaccatctgggcggtttggacgttcaggatgccgacggcaaaacggttcaccacattcccgccgttcagggtaagctcggttcgctcaagctgtacaatgctttggcagaacgttttgacggaaaattggacaaagaagcggcagaacagggtttgatatggtttgccgaacacgttgccgacgcgcgcgcccatcccggcaagcatcccaatatcgacctgcttgaaaatgtcgtgcaaagcggcgaaaccttgctgctcaagccgcttgccgcgcaataa

SEQ ID NO: 50512 - DNA, 696 bp, Neisseria meningitidis
atgatgaaggatttgaatttgagcaacagtctgttcaaaggctacaacgacaaacatggtttaatgatttgtgggtatgaatggggttggagtaaagccgatgaggctgcttatgtagcaggtgaatacaaactccctgaaaacaaaatcgaccatacatttgcaaacaaatccctctatttcggagagcaggcaaagaagtggcgttacgacaatacgataaaaaattggtttgaaatgtggggacaccccttagacgaaaatggattgggcggtgcatttgaaaaatccctggttcaaaccaactgggctgctacacagggcaacactatcgacaatcccgacaagttcacacaacccgagcacatcgataattttctctaccacatcgaaaaactgcgtccgaaagtcatcctcttcatgggcagcaggttggcggattttctgaacaaccaaaatgtactgccacgcttcgagcagttggtcggtaagcagaccaaaccgctggagacggtgcaaaaagaatttgacggtacacgtttcaatgtcaaattccaatcgtttgaagattgcgaagtcgtctgctttccccatcccagtgccagtcgcggtctatcttacgattacatcgccttgtttgcgcctgaaatgaaccggattttatcggactttaaaacaacacgcggattcaaataa

SEQ ID NO: 50513 - DNA, 1335 bp, Neisseria meningitidis
atggcaaaaaaatatttcggcacggacggcgtgcgcggcgaagtcgggcagtttccgattacgcccgattttgtattgaaactcggctatgcggcgggtcaggttttggttcagcacgacactgaccagaaaccgaccgttttaatcggcaaggatacgcgtatttccggttatatgctggaagccgctttggtggccggttttacggcggcgggtgtgaatgtggtacagaccggaccgctgcccacgcccggcgtggcttatctgacccgtgcgctgcgtttgtccgccggtgtgatgatttccgcgtcgcacaatgcttattttgacaacggcatcaaattctttgccgagggcggcgtgaagctttccgatgaaatcgagttggaaatcgaagccaaaatcgacgaagaaatgaaaacccagccttctgcacgcctcgggcgcgcacgccgcatcagtggtgcggacgaccgctatatcgaattttgcaaatccacctttcccagccattccgaccttcggggtttgaacttggttatcgataccgccaacggcgcggggtacggtgtcgcccccaaggtgtttcacgaactgggtgcacaggtcgtcagcatcggcgacgaacccaacggctacaacatcaacgaaaaatgcggtgcgacttataccaagacactccaggctgccgttttacagcatgaagccgactacggcatcgccttagacggcgacggcgaccgcctgatgatggtcgataaaaacggtaaggtttacgacggcgacagcctgatttacgtcattgctaaagcccgcgcccgagaaggtatcaacatcggcggcgtggtcggcacggtcatgaccaatatggcgatggaaatcgccctgaaagagcagggcgtggatttctgccgcgccaaagtcggcgaccgctatgtgttggaacagctgaaccaacgcggctggctcatcggcggcgaagccagcggccatattttgtgcatggacaaacacaacaccggcgacggcattatttccgcgctgcaagttttggcggcactgcaaacgctgaaccaagacctcgccaccgtttgcgccgactggcagccgtatccgcaaacgatgattaatgtccgtatcggcaaagggcaaaactggcaggaagcctcaaaaggcgtgttggcggaagtggaaaaagaactcgaaggcaaagggcgtgtcgtgttgcgcgcttcgggaaccgaacccgtcgtgcgtgtgatggtggaggcgcggcaggcggattgggcgcgcgacggtgcggaacgtattgcttccgccatcggcagcctttag

SEQ ID NO: 50514 - DNA, 1149 bp, Neisseria meningitidis
atgcccctccccctcccctctcccgaagcacggcaattctcgctcaaactgcaaaccctcattgccgaagaaatcggcaaacacggcaactggattccattttcacgttttatggaattggttttatacgctccgcaatacggctactacaccggcggcagccataaaatcggcaataccggggattttattaccgcaccgaccctcacctctctgtttgcacagacactggcacgccaacttcaagaacttctatcccaaacggcgggcaatatctatgaattcggcgcgggaaccggacagcttgccgccgatttgttgggcagcatttcggacggcatcagccgttactatattattgaaatatcgccggagctggcagcacgtcagaaaaacctgattcaagcacgcgcaccggaagcatctcaaaaagttgtccacttgaccgcacttcccgaagcgtttgacggcatcatcatcggcaacgaagtactcgatgccatgcctgtcgaaatcgtccgtaaaaatgaaggcggctcattcgagcatgtcggcgtttgcctagataatgaccgttttacctattcggcacgaccgctgcacgacttacagctatctgccttggcttccctctattttcctcaaacagattatccctacaccagcgaactacatccgcaacaatatgcctttatccgcacccttgcctcaaggcttgaacgcgggggtatgatattcatcgactacggttttgatgcagcgcagtattaccaccctcaacgcaatcaaggtactctgatcggacactaccgacatcacgttatccacaatccttttgacttcatcgggttggccgacctgaccgcgcatgtcaactttaccgacattgcccaagccggtacggatgcaggactggatttgacaggctatctgccccagtcccattttctgctgaatctgggcataaccgaactgttggcacaagtgggaaaaacagactcgcccgcctacatccgtgaagctgctgccgttcagaaactgattgaccagcatgaaatgggagaattgtttaaagtcatcgcattcggtaaaaatatcggcatcgactgggcaggattccgcttcggcgacatctgccacaaactctaa

SEQ ID NO: 50515 - DNA, 396 bp, Neisseria meningitidis; identical to SEQ ID NO: 37459

SEQ ID NO: 50516 - DNA, 1050 bp, Neisseria meningitidis; identical to SEQ ID NO: 46953

SEQ ID NO: 50517 - DNA, 621 bp, Neisseria meningitidis; identical to SEQ ID NO: 42837

SEQ ID NO: 50518 - DNA, 1422 bp, Neisseria meningitidis
atgttcagacggcatttttgttttcagatgcagggaaaaccgatggcaaaaacgcttaaaaccctttaccaatgcaccgaatgcggcggcacttcgccgaaatggcaaggcaaatgcccgcattgcggcgagtggaacacgcttcaagaaagcttagccgcgcccgagccgaaaaacgcccgcttccaatcttgggcggcggatacctcgaccgtccaatccctctccgccgttaccgctgccgaagtgccgcgcaacccgaccggcatgagcgaactcgaccgcgtattgggcggcggtttggtcgatggcgcggtcatcctactcggcggcgatcccggcatcggcaaatccacgctgttgttgcaaaccatcgccaaaatggcgcaaagccgcaaagtgctgtacgtttccggcgaggaatccgcccaacaggtcgccctgcgtgcgcaacgtttggaactgcccacagaaggtgtgaacctgcttgccgaaatccgtatggaggcgattcagacggcgttgaaacagcatcagcccgaagttgtcgtcatcgactctatccaaaccatgtattccgaccaaatcacgtccgcccctggctccgtgtcgcaggtgcgcgagtgtgccgcccaactgacgcgcatggcgaaacagatgggcatcgccatgatactggtcggacacgtgaccaaagacggcgcgattgccggcccgcgcgtgctggagcatatggttgataccgtgctgtatttcgagggcgaccaacattccaactaccgcatgatacgcgccatcaaaaaccgcttcggcgcggcaaacgaactgggcgtgttcgcgatgacggaaaacggtttgaaaggtgtgtccaacccgtccgccatcttccttgccagctaccgcgacgacacgcccggttcgtgcgttttggttacgcaggaaggcagccgaccgcttttggttgaaattcaggcattggtcgatgacgcgcacggattcacccccaaacgactcaccgtcggtctcgaacaaaaccgcctcgccatgttgctcgccgtgttaaaccgccacggcggcatcgcctgcttcgatcaggatgtgtttttaaacgccgtcggcggtgtgaaaatcggcgaaccggcggcggatttggcggtcatcctcgcgatgctttccagcttccgcaaccgcccgctgcccgaaaaaatggttgcatttggagaaatcggtttgagcggtgaagtccgccccgtcgcacgcgggcaagagcggctcaaagaagcggaaaaactcggcttcaaacgcgccatcgttcccaaagccaatatgccgcgcaacgccaaagagtttccgaacctgaaaatctacggcgtttcgagtttgcaggaagccatcgatatttgccgtgacagcagggaataa

SEQ ID NO: 50519 - DNA, 1011 bp, Neisseria meningitidis; identical to SEQ ID NO: 38365

SEQ ID NO: 50520 - DNA, 558 bp, Neisseria meningitidis
atggatgctttaaaattattgacgaaccgccgatcttccaaaaagctgaagccccccgcccccgatgcggcggagttggaacaaatatttcaggcggcaacccaagttcccgatcacggcaatatgcgccccttccgttttaccgtgattcaaggcgaggtaggattgcaacgttttcgcgatgtgttgaagcaaacggttgccgaattgaatttcggcgacgatgcgatgaaaaaggcggaaaaagtgggcaatatgtcgccgatggttatcggggtaacgtttgcgccgaaccgcgatgtgcctaagccgaaaccggaatgggagcagatgctgacggcgggttgtgcggcgtatgcgctgcaactggcggcaacggcgcaaggtttcgacaatgtctggattacggggatgtgggtcaacagccccctgttgcgtgaggctttcggatgtgcggataaggataaaatcatcgggctgatgatggtcggcacgccgacagaggaagtgcataagcccaagaataccgatttggaagcgtttgtcagtcattggtaa

SEQ ID NO: 50521 - DNA, 1773 bp, Neisseria meningitidis
atgatactgccagcccgtttttcagacggcatcagcctttccctacgcctgaaactcctgaccggagtgtgggtcgggttggcggcattgtctgtcgttttgacactgctgctctctttgcgtctggaaaacgcggcctccgtcatcgaagaggcgggcaacttgagaatgcaggcataccgtctggcatacatggcgggtgaaggatctccccgctcccaaatagacaatcaggttgacgaatttgaaaaaagcctgaatcgtatttcacaaagtgatgccatccatccgctgattccttcggacacccctcttgcttatgatttgatacaatccatgctgattatagattggcaggcacacatcctccccccgctccagtcctaccggcgaccgactcaggtcgatctctaccgctttgccggaaacatcgaactgtttttgcaggcattggaaaatgccaacgaaaaaaacacatggtggctcaggcgttttcaatgggcaattatgttgatgacgctggtgtcgtctgtactgatgctgttttggcaccagatttgggttatccggccgctgcaggcgttaagggaaggtgcggaacgcatcggacggaggtgtttcgatattccggttcccgaaggcggtacgccggaattcaaacaggtcgggcgttgtttcaatcaaatgggcggcaggttgaaaattttatatgatgatttggaaggacaagtcgccgagcagacacgcagtctcgaaaaacaaaatcaaaacctgaccctgctgtaccaaactacacgggacctgcaccaatcctacataccgcaacaggctgcagaacattttctaaaccgtatcctgcccgccgtaggagcagattccggcagagtttgtttggacggcggatccgatgtttatgtttccattcatcatgcggattgcggcacagcagcttcggatttggggaagtaccatgaggaaatcttccccattgagtaccagaacgaaacattgggcaggctgttgctcagctttccaaacggcatttctcttgatgaagacgaccgcatcctgcttcaaacactaggcaggcaattgggcgtatcgcttgccggcgcaaaacaggaggaagaaaaacgcctgcttgcagtattgcaggaacgcaacctgattgcgcaaggattacatgacagcatcgcacaagcattaacgttcctaaacctacaggtacagatgctggaaaccgcctttgccgaaaacaaacgggaggaagccgcagaaaacatcggcttcatcaaaacaggcgtgcaggaatgttatgaagatgtccgcgaactgctgctcaacttccgtaccaaaatcagcaataaagaatttcccgaagccgttgccgacctattcgcccgctttacgcaacaaaccgggataacggtcgaaaccgcctgggaaaacggttcgttcctgccgcctcaggaagcgcagctccaaatgatttttatcctgcaggaaagcctgtccaacatccgcaaacacgcccgcgccacccatgtaaaattcaccctttccgaacacggcggacgctttaccatgaccatccaagacaacggacaaggtttcgacacggagaaaataggagaacctacgggcagccatgtcggactgcacatcatgcaggagcgtgccaagcgcatccatgccgttttagaaatccgttcccaaccccaacagggaaccaccgtctcattgacgggtgcatctgaagaaagcttgaaatga

SEQ ID NO: 50522 - DNA, 1272 bp, Neisseria meningitidis; identical to SEQ ID NO: 43272

SEQ ID NO: 50523 - DNA, 633 bp, Neisseria meningitidis
atgaccctacgttacgaaatcctctccgttacccccttccgccaaaactgcaccctgatttgggacgacgaaagcggcgaagccgtcctgaccgatgtcggcggcgacgtgccgttcctgctgcaagcgttggcaaaccgcaaacttacgctcacggcaatctggctgacgcacggccatctcgatcacgcgggcggcgtggtcgaaatgttgaaaacgcataaagtccctgtcctcgggccgcatccggacgatgaattcctgctccaatcgctgccgcaaaccaccgcgcaatacggattccccgtctcgcccgcctttgcgccgaaccattggctcgaagaaggcgaaacgctcaaagtcggacgctacgccttccaagtgctgcatattccggggcacacgccgggacacgtggttttctattgtgccgaagcggagctgctgattgcgggcgacgtgctgttttacgaaaccataggcagaaccgattttccgcgcggcaaccacgccgacttaatcaataatatccgcaacaaattattcgccctccccgaaaccgtgcaagttgtcgccggacacgggcgtatgacttccatcggacacgaaaaacggcacaatccgtttttctaa

SEQ ID NO: 50524 - DNA, 435 bp, Neisseria meningitidis
gtggcaaagaaaattatcggctatattaaactgcaaattcctgcaggtaaagccaatccatctcctccggttggtcctgctttgggtcagcgcggtttgaatattatggaattttgtaaggcatttaatgctgcaacccaaggtatggagcctggcttaccgattccggttgtgattactgcatttgcagataaatcattcacatttgtgatgaaaaccccgccagcttctatcttgttgaaaaagactgccggtttgcaaaaaggtagttctaatcctctgaccaacaaagtgggtaaattgacccgtgcccagttggaagaaattgctaaaactaaagagcctgatttgactgctgctgacttggatgcggctgtccgtactatagcaggttctgctcgctcaatgggcttggatgtggagggtgttgtataa

SEQ ID NO: 50525 - DNA, 1458 bp, Neisseria meningitidis; identical to SEQ ID NO: 42683

SEQ ID NO: 50526 - DNA, 951 bp, Neisseria meningitidis; identical to SEQ ID NO: 43319

SEQ ID NO: 50527 - DNA, 690 bp, Neisseria meningitidis; identical to SEQ ID NO: 42281

SEQ ID NO: 50528 - DNA, 345 bp, Neisseria meningitidis; identical to SEQ ID NO: 39778

SEQ ID NO: 50529 - DNA, 591 bp, Neisseria meningitidis; identical to SEQ ID NO: 38699

SEQ ID NO: 50530 - DNA, 2430 bp, Neisseria meningitidis
atgcggttctcaaggtttgagcccaaaggtcgtctgaaacaacaaatacggtttcagacgacctttctttcaacaagccaccacggcaatcagacaaaagcagcacatcgccacatccatgtcggcagtacggccggcacaaccaccatccgcagcggcggggataccaccctcaaaggtgcgcagctcatcggcaaaggcatacaggcagatacgcgcaacctgcatatagaaagtgtacaagatactgaaacctctcagagcaaacagcaaaacggcaatgtccaagttactgtcggttacggattcagtgcaagcggcagttacagccaaagcaaagtcaaagcagaccatgcctccgtaaccgagcaaagcggtatttatgccggagaagacggctatcaaatcaaggtcggaaaccatacagacctcaagggcggtatcatcacctccggcaagagtgccgaagacaaaggaaaaaacctttttcagacggccacccttactgccagcgacattcaaaaccacagccgctacgaaggcaaaagcttcggcataggcggcagtttcgacctgaacggcggctgggacggcacggttaccgacaaacaaggcaggcctaccgacaggataagcctggcagccggctacggcagcgacagcgacagtcaaagcagcatcacaaaaagcggcatcaacacccgcaacatacacatcaccgacgaagcgggacaacttgcccgaacaggcaggactgcaaaagaaaccgaagcgcgtatctacaccggcatcgacaccgaaactgcggatcaacacacaggccgtctgaaaaacagcttcgacaaagacgcggtcgccaaagagatcaacctgcaaagggaagtaacgaaggagttcggcagaaacgccgcccaagccgtagcggccgttgccgacaaactcggtaatacccaaagttacgaacggtatcaggaagcccgaaccctgctggaggccgaactgcaaaacacggacagcaaagccgaaaaagccgccatccgcgcatccctcggccaagtaaacgcctatcttgccgaaaaccaaagccgctacgacacctggaaagaaggcggcataggcaggagcatactgcacggggcggcaggcggactgacgaccggaagcctcggcggcatactggccggcagcggcacttcccttgctgcaccgtatttggacaaagcggcggaaaacctcggtccggcaggcaaagcggcggtcaacgcactgggcggggcggcaatcggctatgcggcgggcgggaatgtcggtacggcggcagtaggggcgaatgtcgattggaacaataggcagctgcatccgaaagaaacacaaatccttaacaaactgtcaaaaggcaaatcggctgaagaacagtaccgcctaaaagccgctgcatgtgcattaacccggtgcgcggaaggcgtacctgacttcgaccctctttataaaggactaaaaaacctccaagatgccggtaaacagtttgtagcggaacaaaacgtattgatgcggacggatgcatttaaatatggaacatggaacagcctgaatgatatacgcagcagttacgaccgtgctgccaccaaaattaagggtgcgggcaatatgggattgggtgcaacgacttttgtcggttcgggtgctataggcggaggtctgtgcagtaccgggattggctgtgcggccggtggacttattgcaacggcaggtatgaccggtggttatacacaggcctcagaaggaagccggcaattgtttggcacttaccagtccgattttggtaaaaaagttgtcctatctttgggtacaccaatagaatacgaatcgccgttagtatctgatgcgaaaaatctagccgtatggggattggaaacgctgattacgcgcaaattgggaaacttggcaacgggtgtgaaaacttccttgactccgaaaactgctgacgtacagcgaaatatcctgtcccaatccgaagtcggtatcaagtggggcaaggggattgaaggacagggaatgccttgggaggattatgtcggtaagggcttgtctgccaatgcaaggttacctaaaaattttaaaacatttgattattttgatcgtggtacaggcacggcaatcagtgccaaaactctggatacgcaaactacggcacgcctgtccaaacccgaacagctttacagtaccatgaaagggtacatcgataagacggcaaatttcaaaagttatgaattatcagaagtaccgttaagggcagacatgatcaaacagcgcgaaatccatctggccatacccgcacaaactaataaggagcaaagattgcagttgcaacgtgtggtagagtatggcaaaagtcaaaacattacagtcaaaattacggagatcgaataa

SEQ ID NO: 50531 - DNA, 1035 bp, Neisseria meningitidis; identical to SEQ ID NO: 42242

SEQ ID NO: 50532 - DNA, 669 bp, Neisseria meningitidis; identical to SEQ ID NO: 43457

SEQ ID NO: 50533 - DNA, 339 bp, Neisseria meningitidis
atgaacacacgcatcatcgtttcggctgcgttcgttgcgttggcattagcaggttgcggctcaatcaataatgtaaccgtttccgaccagaaacttcaggaacgtgccgcgtttgccttgggcgtcagcccaaatgccgtaaaaatcagcaaccgcagcaatgaaagcatacgcatcaactttaccgcaactgtgggtaagcgcgtgagccaatgctatgttaccagtgtaatcagcacaatcggcgttaccacttccgatgcaatttgtttgggaggcggaacgcacaaaggcaaaagtcaatgcaatgctttgcttaaagcggcaggccgttgctaa

SEQ ID NO: 50534 - DNA, 1140 bp, Neisseria meningitidis
atgagtcaaaatgcctcggtgggcattgtaatgccccaaaaaattccgtttgagatgccgctggttttggaaaacggtaaaactttgccgcgtttcgatctgatgattgaaacctacggcgagctgaatgctgaaaaaaacaatgcggttttaatctgccacgcgctgtcgggcaaccatcatgttgcgggcaggcattcggcggaagataaatatacgggctggtgggacaatatggtcggacctggcaaaccgattgatacggaacgttttttcgtggtcggtttgaataatctgggcggctgcgacggcagcagcgggcccttgtcgatcaatcctgaaacgggcagggaatacggcgcggattttccggttgttacggtgaaggactgggtaaaatcccaagccgcgcttgccgattatctcggcatcgaacaatgggcggcggttgtcggcggcagtttgggcggtatgcaggctttgcagtgggcgatttcctatcccgaacgcgtgcgccatgctttagtgattgcgtctgcgccgaagctgtccacgcaaaatatcgcgttcaacgatgtggcgcgtcaggcgattttgaccgaccccgatttcaacgaaggacattaccgcagccgtaacaccgttcctgcacggggcttacggattgcccgcatgatgggacacattacctatcttgccgaagacggtttgggcaaaaaattcggacgcgatttgcgctccaatggctatcaatacggctatggcgttgaatttgaagtagaatcctatctgcgctatcaaggcgacaaattcgtcggacggtttgatgccaacacctacctgctgatgaccaaagctttggactatttcgatccggcggcggatttcggcaacagcctgacccgcgccgtgcaggatgtgcaggcaaaattctttgtcgccagcttcagcaccgattggcgtttcgcgcccgaacgttcgcacgaactggtcaaggcactgattgccgcacaaaaatccgtgcagtatatcgaagtcaaatccgcacacgggcacgatgcctttttaatggaagacgaagcctatatgcgtgcggtcgccgcctatatgaacaacgtttataaggaatgtcagcaatga

SEQ ID NO: 50535 - DNA, 420 bp, Neisseria meningitidis
atgaatctcgtgaaactgctggcgaataactggcaaccgattgccattatcgcgcttgtcggcacgctcttggctgtgtcgcaccatcaaggctacaagtcggcatttgcgaagcagcaggcggtcatcgacaagatggagcgcgacaaggcgcaagccctgctgttgtcggctcaaaactatgcgcgcgaactggaactggcacgcgcggaagctaaaaaatatgaagtcaaggcgcacgctgtcggcatggctttggcgaaaaaacaggcggaagtcagccgtctgaaaacggaaaataaaaaggaaatcgaaaatgtccttactcaagaccgtaaaaatgcaagcggcggttgcattgacggctttggctctcacggcctgcagctctacaaccgcgccctcggctacggaaattaa

SEQ ID NO: 50536 - DNA, 918 bp, Neisseria meningitidis; identical to SEQ ID NO: 42983

SEQ ID NO: 50537 - DNA, 1347 bp, Neisseria meningitidis; identical to SEQ ID NO: 42142

SEQ ID NO: 50538 - DNA, 480 bp, Neisseria meningitidis; identical to SEQ ID NO: 42783

SEQ ID NO: 50539 - DNA, 1116 bp, Neisseria meningitidis
atgatttatcaaagaaacctcatcaaagaactctcttttaccgccgtcggcattttcgtcgtcctcttggcggtattggtctccacgcaggcaatcaacctgctcggccgtgccgccgacgggcgtgtcgccatcgatgccgtgttggcattggtcggcttctgggtcatcggtatgacgccgcttttgctggtgttgaccgcatttatcagtacattgaccgtgttgacccgctactggcgcgacagcgaaatgtcggtctggctatcctgcggattggcattgaaacaatggatacgcccggtgatgcagtttgccgtgccgtttgccgttttggttgccgtcatgcagctttgggtgataccgtgggcagagctacgcagccgcgaatacgctgaaatcctgaagcagaagcaggaattgtctttggtggaggcaggcgggttcaacagtttgggcaagcgcaacggcagggtttattttgtcgaaaccttcgataccgaatccggcatcatgaaaaacctgttcctgcgcgaacaggacaaaaacggcggcgacaacatcatcttcgccaaagaaggtaacttctcgctgaacgacaacaaacgcacgctcgaattgcgccacggctaccgttacagcggcacgcccggacgcgccgactacaatcaggtttccttccaaaaactcaacctgattatcagcaccacgccaaaactcatcgaccccgtttcccaccgccgtaccattccgaccgcccaactgattggcagcagcaacccgcaacatcaggcggaattgatgtggcgcatctcgctgaccgtcagcgtcctcctactctgcctgcttgccgtgccgctttcctatttcaacccgcgcagcggacatacctacaatatcttgattgccatcggtttgtttttaatttaccaaaacgggctgaccctgctttttgaagccgtggaagacggcaaaatccatttttggctcggactgctgcctatgcacatcatcatgttcgtcatcgcaatcgtacttctgcgcgtccgcagcatgcccagccagcccttctggcaggcggttggcaaaagtctgacattgaaaggcggaaaatga

SEQ ID NO: 50540 - DNA, 279 bp, Neisseria meningitidis; identical to SEQ ID NO: 36778

SEQ ID NO: 50541 - DNA, 567 bp, Neisseria meningitidis
atggctaagaaaatcagtattttggtgggcagcctgcgccgagcttcttttgcgcgcaaagtggcattgaatgcggcggagatgttccccgaaggctggcaggcggaaatcgtcgaaatcggacatctgccgctttacaatttcgattatgacgaccctgcggtggaagatgtgccgctacccgaaagctacacggctttccgcgaaacgattaaggcttcggacggcattttgttcgttacgtccgaaaataaccgcaccattcccgcctgtttgaaaaatgcggtggacatcggctcgaaaccgaatgccgacgtggcgtggaaaaacaaaccggccggtatcatcagccattccgtcggcaagatgggcggttacagttcgcaaaaaaacctgcgccttgcgctgtcttatttcgatatgcccgtaaccggacagccggaagtgtttttgggcaattcgccgacgctgtttgatgaaaacggcaaattgatcgactcggcaagggattttgttcagtcatatattaatcagtttgtcggtttgattgaaagaaatgccaaataa

SEQ ID NO: 50542 - DNA, 765 bp, Neisseria meningitidis
atgagctacacgcaactgacccagggcgaacgataccacatccaatacctgtcccgccactgcaccgtcaccgaaatcgccaaacagcttaaccgccacaaaagcaccatcagccgcgaaatcagacggcaccgcacccaagggcagcaatacagcgccgaaaaagcccagcggcaaagccagactatcaaacagcgtaagcgacaaccctataagctcgattcgcagctgattcagcacatcgacacccttatccgccgcaaactcagtcccgaacaagtatgcgcctacctgtgcaaacaccaccagatcacgctccaccacagcaccatttaccgctaccttcgccaagacaaaagcaacggcagcacgttgtggcaacatctcagaatatgcagcaaaccctaccgcaaacgctacggcagcacatggaccagaggcaaagtacccaaccgtgtcggcatagaaaaccgacccgctatcgtcgaccagaaatcccgtatcggcgattgggaagccgacaccattgtcggcaaaggacagaaaagcgcattattgaccttggtcgaacgcgttacccgctacaccatcatctgcaaattggatagcctcaaagccgaagacactgcccgggcagctgttagggcattaaaggcacataaagacagggtgcacaccatcaccatggataacggcaaagagttctaccaacacaccaaaataaccaaagcattgaaagcggagacttatttttgtcgcccttag

SEQ ID NO: 50543 - DNA, 873 bp, Neisseria meningitidis
ttgtcggatgaaggcaggcataaacctacttccgccccaaaccgcgtttttatgatgaaaggtatggataaattgagataccaacaggattttttaaatatccgccccatttttacagccggcgaacaagaatacctgaccgaattgtccgatcggcttcctttatctgttttaacggactccgtgcgtaatattgaagaaatcggtatcgattttgtgtacagttctgccaaattggaaggaaacacttataatcaatacgatacgcaggcattgcttaaactcgggcaaaccgcaggcgggaagttatattcggatgccgtaatgttaatcaacctgagggaaagttaccggcacctgctgtccggtttggacagccccgagccgtttgactggttggatttcttaaaaaccacccacagcctgatttccgaaaacttactggaaaaaggctccggcggcgtagtccgccgcgacagcgttaccataagcgggacagactacacccctttatctaacccgcaaagtttggatacggaattaaaatggttgcttcaagaagctcccaaaatagaaaatcctttcgaccgcgccgtttatctccataataatttggcgtatcttcaatattttaaagattgcaataaacgtactgccagaaactgcatgaccttgtcgctgatgcgctccggtttttttccttgcgtattctcccccgacagttatcccgcctatgccgaggctgtcgtagcctattacgaaaccggcgattacggtttattcaagaaatattttatttcggcatacgaaaataccgtaaataagtacggcccacagcctgatatggatattttccgcaacttctccctttaa

SEQ ID NO: 50544 - DNA, 1635 bp, Neisseria meningitidis
atgaccaaattcattttcgtcaccggcggcgttgtctcctcactgggtaaaggtatcgccgccgcttctattgccgccatcctcgaatcgcgcggcttgaacgttaccatgctcaagctcgatccttatatcaacgtcgatcccggcacgatgagcccgttccaacacggcgaagtgttcgtaaccgacgacggcgcggaaaccgacctcgacttgggacactacgaacgctttatcgattccacgatgacccgccgcaacagcttcagcacggggcaggtgtacgaaaacgtcatcgccaaagaacgacggggcgactatttgggcggcacggttcaagtcatcccgcacattaccgacgaaatcaaacgccgcatccacgaaggcgcggcaggttacgatgtggcgattgtcgaaatcggcggcacggtcggcgacatcgaatcgctgccgtttttggaagccatccgccagatgcgaagccagttgggacgcaacaacaccctgttcgcccacttgagctacgtcccctacatcgccgccgccggcgaaatcaaaaccaaaccgacccagcatactgttaaagaaatgttgagcatcggtttgcaaccggacatcctgatctgccgtatggacagagaaatgcctgcggacgagcgccgtaagattgcattgttctgtaacgttgaagaacgtgccatcgtgggcagctacgatgtggacagcatctacgaatgccccgaaatgctgcacgaccaaggcatcgacaacatcattaccgagcagttgcagcttaacgtgcaacaggcggatttgaccgcgtggaaaaaaatcgtccacgccgtcaaaaatccgaaacacaccgtcaaaatcgcgatggtcggcaaatacgttgatttgaccgaatcctacaaatcactgattgaagccttgaaacacgcaggtgttcacaccgaaaccgacgtacaaattacctttgttgacagcgaaagcatcgagaaaaacaagggcgacgtttctatgctcaaagatatggacgccatcctcgttcccggcggttttggttcgcgcggcgtggaaggcaaaatcgccgctgtgcgctatgcccgcgaaaacaacgtgccatacttgggcatctgcctcggtatgcagattgcgctgatcgaatacgcccgcgacgtggcaggtttgaaaggtgcgaattccaccgagttcgacctcaaatgcgccgcccccgtcgttgccctgattgacgaatggcaaactgccgacggcagcgtcgaaacccgcgacgaatccgccgatttgggcggcaccatgcgtttgggcgcgcaagaagtcgaattgaaagcaggcagcctcgccgccaaaatctacggcagcgaacacatccgcgaacgccaccgccaccgctacgaagtcaacaacaactacgttcctacgctggaacaggcaggtttggtcatcggcggcgtatccgccggacgcgaacgcttggtcgaaaccatcgaactgccgaaccatccttggttcttcgcctgccagttccaccccgagtttacctccaatccgcgcaaagggcatcctttgttcaccgcgtttgtcaaagctgcgttgaacaataaaaaagcctga

SEQ ID NO: 50545 - DNA, 246 bp, Neisseria meningitidis; identical to SEQ ID NO: 42999

SEQ ID NO: 50546 - DNA, 171 bp, Neisseria meningitidis; identical to SEQ ID NO: 39149

SEQ ID NO: 50547 - DNA, 615 bp, Neisseria meningitidis; identical to SEQ ID NO: 49632

SEQ ID NO: 50548 - DNA, 150 bp, Neisseria meningitidis
ttgcggcaatgccgtctgaagccacgaatccggcttcagacggcatctgtttaccaaaaagcaaataattcggtttggcaaaaaaaacagatttgctttttggtaaatactcgcttacaatccgctacatccgatttctacaaaggatga

SEQ ID NO: 50549 - DNA, 684 bp, Neisseria meningitidis
atgccgtctgaaaaatgttcagacggcatttcttataaccttttgtttgcagcacataaccaatcagtctttcctattccgttccgaaatgcataccatgcgcccgtccccaatatttgcgaacaaggaaagaaaatggcacgtttaaccgtacacacccttgaaaccgcccccgaagccgccaaagcgcgcgtagaggcggtacttcaaaacaacggcttcatccccaaccttatcggcgtattggcaaacgcccccgaagccttggcgttttaccaagaagtcggcaagctcaacgccgccaacagcctgactgccggcgaagtcgaagtcatccagatcatcgccgctcgtaccaaccaatgcggtttttgcgtggcagggcacaccaaactcgcaaccctgaaaaaactcctgtccgaacaatccgtcaaagccgcgcgcgctttggcagcaggcgaatttgacgatgccaaactcggcgcgctcgccgccttcacccaagccgtaatggcgaaaaaaggcgcggtatccgatgacgaactcaaagcatttttcgacgcgggctacaaccagcagcaggcagttgaagtcgtgatgggcgtagccttggcaactttgtgcaactacgtcaacaacctcgcccaaaccgaaatcaaccccgaattgcaggcttacgcctga

SEQ ID NO: 50550 - DNA, 1479 bp, Neisseria meningitidis
atgaaatacaaagacctgcgcgacttcatcgccatgctcgagcagcagggcaaactcaaacgcatcgcgcaccccgtttccccgcatttggaaatgaccgaaatcgccgaccgcgtgctgcgcgccgaagggtcggcattgttgtttgagaatccgattaagcctgacggtacgcgctacggttatcccgtgttggcaaacctgttcggtacgcccgaacgtgtggcgatgggcatgggcgcggacagcgtgtccaagctgcgcgaaatcgggcagacgctggcgtatttgaaagaacccgaaccgcccaaaggcatcaaagatgcgttttccaaactgccgctgctgaaagacatttggagcatggcgccgaacgtggtgaaaaacgcgccgtgtcaggaaatcgtgtgggaaggcgaaaacgttgatttgtataaacttccgattcagcattgctggccggaagacgttgcgccgctggtaacatggggcttgaccgtcacgcgtgggccgcacaaaaaacgccaaaatctcggcatttaccgccaacaactcatcggcaaaaacaagctgattatgcgctggctgtcgcatcgcggcggcgcgttggattatcaggagttccgcaaactcaatcccgatacgccgtatcccgtcgccgtcgtgctcggttgcgaccctgccactattctcggagcggtaacgcctgttcccgatactttgagcgaataccagtttgccggactgctgcgcggttcgcggacggagctggtgaaatgtatcggcaacgatttgcaagtgcctgcccgtgctgaaattgtattggaaggcgtgattcatccgaacgaaaccgcgttggaaggcccatacggcgaccacaccggctattacaacgagcaggatcatttccctgtatttacggtcgagcgcatcaccatgcgcgaaaacccgatttaccattcgacctacacaggcaaacctcccgatgaacccgctgttttgggcgtggcattgaacgaagtgttcgtaccgctcttgcaaaagcagttccccgaaatcaccgatttttacctgccgcccgaaggctgctcctaccgcatggcggtggtgagcatgaaaaaacagtacgccggacacgccaagcgcgtgatgatgggctgctggtcgttcctgcgccagtttatgtacaccaaattcatcatcgtggtggatgacgatgtgaacgtgcgcgactggaaagaagtcatctgggcggtaaccacgcgcatggaccccgtgcgcgacaccgttttggtggaaaacacgcccatcgactatctcgacttcgccagcccggtcagcggactcggcggcaaaatgggcttggacgcaaccaacaaatggccgggagaaaccgaccgcgaatggggacgcgtcatcaaaaaagaccctgcggttacggctaagattgatgggatttgggaggaattggggttgtag

SEQ ID NO: 50551 - DNA, 756 bp, Neisseria meningitidis
atgaagtttgcacggttactctttctctgtgcggcactcgccggcactcaagcggcagctgccgaaatggttcaaatcgaaggcggcagctaccgcccgctttatctgaaaaaagataccggtctgattaaagtcaaaccgttcaaactggataaatatcccgttaccaatgccgagtttgccgaatttgtcaacagccacccccaatggcaaaaaggcaggatcggttccaaacaggcagaacccgcttacctgaagcattggatgaaaaacggcagccgcagctatgcgccgaaggcgggcgatttaaaacaaccggtaaccaatgtttcctggttcgccgccaacgcctattgcgccgcacaaggcaaacgcctgccgaccattgacgaatgggaatttgccggacttgcctccgccacgcagaaaaacggctcaaacgaacccggctacaaccgcactattctcgactggtatgcggatggcgaccggaaagacctgcacgatgtcggcaaaggtcgcccgaactactggggcgtttatgatatgcacggtctgatttgggaatggacggaagatttcaacagcagcctgctttcttccggcaatgccaacgcgcaaatgttttgcagcggcgcgtctatcgggtcgagcgactcgtccaactatgccgccttcctccgctacggcatccgtaccagcctgcaatccaaatatgtcttgcacaacttgggcttccgttgcacaagccgataa

SEQ ID NO: 50552 - DNA, 846 bp, Neisseria meningitidis
atgctcagttacagacacgcattccacgccggcaaccacgccgatatgctcaaacactttaccttgtttttagtgctgcaatatttcaaccgcaaagacaagccctactggtacatcgacacgcacggcggcgcgggtgtgtacaatctcgaaggcagcgaggcgcagaaagtcggcgaataccggcaaggcatcgccctgctccgacaggcgcaaaacctgcctgccgaactctctgactttgccgcgcacatacaaaaaatcctgccctcgcccgaactttactgcggttctccgtggctggcacaatcgctgacccgcgtcggcgacaaattacgcctgtttgagctgcaccccaccgactttgtccatctgcaaaacaatatgggcgaagcaggattgggcaaacgcggacaagtgttgcgcgaagacggttacaaagggctgatttccctgctgccgcccccgccgcgccgtgccgccgtcctcatcgacccgccttacgaggaaaaacaggactactggcgtgtaacggaaacgctgaaatccgctttaaaacggtttgagtccggctgttatctcatctggtatccctgcctcagccgcgaagaaagccgcaagctgcccgaagaactgaaaaaactcgttcccgacaactaccttcacgccgaactgcacgtccacgcgccgaaagccgacggtttcggtatgcacggcagcggaatgttcgtcatcaatccgccctatctgttggcggaacaattggcggcaaacctccccgccctgacgcggctgctggcgcaagacgaaggcgcgcgctaccttttggacagcaaaatccgctga

SEQ ID NO: 50553 - DNA, 810 bp, Neisseria meningitidis
atgcaaggtactgccatgaatacgattttggctttcgatattgaaaccgtacccgatgtgcagggtatccgaacattgtacgagctgccgtcctcgctgcccgacgatgaagtggtgctgtttgcccagcagaaacgccgcgcccaaacgggcggcgattttatgcagcatcatcttcatcaggttgtggcgatttcgtgctgtatgcgttgggggcaggataaagtccatgtcggcaccatcggcgagatggatgacggcgaggaagtggtcattgccaaatttttcgaattgattgaaaaacatacgccgcaactggtcagttggaacggcggcggtttcgacctgcccgtactgcattaccgctccctgatatacggcattaacgccgcgcgctattgggatatgggcgacggcgatttcggcgacagccgcgatttcaagtggaacaactacatcagccgttatcaccaacgccactgcgatttgatggatttgctcgcgctttaccagccgagggcaaacgtgccgctggacgatatggcgaaactgtgcggttttccgggcaagctgggtatggacggcagcaaggtgtgggatgcgttccacgcgggcaggctgaaagaaatccgcaattattgcgaaaccgatgccgtgaatacgtatttgatgtatctgcgtttttgtctggtcagcggcagattcgacgcggacgaatacgaaatggaaatcaagcggatcagaaactatctttccgcccaaacagaagacaaaccgcattgggcagaatttgtccaagcgtggaaatag

SEQ ID NO: 50554 - DNA, 225 bp, Neisseria meningitidis; identical to SEQ ID NO: 39134

SEQ ID NO: 50555 - DNA, 3090 bp, Neisseria meningitidis
atgaatcaaaatcatttttcacttaaaattctgaccgttatgctgttatcggcttacggtggttcttttgcagacggtgttgtgcctgtttcagacggcaataccgtcagtctggatacggtcaatgtacgcggctctcatgctttgttgggcaagaccgaaaagacccgttcttatacgatagatcggatgtccaccgccacaggtatgaggattgcgggcaaggatacgccgcagtcggtcagcgtcatcacgcgcagccgccttgacgataaggcggtgcatacgcttgaagaggcaatgaaaaacacgacgggtgtcaacgttgtgcgcgattcaggcttgcagacgcggtttttgtcacgcggtttctatattgatcagattggtgaagacggtatgaccgtcaatgttgcaggccgttcgggatatacggcgaaaatcgacgtgtctccgagtaccgatttggcggtttatgaccatattgaagttgtacggggtgcaacggggttgacccaatccaattcagagccgggaggaaccgtcaatttgatccgtaagcgacctaccgcttctttcaaacataccggagagctgaccgccgaccatcgcggcagccggcgtgcagtgttggatgtttcaggcagcctgaataaggcgaataccttacgcggaaggttggtgggtgcggaagagtataaaaaatcgtttaaagaccgcgtttggggcaggaaacatatggtttacggcattgccgaagccgatgcgggcgacagcagtgtgcttactttgggcggcatgtatcagaagagtagggaggttcctgatttttcgggcattattttgccctgtgaaaatcagaaaactgccccgttcagttcaacgcctgcctgcaaccggcctttgcaactgccgcgcaacacttatttgggggaggattggtcgcggttaagtgccgacaaatacaaccttttctcaggattcaaacatgtgtttgacaacggttggcagctcaatgccgaagtgtcttataccaagaatgaatccgatgcgaaggtggggcagttttttctgaaaaacgaatatgcggcgggtttgtcgggtgaggatgcggtaggctttttgactgaaaaaaacgaagtcatcccgttcgagccgaaagataaggcattggagaaactgaaagcatatcgtgatgaaaccgccaaggaataccgggagcgcaaagacgattttgttaaaaaccgtttcgataatactgctttcgaacagtatcgcagccgccgtgccgcagaacgcaaagccggttttgacaagtgtatgagtgaccctttcgcgctggactttatctgtcaaggttcttggggggatccgggcgttgatgccgacaaggcggaatttgtcgataaagcccttgcgaaggagggcatctttaataatgcggcacaacgttttccaaacagcctgtatgactcttcctttaatcggaaggctaccgccaaccgacgatacagttatatgccgttgcggcataccaaagacgaccgccaatggggaattaaacttgacctgaccggcacatatgggctgttcgggcgggagcatgatttctttgtcggctatgcctacggtgatgaaaagatacgttcggaatatctagaaatctacgaacgccgctacagagtacgtccgaatacgggggcaacgcacggcgtgtatgcgggaagttgtcaggaggagccggacggcgatttgtcgtctcctttggtcagggggcataaagaacccgattggcaggcgtacgatgaaaaaggcaaccgtaccgtttatgccgaagaatgcaggaacgccaagaaaataaaaaccgagcccaagctcgatgccgaaggcaagcaggtgtattactatgacgaatacagcggcagccggacaccggtatatgtcgatgtatatgagctggacgaaaaaggcaacaagattcaggagaccaatcccgacggcacgcctgcctttaccggtttttccggtacggtgccggtttggaaaaccgtcaaagtggcagacgaccatgttcctgcgctgtataactacgccaaatacctcaacaccaacaaaacccattcgctgactgccagcacgcgtttcaacgtaaccggccgactgcaccttttgggcgggctgcactacacgcgctatgagacttcgcaaaccaaagatatgcctgtccgctatgggcagccggcaagcgattttcagacggcatcgagcattagggcggatcaggaccattacacggccaagatgcaaggtcataaattgacgccctatgcaggcattacctatgacttgacaccgcaacagagtatttacggaagttataccaaaatcttcaaacagcaggataatgtcgatgtcagtgccaaaaccgttttaccgcctttggtcggcacaaactatgaggtaggctggaaaggcgcgttcttgcaaggacggctgaatgcttcgttcgcattgttttacctcgaacagaaaaaccgcacggtcgtcgatttcggctatgttcccggagcaggcggcaagcaggggtcgttccaaaccgttgccaaaccgataggcaaagtggtcagcaggggtgcggaattcgagttgtcgggtgagttgaacgaagattggaaagtctttgcgggttacacctacaacaagagccgctacaaaaacgccgccgaagtcaacgccgaacgccttgccaaaaattccagtgcagacccgtacaacttcagcaatttcacacccgtgcacatattccgtttcggaacgagcttccatataccgaatacggggctgaccgtcggcggcggcgtgtccgcacaaagcggcacaagcagtctgtataacatcaggcagggcggctacgggctgatagacggtttcgtccgttacgaattgggcaaacacgccaaattgagcctcatcggtacgaacttaaacggacgcacttattttgagaacaactacaaccgtacgcgcggcgcaaacaacttctacggagagccgcgcactgtcagcatgaaactggattggcagttttaa

SEQ ID NO: 50556 - DNA, 588 bp, Neisseria meningitidis
atgcgggctgtcgggcattgttggaaaagatttccaaataaagcaattgaatacaaatataaaaccgcctcctgccgtatcggttgttcagacggcataaacagggaatttatgaaaacaaatttcaaacagaaaattatcgaacaggcacgcagcgaaggcttgcaggtaaccgctttgcgcgagcaggtattagatattgtcttgcagcaaagcggcgtgattaaagcctacaacgtcttgtcgcagatgcagcagcaaagcgagggcgtgcttgcaccgcctaccgcctaccgcgcccttgatttttgggcggagcagggcgttttgcacaaagtggcggcggtcaacggctatattttgtgcagccacgcgcagcacgagtgcgacgaccattgccacgaccacgaagaagccgaagcgcaccacagcgcgtttattttggtctgcaccgaatgtggcacggcggacgagcaaaccctgagccacgagtgggcggcactgcgcgcaggcgttgccgaaagcggctttgcgctgaaagaagaacacgttgttttaaccgggatttgtaaaaaatgtcagcagtaa

SEQ ID NO: 50557 - DNA, 423 bp, Neisseria meningitidis; identical to SEQ ID NO: 42719

SEQ ID NO: 50558 - DNA, 927 bp, Neisseria meningitidis
atgctaaacgtaccaaaaggcagttatgatggtatgaagggttttaccattattgaatttttggttgcgggcatgctcagtatgattgtcctgatggcggtcggatcgagttacttcacatcccggaaattaaatgatgcggcaaacgagcgtctttccgcgcaacaggatttgcggaatgcggcaacattgattgtccgcgatgcgagaatggcgggcggcttcggttgtttcaatatgtccgagcatcctgcaactgatgttatttccgatacgacgcaacaaaattctccttttcccttaaaaaggaacagtacaaataaacttatccccataacggaatcttcaaatatcaattatcagaattttttccaggttggtagcgcattgatttttcaatacggaatcgatgatcttgatgcgagtgctgagactgttgtagtcagcagctgttccaaaatagcaaaaccgggtaagaaaatatctaccttgcaagaagcaaagagtgcattacagattactaatgatgataaacaaaatggaaatatcacccgtcaaaggcatgtggtcaatgcctatgcggtcggcaggattgccggtgaggaaggtttgttccgcttccaattggatgataagggcaagtggggtaatcctcagttgctcgcgaaaaagattagacatatgaaagtgcggtatatctatgtttccgactgtcctgaagatgacgatgccggcaaagaggaaacattcagatatacggataaattcaacagcgcccaagatgctgttacgcctgccggggtggaggttttattgagtagcggtactgataccaagattgccgcttcttcagacaatcatatttatgcttaccgtatcgatgcgacaatacgcgggggaaatgtatgcgcaaacagaacactttga

SEQ ID NO: 50559 - DNA, 420 bp, Neisseria meningitidis; identical to SEQ ID NO: 41421

SEQ ID NO: 50560 - DNA, 1101 bp, Neisseria meningitidis
atgacccgtatcgccatcctcggcggcggcctctcgggaaggctgaccgcactgcagcttgcagaacaaggttatcagattgcacttttcgataaaggctgccgccggggcgaacacgccgccgcctatgttgccgccgccatgctcgcgcctgcggcggaagcggtcgaagccacgcccgaagtcatcaggctgggcaggcagagcattccgctttggcgcggcatccgatgccgtctgaacacgcacacgatgatgcaggaaaacggcagcctgattgtgtggcacgggcaggacaagccattatccagcgagttcgtccgccatctcaaacgcggcggcgtagcggatgacgaaatcgtccgttggcacgccgacgacatcgccgaacgcgaaccgcaactcggcggacgtttttcagacggcatctacctgccgaccgaaggccagctcgacgggcggcaaatattgtctgcacttgccgacgctttggacgaactgaacgtcccttgccattgggaacacgaatgtgcccccgaagacctgcaagcccaatacgactggctgatcgactgccgcggctacggcgcaaaaaccgcgtggaatgcttctgccgaacacggcagcaccctgcgcggcatacgcggcgaagtggcgcgggtttacacacccgaaatcacgctcaaccgccccgtgcgcctgctgcacccgcgttatccgctctacatcgccccgaaagaaaaccacgtcttcgtcatcggcgcgacccaaatcgaaagcgaaagccaagcccccgccagcgtgcgttcagggttggaactcttgtccgcactctatgccgtccaccccgccttcggcgaagccgacatcctcgaaatcgccaccggcctgcgccccacgctcaaccaccacaaccccgaaatccgctacagccgcaaacgccgcctcatcgaaatcaacggccttttccgccacggtttcatgatctcccccgccgtaaccgccgccgccgtcagattggcagtggcactgtttgacggaaaagacgcgcccgaacgtgatgaagaaagcggtttggcgtatatccgaagacaagattaa

SEQ ID NO: 50561 - DNA, 546 bp, Neisseria meningitidis
atgacttacgaaaaactttatgagcttcgccaaacactcagaccgactaccaaagacggtctctatacagataatgaaaaaaatcgagaaatcctaacggttagatggagcggcaacacagaaaatcctaaaaatttctcagctgttgctataggaattaatccaagtaaagcaaatgatgaaagaagcgacaaaacccttacccaacttgcacgtttcttggatatgtacggttttaccaacttcaaaatgttaaatattttttccagttactctacacagcaaacaggaattagggcaaacacccaaaccgatttttccaaatttaaaggatgtttggaagatgctgatatgattattcttgcatggggtacagaccgcagtgcttataaggatgaaaaaaacagaatactggaatttctaaaagcagaaaaatttatggaaaaagtattctgtatttctgaaactggtaattccagcgatacaagacatccgtcaagaattagttatagctatcaacttgtacaatttgaagagtcagcatga

SEQ ID NO: 50562 - DNA, 1311 bp, Neisseria meningitidis; identical to SEQ ID NO: 39855

SEQ ID NO: 50563 - DNA, 558 bp, Neisseria meningitidis; identical to SEQ ID NO: 43551

SEQ ID NO: 50564 - DNA, 873 bp, Neisseria meningitidis; identical to SEQ ID NO: 43062

SEQ ID NO: 50565 - DNA, 633 bp, Neisseria meningitidis; identical to SEQ ID NO: 41857

SEQ ID NO: 50566 - DNA, 1410 bp, Neisseria meningitidis
atggatacacaaatcaaaactgaagccggtcagcagaataaccggcgttatctgaccgtttggcggtggcatttttatgccggtctgctggttatgccttttcttaccctgcttgccgttacgggtttgggtatgctgctgtttgccaatattaccggtaaggagggcgagcggattcatgttgtgccgcaggcaacggtacaacctctgtctgttcaggcggaagcggcacgcagtgccgttaatccggaaacttcgtccgtcgttcagtatattgcgccgcgtgccgatgatatggttgccgtgttccgtgtcaacaatgagggcaaggcaacgatggtcgcggtcgatccttatacggcaaaagtggtcagtaccatgccgcgcaatcagggttggtattacgcgatggatgaaatccacagcgatatgatgctcggttcgacaggtgattatcttttggaaacggctgcatcgctgacgattatcatgataatcagcggtttgtacctttggtgggtgaaacggcgcggcatcaaggcgatgctgctgccgccaaaaggcagggcgcgttcttggtggcggaatctgcacggcgcgtttggaacttgggtgtcgttgattttactgttgttctgcctgtcgggtattgcttgggcaggtatttggggcggcaagttcgtgcaggcttggagtcagttcccggcaggcaaatggggtgtcgaaccgaaccctgtttcagtcgtgccgacccatggcgaggtattgaacgacggcaaggttaaggaagtgccgtggattttggagcttacgcctatgcctgtttcagggacgactgtgggcaaagacggcattaaccccgacgagccgatgacattggaaaccgtcgaccgttttgcgcgggaaatcggtttcaaagggcgttatcagttgaatttgcccaaaggcgaggacggcgtatggactttgtcgcaagactctatgagttacgatatgattagtccgtttgccgaccgcacggtgcatatcgaccagtacagcggcaaaatccttgccgacatccgctttgacgattacaacccgttcggcaaatttatggcggcaagcattgcgctgcatatgggtactttgggctggtggagcgtgttggcgaacgttttgttctgccttgccgtcatttttatcggtatcagcggctgcgtgatgtggtggaaacgccgtccgaccggagcggtgggcatcgttccgccggcgcagaaagtcaagctgccggtttggtggatgatggcattgccgctattggcaatcgcactgctcttcccgaccgcactgcttgccattgccgtgatttggctgttggataccttgctgctgtcgcggattcctgttttgaggagatggtttaaatga

SEQ ID NO: 50567 - DNA, 408 bp, Neisseria meningitidis
  misc_feature 8, 9, 10, 11, 12: 'n' is a, c, g or t
gtgtgtgnnnnnggcgcgttcaaccgcgtcggagcgagcagccgctttatgaaccgtcccgtcatcgacatcgatttggcgcgtaccgctttgcaggacattattgccgagaagcacaaagtcatcaccgccgatattattattgatgccgttgcgaaatattaccgcatcaaaatcagcgatgtgctcggtaagaaacggacacgaaacattgcccgtccgcgccaggtggcgatgagcctgaccaaagaactgaccactttgagcctgccgtctatcggcgattcgtttggtgggcgcgaccatacgaccgttatgcacggcatcagggcagtggcgaaactgcgcgaagaagatccggaattggctcaggattatgaaaagctgctgattctgattcaaaactga

SEQ ID NO: 50568 - DNA, 1209 bp, Neisseria meningitidis
atgagtgaagcagaatatttttcacatttcatatctaacggcaatgggaagttattagaaattccgcaacgtaggggcaggcaggacggcgtttttatagattggttgtcattcacactgcacgaagattccttgctgaaagtttccgggatgccccttagtttccgatgccgaatatatgtttgtttaagcaaaaaattggaggaaatattagggtttggcatcacgagcagatgcaaatcgaagggcaataaattttacgattcgatgtttaggttgggatcggaagaagttgactacggcgaagtccattacggaggtcagcgaaatacggttttaatcgaattgaaaggtgtaggttgcaacattgcaaatccaggttgggaattgaggcttaagcagtttttggaagattcattgaggccgaggataacgcgggtagatttggcacttgatttttttgatggggagtacacgccggaacaggcacttttggatcacgataacggttttttcgataacagtaacatgaggccgaaatctgaaatggttggaacggcttggcggagagaggacgggagcggcaagacattttatgtaggtcgcaagaaaaattctcgttttgtgcgtgtttatgagaaaggcaggcagctaggcgataaagaaagcaagtgggtaaggttcgaaattcagtttaatcatggagatatggaaatacctttggatattctgataaatcaaggttcttacttttcaggcgctttcccgatttgtcagaaatttaaaaatatgccgaatccggaaaggttcgattaccgtaaaaaagtggctaatttaacttttcagcataaattgagatacgcaaaaaacgcggtcggcaaactgattaatttcatgtttgatatgggttttgatagtgatgaaattgtcagatatctgaaggcagatttggggtatcccaaagggctagaacctgaaaaatattcgttggccggattgaaggaatctttgaaattcggctttatccacgaacaaccggatgtagatttagaggttgaattggaagaactcggaattatcaaatttaagcaatcagataaattcgatccggataaaaggcttttcgatccacatcacgatgtagaaagtgagaggcaatatcagctttatctcgacagaatgtatgatcttcatgcaaatcaaaattaa

SEQ ID NO: 50569 - DNA, 1113 bp, Neisseria meningitidis; identical to SEQ ID NO: 43907

SEQ ID NO: 50570 - DNA, 588 bp, Neisseria meningitidis
  misc_feature 8, 9, 10, 11, 12: 'n' is a, c, g or t
gtgtgtgnnnnncgttggataaagaaaaacggcctctacaaactcggttacaaacaacatacccgtaccgatgcagaaggctatatcgagaaactgcacattaccttcgccaatgccaatgagtgcaaacacctgtcgccgttgttggaaggactgcccgaaggtacgaccgtctatgccgacaaaggctatgacagtgcggaaaaccggcaacatctggaagagcgtcagttgttagacggcattatgcgcaaagcctgccgcaaccgtccgctgacggaaacgcaaaccaaacgcaaccggtatttgtcgaagacccgttatagtggattaaatttaaatcaggacaaggcgacgaagcagcagacagtacaaatagtacggcaaggcgaggcaacgccgtactggtttaaatttaatccactatatgtggtcgaacagagcttcggtacgctgcaccgtaaattccgctatgcgcgggcagcctatttcggactgattaaagtgagtgcgcaaagccacctgaaggcgatgtgtttgaacctgttgaaagccgccaacaggctaagtgcgcccgctgccgcctaa

SEQ ID NO: 50571 - DNA, 594 bp, Neisseria meningitidis
atggaacactatttgagcctcttcatcaaatccgtcttcattgaaaatatggcgctatccttctttttgggtatgtgcacgtttttggcggtatccaaaaaagtatccaccgcattcggtttgggtgtggcggtaattttcgtactcgggctgtccgtccctgtcaaccaattggtttactcgctgctcaaagacggcgcgattgtcgaaggcgtggatttgacctttttgaaattcatcaccttcatcggcgtgattgccgctttggtgcagattttggaaatgttcttggataaattcgtccccgccctctataacgcgttgggcatctacctgccgctgattaccgtgaactgcgcgattttcggcgccgtatcgtttatggcgcaacgcgaatacaacttcggcgagtccgttgtatacggcttcggcgcgggcttgggctggatgttggcgattgtcgctttggcgggcattaccgaaaaaatgaaatattcggacgctcccaaaggcctcaaaggcttgggcattacctttatcgccgccggcctgatggcgatggcgtttatgtcgttctccggcatccagttataa

SEQ ID NO: 50572 - DNA, 345 bp, Neisseria meningitidis
atgaacatcatccgcgcgctcctcatcatcctcggctgcctcgccgccggcgaaaccgccgttttcctagcaggcatcaaactgcccggcagcatcgtcggcatgggcgtgctgtttgcgcttttgcaggcaggttgggtcaaaacgtcttggctgcaacagcttaccgacgcgctgatggcgaatctgacgctgtttctcgtgccgccctgcgtggcggtcatcagctatttggatttgattgccgacgattggttttcgatactggtttccgcctccgccagcactttgtgcgtactgctggttacaggcaaggttcaccgctggatacggagcattatctga

SEQ ID NO: 50573 - DNA, 876 bp, Neisseria meningitidis
atgagtcaacactctgccggagcacgtttccgccaagccgtgaaagaatcgaatccgcttgccgtcgccggttgcgtcaatgcttattttgcacgattggccacccaaagcggtttcaaagccatctatctgtccggcggcggcgtggcagcctgctcttgcggtatccctgatttgggcattaccacaatggaagatgtgctgatcgatgcgcgacgcattacagacaacgtagatacgcctttgctggtggacatcgatgtgggttggggcggtgcattcaatattgtccgtaccattcgcaactttgaacgcgccggtgttgcagcggttcacattgaagatcaggtagcgcaaaaacgctgcggccaccgtccgaacaaagccattgtttctaaagatgaaatggtcgaccgtatcaaagctgccgtcgatgcgcgcgttgatgagaacttcgtaattatggcgcggacggatgcgctggcggtggaaggtttggatgctgccatcgaacgcgctcaagcttgcgtggaagccggtgcggacatgattttccctgaagccatgaccgatttgaaaatgtaccgccaatttgcagatgcagtgaaagtgcctgtattggccaacattaccgagtttggttctactccgctttatacccaaagcgagctggctgaaaacggcgtgtcgctggtgctgtatccgctgtcgtcgtttcgcgctgcgagtaaggccgctttgaatgtttacgaggcgattatgcgcgacggcacgcaggcggcggtggtcgatacaatgcaaacccgtgccgagttgtacgagcatctgaactatcatgccttcgagcaaaaactggataaattgtttcaaaaataa

SEQ ID NO: 50574 - DNA, 678 bp, Neisseria meningitidis; identical to SEQ ID NO: 42526

SEQ ID NO: 50575 - DNA, 231 bp, Neisseria meningitidis; identical to SEQ ID NO: 44466

SEQ ID NO: 50576 - DNA, 279 bp, Neisseria meningitidis; identical to SEQ ID NO: 36778

SEQ ID NO: 50577 - DNA, 5928 bp, Neisseria meningitidis
atgaataaaggtttacatcgcattatctttagtaaaaagcacagcaccatggttgcagtagccgaaactgccaacagccagggcaaaggtaaacaggcaggcagttcggtttctgtttcactgaaaacttcaggcgacctttgcggcaaactcaaaaccacccttaaaaccttggtctgctctttggtttccctgagtatggtattgcctgcccatgcccaaattaccaccgacaaatcagcacctaaaaaccagcaggtcgttatccttaaaaccaacactggtgcccccttggtgaatatccaaactccgaatggacgcggattgagccacaaccgctatacgcagtttgatgttgacaacaaaggggcagtgttaaacaacgaccgtaacaataatccgtttctggtcaaaggcagtgcgcaattgattttgaacgaggtacgcggtacggctagcaaactcaacggcatcgttaccgtaggcggtcaaaaggccgacgtgattattgccaaccccaacggcattaccgttaatggcggcggctttaaaaacgtcggccgcggtatcttaaccaccggtacgcctcaaatcggcaaagacggtgccttgacgggatttgacgtgcgccaaggcacattgaccgtcggtacgtcaggttggaacgacaaaggcggagccgattacaccgaagtgcttgcccgtgcggttgctttgcaggggaaattgcagggtaaaaacctggcggtttcgaccggcgcacagaaagtagattacgccagcggtgaaatcagcgcaggaacggcagcaggtacgaaaccgaccgttgccctcgatactgccgcattgggtggtatgtacgcagacagcattaccctgattgccaatgaaaaaggcgtaggcgtcaaaaatgccggcacactcgaagcggccaagcaattgattgtgacttcgtcaggccgcattgaaaacagcggccgcatcgccaccactgccgacggcaccgaagcttcaccgacttatctctccatcgaaaccaccgaaaaaggagcggcaggcacatttatctccaatggtggtcggatcgagagcaaaggcttattggttattgagacgggagaagatatcagcttgcgtaacggagccgtggtgcagaataacggcagtcgcccagctaccacggtattaaatgctggtcataatttggtgattgagagcaaaactaatgtgaacaatgccaaaggcccggctactctgtcggccgacggccgtaccgtcatcaaggaggccagtattcagactggcactaccgtatacagttccagcaaaggcaacgccgaattaggcaataacacacgcattaccggggcagatgttaccgtattatccaacggcaccatcagcagttccgccgtaatagatgccaaagacaccgcacacatcgaagcaggcaaaccgctttctttggaagcttcaacagttacctccgatatccgcttaaacggaggcagtatcaagggcggcaagcagcttgctttactggcagacgataacattactgccaaaactaccaatctgaatactcccggcaatctgtatgttcatacaggtaaagatctgaatttgaatgttgataaagatttgtctgccgccagcatccatttgaaatcggataacgctgcccatattaccggcaccagtaaaaccctcactgcctcaaaagacatgggtgtggaggcaggctcgctgaatgttaccaataccaatctgcgtaccaactcgggtaatctgcacattcaggcagccaaaggcaatattcagcttcgcaataccaagctgaacgcagccaaggctctcgaaaccaccgcattgcagggcaatatcgtttcagacggccttcatgctgtttctgcagacggtcatgtatccttattggccaacggtaatgccgactttaccggtcacaataccctgacagccaaggccgatgtcaatgcaggatcggttggtaaaggccgtctgaaagcagacaataccaatatcacttcatcttcaggagatattacgttggttgccggcaacggtattcagcttggtgacggaaaacaacgcaattcaatcaacggaaaacacatcagcatcaaaaacaacggtggtaatgccgacttaaaaaaccttaacgtccatgccaaaagcggggcattgaacattcattccgaccgggcattgagcatagaaaataccaagctggagtctacccataatacgcatcttaatgcacaacacgagcgggtaacgctcaaccaagtagatgcctacgcacaccgtcatctaagcattaccggcagccagatttggcaaaacgacaaactgccttctgccaacaagctggtggctaacggtgtattggcactcaatgcgcgctattcccaaattgccgacaacaccacgctgagagcgggtgcaatcaaccttactgccggtaccgccctagtcaagcgcggcaacatcaattggagtaccgtttcgaccaaaactttggaagataatgccgaattaaaaccattggccggacggctgaatattgaagcaggtagcggcacattaaccatcgaacctgccaaccgcatcagtgcgcataccgacctgagcatcaaaacaggcggaaaattgctgttgtctgcaaaaggaggaaatgcaggtgcgcctagtgctcaagtttcctcattggaagcaaaaggcaatatccgtctggttacaggagaaacagatttaagaggttctaaaattacagcaggtaaaaacttggttgtcgccaccaccaaaggcaagttgaatatcgaagccgtaaacaactcattcagcaattattttccaacccaaaaggcagccgaactcaaccaaaaatccaaagaattggaacagcagattgcgcagttgaaaaaaagctcgcctaagagcaagctgattccaaccttgcaagaagaacgcgaccgtctcgctttctatattcaagccatcaacaaggaagttaaaggtaaaaaacccaaaggcaaagaatatctgcaagccaagctttctgcacaaaatattgacttgatttccgcacaaggcatcgaaatcagcggttccgatattaccgcttccaaaaaactgaaccttcacgccgcaggcgtattgccaaaggcagcagattcagaggcggctgctattctgattgacggcataaccgaccaatatgaaattggcaagcccacctacaagagtcactacgacaaagctgctctgaacaagccttcacgtttgaccggacgtacgggggtaagtattcatgcagctgcggcactcgatgatgcacgtattattatcggtgcatccgaaatcaaagctccctcaggcagcatagacatcaaagcccatagtgatattgtactggaggctggacaaaacgatgcctataccttcttaaaaaccaaaggtaaaagcggcaaaatcatcagaaaaaccaagtttaccagcacccgcgaccacctgattatgccagcccccgtcgagctgaccgccaacggtatcacgcttcaggcaggcggcaacatcgaagctaataccacccgcttcaatgcccctgcaggtaaagttaccctggttgcgggtgaagagctgcaactgctggcagaagaaggcatccacaagcacgagttggatgtccaaaaaagccgccgctttatcggcatcaaggtaggtaagagcaattacagtaaaaacgaactgaacgaaaccaaattgcctgtccgcgtcgtcgcccaaactgcagccacccgttcaggctgggataccgtgctcgaaggtaccgaattcaaaaccacgctggccggtgccgacattcaggcaggtgtaggcgaaaaagcccgtgtcgatgcgaaaattatcctcaaaggcattgtgaaccgtatccagtcggaagaaaaattagaaaccaactcaaccgtatggcagaaacaggccggacgcggcagcactatcgaaacgctaaaactgcccagcttcgaaagccctactccgcccaaattgtccgcacccggcggttacattgtcgatattcccaaaggcaatctgaaaaccgaaatcgaaaagctggccaaacagcccgaatacgcctacctgaaacagcttcagacggccaagaacgtcgattggaaacaggtgcagctggcctacgacaaatgggactataaacaggaaggcttgaccggagccggtgcagcgattgtggtgattattgtaaccgctctaacttatggatacggagcggctgcagcgggtagcgtaactgccgcaggaagtagtacagccgcagctgcaacaacgacagcggcagcaactaccactgtttctactgcagctgccatgcaaaccgcagctttagcctccttgtatagccaagcagctgtagccatcatcaataataaaggcgatgtaggcaaagcattaaaagatctcggcaccagtgatacggtcaagcagattgttacttccgcactgacggcgggtgcattaaaccagatgggcgcagatattgcccaattgaacagcaaggtaagaaccgaactgttcagcagtacgggcaatcaaaccattgccaaccttggaggcagattggccaccaacctcagcaatgcaggtatctcagctggtatcaataccgccgttaacggcggcagcttgaaagacaacttaggcaatgccgcattgggagcattggttaatagcttccaaggggaagccgccagcaaaatcaaaacaaccttcagcgacgattatgttgccaaacagttcgcccacgctttggcgggttgtgttagcggactggtacagggaaaatgtaaagatggggcaattggcgcagcagttggggaaatcgtagctgaatccatacttggcggcagaaaccctgctacactcagcgatgcagaaaagcataaagttatcagttactcgaagattattgcgggcagcgtggcggcactcaacggcggcgatgtgaatactgcggcgaatgcggctgaggtagctgtggtgaataatgctttgaattttgacagtacccctaccaatgcgaaaaagcatcaaccgcagaagcccgacaaaaccgcactggaaaaaatcatccaaagtattatgcctgcacatgcggcaggtgcgatgactaatccgcaggataaggatgctgccatttggataagcaatatccgtaatggcatcacaggcccgattgtgattaccagctatggagtttatgcagcagattggacagctccgctgatcggtacagctggtaaagcagctatcagcacctgtatggctaatccttctggttgtactgtcatggtcactcaggctgccgaagcgggcgcgggaatcgccacgggtgcggtaacggtaggcaacgcttgggaagcgcctgtgggggcgttgtcgaaagcgaaggcggccaagcaggctataccaacccagacagttaaagaacttgatggcttactacaagaatcaaaaaatataggtgctgtaaatacacgaattaatatagcgaatagtactactcgatatacaccaatgagacaaacgggacaaccggtatctgctggctttgagcatgttcttgaggggcacttccataggcctattgcgaataaccgttcagtttttaccatctccccaaatgaattgaaggttatacttcaaagtaataaagtagtttcttctcccgtatcgatgactcctgatggccaatatatgcggactgtcgatgtaggaaaagttattggtactacttctattaaagaaggtggacaacccacaactacaattaaagtatttacagataagtcaggaaatttgattactacatacccagtaaaaggaaactaa

SEQ ID NO: 50578 - DNA, 279 bp, Neisseria meningitidis
ttgcgtggcaaaaccaaagtgatgacgacccagatgggtgcttcccgcgatgtcagcaaaagcaccaaaggttggagtgtcggtatcggtctgaatgtaggcaaacagttcaccgacagcgtcagtctcgagtttgatccatactagcgtcacaaaacaatctgcaaatcccgtgagattgtcttggacggctacagaaccaaaatgggctgctccaaatccaacgagtacgacttccgcgtaaccgcaacgttctatagtcaattaaaatcaaagtag

SEQ ID NO: 50579 - DNA, 315 bp, Neisseria meningitidis
  misc_feature 300, 301, 302, 303, 304: 'n' is a, c, g or t
ttgctttgcccggaaaaaatgtcggtgatggcgggacggcatccgtacggcgtccggtcgggtttgcggaggaacggcttgaaactttgggatattcattttagaatgactcgttttatcgtcgcaagatgcggtttattgtttgcaacccttaaaggaaaaaccatgaagaaaatgttcgtgctgttctgtatgctgttctcctgcgccttctcccttgcggcggtaaacatcaatgcggcttcgcagcaggagttggaggcgctgccgggcataggcccggcgaaggcgaaggccatnnnnncacacacttaa

SEQ ID NO: 50580 - DNA, 2325 bp, Neisseria meningitidis
gtgctgaagacaccccctacgcttgctgcagaactttcgggtaaaaccggtgtgagcattagcgcaccgtatgccaatgagaacagccgcatcagtctgagtgcggcaaacatcgaagctgaaaacggcaaaatcaaaattcaatcttacggtgaccaatattactatgcgagacagagcgaactctatacctttgaacgccgcagctacaaaactggcaaatggtacaaccgcaaacacattaccgaagtcaaagaacacaaaaacgccaagcccgacgcagtaaacctcagcgcatcccaaggcatcgacatcaaatctggtggcagcatcgacgcctacgccaccgcattcgatgcccccaaaggcagcattaacatcgaagccgggcggaaattgacactctatgccgtagaagagctcaactacgacaaactagacagccaaaaaaggcgcagatttctcggcatcagctacagcaaagcacacgacaccaccacccaagtcatgaaaaccgcgctgccctcaagggtagttgcagaatcagccaatctgcaatcaggttgggataccaaactgcaaggcacacagtttgaaaccacactgggtggcgcaaccatacgcgcaggcgtaggcgagcaggcacgggcagatgccaagattatcctcgaagggatcaaaagcagcatccacacagaaaccgtgagcagcagcaaatctactctatggcaaaaacaggcaggacggggcagtaacatcgaaaccttgcaattgccgagtttcaccggtcccgttgcgcccgtactgaccgctcccggcggctatatcgccgacatccccaaaggcaacctcaaaaccgaaatcgaaaagctgtccaaacagcccgagtatgcctatctgaaacagctccaagtagcgaaaaacatcaactggaatcaggtgcagcttgcttacgacagatgggactacaaacaggagggcttaaccgaagcaggtgcggcgattatcgcactggccgttaccgtggtcacctcaggcgcaggaaccggagccgtattgggattaaacggtgcggccgccgccgcaaccgatgcagcattcgcctctttggccagccaggcttccgtatcgttcatcaacaacaaaggcgatgtcggcaaaaccctgaaagagctgggcagaagcagcacggtgaaaaatctggtggttgccgccgctaccgcaggcgtagccgacaaaatcggcgcttcggcactgaacaatgtcagcgataagcagtggatcaacaacctgaccgtcaacctagccaatgcgggcagtgccgcactgattaataccgctgtcaacggcggcagcctgaaagacaatctggaagcgaatatccttgcggctttggtcaataccgcgcatggagaagcagccagtaaaatcaaacagttggatcagcactacatagtccacaagattgcccatgccatagcgggctgtgcggcagcggcggcgaataagggcaagtgtcaggatggtgcgataggcgctgcagtcggtgagattgttggtgaggctttggttaagaatactgatttcagtcgtatgagtgcgaccgaaatcgaaaaagctaaagcgaatattactgcgtatgcaaaattggtagccggagcgactgtaggtgttacaggaggcaatgttgatgtggcggcaaatgcttccgaaacagctgttaaaaataatgcattagatattatttgggatatcggcaacctcgtatgggacggcggtaaatggatttacgccaaatctattggcgataagcagatggctcgagaagcggcgattgattttggtgtggatgccgccgcagctgccgttccctttgttccggcaggtgcgactaaaatcagccgaggcggggcttatgttctgaaggcgggagacgaagcagttgatacggctaaagccatacaggaaattcagaagcagaccggaatcaagcttacttatgataaggttaataaggtttggacaacaccggcggggttagattatgggttagatgctaagcatggtaataggattaaacatgttttagcccatacaattccaaatccaaacaaacctgttcattctgtttttaatgtgtcccgtaaagaagttttgcctttggttgatgaagcttggagaatgaaaggaaatcctttgccaaatgattcatccgtatatcttgtagatatgaagaaacctattggaacaaaaggagaaacaaaagtgcggattgttgtgcaaaaaggaacaaataaaatcatttctgcatatcctcagaaataa

SEQ ID NO: 50581 - DNA, 369 bp, Neisseria meningitidis; identical to SEQ ID NO: 39308

SEQ ID NO: 50582 - DNA, 852 bp, Neisseria meningitidis; identical to SEQ ID NO: 47522

SEQ ID NO: 50583 - DNA, 2259 bp, Neisseria meningitidis
atgtacacaagaattatggaaatcagcccttggacgctgcgttcggcaaagctggaaaaagaacacaaacggctgcaagagagcctgaccagtttgggcaacggctatatgggtatgcgcggcagctttgaggaaacctactccgccgacagccacttgggtacctacatcgccggcgtgtggttccccgacaaaacccgcgtcggctggtggaaaaacggctatcccaaatatttcggcaaagccatcaacgcgctcaatttcagcaaagttaaaatctttgtcgatggacaagaggtggacttggcgaaaaacgacgttaccgacttctccgtcgaactcgatatgcagcacggtgtgttgtgccgctcgttcaccgtattcggcgtgcgtttcgatgtgtgcaaattcctgtccgtcgcgcaaaaagagctggcggttatccgctgggaagccgtatccgttgacggcaaaacccaccaagtccgcatcgattccatcatcgatgccgacgtgaaaaacgaagactccaactacgaagaaaaattctggcaggtattggacaaaggcgtttcagacagtctctcctacattgccgcccaaaccgtcaccaatcccttcggcgtggaacaattcatcgtcaacgccgagcaaaccttcgccggcagcttcaaagtcttaggcggcagccaaaccgattggcaagtttctaattctttcgaggccgaagtcggcggcacgcccgaaacctttgaaaaacgcgtgatcgttaccaccagccgcgattatcagggcttggaagcagtgaaaaccgccggccgcgccttgtcggaaaaaatcgcaggcgttgcgtttgaaaccttgctggaggcgcacaaagcaggctggctgcaccgttgggaaatcgccgacgtggtcatcgaaggcaacgacgaagcgcagcaaggcatccgtttcaatctgttccaactgttctccacctactacggcgaagacgcgcgtctgaacatcggcccgaaaggctttaccggagaaaaatacggcggcgcgacctattgggacaccgaagcctacgccgtgccgctctacctcgcactggcggaacccgaagttacccgcaacctgctgcaataccgccgcaaccaactgccacaggcgcaacacaacgcgcgcgaacagggcttggcgggcgcactctatccgatggtaacgtttacgggcatcgagtgccacaacgaatgggaaatcaccttcgaggaaatccaccgcaacggcgcgattccttacgccatctataactacaccaactacaccggcgacgagggctatcttgctaaagaaggcttggaagtcttggtcgaagtgtcccgcttctgggcggaccgcgtccacttctccaaacgcaacggcaaatacatgattcacggcgtaaccggtccgaacgaatacgaaaacaacatcaacaacaactggtacaccaacaccctcgccgcatgggtattggactacacccgcgaagccttggcgaaatacccgcgtccggatttgaacgtgcgtgccgccgagttggaaaaatgggcggacatcagcgcgaatatgtaccgtccgcatgacgaagaactcggcgtattcgtgcagcacgacggcttcctcgataaagacatccgcccagtgtccgcgctttcgcccgacgatttgccgctcaaccagaaatggtcgtgggacaaaatcctgcgttcgcccttcatcaaacaggcggacgtcttgcaaggcatctacttcttcggcgaccgtttcaatatcgacgaaaaacgccgcaacttcgacttctacgaaccgatgaccgtgcatgaaagctcgttgtcgccgtgtatccactctattctcgccgccgaactgggcaaagaagaaaaagccgtggaaatgtaccggcgcaccgcccgcctggacttggacaactacaacaacgacaccgaagacggcctgcacatcacctccatgaccggctcgtggctcgccatcgtccaaggtttcgcccaaatgaaaacctggggcggcaaactcagctttgcaccgttcctgccgggcgcatggacaggctacgccttccatatcaactaccgaggccgtctgattaaagtcgccgtcggcaaagaaaacgtcgtcttcaccctgctcaaaggcgagccgctcgatttgcaggtgtatggcaaagacatcacgctcgacggcagccacgccgccgcgttggaaaaataa

SEQ ID NO: 50584 - DNA, 789 bp, Neisseria meningitidis
atgatggaaaacggaaaaacagtcccgagatggcgttttgccttgaaaagtgcgggctggcatctcttaatcagcctgtcggttgcagggctggcggcattgctggtttttaaggtttggtatccttatccttatgccgagctgacgggagggctgtcgctttatcagctggtggtggctgtcgatattgtatgtggtccgctgctgactttaattttggcaagcccgaagaaaaagacaaaggcacgcatggtcgatttttccatggtcggcatcatccagctggcggctttggtgtacggtctgcacagcgtttctttggcgcgccctgtgatagaggcgtttgaaaaagacaggattaatgttgtgaccgccgccgaagtggcggttgaagatttgcacaaagcgccggaagggctgcaaagcctgtcgtggttcggcatccgccgcattgcattgaaagaacctgaggatgcggatgagaagaacaagacgctggatttgtccctgaaaggtatcgagccgagtatgcgtcccgaccagtggctgccgtattccgacaaggaagcagaagaaatccgcaaacatctgaaaccgctgaaagtcttggcggatgcgagaaaaacgacggttgcggacattctgaaacaggcaggtctcgccgaaggggaggagctgtattacctgccgtttaccagcagcaggcagaaagagtggatagtcattaccgataaagagggcaacaccaaaggctacgcgccgatagacggcttcatcatcaccccttaa

SEQ ID NO: 50585 - DNA, 141 bp, Neisseria meningitidis; identical to SEQ ID NO: 44879

SEQ ID NO: 50586 - DNA, 2595 bp, Neisseria meningitidis
atgtccaaatccgccgtttccccaatgatgcagcaatacctcggcatcaaagcgcaacataccgacaaactggtgttttaccgtatgggcgatttttacgagatgtttttcgacgatgcggtagaagcggcaaaacttttggatattaccctgaccacgcgcggacaggtggatggcgagccggtcaaaatggcaggcgtgccgtttcacgccgccgaacaatatctggcgcgcctggtcaagttgggcaaaagcgtggcgatttgcgaacaggtcggcgaagtcggcgcgggcaaagggcctgtggagcgcaaagtcgtgcgcatcgtaacgcccggcacgctgaccgattccgcattgctggaagacaaggaaaccaaccgtatcgttgccgtgtcccccgacaaaaaatacatcggtttggcgtgggcatcgctgcaaagcggcgaattcaaaaccaagctgacaactgtggataaattggacgacgaactggcgcgcctgcaggcggcggaaattctgttgccggacagtaaaaacgcaccgcaacttcagacggcatcgggtgttacgcgcctgaacgcgtggcagtttgccgccgacgcgggggaaaaactgctgacggaatatttcggctgccaggatttgcgcggcttcggtttggacggcaaagaacacgccgttgcgattggcgcggcaggtgcgctgttgaactatatccgcctgacgcaaaacctgatgccgcaacatttggacggcctgtcgctcgaaaccgacagccaatatatcggcatggacgccgccacgcgccgcaatctcgaaatcacgcaaaccctctccggcaaaaaatcgccgaccctgatgtccacgctcgacctttgcgctacccatatgggcagccgcctcttggctctctggctgcaccaccctttacgcaaccgcgcccacatccgagcgcgccaagaagccgttgccgcgctggaaagccaatacaaacccctccaatgccgtctgaaaaacattgcggacattgaacgcattgctgcccgcatcgccgtcggcaacgcccgcccgcgcgatttggcatctttacgcgacagtctgttcgagttggcacaaatcgacttgtccgcaaacggcagcagcctgttggaaaccctcaaagccgttttcccggaaaacctatccacagccgaacagctccgccaagccattttgcccgaaccttccgtctggctgaaagacggcaatgtcatcaaccacggttttcatcccgaactggacgaattgcgccgcattcaaaaccatggcgacgaatttttgctggatttggaagccaaggaacgcgaacgtaccggtttgtccacactcaaagtcgagttcaaccgcgttcacggcttttacattgaattgtccaaaacccaagccgaacaagcacctgccgactaccaacgccggcaaaccctcaaaaacgccgaacgcttcatcacgccggagttgaaagcctttgaagacaaagtgctgactgctcaagagcaagccctcgccttagaaaaacaactctttgacggcgtattgaaaaaccttcagacgacattgccgcagcttcaaaaagccgccaaagccgccgccgcgctggacgtattgtccacattttcagccttggcaaaagagcggaacttcgcccgccccgagtttgccgactatccggttatccacatcgaaaacggccgccatcccgttgtcgaacagcaggtacgccacttcaccgccaaccacaccgaccttgaccacaaacaccgcctcatgctgctcaccggccccaatatgggcggcaaatccacctacatgcgccaagtcgcgctgattgttttattggcacacaccggctgttttgtgcctgccgatgccgccacaatcgggcccttcgatcaaatcttcacccgcatcggcgcatcggacgacctcgcctccaaccgctccactttcatggtcgaaatgagcgaaaccgcctacatcctgcatcacgccaccgaacaaagccttgttttaatggacgaagtcggacgtggtacttccactttcgacggcctcgccctcgcgcacgccgttgccgaacacctgctgcaaaaaaacaaatccttcagcctgtttgctacccactatttcgagctgacctacctgcccgaagcccacgccgccgccgtcaatatgcacctttccgcgctcgaacagggacaggacatcgttttcctgcaccaaatccaaccgggtcccgccggtaaaagctacggcattgccgtcgccaaactcgccggcctgcctgtacgcgcattgaaatccgcccaaaagcatttgaacggactggaaaaccaagccgccgcgaaccgtccccaactggatattttcagtaccatgccgtctgaaaaaggagatgaaccgaatgtgggcaactttgtggataaatcagaggaaaaacattttgaaggtatattggcagcagccttggaaaaactcgatcccgacagcctgaccccgcgcgaagcattgtcagaactgtaccgtctgaaagatttgtgcaaatccgtatcttaa

SEQ ID NO: 50587 - DNA, 1098 bp, Neisseria meningitidis; identical to SEQ ID NO: 42648

SEQ ID NO: 50588 - DNA, 645 bp, Neisseria meningitidis
gtgacccgccccgccaaaatcaatacttacacacgcatcatcgacgccagccttgcgcttttcaacgaggaaggcgagcgcaacatcagcaccaaccatattgccgcccacttgggcatcagtccgggcaatctctattaccacttccgcaacaaagacgaaatcatcgtccaactgttcaaacgttacagcgaagccctgctggaatacctcaacgaagccgtgttgccgtctgatgtggaagactccatcaattatatggcgggcatttacgacgtgatgtgggaataccgcttcctctttagcgatgtaaacaccctgcttgcccgcagtgccgaattattgggcgaacacaacaccttcacccaagccaaagtctccccgctcttggtcaacctgctgacccagctcaacggtctgaacatcatccaagccgaccaaaccgccatgaacgatctcgccgtcaatatgtggatggtcacgaaatactggttcgacttcgacagctccctgcgcggccgcaccaagctgaccgaagactccaaagcacgcggcatccgccgcaccttaagcctccttcgtccttatcttttgcccgaacaccgcaagaaatacgaccggaaaatcggcaacggcaacccgtaa

SEQ ID NO: 50589 - DNA, 1209 bp, Neisseria meningitidis
atggcggaaagggtgcggtttttatccgaatccgctataaaatgccgtttgaaaaccaatatgccgacaatgggggcggagatgaatacacggaatatgcgctatattcttttgacaggactgttgccgatggcatccgcttttggagagaccgcgctgcaatgcgccgctttgacggacaatgttacgcgtttggcgtgttacgacaggatttttgcagcacagcttccgtcttcggcagggcaggaagggcaggagtcgaaagccgtactcaatctgacggaaaccgtccgcagcagcctggataagggcgaggcggtcattgttgttgaaaaaggcagggatgcgcttcctgccgacagtgcgggcgaaaccgccgacatctatacgcctttgagcctgatgtacgacttggacaaaaacgatttgcgcgggctgttgggcgtacgcgaacacaatccgatgtaccttatgccgctctggtacaacaattcgcccaactatgccccgggttcgccgacgcgcggtacgactgtacaggaaaaattcggacagcagaaacgtgcggaaaccaaattgcaggtttcgttcaaaagcaaaattgccgaagatttgtttaaaacccgcgcggatctgtggttcggctacacccaaagatccgattggcagatttacaaccaaggcaggaaatccgcgccgttccgcaatacggattacaaacctgaaattttcctgacccagcctgtgaaggcggatttgccgttcggcggcaggctgcgtatgctcggtgcgggttttgtccaccagtccaacggacagagccgtcccgaatcgcgttcgtggaacaggatttacgccatggcaggcatggaatggggcaaattgacggtgattccgcgcgtgtgggtgcgtgcgttcgatcagagcggcgataaaaacgacaatcccgatattgccgactatatggggtatggcgacgtgaagctgcagtaccgcctgaacgacaggcagaatgtgtattccgtattgcgctacaaccccaaaacgggctacggcgcgattgaagccgcctacacgtttccgattaagggcaaactcaaaggcgtggtacgcggattccacggttacggcgagagcctgatcgactacaaccacaagcagaacggtatcggtatcgggttgatgttcaacgacttggacggcatctga

SEQ ID NO: 50590 - DNA, 678 bp, Neisseria meningitidis; identical to SEQ ID NO: 48978

SEQ ID NO: 50591 - DNA, 282 bp, Neisseria meningitidis; identical to SEQ ID NO: 43821

SEQ ID NO: 50592 - DNA, 1344 bp, Neisseria meningitidis
atgattaaaatcaaaaaaggtctaaacctgcccatcgcgggcagaccggagcaagtcatttatgacggcccggccattaccgaagtcgcgttgcttggcgaagaatatgccggtatgcgcccctcgatgaaagtcaaggaaggcgatgccgtcaaaaaaggccaagtgctgtttgaagacaaaaagaatccgggcgtggtgtttaccgcgccggcttcaggcaaaatcgccgccatccatcgcggcgaaaagcgcgtacttcagtcggtcgtgattgccgttgaaggcaacgacgaaatcgagttcgaacgctacgcgcccgaagcgttggcaaacttaagcggcgaagaagtgcgccgcaatctgatccaatccggtttgtggactgcgctgcgtacccgtccgttcagcaaaatccctgccgtcgatgccgagccgttcgccatcttcgtcaatgcgatggacaccaatccgctggctgccgaccctacggtcattatcaaagaagccgccgaggatttcagacgcggcctgttggtgttgagccgtttgaccgaacgcaaaatccatgtttgtaaggcagccggcgcagacgtgccgtctgaaaacgccgccaacatcgaaactcatgaatttggcggcccgcatcctgccggtttgagtggcacgcacattcatttcattgagcctgtcggtgcgaacaaaaccgtttggaccatcaattatcaagatgtaattgccattggccgtttgtttgcaacaggccgtctgaacaccgagcgcgtgattgctttgggtggttctcaagtcaacgaaccacgcctcttgcgtaccgttttgggtgcgaaagtatcgcaaattactgcgggcgaattggttgacgcagacaaccgcgtgatttccggttcggtattgaacggcgcgattacacaaggcgcgcacgattatttgggacgctaccacaatcagatttccgttatcgaagaaggccgcagcaaagagctgttcggctgggttgcgccgcagccggacaaatactccatcacgcgtacgaccctcggccatttcctgaaaaacaaactcttcaagttcacgacagccgtcaacggtggcgaccgcgccatggtgccgattggtacttacgagcgcgtaatgccgctagacatcctgcctaccctgcttttgcgcgatttaatcgtcggcgataccgacagcgcgcaggcattgggttgcttggaattggacgaagaagacctcgctttgtgcagcttcgtctgcccgggcaaatacgaatacggcccgctgttgcgtaaggtgctggaaaccattgagaaggaaggctga

SEQ ID NO: 50593 - DNA, 2262 bp, Neisseria meningitidis; identical to SEQ ID NO: 50482

SEQ ID NO: 50594 - DNA, 1806 bp, Neisseria meningitidis
atgcgtaaggtgtgtgcttcagcacgcacgcgttccatgatttacggctcaatgccgtctgaaaagctcacaatttttcagacggcatttgttatgcaagtaaatattcagattccctatatactgcccagatgcgtgcgtgctgaagacaccccctacgcttgctatttgaaacagctccaagtcaccaaagacgtcaactggaaccaggtacaactggcgtacgacaaatgggactataaacaggaaggcttaaccggagccggagcagcgattattgcgctggctgttaccgtggttactgcgggcgcgggagccggagccgcactgggcttaaacggcgcggccgcagcggcaaccgatgccgcattcgcctcgctggccagccaggcttccgtatcgctcatcaacaacaaaggcaatatcggtaacaccctgaaagagctgggcagaagcagcacggtgaaaaatctgatggttgccgtcgctaccgcaggcgtagccgacaaaatcggtgcttcggcactgaacaatgtcagcgataagcagtggatcaacaacctgaccgtcaacctggccaatgcgggcagtgccgcactgattaataccgctgtcaacggcggcagcctgaaagacaatctggaagcgaatatccttgcggctttggtcaataccgcgcatggagaagcagccagtaaaatcaaacagttggatcagcactacatagtccacaagattgcccatgccatagcgggctgtgcggcagcggcggcgaataagggcaagtgtcaagatggcgcgataggcgctgcagtcggtgagattgttggtgaggctttggttaagaatactgatttcagtcgtatgagtgcgaccgaaatcgaaaaatctaaagcgaagattactgcctattcaaaactggttgccggcactgcgactgccgttgcaggcggggatgtgaatgctgcggcaaatgcagcacagatagcggtggagaataatactttgtatcctaaatgcattggtgcaaagtgtgatgaatttcaaaaggaacaacaaaaatggatacgtgaaaatcctgaagaatatcgggaagttttgcttcttcagacgggatttattccaattatcggtgatatacagaattttgtacaagcacagaccgctgctgattacctgtttgctttggtgggtgtggttccgggtatcggtgaatcgatacaggcctataaagtagcgaaagcggcaaaaaatttacaaggcatgaaaaaagccttggacaaggcagcaaccgttgccactgcacagggctatgtcagcaaaaccaaaatcaaaatcggtcaaactgaattaagggttactgcagcaactgacaaacaattgctgaaaaccattagcgaaggaagggacacgacaggtaaaatgaccgagcagttatttgactctttagctaaacaaaatggcttcagagtgctttcgggcggcaaatacggcgcaaataacggttttgatcatgtatggcaggctgccgatggtagtgtcgttttgattgtagaaagtaagcagattaggaacggtacggtacagctgaatccgaatggtgcgggtggatatacgcaaatgagtgaggattggattaaacaagttattactaacttaccagataatcatcccactaaaaacatccttcgagaagcagtacgttcgggtaaaatcaaaactgcggttactggagtagatcgtcaaacaggtaaagcagttattcttcctgtcaaagttccttctaaaaccaatataaggagataa

SEQ ID NO: 50595 - DNA, 720 bp, Neisseria meningitidis
atggcgacactgtccgacaaaaccatcttaattaccggcgcatcgcaaggtctgggcgaacaggtcgccaaagcctatgcggcggcaggcgcaaccgtgattctggtggcacgccatcagaaaaaactggaaaaagtctatgacgcgattgtcgaagccggacaccccgaacccttcgccatccgtttcgacctgatgagtgcggaagaaaaagaattcaatcagttcgccgccaccattgccgaagccacgcaaggcaaactggacggcatcgtccactgcgccggctatttttacgccctctcgccgctggatttccaaaccgtcgccgaatgggtcaaccaataccgcatcaacaccgtcgcacctatggggctgacccgcgccctgttcccgctgctgaagcagtcgcccgacgcgtccgtcatcttcgtcggcgaaagccacggcgaaacacccaaagcctactggggcggcttcggcgcgtccaaagccgcgttgaactacctgtgcaaagtcgccgccgacgaatgggaacgcttcggcaacctgcgcgccaacgtcctcgtccccggccccatcaattccccgcaacgcatcaaatcccatccgggcgaagccaaaagcgaacgcaaaagctacggggacgtgctgcccgcatttgtctggtgggcaagtgccgaaagcaaagggcggagtggcgaaatcgtttacctctaa

SEQ ID NO: 50596 - DNA, 1059 bp, Neisseria meningitidis
atgattacaccgcaacaggctatcgaacgattaatcagcaataatgagttgttttacgatgaaatgaccgacttgatgcgccaaatgatgagcggaaaagtgccgcccgaacaaattgcggcgattttgacaggattgcgtatcaaggttgaaaccgtttccgaaattaccgcagctgcagccgtcatgcgcgagtttgcgacaaaagtgccgctggagaatgcggaggggctggttgatatcgtcggtacgggcggggatggtgccaaaaccttcaatatttcgacgacttcgatgtttgttgccgcagcggcaggcgcgaaggttgccaaacacggcgggcgttccgtttcatcttccagcggcgcggcggacgtgatggagcagatgggcgcaaacctcaacctgactcccgaacagattgcccaaagtatcagccagaccggtatagggtttatgttcgcccccaatcaccacagtgccatgcgccatgtcgccccggtacgccgttcgctcggtttccgaagcattttcaacatattgggtccgttgaccaatcctgcgggcgcgccgaaccagcttttgggcgtgttccacaccgatttgtgcggcattttgtcgcgggtcttgcaacaactcggttcaaaacacgttttagtcgtttgcggggagggcggtttggatgaaattacactgacgggcaaaacgcgcgttgccgaactcaaagacggaaaaatcagcgaatacgacatccgcccagaagatttcggtatcgaaacccgccgcaatttggatgaaatcaaagttgccaatactcaggaatctttgttgaaaatgaatgaggtgctggatgggaaagaaggggctgcgcgcgatatcgtattgcttaataccgccgccgccctatatgccggaaatgtcgctgcttcgctttcagacggcatatctgccgcacgggaagccatcgattcaggcagggccaaatcgaaaaaagaggagtttgtcggttttcaaccacaacaaagatgccattttcttggaaagatggagcttgggtga

SEQ ID NO: 50597 - DNA, 519 bp, Neisseria meningitidis; identical to SEQ ID NO: 42225

SEQ ID NO: 50598 - DNA, 1080 bp, Neisseria meningitidis; identical to SEQ ID NO: 43538

SEQ ID NO: 50599 - DNA, 1356 bp, Neisseria meningitidis; identical to SEQ ID NO: 43735

SEQ ID NO: 50600 - DNA, 621 bp, Neisseria meningitidis; identical to SEQ ID NO: 39955

SEQ ID NO: 50601 - DNA, 375 bp, Neisseria meningitidis
ttggctgaaggtcaaaaatcagccgtcacagagtattacctgaatcacggcatatggcccggcgacaacagttctgccggcgtggcatcttcttcaacaatcaaaggcaaatatgttaaaagcgttgaagtcaaaaacggcgtcgttaccgccacaatgctttcaaccggcgtaaacaacgaaatcaaaggcaaaaaactctccctgtgggccaagcgtcaagacggttcggtaaaatggttctgcggacagccggttacgcgcgacaaagccaaagacgacgccgtcaccgccgccaccggcaagggcaccgccaacatcaacaccaagcacctgccgtcaacagcaccgacaagaaaatcgacaccaaactag

SEQ ID NO: 50602 - DNA, 2907 bp, Neisseria meningitidis
ttgggctacaatcaatcttttaacttttcagacggtataggggtttcccgttgtgaaatactgtttgaggcgcaatgccgtctgaaaccgaaataccgcaacaatagagatcaaaaaatgaccgattacagtaaaaccgtaaacctgctcgagagcccgtttccgatgcgcggcaatcttgccaagcgcgagcctgcatggctgaaaagctggtacgagcaaaaacgctaccaaaaactgcgcgaaatcgccaaaggccgtccgaaattcatcctacacgacggccctccgtatgccaacggcgacatccacatcggtcatgccgtcaataaaatcctcaaagacatcattatccgcagcaaaactcaagccggttttgacgcgccttatgtgccgggttgggactgtcacggtttgcctatcgaagtaatggtggaaaaactgcacggcaaagatatgcccaaagcgcgtttccgcgaattatgccgcgaatacgccgccgaacaagttgcccgccagaaaaaagactttatccgcttgggcgtgttgggcgattgggaccgtccttacctgactatggattttaaaaccgaagccgataccgtgcgtatgcttggtgaaatctacaaatccggctatctctaccgcggcgcaaaaccggttcagttctgcttggactgcggttcttcgctggcggaagcggaagtggaatacaaagacaaagtatcgcctgcgattgacgtgggctatccgtttaaagacactgccgcgcttgccgccgcattcggtttggcaggcatcgagggcaaagcgtttgccgtcatttggacgactacgccttggacgctgccggcgagccaagccgtatcggcgggcgcggacgtggtttaccaactgattgatacgcccaaaggcaaattggtgctggcgaaagatttggcggaagacactttgaaacgctacggcttttcagacggcattgctattctcgccgaaaccaccggcgacaagctggaaaatctgcacatgaaccatccgttcctcgaacgcgatattcccatgctcaacggcgaacacgttaccaccgatgccggtaccggcttggtacacaccgcccccgcgcacggtttggaagactacgccgtctgcaataaatacggcatcgagctttacaaccccgtcaacgccgaaggccgatacatcggcgaaacgccgcgtgtcgccggtatgcgcgtttgggaggcgaaccccgtcatcctgcaatggttggaagaaaccggcaaccttttggcaagcagtaaaatcgaacacagctacgcccactgctggcggcacaaaacgccgctgatttaccgcgcgacaggtcaatggtttgtcggtatggacaaagccggtgccgacggcaaaaccctgcgcgacaaagccatcaaggccgtggacgacaccgaattcttcccgtcttggggtcgtgcgcgtttggaagccatgattgaaggtcgtcctgactgggtggtttcacgccaacgctattggggcacgccgatgactttctttgttcacaaagaaacgggcgagctgcatccgaactctgccgaacttttggaaaaagttgccctgaaaatcgaagaaaaaggcatcgaagcgtggttctccctcgataagagcgaactcttgagcgcggaagattgcgaaaattacgataaactttctgacacaatggacgtatggttcgactccggctcgacccattattccgttgtgaaacaacgcgaagaattggaatggccggctgatttgtatctcgaaggcagcgaccaacaccgcggctggtttcaatcgtccatgctgaccggctgcgcctcatcaatgggtcgcgcgccgtataaacagctgctgacccatggtttcgttgtcgacggcgaaggcaaaaaaatgtcgaaatccatcggcaacgtcgttgcaccgcaagaggtttataacgaattcggcgcagacatcctgcgcctgtgggcggcatctaccgattacagcggcgaattggcgatttccaaagaaatcctcaaacgcgtaaccgaaagctaccgccgtatccgcaataccttgagctttttgtttgccaacttgagcgactttaatccgattgaagatgccgtgcaacaggcggatatggtggaaatcgaccgctacgccgtggtattggcacgtcagctgcaagagcgtctggcaggcgattactatccgcgttatgccttccactttgccgtaaaagacattgtttctttctgctcggaagacttgggtgcgttctacctcgacatcctgaaagaccgcctctacaccaccaaagcagacagccatgcacgccgcagcgcacaaactgccctgtatcacatcacacgcagtttggttctcttgattgcaccgattttgtgcttcaccggcgaagaagcgtgggacatcatcggcggcggcgaagaagacagcgtcctcttccatacttggcacgagttcccgaccatcaacgaaaaaaccgaagccgaactggtgaaaaaatggacggcaatccgcgaagcccgcgaagcggtaaccgccgccatcgagcctttgcgcgccgacaaaaccgtcggttcgtccttgcaagccgaagccgaaatcaccgcgccggaagaaatggccggctacctgaacgccttgggcgaagaattgcgctttgccatgctggtgtctaaagcagaagtgaaagtaggcagcgaacttgccgttgccgctaaagccagtgatggtgaaaaatgcgaacgctgctggcactacacccgcgatgtgggcgcggttgcaggctatgaaaccgtctgcaaacgctgtgcagagaatgtcggcggagaaggcgaaacgcgccattacgcctga

SEQ ID NO: 50603 - DNA, 825 bp, Neisseria meningitidis
atggacggtacgcagtcgaaacccaagtttttcgaacgcctgatctcccgacttgccggcgagcccgactccgccgaagacgtattgaccctgctgcgccaagcgcacgagcaggaagtttttgatgcggatacgcttttaaggttggaaaaagtcctcgatttttccgatttggaagtgcgcgatgccatgattacgcgcagccgtatgaacgttttaaaagaaaacgacagcatcgagcgcatcaccgcctacgttatcgataccgcccattcgcgcttccccgtcatcggcgaagacaaagacgaagttttgggcattttgcacgccaaagacctgctcaaatatatgtttaaccccgagcagttccacctcaaatccattctccgccccgccgtcttcgtccccgaaggcaaatcgctgaccgcccttttaaaagagttccgcgaacagcgcaaccatatggcgattgtcatcgacgaatacggcggcacatccggcttggtcacctttgaagacatcatcgagcaaatcgtcggcgaaatcgaagacgagtttgacgaagacgatagcgccgacaatatccatgccgtttcttccgaacgctggcgcatccatgcagctaccgaaatcgaagacatcaacaccttcttcggcacggaatacagcagcgaagaagccgacaccattggcggcctggtcattcaagagttgggacatctgcccgtgcgcggcgaaaaagtccttatcggcggtttgcagttcaccgtcgcacgcgccgacaaccgccgcctgcatacgctgatggcgacccgcgtgaagtaa

SEQ ID NO: 50604 - DNA, 525 bp, Neisseria meningitidis
atgaaaaaagcacttgccacactgattgccctcgctatcccggccgccgcactggcggaaggcgcatccggcttttacgtccaagccgatgccgcacacgcaaaagcctcaagctctttaggttctgccaaaggcttcagcccgcgcatctccgcaggctaccgcatcaacgacctccgcttcgccgtcgattacacgcgctacaaaaactataaagccccatccaccgatttcaaactttacagcatcggcgcgtccgccatttacgacttcgacacccaatcgcccgtcaaaccgtatctcggcgcgcgcttgagcctcaaccgcgcctccgtcgacttgggcggcagcgacagcttcagccaaacctccaccggcctcggcgtattggcgggcgtaagctatgccgttaccccgaatgtcgatttggatgccggctaccgctacaactacatcggcaaagtcaacactgtcaaaaacgtccgttccggcgaactgtccgccggcgtgcgcgtcaaattctga

SEQ ID NO: 50605 - DNA, 1095 bp, Neisseria meningitidis
atgaaaaccaatctgctcaactacgaccttcaagggctgacccgacattttgccgatatgggcgaaaaacctttccgtgccaaacaggttatgcgttggatgcaccaatccggcgcgcaaaattttaacgaaatgaccgatttggcaaaatcgttgcgccataaactgaacgaacaggcaggcatcgaaattcccaagctgatgatgtctcaaaaatcttcagacggcactcgaaaatggcttttggatgtcggtacgggcaacggggtggaaaccgtcttcatccccgaatcggatcgcggcacgctctgcatttcctcacaagtcggctgcgctttggaatgtacattttgttcgaccggccggcagggcttcaaccgcaatttgactgctgccgaaatcatcgggcaattgtggtgggcaaacaaagcgatgggcgttacaccgaaaaacgagcgcgtgatttccaacgtcgtcatgatgggcatgggcgagccgatggcgaacttcgacaatgtcgttaccgccttaagcatcatgctggacgaccacggctacggtttgagccgccgccgcgtaaccgtttccacttcgggtatgattccccaaatggacaggttgcgcgatgtcatgccggtggctttggcggtttccctccacgcttccaatgacgaagtccgcaaccaaatcgtaccgttgaacaaaaaatatcccttgaaagaattgatggccgcatgccaacgctatctggtcaaagcacccagggatttcatcactttcgaatacgtcatgttggacggaataaacgataaggcgcaacatgcgcgcgaactgatcgaactggtcacagatgttccctgcaagttcaatctgattccgttcaatcccttcccaaactccggatacgaacgctccagcaatgagaacatccgtgtgttccgcgatattttgcagcaggcaggatttgtcgttaccgtacgaaaaacgcgcggcgacgacatcgatgccgcctgcggacagttggcggggcaggttcaggataaaacgcgccgccaacaaaaatggcagcagattttaatcggacaacaggggtaa

SEQ ID NO: 50606 - DNA, 927 bp, Neisseria meningitidis
ttgggtaggccgtttcttgtgtcaggaggaaatatgattattgtcatgagcaggcgtgccgccgaagcggacattgccggcgttgtcgcctttatccgcagcagaggtctgcgagaacacatttctcacggcgacgagcgtactgtcatcggcgcaatcggcgacgatagggttttgagcgtcagggaggtgcagacgctgccggaggtcgagaaagccgtccgcattttggatacatggaaaaccgtcagtcgggaaaatcgggcggaagacagccgcgttgccgccaaaggcgtggctttcggcggcggggaaaccgtccgtatcgccgcagaaccgtcagtatggcgcaatgcggatgcagtgtttctggatccgtttttcacttcggcaaacttatacgacacttcaagtgcggatgaagggcggggacggtgcagacggttggcggaacagaccgcatcggcgcatgatgcagggaaacccgtattggtgcgcgtccgcaacgtccgccatgtcgaagcggctttgaatgcgggggcggacatcctgtatttgggcggcgggctgatgtccgatcttgccgtattgaatgaagccggaaacctgaacattcccttggtgctgtgtaaagacaagcaccattctgccgaagattggttgaatgccgcagaatatgtcgtctcgcgcggcaaccgccacctgattctgggcgagtcgggcgtattgaaccataccaaaggccatccctaccgtttggatgtcgaatccatcgtgaaagtccgccaaatcagccatctgcccgtgattgcgaatattacgggattatggaaccgcgatatgccgcaggaaatcctgtacggcttggcaaaggcggcaggcgcgtgcggaatcgtcggaacctgttttgaaaagtcgggcggatag

SEQ ID NO: 50607 - DNA, 345 bp, Neisseria meningitidis; identical to SEQ ID NO: 36580

SEQ ID NO: 50608 - DNA, 240 bp, Neisseria meningitidis; identical to SEQ ID NO: 43044

SEQ ID NO: 50609 - DNA, 855 bp, Neisseria meningitidis; identical to SEQ ID NO: 46280

SEQ ID NO: 50610 - DNA, 840 bp, Neisseria meningitidis
atgaaacaactccgcgacaacaaagcccaaggctctgcactgtttacccttgtgagcggtatcgttattgttattgcagtcctttatttcctgattaagctggcgggcagcggctcgttcggcgatgtcgatgccactacggaagcagcaacgcagacccgtatccagcctgtcggacaattgacgatgggcgacggcatccccgtcggcgaacgccaaggcgaacagattttcggcaaaatctgtatccaatgccacgcggcggacagcaatgtgccgaacgctccgaaactggaacacaacggcgattgggcgccgcgtatcgcgcaaggcttcgataccttgttccaacacgcgctgaacggctttaacgccatgcctgccaaaggcggtgcggcagacctgaccgatcaggagctcaaacgggcgattacttacatggcgaacaaaagcggcggttctttcccgaatcctgatgaggctgcgcctgccgacaatgccgcttcaggaacagcttctgctcctgccgatagtgcagctccggcagaagcgaaggcagaagacaagggtgcggcagcccctgcggtcggcgttgacggtaaaaaagtcttcgaagcaacctgtcaggtgtgccacggcggttcgattcccggtattcccggcataggcaaaaaagacgattgggcaccgcgtatcaaaaaaggcaaagaaaccttgcacaaacacgcccttgaaggctttaacgcgatgccggccaaaggcggcaatgcaggtttgagcgatgacgaagtcaaagcggctgttgactatatggcaaaccaatccggtgcaaaattctaa

SEQ ID NO: 50611 - DNA, 288 bp, Neisseria meningitidis
gtgtttcagacggcattggacagcagatgccgtctgaaacccttatcgcgtatggcatacacatcaacaataggaaaaaatatggatgaagcagtttttgccgattgggcgttgaaaatctgcctgaccggcttgattatttttttgggttttatcgtttggaatttgggcaaggagtccaaagcaggcaaattcggcatcgccattttgtttttggttttgggcttgggcgtgttcggttttgtgttcaaagagttattgattaagtttttggtattgccgaaatag

SEQ ID NO: 50612 - DNA, 216 bp, Neisseria meningitidis
atgaccatcacagaagaatactccatcgacatccgcgtaaccgcagaacaggggaaaaacgactacggctaccccaccgaacgctacggatgcgacatcatcaacacagacggggagctgcttgtcggcatagagccagagtacaaaaccccctttgccgccgtcagacaagcgctcatctgtctgacaaaagacaacctcaaaaacgctgcctga

SEQ ID NO: 50613 - DNA, 288 bp, Neisseria meningitidis; identical to SEQ ID NO: 36767

SEQ ID NO: 50614 - DNA, 969 bp, Neisseria meningitidis; identical to SEQ ID NO: 42633

SEQ ID NO: 50615 - DNA, 726 bp, Neisseria meningitidis
atgccccgattccacctgcccgaaaacctttccgtcggacaaaccgtcgccctgcccgacaacatcgtccgccacctcaacgtcctgcgcgtccgccccaacgaaaacatcaccctcttcgacggcaaaggcaaggcacacgccgcacggctgaccgttttggaaaaacgccgcgccgaagccgaaatcctgcacgaagacacaaccgacaacgagtccccgctcaacatcacactgatacaatccatctcctccggcgatcgcatggatttcaccctgcaaaaaagcgtcgaactcggcgtaaccgccatacagcccgtcatcagcgaacgctgcatcgtccgcctcgatggggaacgcgccgccaaacgcctcgcacgctggcaggaaatcgtcatctccgcgtgcgaacaaagcggcaggaacaccgttccccccgtactgcccatcatcggctaccgtgaagcactcgacaaaatgccgtctgaaagcaccaagctgattatgagcatcaaccgcgcccgcaaactcggcgacatacgccaaccgtccggcgcaatcgtctttatggtcgggcccgaaggcggctggacagaacaggaagaacaacaggcatttgaagctggctttcaagcggttacactcggcaaacggattttacgcacagaaaccgccccactcgccgccctcgccgccatgcagacgctttggggcgatttcgcataa

SEQ ID NO: 50616 - DNA, 474 bp, Neisseria meningitidis
atgactgatttttccgtttgggagaccgccccctttggtgcaaccgtcgatcatatcctgcaacgctaccacaatgtccaccgtgcacaatttgaagaattggtgccgctggcgcaaaaagtggcccaagttcatgccgacacctttccggcggaaattgccgagctgcttgcctatatgcagaacgaactgctgatgcatatgatgaaagaggaaaggatgctgtttccgatgattaatcagggtgtcggccggggtgcgacgatgcccatcagcgtgatgatgcacgaacatgaagaacacgaccgcgccatcgcacggctcaaagagctgaccgataatttccaagcgcccgaaggagcctgcggaagctggacacggctttacgttttgaccaaagaaatggtggacgacttgaacgaccacattcatttggaaaacgatattctgtttgcccgcgtactcgattcttaa

SEQ ID NO: 50617 - DNA, 492 bp, Neisseria meningitidis; identical to SEQ ID NO: 39850

SEQ ID NO: 50618 - DNA, 1875 bp, Neisseria meningitidis
ttgcacccgatattcggacgcaacgccgtttgttcagacggcatttcccaaacccactgtccgacattcaaaacaactctaatgaaaaatatccgaaatttctccatcattgcccacatcgaccacggcaaatcgacgcttgccgaccgcttcatccaatattgcggcggtttggatttgcgcgaaatgagtacgcaggtactcgattccatggacatcgaaaaagagcgcggcattaccatcaaagcgcaaaccgccgcgctcaactataaagcgcgcgacgggcaggtgtatcagcttaatttgattgacacgccgggacacgtcgacttctcttacgaagtatcccgttcgctgtcagcttgcgaaggcgcgcttttggtggtcgatgcgtcccaaggtgtagaagctcaaactgtggcgaactgctataccgcgattgatttgggcgtggaagttgtgcctgttttgaacaaaatcgacctgccggccgccgaccccgagcgcgtggagcaggaaattgaagacatcatcggcattgatgccgttggtgcggtacagtgttccgctaaaagcggcattggtgtggaagatgttttggaagaaatcgttgccaaagtccctgcgccaaccggtgatgaaaatgcgccgttgcaagcggttattgttgattcatggtttgacaactacgtcggcgtagttatgttgattcgtgtgaaaaacggcaccatcaagctgaaagacaaagtgcgctttatgagcaccaaggcggaaactcaggttgagcagctgggcgtttttacgccgaaatcggttcaaaaacaagaactcaaagccggagaagtgggctttttgattaccggcgtgaaagaattgggacaggcgaaagtcggcgatacggttactttggttgccaaccctgcctctgagccgctgcccggcttccaagaggtgcaaagccaagtattcgcgggtctctaccccgtagaaagccacgactatgaagccttgcgtgacgctttggaaaaattacagcttaacgacgcttcgctaaaattcgagcctgaagtttcccaagcattgggcttcggcttccgttgcggcttcttgggtctgttgcacttggaaatcgtgcaggaacgcttggagcgcgagttcgacatggatttgattaccaccgcgccgacggtggtttatgaagtcgtgttgaaaagcggcgaaaaaatcgaagtcgaaaatccgtccaaactgcccgacatcggcagcatcgaaaccatactcgagccgattattaccgcgaccatcctcgtgccgcaggaatacgtcggcaacgtcatgactttgtgtaaccaaaagcgcggcgttcaggtcaatatgcaatatatgggccgccaagtcatgctgacttatgatttgccgatgaacgaagtcgtcatggacttcttcgacaaactcaaatccacttcgcgcggttatgcttcgttggactaccatttcaaagagttccaaccgtctgatttgattaagctggatattatggtcaacggcgaaaaagtcgatgcattaagcctgattgtgcaccgtcaaagcgcggttcaccgaggccgcgagctggcatcaaaaatgcgcgagctgattccgcgccaaatgttcgacatcgccgtccaagccgccatcggcagccagattatcgcccgcgaaaacgtcaaagccctgcgtaaaaacgttttggcgaaatgttacggcggcgatattacgcgtaagaaaaaactgcttgaaaaacaaaaggcaggtaaacgccgtatgaaacaagtgggcaatgtggaaattccgcaaagcgcgttcttggcgattttgcaggtgagcgacaaataa

SEQ ID NO: 50619 - DNA, 618 bp, Neisseria meningitidis
atggtcattgcagccattatggcgatgatagccctccccaatatgagccaatggattgcatcccgccgcattgccagtcacgcggagcggattgccaaccttttgcgtttctccaggggcgaagccgtccggctcaatctccctgtctatatctgtcctgttcaagttaaaaaagacggtacggccaacaataaatgtgactccggcaagaaggggcagggaatgttggctttcggcgacaaaaacggcaataagggatatgacaatgatacggcggatgttcttctccgcagtgtggtattgaatgatgatatcaatgataagcggattaattatgccttcaaccatatcgcttttggtcagactcagccgaccaccgaccgtgtagtttggacattcaatcaaaacgggacgttcggttatacgaaagaccagcatcttacaaaacaatccagctttttttattccgacggttatatccaaatcgtgctgacagatgcgagagcagtttcagatgccgataagaaattccgttcggcggtggttttgattgacagcagcggcagggttgaggtttgtcctagaaacgataggcgtaccgtatgccaatataaatga

SEQ ID NO: 50620 - DNA, 780 bp, Neisseria meningitidis; identical to SEQ ID NO: 38358

SEQ ID NO: 50621 - DNA, 1128 bp, Neisseria meningitidis
atgagcaactggaaacccgatattccctataacgatttaccacccctgccgccaaaacaggatattgaaagcaaaaccatcctgaaacgttgtatagccgcccgtgcatcccttgcccgtttaaagcaggcggcagaactgataccgaatcaagccatgctgattaacacccttcctgttatggaagcccgtgcaagttcagaaattgaaaacatcgtaaccacaacggataagctgtttcaatccctgcaaatggatacggaacggcaagaccctgccacgaaagaagccctgcaataccgcaccgccctgtttgcaggctatgaatcactgacgagccgccctttatgcacacaaaccgccatcatagtctgcaacgccatcaagcacccctacgaaatggccatccgcaaaacaggcggcacagccctaaaaggaggcaacagcggaaatgttgtctataccccgcccgaaggagaagaaaccatacgcggcaagctggcaaattgggagcggtttattcacgaaagcggcgatttagacccgcttatcatcatggcggcggcacattaccaatttgaagccatccatccgtttacggacggcaacgggcggacggggcgcatattgaacagcctgctattgattgataaagggcttttggatttgcctattttgtatttgagccgctatattatcgaaaacagggcggactattaccgcctgcttttaggcgtaaccgaacggcaggactgggaaagctggataatctacatcttagacggcgtagccgataccgccgattggacggtagcgaaaatagatgcgatacgccgcctgtttgagcagacacggcaacacatacggacacacgcacaaggaatctacacgcacgaactggtaaatcttctgtttgaacagccatatacacgcattgccaacctagaagcggcagggatagccaaacggcagacggcttctaagtatctgaaagagctctcagacataggtgtgctgcaagaaatcgccatcggcagggacaaactattcattcatccgcgcctaatggaactattgcggggagagggcaacagctttacctcattccaatccctcgttaaagcatag

SEQ ID NO: 50622 - DNA, 1437 bp, Neisseria meningitidis
atgccgctgctgtctgtcgagttcgcactgttctttctcgccttcctgccgatttactggggcttggcgaaatacccgtccgtccaaaacctgctgcttttggctgccggtatgggctggctctaccatatcggccccgtatttgcggcaatcgtcgtcctttattcctcctgcgtgtaccttttgggcgaactgctccgttccgatcgcgaaaatacgcgccgcttttggctggggtgcggcattgccgtctcgctgaccgtcttgggctttttcaaatatttcgactttttccgcccgctgattgcacaatatgccggacaaggcggcgcaatcgacatcctgatgccgctggggctttcgtattacaccttccagtcgctcgcctatctggtttactgcttccgcgccccgcacgccgcgcgtttcgagtggcacgagctgctgctgcacctgagttttttccccaccgttacctccggcccgattatccgcgccgccgcattcaaaagcgcagacggcgagcaggcgggcgcattggcgcaaatccgtacccaccaaccacgctcacccgtccgccccgcactcgccgtttccctgattctgctgggtattgccaaaaaatggtggctggcggggatgctcgcagaaaactgggtatcgcccgtatttgaaaatcccgcccaattcgacggctggggcgtattggcgggcgtgtacggctataccttccaactctttttagacttttccggatattccgacttggttatcggaatggcaatgctgctgggcttccggctgcccaaaaacttctccgcaccgcttcgtgccgcgaatatccgcgcattttgggacaaatggcacatcagcctttccacctggatacgcgactacatctacatccccttgggcggcagcaaaaaaggctttttgcggacacagttcaacctgatggcggcaatggtgctctcaggcatttggcacggctacggctggaacttcctcatttggggcgcgctgcacggcacggcgctggtgctgctcaacacgggcgatcgctatttcggacgcaacgcgctatgccgtctgaaataccttgcgccgctctcgtggtttgttaccttccatttcgtctgccttagctttgttgtcttcaataccgcaagccccgacgatgcaggcgcagttttcaatgccctctttgccaatgccaacggctggaatgcgccgcaacaggcaaacatgctgctgcttgcctcgtttgcatccgtgatgctgctctacccttacctgcaacgcgctttcgacggcgcggtcaaaggtttggaaaaaatcccgatgtggctgtggtttatccccgtttccgccgtcctgctgctgattatcgtattggccccctcggggatacccggctttatttatgccaatttttaa

SEQ ID NO: 50623 - DNA, 729 bp, Neisseria meningitidis
atgtctcaaattactatgcgtcagatgattgaagccggtgtccacttcggccaccaaacccgtttctggaacccgaaaatggcacaatacattttcggtgcgcgcaacaaaatccatatcgtcaacctggaaaaaaccctgccgatgttccaagacgcgcaagaagccatacgccgtctggttgccaacaaaggtacagtattgttcgtaggtaccaaacgccaggcacgcgacatcatccgcgaagaagcgacccgcgccggtatgcctttcgtcgattaccgctggttgggcggtatgctgaccaactacaaaaccgttaagcaatccatcaaacgcctggaagaaaaaaccgcagccttggaaaatgctgccgaaagcggtttcagcaaaaaagaaattctggaaatgcaacgcgatgttgaaaaactggaacgttctttgggcggtatcaaaaacatgaaaggcctgcccgacgcgattttcgttatcgataccggctaccaaaaaggtactctggtcgaggctgaaaaactgggcatccccgttatcgccgtagtcgataccaacaacagccctgacggcgtgaaatacgtcatccccggcaacgacgactccgccaaagccatccgcctgtactgccgcggcatcgctgacgcagttttggaaggcaaaaaccaagcgctgcaagaaaccgtagccgctgcccaagaagccgctgccgagtaa

SEQ ID NO: 50624 - DNA, 150 bp, Neisseria meningitidis; identical to SEQ ID NO: 41322

SEQ ID NO: 50625 - DNA, 1575 bp, Neisseria meningitidis
atggctcaaatccaaatgagcgcaaatgttaaaaccatcaacgccgtctttgccgccatgctggtaggtacagtcggctattttatttattggggcttgggttatacccattacaattacgccgccttattcattattgccacgatgttcggcgtgtttatggcgttcaacatcggcggcaacgatgttgccaattctttcggcaccagcgtcggtgcgggtacgctgaccatcccgcaggctttgctgattgcggcggtatttgaggtcagcggcgcggtcatcgcgggcggcgaggtaaccaataccatacgcaaaggcatcgtcgatttgaagggtgttgatttcgaacccatacagtttgtgtttattatgatgtccgcgcttttggcggcggcgttgtggctgttgtttgcctcgaaaaaagggcttccggtatctaccacccattccattatcggcggcattgtcggcagcgcggtatgtatggcggtaatgaacgatgccgcatcgggcgatttgatacgttggggcaagctgggcggtattggtgtttcttgggtattgtcgcccgtgttgggcggcgcggtgtcctatttcctgttttcgcgcgtcaagaaaaacgtcttagattacaacgcttgggcggaaggcacgctcaagggcatcaagcaggaaaaaaaggcctataaagaacggcaccgcctgtttttcgagggtttgtccgaagccgaaaaagtcgagtacgccaccaaaatggcgcacgacgcgcaaatttacgacgaacccgaattcgatccgcaagagctgcaatcggagtattaccgcggtctttatgcgttcgacaaccgtaaaaacaatgtcgattcctacaaggcactgcattcttggattccctttatcgcttcgttcggcgcgatgatgatttccgctatgctgattttcaagggcttgaaaaacctgcatttggggatgagcaacgtcaacagcttcctgaccatctttatgataggcgcggcggtgtggatggggacgtttgtttttgccaaaagcctcaagcgtaaagacttgggcaaatcgacctttcagatgttttcatggatgcaggtctttaccgcctgcggcttcgcattcagccacggtgcgaacgatatcgccaacgccatcggtccgtttgccgcgattatggatgttttgcgtaccaacagcgttgccgcgcaaaatgtcgtccccccgattgcgatgctgactttcggcatcgcgctgattgtcggtttgtggtttgtcggtaaagaggtgattaaaaccgtcggtacgagtttggccgaaatgcaccccgcctcgggttttaccgccgaactgtccgccgcatccgtcgtgatgggcgcgtcgctgatggggctgcccgtgtccagtacgcatatcttggtcggcgcggtactcggcatcggtctggtcaaccgcaatgccaactggaaactgatgaagcccatcggtttggcgtgggtcattaccctgcctgccgccgccgtattgtcggttgtctgctacttggttttacaggcagtattctga

SEQ ID NO: 50626 - DNA, 240 bp, Neisseria meningitidis
atgattctcaacatacgcaaaatgggaaactcgcaaggcgtgattctgcccaaatcattattgagtcaaataggggcagtggacagcttggctgttacagttgaaaagggcaatattattttaagctgtcctaccgttcgcaggggatgggcagaagctgccgcaatgcttgtcgaaaccgagcaggagcattttttttccgaaattgaaaacgaagcggataaagaatggatatggtag

SEQ ID NO: 50627 - DNA, 546 bp, Neisseria meningitidis
atgaaaaaacaaatcaccgcagccgtaatgatgctgtctatgattgcccccgcaatggcaaacggcttggacaatcaggcatttgaagaccaagtgttccacacgcgggcagatgcaccgatgcagttggcggagctttctcaaaaggagatgaaggagacagagggggcgtttcttccattggctatcttgggtggtgctgccattggtatgtggacacagcatggttttagttatgcaacgacaggcagaccagcttctgttagagatgttgctattgctggcggattaggcgcaattcctggtggtgtaggtgccgcaggaaaggttgtttcctttgctaaatatggacgtgagattaaaatcggcaataatatgcggatagcccctttcggtaatagaacaggtcatcctattggaaaatttccccattatcatcgtcgagttacggataatacgggcaagactttgcctggacagggaattggtcgtcatcgcccttgggaatcaaaatctacggacagatcatggaaaaaccgcttctaa

SEQ ID NO: 50628 - DNA, 735 bp, Neisseria meningitidis
atgacgacacgccaaatcatcctcgataccgaaaccaccggtctgtatgccgacggcggcgaccgcttggtcgagtttgccggtctggaaatggtcaaccgccaaatgaccgacaaaaacctgcacctctatgtccaccccgagcgcgatatgcccgaagaggcggcgagggtgcacggtctgacgatagaggttttggaagggaaaaacgcgccgccgtttgcagaggtcggcaggcagattgccgatttcctgcgcggtgcggaactgattatccacaatgccaaattcgacgtgggcttcctcaatatggagttccgccggatggggttgccgaccgttgaggaactcggctgtaccgttaccgataccctggcgatggcgcgcgaaatgttccccgggcagaaagccagcctggatgccttgtgcaaccgtttttccgtcgaccgcagcaagcgcgtcctgcacggcgcgctgatcgactgcgagcttttgggcgaagtttatttagcgatgacgcggcggcaattcgacctgatgggtgcggccgcagaggaaaaaatggaaaccaaacccgtggcgcataccgaaaccaaacgcagcggcaaactgaaagtcatcagggcggacgaaaacgagttggcggagcacgggcgatatttggacggcttgggcgaagcctgtatctggcgcaagacgcagatgccgtctgaaaacggcgggacggaggcatga

SEQ ID NO: 50629 - DNA, 366 bp, Neisseria meningitidis
atggaaaaaccgcttctaactcctcctttttttctatttgaagatgtgtctttggatatatttcaaggattgtcggaattggaaaagaaaatagagccgcaggatttgatggatgatgtttaccgtgcttttgattcggttggaaatattctgaatttccatatagtagaaaaagagcaaaaagggttttgggtaagtaccaaaatcaaaacagttgtatttgattcggcagatatgtcttctgatgatctttttctgaaatgcttacagtcttcatataaggcttattttgaaactgaacctgccggtttagataaacggcagctgatgaaaacgttaattcaaaaatgcggattcagttgttga

SEQ ID NO: 50630 - DNA, 417 bp, Neisseria meningitidis
atgcttaaacatctcgcattcctactgcccgccatgatgttcgccctccccacttcggccgccgtcctgacttcctatcaagaacccggctgcacctacgacggcgatgtcggaaaagacgggcttctttcaggcaaaggcatatggcgttgccgggacgggcgcggttataccggttcgttcaaaaacggcaaattcgacgggcaaggcgtttataccgttgccgccaaccgcgaagtatttctcgagccgttcaattccgacagtaccaaattccgcaatatggcattgtcgggcacgttcaaaaaaggcttggcacacggcagatttaccgtctcgcaaaacggcgaaaccctcttcattatgaaatgcgaaaacggcatgattaaagaagtgaagctgcccaaaaacaaataa

SEQ ID NO: 50631 - DNA, 1194 bp, Neisseria meningitidis
atgttcttcaagcacatcgaagccgcccccgccgatccgattctcggtttgggcgaagcattcaaagccgaaacccgccccgaaaaagtcaacctcggcatcggcgtttataaagacgcatccggcgcaacacccctcgtcaaagccgtcaaagaagccgaaaaacgcctgttggaaagcgaaaccaccaaaaactacctcaccatcgacggcgttgccgactacaacgcgcaaacccaaatcctgctgttcggcaaagaccacgaaatcatcgccagccgtcgcgccaaaacagcgcaaagcctcggcggtacgggcgcattgcgtattgcggccgagtttgccaaacgccagttgaacgcgcaaaccatctggatttccaatccgacctggcccaaccacaacgccatcgccaaagcggtcggtatccaagacaaaccttatcgttactatgatgccgccaaacacggtttggattgggacggcatgattgaggacttgagccaagcgcaaaaaggcgacatcgtcctgctgcacggctgctgccacaatcctaccggcatcgaccctacgcccgaacaatgggaaactttggcaaaactttctgccgaaaaaggctggttgccgctgtttgactttgcctaccaaggcttcggcaacggtctggaagaagatgcctacggcttgcgcgtgttcttgaaacacaatacagaattgctgattgccagctcttattccaaaaacttcggtatgtacaacgagcgcgtcggcgcgttcactttggtggccgaagatgaagaaacagcagcccgcgcccacagccaagtcaaaaccatcatccgtaccttgtattccaacccggcttcacacggtgcgaacaccattgcgctggtgttgaaaaatgatgatttgaaagcacaatggattgccgaactcgatgaaatgcgcggccgcatcaaagccatgcgccaaaaatttgtcgagttgctcaaagccaaaggtgcaagccaaaactttgatttcattatcgaacaaaacggtatgttctctttcagcggcttgactcccgaacaagtcgaccgcctgaaaaacgagtttgccatttatgccgtccgttccggccgcatcaacgtcgccggcattaccgacaacaacatcgattatctgtgcgaaagcatcgtgaaagtactgtaa

SEQ ID NO: 50632 - DNA, 165 bp, Neisseria meningitidis; identical to SEQ ID NO: 42784

SEQ ID NO: 50633 - DNA, 936 bp, Neisseria meningitidis; identical to SEQ ID NO: 42109

SEQ ID NO: 50634 - DNA, 159 bp, Neisseria meningitidis; identical to SEQ ID NO: 48769

SEQ ID NO: 50635 - DNA, 918 bp, Neisseria meningitidis; identical to SEQ ID NO: 49476

SEQ ID NO: 50636 - DNA, 1779 bp, Neisseria meningitidis
atgacggttttgaagccttcgcactggcgggtgttggcggagcttgccgacggtttgccgcaacacgtctcgcaactggcgcgtatggcggatatgaagccgcagcagctcaacggtttttggcagcagatgccggcgcacatacgcgggctgttgcgccaacacgacggctattggcggctggtgcgcccattggcggttttcgatgccgaaggtttgcgcgagctgggggaaaggtcgggttttcagacggcattgaagcacgagtgcgcgtccagcaacgacgagatactggaattggcgcggattgcgccggacaaggcgcacaaaaccatatgtgtgacccacctgcaaagtaagggcagggggcggcaggggcggaagtggtcgcaccgtttgggcgagtgtctgatgttcagttttggctgggtgtttgaccggccgcagtatgagttgggttcgctgtcgcctgttgcggcagtggcgtgccggcgcgccttgtcgcgtttgggtttgaaaacgcaaatcaagtggccaaacgatttggtcgtcggacgcgacaaattgggcggcattctgattgaaacggtcaggacgggcggcaaaacggttgccgtggtcggtatcggcatcaatttcgtgctgcccaaggaagtggaaaacgccgcttccgtgcaatcgctgtttcagacggcatcgcggcggggaaatgccgatgccgccgtgttgctggaaacgctgttggtggaactggacgcggtgttgttgcaatatgcgcgggacggatttgcgccttttgtggcggaatatcaggctgccaaccgcgaccacggcaaggcggtattgctgttgcgcgacggcgaaaccgtgttcgaaggcacggttaaaggcgtggacggacaaggcgttctgcacttggaaacggcagagggcaaacagacggtcgtcagcggcgaaatcagcctgcggcccgacgacagaccggtttccgtgccgaagcggcgggattcggaacgttttctgctgttggacggcggcaacagccggctcaagtgggcgtgggtggaaaacggcacgttcgcaaccgtcggtagcgcgccgtaccgcgatttgtcgcctttgggcgcggagtgggcggaaaaggcggatggaaatgtccgcatcgtcggttgcgctgtgtgcggagaattcaaaaaggcacaagtgcaggaacagctcgcccgaaaaatcgagtggctgccgtcttcggcacaggctttgggcatacgcaaccactaccgccaccccgaagaacacggttccgaccgctggttcaacgccttgggcagccgccgcttcagccgcaacgcctgcgtcgtcgtcagttgcggcacggcggtaacggttgacgcgctcaccgatgacggacattatctcgggggaaccatcatgcctggtttccacctgatgaaagaatcgctcgccgtccgaaccgccaacctcaaccggcacgccggtaagcgttatcctttcccgaccacaacgggcaatgccgtcgccagcggcatgatggatgcggtttgcggctcggttatgatgatgcacgggcgtttgaaagaaaaaaccggggcgggcaagcctgtcgatgtcatcattaccggcggcggcgcggcaaaagttgccgaagccctgccgcctgcatttttggcggaaaataccgtgcgcgtggcggacaacctcgtcattcacgggctgctgaacctgattgccgccgaaggcggggaatcggaacatacttaa

SEQ ID NO: 50637 - DNA, 861 bp, Neisseria meningitidis
atggcaaaagtaaaaggcggattggggcgcggtttggattcgctgctcgccaacggcgcagacaacagcagcggcgaccgattgaccacggttgcggttaaagatatccggcccggccgctatcaggcgcgtgttcaaatcgatgacgaagccttgcaggagctggcagattcgattaaggcgcaaggcgtgatacagcccgtcatcgtgcgcgaacacggactgtcccgatacgaactgattgcaggcgaacgccgttggcgcgccgcacagattgccggcctgaccgaaatccccgccgttatcaaaaccatcagcgacgaaaccgcattggcaatgggtttgatcgaaaacctccagcgcgaaaacctcaaccccatcgaagaagcacaaggcttgaaacgccttgccgacgagttcgggctgacccacgaaaccatcgcccaagccgtcggtaaaagccgaagcgcgatttccaacagcctgcgccttttaagcctgcccgaacccgtgcaggaaatgctttaccaacgccgcctcgaaatggggcacgcccgcgcattgctgaccctgcccgtcgtcgaacagctcgaattggcgcaaaaggccgtcaaaaacggctggtcggtgcgcgaagtcgaacgccgcagccaggtcgcccttcaaaacaaacgtcccgagcccaaaaagactgccgccgccgacatcggccgcctgaatgatttgctgactgaaaaactgggtgtcaacgccgaaatcaaaaccgccaatcataaaaaaggcagaatcatcctgcatttcgacacgcccgaaaccttcgaccatatcttgaagcagttgggcatagattaccgaccttaa

SEQ ID NO: 50638 - DNA, 936 bp, Neisseria meningitidis
atggggcacaatatgatgaccacccaaaaatggtatgagcatattactaatgtaatcataggcaatactgctaatttcaatagcggttgccctgaagctatagattatgtagatgaaagaaaaggcgttccgcttgcagcgatgagacatattttaatgtatactgaagctgcggcttcccatgcctatctatttgaacatgatcttaagaaattcaagcaatatgcttatgttgcaggaaagctgggtattttgcggagtgtaaattctacagaccctgaacccttcttctttccctgtgacatgctcaacattcaagatccgatgtttctgatgctgatgagcgacagcccgcagctgcgcgagtttttggtgcgcaatatcgacaacatcgccaacgatacagaagccttcgtaaaccgctacgacctcaaccgtcatatgatttacaatactctgctgatggtggaaggtaagcagcttgatcggttgaaacaacgtagcgagaaagtcttggcgcatcccacccctagcaaatggctgcaaaagcggttgtacgattaccgcttcttcctcgctttcgccgaacaggatgccgaggcgatgaaggccgccttagagccgcttttcgataaaaaaaccgcgcgtatggctgccaaagaaacattgtcctatttcgatttctacctgcagccgcaaatcgttacctacgccaaaatcgcatccatgcacggtttcgatttgggcatagaccacgaaatcgcaccgagggatttgattgtttacgatccgctgccggcagacgaatatcaagacatcttcgattttatgaaacagtatgacttgtcttacccgtatgaatatctgcaggattggatagattactatacgttcaaaaccgataagctggtatttggtaacgcgaagcgagagtga

SEQ ID NO: 50639 - DNA, 1338 bp, Neisseria meningitidis
atgactttccaaaacaaaaaaatcctcgtcgccggactcggcggcacgggtatttccatgattgcctacctacgcaaaaacggcgcggaggttgccgcttatgatgcggagctgaaaccggagcgggtgtcgcaaatcggtaagatgtttgacgggctggtgttttacacgggccgtctgaaagatgcgctggacaacggtttcgatattctggcgctcagtcccggcatcagcgagcggcagccggatatcgaggcgttcaagcaaaacggcggacgcgtgttgggcgacatcgaattgctggcggacattgtgaaccgccgcggcgacaaggtaattgcgattaccggcagcaacggcaaaaccacggtaacgagcctggtcggctatctctgtatcaagtgcgggctggataccgttatcgcgggcaatatcggcacgccggttttggaggcggaatggcagcgcgaaggcaaaaaggcggacgtgtgggtgttggagctttccagcttccaactggaaaacaccgaaagcctgcgcccgactgcggcgacggtgctgaacatttccgaagaccatctcgaccgctacgacgacttgctcgactacgcgcataccaaagccaagattttccgtggcgatggcgttcaggttttgaattcagacgacgtgttctgccgcgccatgaaacgggcagggcgtgaagtgaaatggttttcgttggaacacgaagccgatttttggttggaacgcgagacaggccgcctgaaacaaggcaatgaagatttgattgccacgcaagatattccgttgcaaggcttgcacaacgccgctaacgtcatggctgccgtggctttgtgtgaggccatcggtttgtcgcgcgaagcattgctcgaacacgtcaaaaccttccaaggcctgccgcaccgcgtggaaaaaatcggcgagaaaaacggcgtggtgtttatcgacgacagcaaaggcacgaatgtcggcgcgactgccgccgcgattgccggtttgcaaaatccgctcttcgtgattttgggcggcatgggtaaagggcaggacttcacgcccctgcgcgatgcactggtaggcaaggcaaaaggcgtgttcttgattggtgtcgatgcgccgcaaatccgccgcgatttggacggctgcggcttgaatatgaccgactgcgccactttgggagaagccgttcagacggcatatgcccaagccgaagcaggcgatattgtgttgctcagccccgcctgcgcgagctttgatatgttcaaaggctacgcgcaccgttcggaagtgtttatcgaagcgtttaaggctttgtga

SEQ ID NO: 50640 - DNA, 681 bp, Neisseria meningitidis
atgacttataccattacccccatcggcaccgcccgctcgccctacaaacagaaattcggcatcgcccgccagcccggtttggtctccgccgcaaaagcctgcatcgagctgaatcccaaattcaccgcagacagcgtgcgcgggctggaagatttcgattatgtgtggataagttttatttttcacggcgtattggatgaaggctgggcgcaaatggtgcgcccgccacggctcggcggcaaacaaaaaatgggcgtgttcgccacgcgcagcccccaccgccccaaccatctcggactctcgctcctgaaactcgaacgcatcgaaaccggcaaacccgtccgcctctattgcagcggcgcagacctgctggacggcacaccgattgtggacatcaaaccttatatcccctttgtcgaatccaaacccgatgccgcatccggtttcgtcagcggcaaacccgtagagttggaagtcgtttggcaggaaaacatcggcgcggaaaatttatctgcaaacaccaaaaaccttatcagccaaagcattgcccaagatccgcgccccgcctatcagaatattcccgaacggatttatgtgatgaatattgcggattacgaaatcagatttcaaatcgaggaaaaccgtgcaaccgttattgatctttccccaaccccgctttaa

SEQ ID NO: 50641 - DNA, 1398 bp, Neisseria meningitidis
atgagccaaggcaaaatcgtacaaattatcggtgcggttgttgacgtggaatttccacgcgacatgattccgcgcgtttacgacgctttgaaattagacgaaaacggtctgactttggaagtccaacagcttttgggcgacggcgtagtccgtaccattgcgatgggcagctcggacggtttgaaacgcggcatgactgtgagcaataccggtgcgcccattactgtgccggtaggtaaaggtacgttgggacgcattgtcgatgtattgggaacgcctgttgacgaggcaggtccgatcgataccgacaagagtcgtgccatccaccaagccgctcctaagtttgacgaactgtcttccacaaccgaattgctcgaaacgggcattaaagtgattgacttgctgtgtccgtttgccaaaggcggtaaagtaggtctgttcggcggtgccggtgtgggtaaaaccgtgaacatgatggaattgatcaacaacatcgccaaagcgcacagcggcttgtccgtgttcgcaggcgtgggtgagcgtacccgcgaaggtaacgacttctaccacgagatgaaagattccaacgtattggataaagtggcaatggtttacggtcagatgaacgaacctccgggcaaccgtttgcgcgtcgcattgaccggtttgaccatggcggaatacttccgtgacgaaaaagacgaaaacggcaaaggccgcgacgtattgttcttcgtggacaacatctaccgttacactctggccggtaccgaagtatccgcattgttgggccgtatgccgtctgcagtgggctaccaaccgacattggcagaagaaatgggtcgtttgcaggagcgtattacctctacccaaaccggttctattacttctatccaagccgtatatgtacctgcggacgacttgaccgacccgtctccggcaacaacgttcgcccacttggacgcaaccgtcgtattgagccgcgatattgcctctttgggtatttacccggcagtcgatccgcttgattccacttcgcgccaactggatccgatggtcttgggtcaagagcactacgacgtggcgcgcggcgtacagtccaccctgcagaaatacaaagaattgcgcgacatcatcgccatcttgggtatggacgaattgtctgacgaagacaaactgaccgtaatgcgtgcgcgtaaaatccaacgcttcctgtcccaaccgttccacgttgccgaagtgtttacaggttctccgggcaaatatgtcgccctgcgcgataccattgccggcttcaaagccatcttgaacggcgaatacgaccatctgcccgaacaggcattctacatggtcggcagcatcgaagaagcggttgagaaagcgaaaaccttaaactga

SEQ ID NO: 50642 - DNA, 984 bp, Neisseria meningitidis; identical to SEQ ID NO: 42465

SEQ ID NO: 50643 - DNA, 1068 bp, Neisseria meningitidis
atgagaaaaatccttgttaccggcggtgcgggctttatcggctctgccgttgtccgtcatattatccgaaacacccaagattccgtcgtcaacctcgacaaactgacctacgcgggcaatctcgaatcgctgaccgacattgccgataatccccgctatgctttcgagcaagtggacatttgcgaccgcgccgaactcgaccgcgtattcgcacaacaccggcccgatgccgtgatgcacttggcggcggaaagccatgtcgaccgctctatcggttcggcaggcgagtttatccaaaccaatatcgtcggcacattcaatctgcttgaagcagcccgcgcctactggcaacaaatgccgtctgaacagcacgaagccttccgtttccaccatatttccaccgatgaagtctatggcgatttaagcggcacagacgatttgtttaccgaaaccacgccctacgcgccgtccagcccctactctgcctctaaagcgtccagcgaccacctcgtccgcgcgtggttgcgtacttacggcttgccgaccattgtaaccaactgctccaacaactacggtccttaccattttccggaaaaactcattcctttgatgattctgaacgcgcttgacggcaaaccgctgcctgtgtacggcgacggtatgcaaatccgcgactggctgtttgtcgaagaccacgcgcgcgcactgtatcaggttgttaccgaaggtgttgtcggcgaaacctacaatatcggcggccacaatgaaaaagccaatattgaagtcgtcaaaaccatctgcgccctgctggaagaactcgctcccgaaaaaccggccggtgtggcgcgttatgaagatttgattactttcgtacaagaccgccccggccatgacgtacgctacgccgtcgacgcagccaaaatcaggcgggatttgggctggctgcctttggaaaccttcgagtccggcctccgcaaaaccgtgcaatggtatctggacaacaaaacctggtggcaaaatgtattgaacggcagctatcgtttggaacgtttaggtactggaaaatag

SEQ ID NO: 50644 - DNA, 591 bp, Neisseria meningitidis
atgggtttggaactgcctttgattttgggtacgagttcggttttccgccgcgaacagatggaaaggctcggcattgcctttcaggcggcgtcccccgattttgacgaaacgccgatgttgggggagtctgcccctcagacggcattgcgccttgccgagggtaaggcgcggtcgttggccgggcgtttcccagaggcgttgattgtcggtgcggaccaggtggcgtggtgcgacggcaggcagtggggcaagccgatgaaccttgctaatgcgcacaagatgttgatgcatttgagcggcagggagattgagttttacagcgcggtcgttctgctaaatacggttacgggcaggatgcagcggcatatcgataagacggtggtcgtgatgaggaagttggacgagctgcacatcctccgctatttggagcgcgagcctgatgcggtttattgctcgtgtgcgttgaagagcgagggcttgggcgcgctgctgatcgaacggattgaaagcagcgatccgaatgctttaatcggtttgccggttttccgtctggtcgatttcttgaaaaatgagggcgtggaggttctgtaa

SEQ ID NO: 50645 - DNA, 462 bp, Neisseria meningitidis
  misc_feature 447, 448, 449, 450, 451: 'n' is a, c, g or t
atgagaaaaatccttgttaccggcggtgcgggctttatcggctctgccgttgtccgtcatattatccgaaacacccaagattccgtcgtcaacctcgacaaactgacctacgcgggcaatctcgaatcgctgaccgacattgccgataatccccgctatgctttcgagcaagtggacatttgcgaccgcgccgaactcgaccgcgtattcgcacaacaccggcccgatgccgtgatgcacttggcggcggaaagccatgtcgaccgctctatcggttcggcaggcgagtttatccaaaccaatatcgtcggcacattcaatctgcttgaagcagcccgcgcctactggcaacaaatgccgtctgaacagcacgaagccttccgtttccaccatatttccaccgatgaagtctatggcgatttaagcggcacagacgatttgtttacnnnnncacacacttaa

SEQ ID NO: 50646 - DNA, 468 bp, Neisseria meningitidis; identical to SEQ ID NO: 38296

SEQ ID NO: 50647 - DNA, 2121 bp, Neisseria meningitidis
atgttcgacaaacacgttaaaactttccaatacggcaaccacaccgttactttggaaaccggcgaaatcgcccgccaagccgccgctgccgttaaagtctctatgggcgacaccgtggttttggttgccgttaccaccaacaaagaagtgaaagaaggccaagacttcttccctctgaccgtcgattatttggaacgcacttacgccgcaggcaaaattcccggcggtttcttcaaacgcgaaggcaaacaaagcgaaaaagaaatcctgaccagccgtctgatcgaccgtccgattcgtccgctgttccctgaaggtttctaccacgacatccaaatcgtagcgatggtcgtgtccgtcgatcctgaaatcgattctgatattcctgcaatgttgggtgcatctgccgcgctggtgttgagcggcgtaccgtttgccggcccgatcggcgcggcacgcgtcggttatgtaaacggcgtgtacgttttgaatccgactaaagccgaattggcgaaatcgcaattggacttggtggtcgccggtacttcaaaagccgtgttgatggtggaatccgaagccaaaatcctgcccgaagacgtgatgctgggcgcggtggtttacggccacgatcaaatgcaggttgccatcaatgcaatcaatgaatttgccgacgaagtcaatccggaactttgggattggaaagcacctgaaaccaatgaggaactggttgccaaagtccgcgggattgccggcgaaaccattaaagaagcgttcaaaatccgtcaaaaacaagcgcgttctgccaaattggacgaagcttggagtgcggtaaaagaagccttgattaccgaagaaaccgacactttggcagccaacgaaatcaaaggcattttcaaacacttggaagccgatgtcgtccgcagccaaattttggatggccaaccgcgcatcgacggccgcgacacccgcaccgtccgtccgctgaacatccaaaccagcgtattgccgcgcacgcacggttctgcattgtttacccgtggcgaaacccaagctttggccgttgcaactttgggtacttcgcgcgacgagcaaatcatcgacgcgctgtccggcgaatacaccgaccgctttatgctgcactacaactttccgccgtactctaccggcgaagtgggccgcatgggcgcaccgaaacgccgtgaaatcggtcacggccgtttggctaaacgtgcattgttggccgtattgccgaaacctgaagatttcagctacaccatgcgcgtggtctccgaaattaccgaatccaacggctcttcctctatggcttccgtctgcggcggctgcctgagcctgctgtctgccggcgtgcctttgaaagcacacgttgccggtatcgcgatgggtctgattctggaaggcaacaaatttgccgtcctgaccgacattttgggcgacgaagaccacttgggcgatatggactttaaagtggccggtacgaccgaaggcgttaccgcgctgcaaatggacatcaaaatccaaggcattaccaaagaaattatgcaaatcgctttggcacaggccaaagaagcgcgtctgcacatcttggatcagatgaaagccgccgttgcgggcccgcaagagctgtccgcacacgcgccacgcttgttcacgatgaaaatcaaccaagacaaaatccgcgaagttatcggtaagggcggtgaaaccatccgttcgattaccgctgaaaccggtacggaaatcaatattgccgaagacggtacgattaccattgccgcaaccactcaagaagccggcgatgcggcgaaaaaacgcatcgagcagattactgccgaagtggaagtgggcaaagtgtacgaaggcactgtggtgaaaatcctcgacaacaatgtcggcgcgattgtcagcgtgatgccgggcaaagacggtttggtacacatcagccaaatcgcccacgagcgcgtacgcaatgtcggcgactacctgcaagtcggtcaggtggtgaacgtgaaagcattggaagtggacgacagaggccgtgtccgtctgtccatcaaagccctgctggacgcgcctgcccgtgaggaaaatgccgccgagtaa

SEQ ID NO: 50648 - DNA, 387 bp, Neisseria meningitidis
atggcatacagcgataaagtaatcgaccactacgaaaatccccgcaacgtcggtactttcgacaaaaacgacgaatctgtcggcaccggcatggtcggcgcaccggcctgcggcgacgtgatgcgcctgcaaatcaaagtgaacgatgaaggcatcatcgaagatgcgaaattcaaaacttacggctgcggttccgccatcgcttcgtccagcctgattaccgagtgggtcaaaggcaaaagcctggatgacgcgctggcaatcaaaaacagcgaaatcgccgaggagttggaactgccgccggtaaaaatccactgctccatcttagcggaagacgcggtaaaagcggccgttgccgactaccgcaaacgtcaggaaaacagataa

SEQ ID NO: 50649 - DNA, 1467 bp, Neisseria meningitidis
atgatgaaattgggtttcaaaccgatacccctcgccattgccgcagtattgtgcgccttggttttggcactgcccgtacccgacggggtcaagcctcaggcttggacgctgctggccatgtttatcggtgtgattgccgccattatcggcaaggccatgccgttgggtgcgctgtcgattattgccgtcgggttggtcgcagtaaccggcgtaaccgccgacaaaccgggcgcggcgatgagcgatgcgttgagtgcgttcgccaatccgttgatttggctgattgccatcgcagttatgatttcgcgcggtttgctcaaaacagggctggggatgcgtatcggatatttgtttatcgccgtttttggaagaaaaacgctgggcatcggttacagtctcgctctttccgaactgctgctggctcccgttaccccttccaataccgcgcgcggcggcggcattatacatccgattatgcagtcgattgccggcagttacggctccaatcccgcaaaaggcacagaaggcaagatgggtaaatatttggctttggtcaactatcattccaatcccatttcgtcggctatgtttattactgcaactgcccccaaccctttaatcgtcaacttgattgccgaaaatttaggcagtagtttccgtctttcttggggggcgtgggcgtgggcaatggctgttcccggcgttgtcgcctttttcgttatgcctttgattttatattttttgtatccgcctgaaattaaagaaacgcccaatgccgttcaatttgccaaagaccgtctgagggagatgggtaaaatgtcggcagacgaaatcattatggcggtcattttcggtatcttgttgctgttgtgggcagatgttcccgcccttattaccggcaatcacgcttttagtatcaacgccaccgccaccgcatttatcggattaagcctgcttttgctttccggtgtattgacttgggacgatgttttgaaagaaaaaagcgcgtgggatacgattatttggtttggcgcattgattatgatggccgcatttttaaataaactcggactgattaaatggttctccggagtgttggcggaaagtgtcggcggtttgggcgttagcggcacggctgcgggcgtaatcctcgtgcttgcttatatgtatgcgcattatatgtttgccagtactactgcacatattaccgctatgttcggcgcatttctcgctgctgccgtttcactgaatgccccggcgatgccgaccgcgctgatgatggcggccgcatccaacattatgatgaccctcactcattatgcgaccggtacttcgcctgtgattttcggttcgggctacaccacaatgggagaatggtggaaggcgggttttatcatgagcgtagtcaattttctgatttttttcgttatcggcagcatttggtggaaagttctggggtattggtaa

SEQ ID NO: 50650 - DNA, 645 bp, Neisseria meningitidis; identical to SEQ ID NO: 38405

SEQ ID NO: 50651 - DNA, 795 bp, Neisseria meningitidis
atgatgtccgaacaccgagtcaaccacgaacccgtcttcctgttggcttcctcgccatggcgcgaaagcagcctgcgggtcgaagccttcagccgccgttacgggcgtgtggcacttttggcaagaagcgcgcgcaagcggcagagcgaattgcgcggcgtgttggtgccgtttgtgccggtgagtgcgtcttggtatggttcgcaagagttgaagaccctacatcgcgccgaatggataggcgggtggccgcagccgcagggtagggctttgttcagcggattgtatgtgaacgagttgatgctgaagttgaccgtccgcgaagatccgttgcccgagttatacgacgcgttggcggaagtgatggaggcggtgtgccgtgaagccaaccatattgccgatttgcgccgcttcgagtggaagctgctcaatgccttgggcgttgcccccgatttgcacgccgacggcacgggcggcgatattttggcggacaaaacctaccggctgatgcccgaagaggcggtcatgcccgtatgcgaggacgcagacgcgctttcgcacgaagccggcgcaattgtcgaagggcaaagcctgatcgatttgcgcgaaggcagtttccgcaccgccgaaagcctgcaacaggcattgaaaatcacacggctttttatccgccacctgttgcccgaggggctgaaatcgcggcaggtgttggaacagatacggcagtttgaccgcaaagaaaccgcccgggaaaccgtcccgacttcggacggcacggcttcaaatgccgtctga

SEQ ID NO: 50652 - DNA, 1443 bp, Neisseria meningitidis
atgaaacaattggccatgtacatcaacggacgctttgaaaacgacttcaacggcgaatggcgcgacgtattgaacccttccaccgaagaaaccatcgcccgcgaacccaaaggcggaaaagcagacgttgaccgagctgtggcggcggcacgcgcggcgcaaccggcttgggaacgcctgcctgcggtcgaacgcggcgcgtatttgcgcaaaatcgcccaaggcatacgcggacgcgccgacgagctgaccgacaccatcgttgccgaaggcggcaaaaccaaagacttggcgcgcgtagaagtgatgttcaccgccgactatctcgattaccaagccgaatgggcgcgccgttacgaaggcgaaatcatccaaagcgaccgcccgcgtgaaaatattttattgttcaaacgtccgctgggcgtgattgccggcattttgccgtggaacttccccttcttcctgattgcccgcaaaatggggcccgctttggtaacgggcaacaccatcgtcgtcaaacccagcagcgtaaccccgatcaactgccacatcttcgccgaaatcgtcgatgcggtcggactgcccgccggcgtgttcaacgtggtgaacggtcccggcgcggaaatcggcaacgccttgtccgcccatccgcaagtcgatatggtcagcctgaccggctccgtcgaagcaggccgccaagtgatggaagccgcttccgccaacatcaccaaagtttcgctggaactcggcggcaaagcccccgccatcgttttgaaagacgcggatttggatttggcggttaaatccatcttggcttcgcgcgtcggcaacaccggtcaaatctgcaactgcgccgagcgcgtctatgtccacagcagcctgaaagacgcgtttatcgaaaaaatgaccgccgcgatgaaaggcgtgcgctacggcaaccctgccgaagccgaagccggcgcgctggaaatgggcccgctgattgaagagcgcgccgtcaaagccgttgccgaaaaagtggaacgggcagtcaaacaaggtgcgaaactggtttgcggcggcaaacgcgccgaaggacgcggctatttcttcgagcctaccctgctgaccgacaccgacaacagtatggacattatgaaagaagaaaccttcggccccgttctgcccgtttccgctttcgacacgctcgaccaagtgattgcactggctaacgattgcgagtttggtctgaccagttctgtttatacgactaatttaaacgaagccttctacgttacccgccgcctgcaattcggcgaaacctacatcaaccgcgaaaactttgaagcgatgcagggtttccacgccggttggaaaaaatccggtatcggcggcgcggacggcaaacacggtttggaagaatatctgcaaacccaagtcgtttatctggaaaccgacatttaa

SEQ ID NO: 50653 - DNA, 996 bp, Neisseria meningitidis; identical to SEQ ID NO: 42282

SEQ ID NO: 50654 - DNA, 738 bp, Neisseria meningitidis
atgaaaaaattatctcggattgtattttcaactgtcctgttgggtttttcggccgctttgccggcgcagacctattctgtttattttaatcagaacgggaaactgacggcgacgatgtcttctgccgcttatatcaggcaatatagtgtggcggagggtattgcgcacgcgcaggatttttattatccgtcgatgaagaaatattccgaaccttatatcgttgcttcaacgcaaatcaaatcttttgtgcctaccctgcaaaacggtatgttgattttgtggcattttaatggtcagaaaaaaatggcggggggcttcagcaagggtaagccggacggggagtgggtcaactggtatccgaacggtaaaaaatctgccgttatgccttataaaaatggtttgagtgaaggtacggggtaccgctattaccgtaacggcggcaaggaaagcgaaatccagtttaaacagaataaggcaaacggcgtatggaagcaatggtatgccgacggcaatatcaaaacggaaatggttatggtcaatgatgagcctgccaagattctgacatgggatgaaagcggtcgattactctcggaactgtctatccatcatcataaacgtaatggagtagtcttagagtggtatgaagatggttctaaaaagagtgaagctgtttatcaggatgataagttggttaggaaaacccagtgggataaggatggttatttaatcgaaccctaa

SEQ ID NO: 50655 - DNA, 411 bp, Neisseria meningitidis; identical to SEQ ID NO: 37452

SEQ ID NO: 50656 - DNA, 1077 bp, Neisseria meningitidis
atgatttgccgaaaacctatcggacacacaccatattttgatatgaataaaacaatctgccgcactgctgcactattgataagcggtttttcatacgcaaacaccgtcattcccgatgtctcccccgtcgcacaaggtcaacatgtcttcattaacatccctcagcaacgcctgttcctctacaccgacggcaaactgaccaaggtttatcccgttgcagtaggtcgggcgatgacgcaaaccaatctaggcgaacataaaatcggtgcgaaagcctataaccctgtttggtacatccccaaatccatacagaaagaacgcggcgacggcgtaaaaaccatagccgccggcccggacaaccctttggggccggtttttgtccgcttaggcgaccccaaactcggtttgggcatacacgggaccaatgcgccggccagcgtccccggggttcggagtcacggctgcgtccgcatgaaatcgcccgacgcgctcgagtttgccaaaaccatcgccagcggctcgcccgcctccgtcatctatcaaatggcgggtctcaatgaagatgcggatcgcaacctgtggcttgccgccttccgcgacccttacggtaagaacaaccttgacaccgcctccctgaaaaaaagcatcgggcaatgggcaaaaacacagggcaaaaccatcgcatccgataaaatcgatgccgtacttaaagcacgtaccggatcggccgtctgcctgacctgcggaaaaaacggcaagatgaagatgccgctcaaatcgctggcgtggatacagggttcttcctcatacagccaagctgaagtcattgaacaaactgaggaaaccaactctgccgaaatatccgagacacgcacgcccgaagtgcctgatgtacacacgcccgaggcacaaccgcatttaaatacccaatccgacggcacgccgactgcctataccgaaccggctgccgattcatcgccgcaagtagaaacacctgatcaggctgcttccgagccggttgatgtattattttcaatagatgtgatacggcagggaaatttgcgtttaggtaattga

SEQ ID NO: 50657 - DNA, 1746 bp, Neisseria meningitidis
atggaacggcagacagatgaatttgcccaagcggcggcaagggcggcaatctggtttttggcacgctatgcgggttccggcgacgaagtgcttgcaaactgcaccgaacgcctgtttcaggcattgcaaaacggtcattcgtttatccgtttgagcggtggcgaggctgacgcgctgtcggcactcgcacccgtggtcggaacatccgccgcgcctttgattttggaaggcagaaggctgtttttgggcaggatgtggcagttggaatacgatttggctgccgagataaaacgcttggcggcagccgacacgtccgcccccgacgcggcaggcgcgaggcaaaacctcgcaaaatggtttcaaggcacgggcagcgaagggcagcgcgatgccgccgccttggcactgttgcagtcttttatggtgattaccggcggacccgggacgggtaaaacgacgacggttgccaaactgctggcgctgatttgcggtgaagacgaaaatcttcccaacatcgcgcttgccgcaccgacgggcaaagcggcggcacatatggcgcgcgcgctgcaccgtgcaatcaacggttttgacgcgccggaggccgtccgccgccatttgctcaaactggaagggcaaaccgtccaccgactgctgaagctgcgcccgcccaaaatgcaggcggcgttcaaccctgtttacccgctgccgtttgacgtattggttatcgatgaagcctctatgctggatacggcattgatgctgcaacttttaaaagcggtcaaaaccggcgcgcgcgtgattctgctgggggatgaaaaccagctcccgtccgtcggaataggggcggtgctgtccgttttgtcgcaaaaaaccgttttggacggagaaacgcaccaaaggctggccggcttccttccggaacacggtttcagcgtcagcgcaaatccgcccgtgttggcgcaaaacaccgcccatctgtcgttcagccaccgcttcggcgacaacagcggcatcggctgccttgcccgtgccgccgtatcgggcgatgagggggcgtgggcattgtttgaccggtttccggacgaactggaacattcggaatgcagtccgaacgctcgagtcgaaaggttgtaccgggcgcacaaagcctattggcaggcggtaaaagacggcaatatcgaagccgcatacgcaggcatctcggatatcgtcgtcctcgcggcgtggcggcaggatgcggaagacttcaacgaagcctattgcagccatgtacgccgcaaaatgaacataccggaacatcaggcctatttcgccggagaaccgattatgatcagacagaacgactacgcgcttgaactgttcaacggcgacatcggactgattatggaagatgtcggacggcagggcagccttgccgcctattttgccgatgcggacggatttaaaaaggtagcggtaagctgcctgcccgaatttgaacccgcattcgccatgaccgtccacaaaagccaaggttcggaatatcgggaagtctggctgctgccgccttccgccgcaccttcggacgaaggggacgatgcattgtctggattgagtaaggagctgttatataccgccattacccgcgcgagagagaagttcgtattcttcggcggggaagaagccttccggcaagctgccgccaccgtcaaaacgcgtcagacggcgttgggcagtatgcttgagcgggtattttcacaaggataa

SEQ ID NO: 50658 - DNA, 630 bp, Neisseria meningitidis
atggcagcccatctcgaagaacaacaagagttagacaactttaaatatttttggaaaaccacgggcaaatggctgtttgccgtgctgattttggcggcgctcggctacttgggatacacggtttaccaaaaccgtgcggcttcccaaaatcaggaagcggcggcggtgctggcaaacatcgtggaaaaggcgcaaaacaaagccccgcaaagcgaaatcaatgccgaattgaccaaactccaacaaagctacccgcattccatttccgccgcccaagccacgctgatggcggcggcaaccgaatttgacgcacagcgttacgatgttgccgaaggccatttgaaatgggtgttgtccaaccaaaaagacagcctgattcaagcgttggcggcgcagcgtctgggcgttgtgttgttgcaacaaaaaaaatacgatgccgcacttgccgcgctcgacacgccggttgaagcggacttcgcccccctgctgatggaaaccaaaggcgatgtctatgccgcacagggaaaaagccaggaagccttaaaaaactacggacaggctttagaaaaaatgcctcaagattctgtcggtcgcgaattggttcaaatgaaacttgattcgctgaaataa

SEQ ID NO: 50659 - DNA, 279 bp, Neisseria meningitidis; identical to SEQ ID NO: 36210

SEQ ID NO: 50660 - DNA, 930 bp, Neisseria meningitidis
atggattccattatcgaactgcgccacctcaagaccctgctggcacttgaagaaaccggcagcgtctcccttgccgccaaacgggttttccttacccaatctgcactttcccaccaaatccgtatgcttgaaaaccactacggcgcaccgttgttcgaacgaaaatccacgcccttgcgctttaccccggtgggcgaaaggctgctgcgcctcgcccacgaactgatacctcaagttgctgttgcagaacgagatttggcgcgaatcacggaaggggaggcgggagagctgcggattgccgtcgaatgccatacctgtttcgactggctgatgcccgccatgggcgaattccgcccgatgtggccccaagtcgaactggatatcgtatcgggattccaagcggatcccgtcgggctgctgctgcaacaccgcgccgatcttgccattgtttccgaagcggaaaaacaaaacggtatttctttccaaccgctgtttgcctacgaaatggtcggcatttgcgcaccggaccatccgcttgccgccaaaaacgtttggacggcggaagactttatcggggaaaccctgattacctatcccgttcccgacgagatgctggatttgcccaaaaaaatcctgattccgaaaaacatcaacccgccgcgccgacacagcgaactgaccatcgccattatccaactggttgccagcagacgtggcattgccgcctttccctattggacagtcatgccctaccttgaaaaaggctatgtcgttcaccggcagattaccgacgacggactgcaaagcaaactgtatgccgccatccgcactgaagacacagataaaagttatctgaacaacttttgccaaatcatacgcgaacgcggttttgcagatttgcccggactgagcgaactggaaccggtctga

SEQ ID NO: 50661 - DNA, 198 bp, Neisseria meningitidis; identical to SEQ ID NO: 36305

SEQ ID NO: 50662 - DNA, 363 bp, Neisseria meningitidis; identical to SEQ ID NO: 43221

SEQ ID NO: 50663 - DNA, 1008 bp, Neisseria meningitidis
atgagcaccttcttccggcaaaccgcccaagccatgattgccaagcacatcgaccgtttcccgctattgaagttggaccaggtgattgattggcagccgatcgaacaatacctgaatcgtcaaaaaacccgttaccttagagatcaccgcggccgtcccgcctatcccctgttgtccatgttcaaagccgtcctgctcggacaatggcacagcctctccgatcccgaactcgaacacagcctcattacccgcatcgatttcaacctgttttgtcgttttgacgaactgagcatccccgattacagcaccttatgccgctaccgcaactggctggcgcaagacgacaccctgtccgaactgttggaactgattaactgccaactgaccgaaaaaggcttaaaagtagagaaagcatccgccgccgtcattgacgccaccattattcagaccgctggcagcaaacagcgtcaggccatagaagttgacgaagaaggacaaatcagcggccaaaccacaccgagtaaggacagcgatgcccgttggatcaagaaaaacggcctctacaaactcggttacaaacaacatacccgtaccgatgcggaaggctatatcgagaaactgcacattacccccgccaatgcccatgagtgcaaacacctgtcgcctttgctggaagggatagccgaaggtacgaccgtctatgccgacaaaggctacgacagtgcggaaaaccggcaacatctggaagaacatcagttgcaggacggcattatgcgcaaagcctgccgcaaccgtccgctgacggaagcgcaaaccaaacgcaaccgatatttgtcgaagacccgttatgtggtcgaacagagcttcggtacgatgcaccgtaaattccgctatgcgcgggcagcctatttcgggctgagcaaagtgagtgcacaaagccatctgaaggcgatgtgtttgaaccttttgaaagcggccaacaggctaagtgcgcccgctgccgcctaa

SEQ ID NO: 50664 - DNA, 864 bp, Neisseria meningitidis
atggaattggacgaatttctcgataaagcctatgccgttttgcggcgtttggatgccgtgcttccgcccgaacccgggcatacggattggaacgcgcttgccttccgctggcagagtgcgggcaaaaaaggttttttggaacacttgcccgatccgcacaccttccccttggcaaggctggcgggagttggcaggcaaaccgaattgctggtgcgtaataccgaacaattcattgccggcagacccgcgaataacgtattgatgagcggcgcgcgcggaacaggcaaatcctcgctggtcaaagccctgctgcacgaatatgcggataagggattgcgcctgatcgaagtcgataaaagcgatttgatcggcctgccgtatctgttgacgcttttgaaggaacgtccggaaaaattcattgtattttgcgacgatttgtcatttgaaagcggcgacgaaacctataaggcattgaaaacggcattggacggcggtctgtcccaacgttgcgccaacgtgctggtgtacgcgacttccaacagacggcacctgatgcccgaatatttggatgaaaatgcaggtacgacaggcgtgcgcggagaaatccatcagaaagaagcggtggaagaaaaagtatctttgtccgaccgtttcggattgtggctcagcttttatccgttcgatcaaaacgattatctgtcggcagtgcaaaattggctggaagatttcggcgtgccgtatgatgaaaccgcacagatggcggcattgcagtgggcgcagacgcggggcagccgttcgggacgttccgcgtggcagtttgcctgcgactgggcgggcaggctgccgaaacaacgggcgttgtga

SEQ ID NO: 50665 - DNA, 1101 bp, Neisseria meningitidis
atggaaacacagctttacatcggcatcatgtcgggaaccagcatggacggggcggatgccgtactgatacggatggacggcggcaaatggctgggcgcggaagggcacgcctttaccccctatcccgacaggctgcgccgccaattgctggatttgcaggacacaggcgcagacgaactgcaccgcagcaggattttgtcgcaagaactcagccgcctatatgcgcaaaccgccgccgaactgctgtgcagtcaaaacctcgcaccatccgacattaccgccctcggctgccacgggcaaaccgtccgacacgcgccggaacacggttacagcatacagcttgccgatttgccgctgctggcggaacggacgcggatttttaccgtcggcgacttccgcagccgcgaccttgcggccggcggacaaggtgcaccgctcgtccccgcctttcatgaagccctgttccgcgacgagaaagaaacacgcgtggtactgaacataggcgggattgccaacatcagcgtactcccctccgacgcacccgctttcggcttcgacacggggccgggcaatatgctgatggacgcgtggacgcaggcacactggcagctgccttacgacaaaaacggtgcaaaggcggcacaaggcaacatattgccgcaactgctcgacaggctgctcgcccacccgtatttcgcacaaccccaccctaaaagcacggggcgcgaactgtttgccctaaattggctcgaaacctaccttgacggcggcgaaaaccgatacgacgtattacggacgctttcccgttttaccgcgcaaaccgttttcgacgccgtctcacacgcagcggcagatgcccgtcaaatgtacatttgcggcggcggcatccgcaatcctgttttaatggcggatttggcggaatatttcggcacacgcgtttccctgcacagcaccgccgaactgaacctcgatccgcaatgggtagaagccgccgcatttgcgtggttggcggcgtgttggattaaccgtattcccggtagtccgcacaaagcaaccggcgcatccaaaccgtgtattctgggcgcgggatattattattga

SEQ ID NO: 50666 - DNA, 1581 bp, Neisseria meningitidis
atggagccgataatggcaaaaaagaacaataaaactaaaatccaaaagcccgaagctgcattgcagacggacgtggctcaaattacggcgaccggtcgggttatcgccgagcatccgtccaattttattacgccgcaaaagatgcgggccctcttcgaggacgcagaaagcggcgacatccgcgcccaacacgagcttttcgcggacattgaggagcgcgacagcgacatcgcggcaaatatggggacgcgcaaacgcgcgctgctgacgctcaactggcgcgtcgccccgccgcgaaatgcgacgcccgaagaagaaaagctgtccgaccaagcctacgaaatgatggacagcctgcctaccctcgaagacctgattatggatttgatggacgcggtagggcacggattttctgcgttggaggtcgagtgggtattttcagacggcctttacctaccccgaaactttatccaccgcccgcaaagctggttcaaatgggacaaagacaacgggctgctgctgcgtacccgcgaaaatccggaaggcgaagcgttgtggccgctgggctgggtcgttcatacccaaaaatcgcgcagcgtccagcaggcgcgcaacgggcttttccgcacgctttcctggctgtatatgttcaaacactacgccgtccacgattttgccgagtttttggagctgtacggcatgcccatccgtatcggcaaatacggcgcgggcgcaaccaaagaggaaaaaaacaccctgcttcgagcggtggcggaaatcggtcacaacgcggcaggcatcatgccagaaggtatggaaatcgagctgcacaacgctgcaagcggtacgatggcaaccagcaatccgtttttgcagatggccgactggtgcgaaaaatcggcggcgcggctgattttggggcaaacgctaaccagcggtgcggacggaaaatccagcaccaacgcgctgggcaatatccacaacgaggtacgccgcgatttgctggtgtcggacgcaaaacaggtggcgcaaaccatcacaagccaaatcatcggaccgttcctgcaaatcaactatcccaatgccgacccaaaccgcgtgccgaaatttgaatttgacacgcgcgagccgaaagacatcgcggtctttgccgacgctatcccgaaactggtggatgtcggcgtacaaatccccgaaagctgggtgcgcgacaaactggtcattccagatgtgcaggagggtgaggctgtgttggtgcggcaggtaccggacaatccgataaacagaactgcattggcggctttatccgcccacaccgtaccatctaaggctacgggcaggcatcaggaaatattggacggcgcgttggatgacgcgctggttgagcccgatttcaattctcagctcaacccgatggtgcgtcaggcggttgccgcacttaatgcttgcaacagctacgaggaggcagatgccgcactgaatgcgctttatccgaatttggacaacgcgaaactgcgtacctatatgcagcaggccttgtttatcagcgatattttgggacaagaccatgcccgcgcctga

SEQ ID NO: 50667 - DNA, 507 bp, Neisseria meningitidis
atgcccctactagacagtttcaaagtcgatcacacccgtatgcatgcccccgccgtacgcgtggcgaaaaccatgactacgcccaaaggcgacaccattaccgtgtttgacctgcgcttttgcgttcccaacaaagaaatcctgcctgaaaaaggcatacacacgctggagcatttgttcgccggctttatgcgcgaccacttgaacggaaacggcgtggaaatcatcgacatttccccgatgggctgccgcaccggtttctacatgagccttatcggcacgccttccgaacagcaggtcgccgatgcgtggctggcttcgatgcaggatgttttgaatgtcaaagaccaaagcaaaatccccgagttgaacgaataccaatgcggcacttatcaaatgcactcgctcgccgaagcgcagcaaatcgcgcaaaacgtgttggcgcgcaaagtggcggtgaacaaaaatgaagagctgacgctggatgaagggctgctgaacgcctaa

SEQ ID NO: 50668 - DNA, 780 bp, Neisseria meningitidis
atgttttttgtcctttcccctgcgaagaaccttaatgaaaaagaccctgcccctgtcagcgagtttacccaacccgacctgctggcagagtccgacattctaatgcagcagttgcgcgagcttgcgccgcaacagattgccgaactgatgcacgtttccgacaaaattgccctcttaaacgcgcagcgcaatgcagaatggcacacgccgtttacgccggaaaacgccaaacaggcggtctttatgttcaacggcgatgtttacgaaggtatggacgtaaacacattggatattggacagatacgctatctgcaaaaccatgtccgcctgctgtccggtctgtacggtcttcttcgcccgttagacctgatacagccctaccgtttggaaatggggacggcatttgccaatttgcgcggcaagaatttgtatgagttttggggcgacatcattaccaaccttttaaatgacacgcttgcccaagcaggcagcaatacgcttgtcaaccttgcctcacaggaatatttcaagtctgtcaacacgaaaaaacttcgggcgcagctgattaccccgatatttaaagacgaaaaaaacggtaaatataaaatcatcagtttctatgccaagcgtgcgcgtggattaatggtgcgctatgcggcagaacatcatattaccgaccctgaaatgctgaaaaattttaattacgaaggctacgcattcaatgacgcggcttcaaatgaaagcgaatgggtttttatgcgttcggaacaaataaagtga

SEQ ID NO: 50669 - DNA, 642 bp, Neisseria meningitidis; identical to SEQ ID NO: 41835

SEQ ID NO: 50670 - DNA, 1011 bp, Neisseria meningitidis; identical to SEQ ID NO: 43278

SEQ ID NO: 50671 - DNA, 891 bp, Neisseria meningitidis; identical to SEQ ID NO: 43449

SEQ ID NO: 50672 - DNA, 1020 bp, Neisseria meningitidis
atgaaaaaaattctcgttaccggcggcaccggttttatcggctcgcataccgttgtttctttgctgaaaagcggccatcaagtcgtgattttggataacctatgcaattccagcatcaatatcctgccacgcttgaaaacgattaccggccaagagattccgttttatcaaggcgatatccgcgatcgtgagattttgcgccgtatttttgcggaaaaccgcattgattcggtgattcattttgccggcttgaaagcggtgggtgaaagtgtggccgagccgatgaaatattatgataataatgtttccggcagcttggtgttggcggaagaaatggcgcgtgcgggcgtgtttagcattgtgttcagttcttcggcgacggtttatggcgatccgggcaaagtgccttataccgaggatatgccactgggcgataccaccagcccttacggcacatcgaaatcaatggttgagcgcattctcactgacattcaaaaagccgatccgcgctggagcatgattttgttgcgttatttcaatccaattggcgcgcatgaaagcggcttgattggcgagcagccaaacggtatcccaaataatttgttgccttatatctgccaagtggcggcaggcaaactgccgcaattagcggtattcggcgatgactaccctacccctgatggcacgggtatgcgcgactatattcatgtgatggacttggcagaaggccatgtcgcggctatgcaggcgaaaagcaatgtagcaggcacgcatttgttgaacttaggttccggccgcgcttcttcggtattggaaatcatccgcgcatttgaagcagcttcgggtttgacgattccgtatgaagtcaaaccgcgccgtgccggtgatttggcgtgcttctatgccgacccttcctatgcaaaggcgcaaatcggctggcaaacccagcgtgatttaacccaaatgatggaagactcatggcgctgggtgagtaataatccgaatggctacgacgattaa

SEQ ID NO: 50673 - DNA, 4176 bp, Neisseria meningitidis
atgaatttgttgaacttatttaatccgttgcaaactgccggcatggaagaagagtttgatgccattaaaatcggtattgcctctcccgaaaccatccgctcatggtcttatggcgaagtcaaaaaacctgaaaccatcaactaccgtacgttcaaacctgagcgtgacggtttgttctgtgccaaaatctttggcccggtcaaagactacgaatgcttgtgcggaaaatacaaacgcttgaaatttaaaggcgtaacgtgtgaaaaatgcggcgtggaagtaaccctgtccaaagtgcgccgcgaacgcatgggtcatatcgaattggctgcgcccgtcgcacatatttggttcttaaaatccctgccttcccgcttgggtatggtgttagacatgactttgcgcgacatcgagcgcgtattgtactttgaagcatttgtggtaaccgatcccggtatgactccgctgcaacgccgccaattgctgactgaagacgattactacaacaagctggacgaatacggcgacgatttcgatgccaaaatgggtgcggaaggtatccgcgaattgctgcgtaccctgaatgtagcgggcgaaatcgaaatcctgcgccaagagttggaatcgaccggttccgacaccaaaatcaaaaaaatcgccaaacgcttgaaagtattggaagccttccatcgttccggtatgaaactggaatggatgattatggatgtgctgccggtattgccgcctgatttgcgtccgttggttccattggatggtggtcgttttgccacttccgatttgaacgatttgtaccgccgcgttattaaccgtaacaaccgtctgaaacgtctgttggaactgcatgcgcctgacatcatcgtccgcaacgaaaaacgtatgttgcaagaagcagttgactcgctgttggataacggccgtcgcggtaaagccatgaccggcgccaacaaacgcccgctgaaatcattggcagacatgattaaaggtaaaggcggtcgcttccgtcaaaacctgttgggcaaacgtgtggactactccggccgttccgtgattaccgtaggcccgtacctgcgtctgcaccaatgcggtttgccgaaaaaaatggctttggaactgttcaaaccgttcattttccacaaattggaaaaacaaggtttggcctctaccgttaaagcagcgaaaaaattggtagagcaagaagtaccggaagtatgggacatcttggaagaagtcatccgcgaacatccgattatgctgaaccgtgcgccgaccctgcaccgtttgggtattcaagcgttcgaacctatcttgattgaaggtaaagcgattcagttgcacccattggtgtgtgctgcgttcaacgccgactttgacggcgaccaaatggcggtacacgttccattgagcttggaagcacaaatggaagcacgcacgctgatgctggcttcaaacaacgtattgtctccggccaacggcgaaccgattatcgtaccttcccaagacatcgtattgggcctgtactatatgactcgcgatcgtatcaatgccaaaggcgaaggcagcctgtttgccgatgtgaaagaagtgcatcgcgcataccataccaaacaggtcgagctgggtacgaaaatcaccgtacgtctgcgcgaatgggtgaaaaacgaagcaggtgagtttgagcctgtcgttaaccgttacgaaacaaccgtcggccgtgcattgttgagcgaaatcctgccgaaaggcctgccgtttgaatatgtcaacaaagcgttgaagaaaaaagaaatttctaaactgattaacgcatcgttccgcctgtgcggcttgcgcgatacggttatctttgctgaccacctgatgtacaccggtttcggatttgcggcaaaaggcggtatttccattgccgttgacgatatggaaattccaaaagaaaaagcggccttgctggctgaagccaatgccgaggttaaagaaatcgaagaccaataccgtcaaggtttggttaccaacggcgaacgctacaacaaggtggtcgatatttggggtcgtgccggcgataagattgctaaagcgatgatggacaacttgtccaaacaaaaagttatcgaccgtgccggcaacgaagtcgatcaagagtcattcaactccatttatatgatggcggactccggtgcccgtggttctgcagctcagattaaacagttgtccggtatgcgtggcttgatggcaaaacctgacggctcgattattgaaacgccgattacctcaaacttccgtgaaggtctgaccgtattgcaatactttattgcgacccacggtgcgcgtaagggtttggcggataccgcattgaaaaccgcgaactccggttacctgactcgtcgtctggtagacgtaactcaagatttggtcgttgttgaagacgattgcggtacttcagacggctttgtcatgaaggcagtggtacaaggcggtgatgtgattgaagcattgcgcgatcgtattttgggtcgtgttaccgcgtctgacgttgtcgatccgtcaagtggcgaaaccttggttgaagccggtacgttgctgactgaaaaactggtggatatgatcgaccaatccggtgtcgatgaagtcaaagtccgtacgccgattacttgtaaaacccgtcacggcctgtgtgcacactgttacggtcgtgacttggcacgcggcaaactggttaacgccggtgaggcagtcggtgtgattgctgcacaatccattggcgaaccgggtacccagttgaccatgcgtacgttccacatcggtggtgcggcatcccgtgcggcagcagccagccaagtggaagccaaatccaacggtacggcacgattcagcagccagatgcgctacgttgccaacaacaaaggcgagttggttgtcatcggccgttcttgtgaagtcgtgattcacgacgatatcggccgtgaacgcgaacgccacaaagtaccttacggtgccatcctgctggtacaagacggtatggccattaaagccggtcaaaccttggcaacctgggatccgcatacccgtccgatgattaccgaacacgcaggtatggtgaaattcgaaaacgtggaagagggcgttaccgttgccaaacaaaccgatgatgtaaccggtttgtccactttggtggtgattgacggtaaacgtcgttcctctagtgcttccaaactgctgcgtccgactgtgaaactcttggacgaaaacggcgtggaaatctgtattcccggtacttctactccggtatccatggcattccccgttggtgcggtgattaccgtacgcgaaggtcaggaaatcggtaaaggcgacgtattggcgcgtattccgcaagcctcttccaaaacccgcgacattaccggcggcctgccgcgcgttgccgagctgtttgaagcacgcgtgccgaaagatgccggtatgttggcggaaattaccggtaccgtttccttcggcaaagagaccaaagggaagcaacgtctgattatcactgacgtggacggtgtagcatacgaaaccctgatttctaaagagaaacagattctggtacacgacggtcaagtggtaaaccgcggcgaaaccattgtggacggcgcggtcgatccgcacgatattctgcgtctgcaaggtatcgaagcactggcacgctacattgtccaagaggtgcaagaggtttaccgtctgcaaggtgtgaagatttctgataaacacatcgaagtcatcatccgtcaaatgttgcgccgtgtgaacattgcggatgccggcgaaaccgggttcattaccggagagcaggtcgaacgcggcgatgtgatggcggccaatgaaaaagctttggaagaaggcaaagaaccggcgcgttacgaaaacgtattgctgggtattaccaaagcttccctgtccaccgacagtttcatttctgccgcatcgttccaagaaacgacccgtgttctgaccgaagccgcgattatgggcaaacaagacgaactgcgcggtttaaaagagaacgtcatcgtcggccgcctgattcctgccggtaccggtttgacttatcaccgcagccgtcatcagcaatggcaaggggtagagcaggagactgctgaaacccaagtaacggatgaataa

SEQ ID NO: 50674 - DNA, 456 bp, Neisseria meningitidis
atggatttgcgcaaattaaaaaaactgattgatttggttgaagaatcgggtatcgccgaaatcgaagtaaccgaaggcgaggaaaaagtccgcatcacccgaaccatcgccgccgcacccgtttacgccgcgcccgtacctgccgccgcgccggccgtaacgcctgccgccgcacccgttgcggcatccgcgcccgccgccgcacctgccgcccgcgatttgtccgacgcgcaaaaatcgcctatggtcggcacgttctaccgcgcacccggcccgaatgccgcgccttttgtcgaagtcggccaacaggttaaagccggcgacacgctgtgcatcatcgaagcgatgaagctgatgaacgaaatcgaagccgaaaaatccggcacggtcaaagaaattctggtcgaaaacggtacgcccgtcgaattcggcgaaccgctcttcatcatcggataa

SEQ ID NO: 50675 - DNA, 1098 bp, Neisseria meningitidis
atgaaatccgtccgctccttcatccgcgacgacatacaagctatgtcggcatatcagattgccgacgttccgcccggctttgccaaactcgattcgatggaaagtcccgtccacccttttgccggacatgaaacgctgttgcaggaatggcaggcacggcttgccgccgcgcccatccatctttaccccaatccctccggcagcggtttacaggaagcattacgttcggcgttcgacattcccgactgcgccgacatcgcgctgggcaacggttcggacgaactgatacagttcatcacgatgctgaccgccaaaccgggcgcggcaatgttggcagccgaacccagtttcgtcatgtaccgccacaacgccgcgctgtacggcatggattatgtcggcgttccactgaacggagatttcaccctcaacctgcccgccgtcctcgaagccgtcaggaaacaccgccctgccctgacctttatcgcctaccccaacaaccccaccggcgtatgcttcacgcgtgccgaaatcgaagccgtcatcgaagcttcagacggcatcgtcgtcgtcgatgaagcctacggcgcattcaacggcgacagcttcctgccgcaggcaggcaggattcccaacctgatagtcttacgcaccctcagcaaaatcggttttgccggactgcgtatcggttatgcggcaggctgccccgaagtcatcggcgaactgcaaaaaatcctgccgccctacaatatgaaccaattgagcctgaccactgccaaactcgccctgcggcactacggcattatctctgccaacatcgacagcctgaaaaacgaacgcgaacggatgttcgccgaattgggcaaaatatgccgtctgaacacctttccaagtcaggcaaacttcattaccatacgcgtacccgatgccgatttgttgtttgacacgctcaaacaaaaccgcatcttggttaaaaaactgcatggcgcgcacccgcttttggaacactgcctgcgcattaccgtaggcagccccgcacaaaacgatgccgttctcaacatcattcgccaactttactgccaaccaacggatttcctatga

SEQ ID NO: 50676 - DNA, 324 bp, Neisseria meningitidis
atgatgaccgaaagcgagtttatccgcgcgagcgaagcattatttgaacacatcgaagaccaaatcgacgaaaacggctgggatttcgactgccggtttgccggaaacgtcctgaccatcgaagccggagacggcacgcaaatcatcgtcaaccgccacacgcccaatcaggaattgtggattgccgccaaaagcggcggctaccatttcgccgagcaaaacggcaaatggctggcaacgcgagacagccgcgatttttatgatgttttaaacgaagccctgagcgcggcttcgggcgaagcggtggaaattgccgaattgtga

SEQ ID NO: 50677 - DNA, 3966 bp, Neisseria meningitidis
atgtctgtcgttttgcccttgcgcggcgttaccgccctttccgatttccgtgtcgaaaaactcttgcaaaaagccgccgcactcggtctgcccgaagtcaaattaagcagcgaattttggtatttcgtcggcagcgagaaagcattggatgccgcgactgtcgaaaaactgcaagccttgttggcggcgcaaagcgttgaacaaacgccaaaagcgcgcgagggcttgcatttgtttttggtcacgccccgtttgggtacgatttcgccgtgggcttccaaggcgaccaatatcgcggaaaactgcggtttggcaggcatcgagcgcatcgagcgcggcatggcggtgtggctggaaggtgcgcttaccgatgaacagaaacggcaatgggcggcgttgctgcacgaccgcatgaccgaatcggtgctgcccgattttcagacggcatccaaattattccaccatctcgaatccgaaaccttttccaccgttgatgttttaggcggcggtaaagaggctttggtcaaagccaataccgaaatgggtttggcactctccgccgacgaaatcgattatctggttgaaaactatcaggctttgcagcgcaatccgtccgatgtggaactgatgatgttcgcgcaggcaaacagcgaacactgccgccacaaaatcttcaacgccgatttcatcctcaacggcgaaaaacaaccgaaatccctgttcggcatgatacgcgacacgcacaacgcgcatcccgaaggtacggtcgtcgcctataaagacaattcgtccgtgatcgaaggcgcgaaaatcgagcgtttctatccgaatgcggcggaaaaccaaggttaccgtttccacgaagaagacacgcatatcatcatgaaagtggaaacgcacaaccacccgaccgccatcgcgccgtttgcgggcgcggcaacaggcgcgggcggcgaaatccgcgacgaaggcgcgacgggcaaaggttcgcgtccgaaagcaggcttgaccggctttaccgtctccaacctcaacatccccgacctcaaacagccgtgggaacaagactacggcaagccggaacacatttcctcgccgttggacattatgattgaaggccccatcggcggcgcggcgttcaacaacgaattcggccgccccaacctcttgggctacttccgcacttttgaagagaagtttgacggtcaggttcgcggctatcacaaaccgattatgattgccggcggcttgggcagcattcaggcgcagcagacgcataaagacgaaatccccgaaggcgcattgctgattcaactgggcggcccgggcatgcttatcggcttgggcggcggcgcggcttcttcgatggataccggcacgaacgacgcgtctttagacttcaattccgtacaacgcggcaaccccgaaatcgaacgccgcgcgcaggaagtcatcgaccgctgctggcagctcggcggcaaaaacccgattatctccatccacgacgtgggcgcgggcggtttgtccaacgccttccccgaactcgtcaacgatgccggacgcggcgcggtattcaagctgcgcgaagtgccgttggaagaacacggtttaacgcctttgcaaatctggtgtaacgaatcgcaagagcgttatgtgttgtcgattttggaaaaagatttggacaccttccgcgccatctgcgaacgcgaacgctgcccgtttgccgtggtcggcacggcgaccgacgacggccatttgaaagtgcgcgacgatttgttcgccaacaaccccgtcgatttgccgctgaacgtcttgctcggcaaaccgcccaaaaccacgcgtaccgacaaaacggttacgccgtccaaaaaaccgtttcacgccgacgatatcgacatcaccgaagccgcctaccgcgttttgcgcctgcctgccgtagccgccaaaaacttcctgattaccatcggcgaccgcagcgtcggcggcatgacccaccgcgaccaaatggtcggcaaataccaaacccccgtagccgactgcgccgtgaccatgatgggcttcaacacctatcgcggcgaagcgatgagcatgggcgaaaaaccggccgtcgccctgtttgacacgcctgcctcgggcagaatgtgcgtcggcgaagccatcaccaacatcgcggcggtcaacatcggcgacatcggcaatatcaaactctccgccaactggatggcggcgtgcggcaacgaaggcgaagacgaaaaactctaccgcaccgtcgaagcggtttccaaagcctgtcaggcattggatttgagcattcccgtgggcaaagacagcctgtcgatgaaaaccgtatggcaggatggcgaagagaaaaaatccgtcgtttcgccgttaagcctgattatctccgcgttcgcgccggtcaaagacgtgcgcaaaaccgttacgcccgaattgaaaaacgtcgaagacagcgtattgttatttatcgatttgggcttcggcaaagcgcgtatgggcggctcggcgtttggtcaggtgtacaacaatatgagcggcgacgcgcccgatttggacgatacaagtcgtctgaaagcgttttacaacgtgattcaacagcttgtcgccgaagacaaactcttggcataccacgaccgcagcgacggcggtttgtttgccgttttggtagaaatggcgtttgcggggcggtgcggcttggatatagatttaaatttattgcttgcacaaacatttattaccaaccataccgctctgtctcaatcattgcggactgaagaggtaaaagcgttggctgaatggcaagaaaccattgcccgcacattatttaatgaagagttgggtgctgttatccaagttagaaaacaagatgttgccgatattatcaatttattctatcaacaacagctgcatcataatgtctttgaaatcggtacgttaactgatgagaacacgttaatcatccgcgacgggcaaacgcaccttatttctgacaacctaatcaaactgcaacaaacctggcaagaaaccagccatcaaatccaacgcttgcgcgacaatcctgcctgcgccgacagcgagttcgcactgattggcgacaacgaacgcagcgcattgtttgccaacctgaaattcgacgtgaacgaagacatcgccgcgccgtttatcaacagcggcgcgaaacccaaaatcgccatcctgcgcgaacagggcgtgaacgggcaaatcgaaatggccgccgcgttcacccgtgccggattcgatgcctacgacgtgcatatgtccgacctgatggcaggccgcttccgccttgccgacttcaaaatgctggcggcgtgcggcggcttcagctacggcgacgtactcggcgcgggcgaaggctgggcgaaatccatcctgttccaccctgctctgcgcgaccagtttgccgcattcttcgccgacccggacacgctgacattgggcgtgtgcaacggctgccaaatggtcagcaacctcgccgagattatcccgggtgcagcagaggcatggcctaaattcaaacgcaacctgagcgaacagtttgaagcacgcctgagcatggttcatgttccgaaatccgcatcactgattctgaatgaaatgcaaggctccagcctgcctgtcgtggtcagccacggcgaaggccgcgccgacttcgcgcttcacggcggcaacatttctgccgatttgggcattgcgttgcaatatgtggacggacaaaaccaaattacccaaacctacccgctcaaccccaacggctcgccgcaaggcatcgccggcgtgaccaacgccgacggccgcgttaccatcatgatgccgcatcctgaacgtgtataccgcgccgcacaaatgagctggaaaccggaagactggacggaattgtccggctggtaccgcctcttcgccggcgcacgtaaagccttgggctaa

SEQ ID NO: 50678 - DNA, 876 bp, Neisseria meningitidis
atggaagaaggtttgatcgacaggctgcttgaaacgctgtggttggacaggcggctcagtcagaatactttaaacggttaccggcgcgatttggaaaaaatcgcccgccgcctgtcccaatcgggcagaatgctgaaggatgcggacgaagcggatttggcggcggcggtttatgttgacggagagcaacggagttcgcaggcgcgcgcattatcggcgtgcaaacgcctgtatatatggatggagcgtgaaggcataaggacggacaatcccacccgtttgctgaaaccgcccaaaatcgacaagaatattccgacactgattacagaacagcagatttcccggctgcttgccactccggatactgatacgccacacggtttgcgggacaaggctttgctcgaattgatgtacgcgaccggcttgcgcgtcagcgaggcggtcgggctgaacttcggcaatgtggatttggacaggggctgtattaccgcgctgggcaagggcgataagcagaggatggtcccgatggggcaggagtcggcgtattgggtggaacgctattatacggaggcacgcccacttctgctgaaaggcaggaattgcgacgcattgtttgtcagtcagaaaaagacgggcatttcccgtcagttggcatggatgattgtcaaagaatatgcaagtcaggcaggcatcgggcacatcagcccgcacagcctgcgccacgcctttgccacgcatctggtgcggcacggcttggatttgcgcgtggttcaggatatgttgggacatgccgatttgaatacgacgcagatttatacccatgttgccaacgtatggttgcagggtgtagtgaaggaacaccattcccgaaactga

SEQ ID NO: 50679 - DNA, 141 bp, Neisseria meningitidis; identical to SEQ ID NO: 42905

SEQ ID NO: 50680 - DNA, 318 bp, Neisseria meningitidis
  misc_feature 295, 296, 297, 298, 299: 'n' is a, c, g or t
ttggacggagacggtatagaaaccgttgccaccaaaggctttgcaggcagcttatttgatcacaccaacaacggtatccgcaccgccaccggttgggtttctgccgatgacggtttactcgtccgcgatttgaacggcaacggcatcatcgacaacggtgcggaactcttcggcgacaacaccaaactggcagacggttcttttgccaaacacggctacgcggctttggccgaattggattcaaacggcgacaacatcatcttcgccaaagaaggtaacttctcgctgaacgacnnnnncacacacttaattaattaa

SEQ ID NO: 50681 - DNA, 240 bp, Neisseria meningitidis; identical to SEQ ID NO: 43044

SEQ ID NO: 50682 - DNA, 720 bp, Neisseria meningitidis
ttgactttaacccgaaaaacccttttccttctcaccgccgcattcggcacacactcccttcagacggcatccgccgacgcagtggtcaaggcagaaaaactgcacgcctccgccaaccgcagctacaaagtcgccggaaaacgctacacgccgaaaaaccaagtcgccgaattcacgcaaaccggcaacgcctcgtggtacggcggtaggtttcacgggcgcaaaacttccggcggagaacgatacgatatgaacgcctttaccgccgcccacaaaaccctgcccatccccagctatgtgcgcgtaaccaataccaaaaacggcaaaagcgtcatcgtccgcgtcaacgaccgcggtcccttccacggcaaccgcatcatcgacgtatccaaagccgccgcgcaaaaattgggctttgtcagccaagggacggcgcacgtcaaaatcgaacaaatcgtcccgggccaatccgcactggttgccgaaaacaaagacatcttcatcgacttgaaatctttcggtacggaacacgaagcacaagcctatctgaaccaagccgcccaaaacttcgccgcttcgacatcaagcccgaacctcgccattgaaaaacgccgttacgaatacgtcgtcaaaatgggtccgtttgcctcgcaggaacgcgccgccgaggccgaagctcaggcgcgcggtatgattcagacggtattgaccgccggttga

SEQ ID NO: 50683 - DNA, 1023 bp, Neisseria meningitidis
atgctgacaaaaaaggagtttgagaagtttttagacgaggtttgcaccgtattgaggcaagaggcaaaaaacgcacctttcaaatcccaagatatttttgaaaacagagttcgtgcgctgtgcattgcaaaaattcccgcttatgctgacatagttatcaatcctgaacctgtgccgcaaattttccccgatgttccaataggggaatatggcgtagaagtcaaattcacgctaaaagatacttggcgcagcgtagcaaacagtatccaagagaaaaacaaagctgacggtgtacagcatatctatgtggtattcggaaaaatggggggcattcccgatgtgaaatggcaactttacgaagatagcgtaattcatgtccgcacatcgcatgttccgcgctttgaggtagaaatagaatctgatcgaccgtctctgtttgagggtttcggtatttcctatgctgaatttgccgatttggatatgcatgaaaaaatggaatatatccgaaaatatgcccgtaacaggctgaaagaaggcgagcggttatggtggatagaagacattgacgcagtagacagccatgatctgcctttggaagtgcgcctttacacttccctgccgcaggaagaaaaaatccgcctccgagctgaagcagcattagtctccccccgtattgtctgctcaggcagggcgaagcacaaatacgataatgccgtcctgtatctgattacctatcgcggtgtgctttgtcatcaggcgcgggacttattcagtgcgggcagcgttgccaactcggcggaagactaccgtggcggaaactatgtagaaaaatctttaaaattgattgagcatgaaattgaaaaagctgctttggaaatggatgatgctctaattgtcgaatattggggagaaagcgtcccgacagaaaaacgcctagagtattggattaagatgttggatgatttggcagatggctggataccttctgaatcgctattcaatggtaggtataaagccaaataa

SEQ ID NO: 50684 - DNA, 1194 bp, Neisseria meningitidis
atgtctgatcaaaaaaaccgcagaaatgccttaatcggcgctgcattcctgatggcgacttccgccatcggcccgggctttctgacccaaaccgccaccttcacccaagcactggcggcaagtttcggctttgtgattctgctctcgattctgctcgacatcggggcgcagctcaatatttggcggattgtcgccgtttccgaaaaacaggcgcaggatattgccaatcaggtcttgcccggcgcaggctatttcttggctgtgctgattgtgatgggcggtttggcgttcaatattggcaacgtcggcggcgcaggcttgggtctgaacctgctgaccggactgtcgccggaaaccggtgccgtgatcagcggcgtgattgccatcggtgtgtttctgtttaaagaagcaggcaaagtgatggacaaattcgcccaagtgatgggtttcgtaatgattgcgctgacggtttatgtggcatggcaggcgaatccgccgctggcagatgccgccgtgcatacctttatgccggaaaaactcgatgcaatggcgattgttacactggtgggcggcacggtcggcggctacatcaccttcgccggtgcgcaccgtctgctggacgcaggtatcaaaggcaaatcggcgttgccggaagtgagccaaagctcggtgcgggcgatcctgattgcctcgattatgcggattgtattgtttttggcggttttgggcgtggtcagccaaggcgtacagctcaatcccgacaaccctgcttccacaccgtttgaatatgcggcgggatacatcggcctgctgattttcggcgtggtgatttgggcggcttcgattacttcggtgattggtgcggcttatacttcggtgtcgttcttctccggtctcagcccgtctatcgaacgcaataaaaacaaatggattattgcctttatcgccgtgtccaccgccgtattttccaccatcggcaaaccggcgcaggtgctggtgttcgtaggcgcattaaacggcctgattttaccgatttccctcggtctgattctgattgccgcctacaaaaccaaaattgtcggcgactacaaacacccgctgtggctcaccgtttccggcgtgattgtggtcggtttgatggcagtactcagcgccattaccatcagcaaatatatcggcggcttgttcggctga

SEQ ID NO: 50685 - DNA, 738 bp, Neisseria meningitidis
atgttaagcgcgcgctacctccacctgcacgaagccttgggtttgggcccgatgtggctgaaacaggccgctgccgtcctgccgcccaaaaacacacccgcaaccccggcacaggcacgtcctcaaaccgtccgcgccgccccgatccgcccttcccaaccccataacggtcaggcgcggctcgaaacgatgaaagcgttggaaaccgccgccgtacctacgcgcaaacccgcgcctgaaaccgaaacgcctctgcccggcctttcagacggcatcgcccctgttcccgccgcttcgggcataaccaaacttgccgtcgtcagcctttgcccaccgatcgaggatgcggtttacgggcagctgttccacggcaaagcgggtgtcctgcttgacaacatactcaaagccgtaggactggatgccgcttatgtacacaagaccagctgggtgaaaaccgccgccgtcggcaacccgatgccgtctgaacaggccgtcgcgaatgcgctgggtcaaatcgccagggaactcgacggctgccgtgcccccgccgtccttttcctcgggcaggcttttgtccagcctgaacggcaaacgatgattgaaactttgtgcggcagccgtcccttcttcatcatcgaccatcccgcccggctgttgcgccaacccgaacttaaagcccgcgcctggcaggtgttgaaacagttgaaacgcgccttgcggcaaggcggcggcagttga

SEQ ID NO: 50686 - DNA, 669 bp, Neisseria meningitidis
atgttaccctagaaatatgaagataacacactgcaaattaaagaaaaaagtacaaaaagaactgctccgttttttgtgctggaagttaccgcccgttctgccgccgatattttgggtatccatcccaattcggcagcactgttctaccgtaaaatccgcacggttatcaaccatcatttggccttggctgccgatgaggtttttgagggccctgtcgagccggacgaaagcgatttcggcggacggcgtaaaggtagacgtggtcgcggtgcagcaggaaaagtggttgtcttcggcattctgaaacgcaacggacgggtctataccgttgtggtggataatgccaagtctgaaacgttactccctgtcatcaagaagaaaatcatgccggacagtattgtttataccgatagtctgagcagctgcgacaagttggacgtgagcggttttatccattaccgcatcaaccattccaaggaatttgcagaccgtcagaaccacattaacggcattgagaacttttggaatcaggcaaaacgcgtcttgcgaaaatacaatggaatcgatcgcaaatctttcccgctgttcttgaaagaatgcgaatttcgatttaacttcggcacaccgtctcaacagcttaaaatcctgcaaaaatgatgtggaatttag

SEQ ID NO: 50687 - DNA, 372 bp, Neisseria meningitidis; identical to SEQ ID NO: 39100

SEQ ID NO: 50688 - DNA, 1254 bp, Neisseria meningitidis
atgtccgaacaacatatttcgacttggaaaagtaaaatcaacgcattgggaccggggattatgatggcttcggcggcggtcggcggttcgcacctgattgcctcgacgcaggcgggcgcgctttacggctggcagatcgcgctcatcatcatcctgaccaacctcttcaaatacccgtttttccgcttcagcgcgcattacacgctggacacgggcaagagcctgattgaaggttatgccgagaaaagccgcgtttatttgtgggtattcctgattttgtgcatcctctccgccacgattaacgcgggcgcggtcgccattgtaaccgccgccatcgtcaaaatggcgattccctcgctgatgtttgatgccggcacggttgccgccttgattatggcatcctgcctgattattttggtgagcggacgttaccgcgctttggatcgcgtttccaaaatcatcatcgttactttgagtatcgccacgcttgccgccgccggcatcgctatgtcgcgcggtatgcagatgcagcccgattttatcgagccgacaccgtggacgcttgccggtttgggcttcctgatcgcgctgatgggctggatgcccgcgccgattgaaatttccgccatcaattctttgtgggtaaccgaaaaacaacgcatcaatccttccgaataccgcgacgggatttttgatttcaacgtcggttatatcgccagtgcggttttggctttggttttccttgcactgggtgcgtttgtgcaatacggcaacggcgaagcagtgcagatggcgggcggcaaatatatcgggcaattgatcaatatgtacgccgttaccatcggcggctggtcgcgcccgctggtggcgtttatcgcgtttgcctgtatgtacggcacgacgattaccgtcgtggacggctatgcccgtgccattgccgaacccgtgcgcctgctgcgcggaaaagacaaaacgggcaacgccgaattctttgcctggaatatttgggtggcgggcagcggtttggcggtgattttttggtttgacggcgtaatggcgaatctgctcaaatttgcgatgattgctgcttttgtgtccgcccctgtgtttgcctggctgaattaccgtttggtcaaaggtgatgaaaaacacaaactcacatcaggtatgaatgcccttgcattggcaggcttgatttatctgaccggttttaccgttttgttcttattgaatttggcgggaatgttcaaatga

SEQ ID NO: 50689 - DNA, 849 bp, Neisseria meningitidis; identical to SEQ ID NO: 37501

SEQ ID NO: 50690 - DNA, 1344 bp, Neisseria meningitidis
atgtttcacagtgtcaatgtatttacgggcgaaacgctttaccgccgccccgctcaagattatgcggagtttgaacggcggctggcggatttgaaaatgcgcggcggggcgttcgcgcaactgggcgtaaccgaacgtgccgcgcgtctgcaaaaatttgccgaccgtttggaggcggagaaagagcgttttgcggaaatggtgtgcgaagaagtcggacgctgcctgcacgaatgccgtgcggaaatcggcaagtctatcgaactgatacgctattacgcccaccttgcccccgaactgcttgcccacaaaaccatcgcgacgcaggcgagtttgagtcaggtaaggtttgagcctttgggtgtggtgtttgccgtcatgccttggaactatcccgtctggcaggtattgcgtttcgccgttcccgctatgtgcgcgggcaacgcgtgcgccgtcaaacccgcgcccagcgtggcacgcgtcagtcaggcactgttcgatttggcttcagacggcattcctctggcaggcgcgtggttggatgaggcgggcacgctcaaggcggttgaagataccgatgcgatggcgtttaccggctcgacgcatacggggcgcatccttgcggcacatgcgggcgcaaacctcaagaaaaccgtcttggaactcggcggcagcaacgcctttatcgtgatgcccgatgccgatttggaacgcgccgccgcagaagcctgttattcccgtttccgcgatgcggggcaatcgtgcaacgccgccaaacgcatcatcgtaaccgaagccgcagccgatcgttttatcacgctgtttcttgccgaatgcgccaaattgaaaatgggcgaccccaaacatcccgatactacgcttgcaccgctgcaccgcgaagatttgcgggacagggttcacgggcaggttgaagatgccgtttcaaacggcgcggtatgcctgaccggcggaaaaatcccacaagggcgaggctggttttatcccgcgacggttttagacagggtaaatcctgcctgccgtgtctggagagaagaagtattcgggccggccgccctgattttgcgcgccgaaaacgaagaacatgccatcgcccttgccaatgattccccgttcgggctaggtgcctgcatttataccgccgataccgaacgcgcttggcggtttgccgaaaaaatacaggcgggatcggtgtttatcaaccgccataccagcagcgatttgcgcctgcctttcggcggagtcaaagattccggttacgggcgcgaattgtccgaattcgggctgtacgagttcgtcaacgtcaaaacctactggcagaaataa

SEQ ID NO: 50691 - DNA, 324 bp, Neisseria meningitidis; identical to SEQ ID NO: 38492

SEQ ID NO: 50692 - DNA, 876 bp, Neisseria meningitidis
atggcagtaggaaaagagattctcaccaaaatccgcagtgttcagaatacccaaaagatcactaaagcgatgcagatggtgtcaacctctaaaatgcggaagactcaggaacggatgcgtttggcgcgtccgtatgccgaaaaagtgcgtatggtgatgagccatcttgcgcaaaccaataccgatcatggtattccgttgctggaatctcatcgggaaatcagacgtgtcggttttattttgattacgtctgataagggtttgtgtggcggtttgaacgccaacgtgctgaaaaagtttttggcacaagttcaagagtatcggaatcaaggtattgaagaggaaatcgtatgccttggcagtaaaggtctgatggcgtgtcagagcattggtctgaatgtggttgccagtgccgtaaatttgggcgataccccaaaaatggaaatgctgctcggacctttgacagaactcttccaacggtatgagaaacatgaaattgacagaatccatctggtgtattcgggttttgtcaataccatgtgtcaggaaccgagaatggaagtattgctgcctatcggtgagaacgtgattggcgattcagctcccaaatcaccgttcagctgggaataccgctacgaaccgactgcacttgcagtgttggaatatctggttcgccgctatttagagtctgtggtttatcaggcgttgagcgacaatatggcatccgaacaggcagcccgcatggttgccatgaaagctgcaacagacaatgcaggcaatgccatcaaagagttgcgtttggtatataacaaatcgcgtcaagctgcgattaccacggaattgtcagaaattgtagcaggtgcggcggctgtctga

SEQ ID NO: 50693 - DNA, 2664 bp, Neisseria meningitidis
atgtccacccaattacacgatgttgaccctatcgaaacccaagagtggctggacgcgttaagctccgtcctcgaatatgaaggcggcgaacgcgcacaatacctcttggaaaacctggtcaaatactgccgcgacaagggcgtacgtatgccacacggcacgaccaccccgtatttgaataccgtttcggttgaaaacgaaaaaggcattccgggcgaccaaaacatcgaacaccgcatccgcgcattcgtgcgctggaacgccgccgccatcgtattgcgcgccggcaagaaagatttggaactgggtgggcacatcgcatctttccaatctgccgccaccatgtacgaagtcggtttcaaccacttttggaaagccaaaggcgaaggcgaagaaggcgatttggtcttcttccaaggtcacgtcgccccgggcatctatgcacgcgcattcgtcgagggccgtctgaccgaagaccagctgaacaacttccgccaagaagtggacggacacggtctgccttcctatccgcacccccacctcttgcccgacttttggcagttcccgaccgtatccatgggcttggggcccatcatggcgatttatcaggcgcgtttcctgaaatacttggaatcgcgtggtttggcaaaaaccaaaggccgtaaagtatggtgtttctgcggagacggcgaaatggacgaacccgaatctcaaggtgcaatcgcactggctgcacgcgaaggcttggacaacctgattttcgtcatcaactgcaatctgcaacgcttggacggtccggtacgcggcaacggcaaaatcatccaagaattggaaggcaactttgccggcgccggctggaatgtcgtcaaagtcatttggggccgccgctgggaccgcctcttggcgaaagacaaagacggtatcctgcgccaacgtatggaagaatgtttggacggcgactaccaaacttacaaatccaaagacggcgcgtatgtgcgcgaacacttcttcaatacgcccgaactgaaagcattggttgccgatatgaccgatgagcaactctgggcattgaaccgcggcggccacgacccgcaaaaagtgtacaacgcctacgaccgcgcagcgaaccatgccgacggcaaacctaccgtcatcttggcgaaaaccattaaaggttacggtatgggcgcatccggcgaaggtcagaacgttgcccaccaagccaaaaaaatggacaaagcgtccctgaaacaattccgcgaccgctttgacattccggttaccgacgaacaaatcgaaagcggcgatctgccttacctgacttttgcccccgatacggaagaatacaaatacctgcacgcacgccgcgatgctttgggcggctacctgccgcaacgcaaaccgacgcaggaagtattggaagtgcccgagctgtcagcattcgacgcacaactcaaatccagcggtgaacgcgagttctcgaccacgatggcattcgtccgcatcctgtccactttgctgaaagacaaaaaaatcggcaaacgcgtcgtacctatcgttcccgacgaaagccgtactttcggcatggaaggtatgttccgccaatacggtatttggaatccgaaaggtcagcaatatacccctcaagacaaagaccaactgatgttctataaagaatccgttgacggtcaaatcttgcaagaaggtattaacgaaccgggcgcgatggccgactggattgcggctgcaaccagctacgccaacagcaacttcgccatgattccgttctacatctactactctatgttcggtttccaacgtatcggcgacttggcttgggcggcgggcgatatgcacgcgcgcggcttcctgctgggcggtactgccggccgtacgacgctgaacggcgaaggcctgcaacacgaagacggccacagccacagccaggccgacctgattccgaactgcgtatcttatgacccgactttccaatacgaagtcgccgtcatcgtacaagacggtctgcgccgtatgtatgccaataatgaagacgtgttctactacatcaccctgatgaacgagaactacacccatccggatatgcccgaaggtgcggaacaagacatcttgaaaggtatgtacctgctgaaagccggcggcaaaggcgacaagaaagtccaactgatgggttccggtacgattttgcaagaagtgattgccggtgccgagctgctgaaagccgacttcggcgtggaagcagacatttggtcttgcccatccttcaacctgctgcaccgcgacgctgtcgaggtagaacgcttcaaccgcctgcatccgctggaagccgaaaaagtacctttcgttacttcccaactgcaaggtcatgacggtccggttattgccgctaccgactatatccgcagctatgctgaccgtatccgcgcctacatcccgaacgactaccacgtcttgggtactgacggcttcggccgctccgacagccgcgccaacctgcgccgcttctttgaagtggatcgctacaacgttgccgtggccgcattggccgcattggcggaacaaggcaaagtcagcaaagaaaccgttcaacaagccattgagaaatacggcatcaaagccgattcagctcctagctggaaacgctga

SEQ ID NO: 50694 - DNA, 183 bp, Neisseria meningitidis; identical to SEQ ID NO: 39725

SEQ ID NO: 50695 - DNA, 303 bp, Neisseria meningitidis; identical to SEQ ID NO: 37201

SEQ ID NO: 50696 - DNA, 999 bp, Neisseria meningitidis
atgtccgaaaacaaacaaaacgaagtcctgagcggttacgaacaactcaaacggcgcaaccgccgccgcctcgtaacggcaagttgcctggttgccgcctcctgcatcctgctggcagccgccctcagttccggccctgccgaacagactgccggcgaaacaagcggcgtagaaaacaaagcggcaggtgcggcacaaacccctgccttgaaatccgccgccgacaaaccgcaggacttggcaggcgaagacaagccttctgccgccgacagcgaaatcagcgagcctgaaaacgtaggcgcgccgctggtgctgattaacgaccgcctcgaagacagcaacatcaaaggtttggaagcatccgagaaactgcaacaggcagaaaccgccaaaaccgcaccgaagcaggcaaaacaacgcgctgccgaaaaagtgccggcaactgccgacagtacggatacggtagcggttgaaaaaccgaaacgcactgccgaaacaaaaccgcaaaaagcggaacgcactgccaaagccaagcccaaagccaaagaaaccaaaaccgccgaaaaagttgccgacaaaccgaaaactgccgccgaaaaaaccaaaccggatacggcaaaatccgacagcgcggtaaaagaagcgaaaaaagccgacaaggctgaaagcaaaaaaacagccgaaaaagaccgttcggacggcaaaaaacacgaaacggcacaaaaaaccgacaaagcggacaagaccaaaaccgccgagaaggaaaaatccggtaaaaaagccgccattcaggcaggttatgccgaaaaagaacgcgccttaagcctccagcgcaaaatgaaggcggcgggtatcgattcgaccatcaccgaaattatgaccgacaacggcaaagtttaccgcgtcaaatcaagcaactataaaaacgcaagggatgccgaacgcgatttgaacaaattgcgcgtacacggtatcgccggtcaggtaacgaatgaataa

SEQ ID NO: 50697 - DNA, 1293 bp, Neisseria meningitidis
atgcagttttcggcattcggcgaaaaattcacgcaacacagcggcatcctccaactgatggacgacctcggcgacgcgctcaaaagcgacaagcccgtcaacatgctcggcggcggcaacccggcgcgcattccggaaatcgatcgggcgttcgccgacatattctccaaactggcggcagaacacgccgtcgaaaacatcggcaactactccaacccccaaggcgatgccgcgctgattgacgcgttgaccgccttcctcaaccgcgaatacggctggaacctgaccgccgacaatatcgcgctgaccaacggttcgcaaaacgcgtttttctatttattcaacctcttcggcggcaaattcaagctttcagacggcacatccgcagaaaaagccattttgttgccgctcgcgcccgaatacatcggctatgccgacgtacatatcgaagggcagcacttcgtttctgtcaagcccaaaatcgaaaacgtcgaacacgaaggcgaagcaggcttcttcaaataccgcgtggactttgacgcactggaaaacctgcccgaactcaaagcgggcaaaatcggcgcgatttgctgttcgcgcccgaccaacccgaccggcaatgtgttgaccgacggcgaaatggcacgtttggacgctttggcgcgtgaacacgggattccgctgattatcgacaacgcctacggaatgccgttccccaacatcatttacagcgacgtaacgctgaattggcacgaaaacatcatcctctgcttcagcctttccaaagtcggcctgccgggcgttcgcaccggcatcatcgtcgccgcgcccgaagtcgtcaaagccgtcagcagcctgaacgcgattgtgaaccttgcccccacgcgcttcggcgcggccatcgccgccccgctgctggaaagcggcgagatgaaacggcttgccgaccaagtcatccggccgttttaccgcaatcaggcgcaaaccgccgtctcgctgctcaagcgcgagctgggcgcgtacccgatgaaaatccacaaacccgaaggcgcgattttcctgtggctctggtttgaaaacctgcccgtttcttcgcaaaccctgtacgaaatgctcaaagccgaaggtacgctgattattccgggcgagcatttcttcgtcggcatcgacacgcgggattacccgcacgcgggcgagtgcatccgcatgagcatcgcgcaggacgctcaaacgctggaaaaaggcattgccgccatcggtaaaaccgtccgaaaactgtacgacaacgtttaa

SEQ ID NO: 50698 - DNA, 504 bp, Neisseria meningitidis
atggacgcctttgatttttttatgcaaggcaattttaaaaaaattgcaactgaacaaggtttagaccgtaaatattttatattccaatatatcgtatgtaatttatctgccatttcttctttttgtctaatgaagattattcatacttatactattctctatatattaatagctgtcatcggtattattaatggctttctcttgagaagcaaggttctatctatagtaaaaaataaacaaaagtttttatctgacatgtttcccttggaaatgcctttcttttttgtagaatacaaaatacctatcttggctagattcttgaataggggaatgaaatggctttatctcccaagttttttctgtttagttgcgatttgtttctcaatatatatccttaatgaagaaggggggtggatgccttattttgcctgctattggtttggactttgttatccagtaagcacttattacgtttttttatccagagattataaacatatctaa

SEQ ID NO: 50699 - DNA, 570 bp, Neisseria meningitidis
atggtacggcgtttgataatcggcatcagtggggcgagcggtttccaatacggcgtgaaggctttggaacttttacgcgcgcaagatatcgaaacgcaccttgtggtatcgaaaggtgcggagatggcgcgcgcttcggaaacggattatgcgagagacgaggtatatgccttggcggacttcgtgcatccgatcggcaatatcggggcgtgcattgccagcggtacgtttaaaacggatgggatgctggtcgccccctgttcgatgcggacgcttgcctctgtcgcgcacggcttcggcgacaatctgctgacgcgtgcggcggatgtggttttgaaggaaaggcggcggctggtgctgatggtgcgcgaaacgccgctgaaccttgcccatttggacaatatgaagcgggtaacggaaatgggcggcgtggtgtttccccctgttcctgcgatgtaccgcaaaccgcagacggcggacgacatagtggcgcacagtgttgcacacgctttgtcgctgttcggaatcgatacgccggattcggcggaatggcagggaatggcggattaa

SEQ ID NO: 50700 - DNA, 1296 bp, Neisseria meningitidis
atgttagacatccaattgctccgcagcaacaccgccgccgttgccgaacggcttgcacggcgcggttatgactttgataccgcacgttttgacgcactggaagaacgacgcaagtccgttcaggtgaaaaccgaagaattacaagcctcgcgtaacagcatttccaagcaaatcggcgcactgaaaggtcagggcaaacacgaagaggcacaggcggccatggatcaagtcgcccaaatcaaaaccgatttggaacaggcagccgccgatttggaagccgtgcaaaaggaactggacgcatggctgttgagcattccgaacctgccgcatgaggacgtgcctttcggtaaggatgaaaccgaaaacgtcgaagtccgcaaagtcggcaccccgcgcgaatttgactttgaaatcaaagaccatgtcgatttgggcgaacctttgggtttggatttcgaaggtggcgcgaaactttccggcgcacgatttaccgtgatgcgcggacaaatcgcccgtctgcaccgcgccttggcacagttcatgctggatacgcacacgctgcaacacggctacaccgagcattacacgccttatatcgttgacgatacgacgctgcaaggtacgggccaactaccaaaatttgcggaagatctgttccacgttacccgtggcggcgacgaaaccaaaaccacccaatacctgattccgacagccgaagttaccctgaccaataccgttgccgacagcattatcccgtccgaacaactgccgctgaagctgaccgcgcattcgccctgtttccgcagcgaggcgggttcgtacggcaaagacacgcgcggtctgattcgccagcaccagttcgacaaagtagaaatggtacaaatcgttcatcccgaaaaatcatacgaagcactggaagaaatggtcggccatgccgaaaacatcctgaaggctttggaactgccctaccgcgtgattaccctgtgtaccggcgacatgggcttcggcgcaaccaaaacgtatgacttggaagtttgggttcccgcgcaaaatacctaccgcgaaatctcaagctgctccaactgcgaagatttccaagcccgccgcctgaaggcgcgtttcaaagacgaaaacggcaaaaaccgcttggtacatactttgaacggctccggcttggctgtcggcagaacgctggtcgccgtattggaaaaccatcaaaacgccgacggcagcatcaacatccctgccgcactgcaaccgtatatgggcggtgttgccaagttggaagtcaaataa

SEQ ID NO: 50701 - DNA, 171 bp, Neisseria meningitidis
ttgcgtataggcaatgacctctttgtcaaacgtgtgcaacgtataccgggcaaactgcttgtaacgtctgaaaatccacgttacgcaccgtttgaaatagatttgagtaatacccaagacgacatcgccatcataggccgtgttgagtggtatggccggagtattgattaa

SEQ ID NO: 50702 - DNA, 591 bp, Neisseria meningitidis; identical to SEQ ID NO: 43038

SEQ ID NO: 50703 - DNA, 1881 bp, Neisseria meningitidis
atgagccaagccttaccctaccgcccggacatcgacacattgcgcgccgccgccgtcttgtccgtcatcgtgttccatatcgaaaaggattggctgccgggcgggtttctcggtgtcgatatattctttgtgatttcaggctttttgatgacgacgattcttcaccgcgaaatgtcggggggggggggagggttttccctgaaggcattttatatccgccgcatcaagcggattctgcccgcatttttcgccgtattggcggcaacgctggcaggcggcttctttttattcaccaaagatgatttctttcttttgtggaaatccgcgctgaccgccttgggtttcgcctctaacctgtattttgcaagggggaaggattatttcgatcccgcgcaggaagaaaagcccctgctgcacatctggtctttgtcggtcgaagaacaattttactttgtctttccgatactgctgctgcttgtcgcccgcaaaagcctgcgcgtacagttcggcttccttgccgcactgtgcgccttaagccttgccgcttcctttatgccttccgcgttcgataaatattacctgccccacctgcgcgcctgcgaaatgctggtcggatcgctgaccgccgtgtggatgcggtaccggcaacagcggaatctcgccgtcggcagatgctgtgccgccgccggcgcattgttttcctcgtgcatactgtccgcctgcctgtttgcctattcggaacaaaccgcctatttcccggggcccgccgctttgattccctgtctggctgttgccgcgctgatttatttcaaccattacgaacacccacttaaaaaatttttccaatggaaaatcaccgttgccgccggtttgatttcctattcgctttatctgtggcattggccgatattggcctttatgcgctatatcggtccggataacctgccgccttattcgccggcggcggcggtcgtcctgatattgctgctttccctgttttcttaccactgcatcgaaaaaccgtttaaaaaatggcaaggttcgttcgcacaatccgttttatggatttatgccttgcctatgctcattttgggggcgggctcgtttttcgcgatgaggctgccgtttatggcgcaatacgaccgtttggggctgacgcgttccaacacctcctgccacaacaataccggcaaacaatgcctgtggggggatacggaaaaacagccggagctgctggttttgggcgactcccacgccgaccattacaaaacattcttcgatgccgtgggcaaaaaagaaaaatggtccgccactatggtttccgccgacgcttgcgcctatgtggaaggctacgcgtcccgtgtgttccaaaactgggcagcctgccgcgccgtttatcgctatgccgaagaacacctgccccggtattcaaaagtggttttggcgatgcgctggggcagccaaatgcccgaaaacagccgctcccttgcctatgatgccggttttttccaaaaattcgaccgtatgctgcataaactctcgtccgaaaaacaagccgtttacctgatggcggacaaccttgcctcgtcttacaacgtccagcgcgcctatatcttgtcttcacgcataccgggttaccgccaagccctgcgcccggacgacgaaagcaccctgaaagccaatgcccgcatcagggaattggcagccaaataccccaacgtctatattattgatgccgccgcctatatccccgcagattttcaaatcggcggattgccggtttactcggacaaagaccacatcaacccttacggcggcacggaattggcaaagcgtttttccgaaaaacaacggtttctcgatacgcgccataaccattga

SEQ ID NO: 50704 - DNA, 495 bp, Neisseria meningitidis
atgaacaacagacattttgccgtcatcgccctgggcagtaatcttgaaaaccctgcccaacaggtacgcgccgcattggacacgctgtcgtcccatcctgacatccgtcttaaacaggcttcctcactgtatatgaccgcgcccgtcggttacgacaatcagcctgactttgtcaatgccgtctgcaccgtttccaccaccttggacggcattgccctgcttgccgaactcaaccgtatcgaggctgatttcggacgcgaacgcagcttccgcaacgcgccgcgcacattggatttggacattatcgactttgacggcatctccagcgacgacacccgactcaccctgccgcatccgcgcgcgcacgaacgcagtttcgtcatccgccctttggcagaaatcctccctgattttgttttaggaaaacacggaaaggttgccgaattgtcaaaacggctgggcaatcaaggtatccgtcttttaccggacaggtaa

SEQ ID NO: 50705 - DNA, 726 bp, Neisseria meningitidis
atgcgtattccgctgcttgcccctgacaattatgcctttcccgatcctgcctatgctttggcctggtgcgacgggctggtcggcgtgagcggcgatttggatgcggggcggctgctcgaggcgtatcggaacggcgtgtttccgtggttttctcgggacggttggtttttttggtatgcggtcggcccgcgtgcggtgattgttcccgaacgtctgcacgttccgcgctcgctggcgaaaacgctgcgcaacggcagctatcgggttgcggtcaacggctgttttgcggaagtggtcgcgcattgtgcggcagcggcgcgcccgaatcaggacggaacttggattgcgcccgagtttcagacggcatatttgaagctgcacgaaatgggacacgcgcattctttcgagtgccattatcccgatgaaagcggtgaaacgaggttggcgggcggcttttacggcgtgcaaatcggcagggtgttttacggcgaatcgatgttcgcattacaaccggatgcgtcgaaaatcgcgtttgcctgcgccgtgccgtttttggcggatttgggtgtggaactgatagactgccagcaggacacggaacatatgcgccgtttcggttcggagctgctgccgtttgcggattttgccgaacgtctgcggatgttgaacgccgtgccgttgaaagaggaaatcgggcggcgcgaagtggcgtgcaaggggctttga

SEQ ID NO: 50706 - DNA, 372 bp, Neisseria meningitidis; identical to SEQ ID NO: 40198

SEQ ID NO: 50707 - DNA, 378 bp, Neisseria meningitidis; identical to SEQ ID NO: 49731

SEQ ID NO: 50708 - DNA, 423 bp, Neisseria meningitidis; identical to SEQ ID NO: 39475

SEQ ID NO: 50709 - DNA, 612 bp, Neisseria meningitidis; identical to SEQ ID NO: 39736

SEQ ID NO: 50710 - DNA, 2082 bp, Neisseria meningitidis
atgaaatcactcaaaaccttcctcatttggggcatagtggtactggtcggcgtagcatcctttaccactttggcactcagccgaggcgaacaggtcagcgcggtatggatggttaccgccgccatatccgtttactgcatcgcctaccgtttttacagcctctacatcgccaaccgcgtgatgcggctcgatcctaaccgcctgactccggcagaacgccacaacgacggcttggactacgttccgacgcacaagggcgtattgttcggacaccactttgccgcgattgccggcgcgggccctttggtcggcccggttttggcggcgcaaatgggttacctgcccggtactttgtggattatcttcggcgtggtgtttgccggcgcggtacaggatatgatggtcttgttcgtctctatgcgccgcgacggtaagtctttgggcgatattgtgaaacaggaactcggcactgtccccggcgtgattgcctccatcggtattttgatgattatggtcatcattatggcggtgttggcgttgattgtcgtaaaagcactggttcacagcccttggggtacgttcaccattgccgccactatgccgattgccctgtttatgggtatttacacgcgctatatccgtccgggcaaaatcggcgagatttccatcgtcggctttattttgctgatgctggcggtaatttacggcgaagatgtggcgaaaagttccatcggacattggttcgaccttgacggcatccagctcacttgggcgattatgatttacggctttgtcgcctccgtattgcccgtatggttgctgctcactccgcgcgactatctctccaccttcctgaaaatcggtacgattgcggccttggctttgggcatcgtcatcgtcaatcccactttgcaaatgcctgccgtaacccactttatcgacggttcgggtccggtattctcaggcgcattgttcccgttcctcttcatcaccatcgcctgcggtgcggtttcaggcttccacgcgctgatttcttccggcaccacgccgaaaatgctggaaaacgaaacccacgtccgtatgattggttacggcggtatgttgatggaaagtttcgtagccattatggcgcttgccgccgccgcatcgcttgatcccggcgtgtacttcgccatgaacagccctgccgccctgatcggtacggatgccaacaccgccgccgaagtgattaccaccaagctgcaattccctgtcgatgccgcaacgctgttgcacaccgctaaagaagttggagaaaacaccatcctgtcccgtgccggcggtgcgcccaccctcgcagtcggtatggcgcacattatgagccgcctgattccgggcgaggcgatgatggcgttctggtatcacttcgccctgttgtttgaagccttgttcatcctgaccgccgtcgatgccggtacgcgcgtcgcacgttttatgattcaagacttgggcagcatcttctacaaacctttcggcaacaccgactccatccccgccaacctgattgcgaccttcttcgccgtggcattgtggggctactttctctacaccggcgtaaccgacccgctgggcggcatcaactcgctctggcctttgttcggcatcgccaaccaaatgctggcgggcgtggccttgattatgtgtgccgtggtgctgattaagatgaaacgcgaccgttatgtttgggtggtactcgttcccgccgtcggcgtactgttcgtaacctgctacgccggcctgcaaaaactgttccacagcgatccgcgcatcagcttccttgcccacgccggcaaatacagcgacgcattggctaaaaacgaaatccttgcgcctgccaaagacatcggcgaaatggcgcaaatcatcttcaacgacaagattaatgccggtctgaccatcctcttcttgtcggttgtcgtgattgtcgccgcgtacggtttgcgtaccgccctcaaagcacgcaaagtcggctggccgaccgccaaagaaatcccggcggtgtaccgcgacggcaaacagccggaggcacaaagtgaagcataa

SEQ ID NO: 50711 - DNA, 270 bp, Neisseria meningitidis; identical to SEQ ID NO: 36672

SEQ ID NO: 50712 - DNA, 960 bp, Neisseria meningitidis; identical to SEQ ID NO: 42649

SEQ ID NO: 50713 - DNA, 1377 bp, Neisseria meningitidis
atgaaacacatccatattatcggtatcggcggcacgtttatgggcgggcttgccgccattgccaaagaagcggggtttgaagtcagcggttgcgacgcgaagatgtatccgccgatgagcacccagctcgaagccttgggtatagacgtgtatgaaggcttcgatgccgctcagttggacgaatttaaagccgacgtttacgttatcggcaatgtcgccaagcgcgggatggatgtggttgaagcgattttgaacctcggcctgccttatatttccggcccgcaatggctgtcggaaaacgtgctgcaccatcattgggtactcggtgtggcggggacgcacggcaaaacgaccaccgcctccatgctcgcatgggtcttggaatatgccggcctcgcgccgggcttccttattggcggcgtaccggaaaatttcggcgtttccgcccgcctgccgcaaacgccgcgccaagacccgaacagccaatcgccgtttttcgtcatcgaagccgacgaatacgacaccgcctttttcgacaaacgttctaaattcgtgcattaccgtccgcgtaccgccgtgttgaacaatctggaattcgaccacgccgacatctttgccgacttgggcgcgatacagacccagttccactacctcgtgcgtaccgtgccgtctgaaggcttaatcgtctgcaacggacggcagcaaagcctgcaagatactttggacaaaggctgctggacgccggtggaaaaattcggcacggaacacggctggcaggccggcgaagccaatgccgacggctcgttcgacgtgttgctcgacggcaaaaccgccggacgcgtcaaatgggatttgatgggcaggcacaaccgcatgaatgcgctcgccgtcattgccgccgcgcgtcatgtcggtgtcggcattcagaccgcctgcgaagccttgggcgcgtttaaaaacgtcaaacgccgcatggaaatcaaaggcacggcaaacggcatcaccgtttacgacgacttcgcccaccacccgaccgccatcgaaaccacgattcaaggtttgcgccaacgcgtcggcggcgcgcgcatcctcgccgtcctcgaaccgcgttccaacacgatgaagctgggcacgatgaagtccgccctgcctgtaagcctcaaagaagccgaccaagtgttctgctacgccggcggcgtggactgggacgtcgccgaagccctcgcgcctttgggcggcaggctgaacgtcggcaaagacttcgatgccttcgttgccgaaatcgtgaaaaacgccgaagtaggcgaccatattttggtgatgagcaacggcggtttcggcggaatacacggaaagctgctggaagctttgagatag

SEQ ID NO: 50714 - DNA, 2247 bp, Neisseria meningitidis
ttgagaaatttcgaccataccggcactcagacggcatcccgcagccttaactgccgtctgaatatcaaagcaggaatcacgcttatgcaacaaaaaatccgtttccaaatcgaaggcatgacctgccaggcctgcgcttcgcgcattgaaaaagtgttgaacaaaaaagattttgtcgaatcggcgggggtaaacttcgccagcgaagaggcgcaggtagtgtttgacgacagcaaaacctcagtagccgacattgccaaaatcattgagaaaaccggttacggcgcgaaggaaaaaacggaagatacattgccgcaacccgaagcagaacaccatatcggctggcggctgtggctgctgttcaccatcaacgtcccgttccttatcggcatggcggggatgatgatcggcagacacgattggatgattccgccgttgtggcagttcgcattggcaagcgtggtgcagctttggctggcaatcccgttttacaaaagcgcgtgggcgagcattaagggcggactggcgaatatggacgtgctggttaccatcggcacggtctcgatttacctgtattccgtctatatgctgtttttcagcccgcacgcggcgtacggtatggcgcatgtgtattttgaagtgggcgtgatggtgatcggttttgtgtcactgggtaaatttttggaacaccgtaccaaaaaatccagcctcaacagcttgggcttgctgctcaaacttacaccaacccaagtcaacgtgcaacgcaacggcgaatggaaacagcttcccatcgaccaagtgcaaatcggcgaccttatccgcgccaaccacggcgaacgcattgccgcagacggcatcattgaaagcggcagcggttgggcggacgagagccatcttaccggcgaatccaatcctgaagaaaaaaaggcgggcggcaaagtgttggcgggcgcgttaatgaccgaaggcagtgtggtgtaccgcgccacgcagctcggcagccaaacccagctcggcgacatgatgaacgcgctctctgaagcacaaggcagtaaagcaccgattgcgcgcgtagccgataaagcggctgcggtattcgtgcctgccgtcgtgggcattgcgttgttgacttttattgttacttggctgattaagggcgattggacggttgcgctgatgcacgccgtcgccgttttggtgattgcctgcccgtgcgcgctgggtctggcaacccctgccgcgattatggtcggtatgggcaaagcggttaaacacggtatttggtttaaagacgcggcagcaatggaggaagccgcccacgtcgatgccgtcgtgttggacaaaaccggtacgctgaccgaaggcagcccgcaggttgccgccgtttattgcgttcccgacagcggctttgacgaagacgctttgtaccgcatcgccgccgccgtcgaacaaaacgccgcccatccgctcgcccgtgccatcgtctccgccgcccaagcgcgcggtttggacattcccgccgcacaaaacgcacaaaccgttgtcggcgcaggcattaccgccgaagtggaaggcgtgggtttggtgaaagcaggcaaagccgaatttgccgaactggccttgccgaagtttttagacggcgtttgggatattgcaagcattgttgcggtctcagtcgataacaaacccatcggcgcattcgcacttgccgacgcgttgaaagccgataccgccgaagccataggccgtctgaaaaaacacaatatcgatgtctatattatgagcggcgacaaccaaggcacggtcgaatacgtcgccaaacaactgggcatcgcacacgccttcggcaacatgagtccgcgcgataaagctgccgaagtgcaaaaactcaaagccgccggcaaaaccgtggcgatggtcggcgacggcatcaacgacgcgcccgcgcttgccgccgctaacgtcagcttcgccatgaaaggcggagcggacgttgccgaacataccgcatccgccacgctgatgcagcattcggtcaaccaactcgccgatgctctgctggtgtcgcaagccactttgaaaaacatcaagcaaaacctgtttttcgccttcttctacaatattttgggcattcctctcgccgcgcttggctttttaaatcccgtcatcgctggcgcggcaatggcggcaagctcggtttccgtgttgagcaatgccttgcgcctgaaacgggtaaaaatcgattag

SEQ ID NO: 50715 - DNA, 1446 bp, Neisseria meningitidis
atgacccaatacacattgaaacaggcaagcgtcctgttgcagtccaaacagatttccgccgtcgaactggcaagcgcataccttgccgccatcgccgaaaaaaatcccgccctcaacggctatatcaccatcgaccaagataaaacccttgcagaagcccgtgccgccgacgaacgtatcgcgcagggcaacgcctccgcgcttaccggcgtacccgtcgcctacaaggatattttctgccaaaccggctggcgcagcgcgtgcgcttccaaaatgctcgacaacttcatctccccctacaccgccaccgtcgtccaaaacctgctcgacgaaggtatggtaacgctcggccgcaccaatatggacgagttcgctatgggttcgaccaatgaaaactcattctacggcgcagccaaaaacccatggaatcttgagcacgtccccggcggttcgtcaggcggttccgccgccgtcgttgccgcgcgcctcgcccctgccgcgctcggttcggacaccggcggctctatccgccaacccgcatcgcactgcggcattaccggcatcaaacccacatacggcacggtttcccgcttcggtatggtcgcctacgcctccagcttcgaccaggccggtccgatggcgcaaactgccgaagactgcgcgattctgttaaacgcgatggcaggtttcgaccccaaagactccaccagcctcgaacgcgaaaaagaagactacacccgcgatttgaaccaaccgctcaaaggtttgaaaatcggcctgcccaaagaatatttcggcgaaggcaacagcgccgatgttctgacggcattgcaaaacaccattgatttgctgaaagcccaaggcgcggaattgattgaagtttccctgccgcaaaccaagctgtccattcccgcctactacgtcctcgcctccgcagaagccagtaccaacctttcacgttacgacggcgtacgttacggacaccgcgccgcccaattcggcgatttggaagaaatgtacggcaaaacccgcgccgaaggtttcggcagcgaagtcaaacgccgcatcatgatcggcacttatgtactgtcgcacggctactacgatgcctactatctcaaagcccaaaaactgcgccgcctcgttgccgatgattttcagacggcatttgcacgatgcgacctcatcctcgcgccgaccgcaccctccgccgcacccaaaatcggagcggatgcttcgccggttgaaacctacttgagcgacatttacaccatcgccgtcaacctcgccggactgcccgcattgaccctgcccgcaggcttcagcggcggcggactgcccgtcggcgttcagcttgtcggcaactacttcgccgaagccaaaatcctcggtgcggcgcatcaaatccaactcaacagcgattggcacggcaaacgacccgaatga

SEQ ID NO: 50716 - DNA, 252 bp, Neisseria meningitidis; identical to SEQ ID NO: 39189

SEQ ID NO: 50717 - DNA, 1419 bp, Neisseria meningitidis
atgtctattaaaaacgccgtaaaattgattgaagaaagcgaagcccgctttgtcgatttgcgctttaccgataccaaaggcaagcagcaccactttaccgtgcctgcgcgcatcgtgttggaagaccccgaagagtggttcgaaaacggtcaggcgtttgacggttcgtctatcggcggctggaaaggcattcaggcttccgatatgcagttgcgccccgatgcgtctacagccttcgtcgatcctttttatgatgatgcgactgttgtgttgacttgcgacgttatcgatcccgccgacggtcagggttacgaccgcgacccgcgctccatcgcccgccgagccgaagcctatttgaaatcttccggcatcggcgagaccgcctatttcggtcccgaacccgagtttttcgtattcgacggcatagaatttgaaaccgatatgcacaaaacccgttacgaaatcacgtccgaaagcggcgcgtgggcaagcggtctgcatatggacggtcaaaacaccggccaccgcccgaccgtcaaaggcggttacgcacctgttgcaccgattgactgcggtcaggatttgcgttcggcgatggtaaacattttggaagaactcggtattgaagtggaagtgcaccacagcgaagtcggcaccggcagccaaatggaaatcggcacgcgcttcgccactttggttaaacgcgccgaccaaacccaagacatgaaatacgtcatccaaaacgttgcccacaacttcggcaaaaccgccacctttatgcccaaaccaatcatgggcgacaacggcagcggtatgcacgttcaccaatccatctggaaagacggtcaaaacctgttcgcaggcgacggctatgccggcttgagcgacaccgccctttattacatcggcggcatcatcaaacatgccaaagccctgaacgcgattaccaatccgtccaccaactcctacaaacgcctcgtgccgcactttgaagcaccgaccaaactggcttattccgccaaaaaccgttccgcttccatccgcattccgtccgtgaacagcagcaaggcgcgccgcatcgaagcgcgtttccccgatccgaccgccaacccatacttggcatttgccgctttgttgatggccggtttggacggtattcaaaacaaaatccatccgggcgatcctgccgataaaaacctctacgacctgccgccggaagaagacgcgctcgtcccgaccgtctgcgcttctttggaagaagcactcgccgccctcaaagccgaccacgaattcctgctgcgcggcggcgtgttcagcaaagactggatcgacagctacatcgcctttaaagaggaagatgtccgccgcatccgcatggcgccgcatccgctggaatttgaaatgtattacagcctgtaa

SEQ ID NO: 50718 - DNA, 2133 bp, Neisseria meningitidis
atgtctatcgtatccgcaccgctccccgccctttccgccctcatcatcctcgcccattaccacggcattgccgccaatcctgccgatatacagcatgaattttgtacttccgcacagagcgatttaaatgaaacgcaatggctgttagccgccaaatctttgggattgaaggcaaaggtagtccgccagcctattaaacgtttggctatggcgactttacccgcattggtatggtgtgatgacggcaaccatttcattttggccaaaacagacggtgagggtgagcatgcccaatttttgatacaggatttggttacgaataagtctgcggtattgtcttttgccgaattttctaacagatattcgggcaaactgatattggttgcttcccgcgcttcggtattgggcagtttggcaaagtttgactttacctggtttattccggcggtaatcaaataccgccggttgttttttgaagtattggtggtgtcggtggtgttgcagctgtttgcgctgattacgcctctgtttttccaagtggtgatggacaaggtgctggtacatcggggattctctactttggatgtggtgtcggtggctttgttggtggtgtcgctgtttgagattgtgttgggcggtttgcggacgtatctgtttgcacatacgacttcacgtattgatgtggaattgggcgcgcgtttgttccggcatctgctttccctgcctttatcctatttcgagcacagacgagtgggtgatacggtggctcgggtgcgggaattggagcagattcgcaatttcctgaccggtcaggcgctgacttcggtgttggatttggcgttttcgtttatctttctggcggtgatgtggtattacagctccactctgacttgggtggtattggcttcgttgcctgcctatgcgttttggtcggcatttatcagtccgatactgcggacgcgtctgaacgataagttcgcgcgcaatgcagacaaccagtcgtttttagtagaaagcatcactgcggtgggtacggtaaaggcgatggcggtggagccgcagatgacgcagcgttgggacaatcagttggcggcttatgtggcttcgggatttcgggtaacgaagttggcggtggtcggccagcagggggtgcagctgattcagaagctggtgacggtggcgacgttgtggattggcgcacggctggtaattgagggcaagctgacggtggggcagctgattgcgtttaatatgctctcgggacaggtggcggcgcctgttatccgtttggcgcagttgtggcaggatttccagcaggtggggatttcggtggcgcgtttgggggatattctgaatgcgccgaccgagaatgcgtcttcgcatttggctttgcccgatatccggggggagattacgttcgaacatgtcgatttccgctataaggcggacggcaggctgattttgcaggatttgaacctgcggattcgggcgggggaagtgctggggattgtgggacgttcggggtcgggcaaatccacactcaccaaattggtgcagcgtctgtatgtaccggagcagggacgggtgttggtggacggcaacgatttggctttggccgctcctgcctggctgcggcggcaggtcggcgtggtcttgcaggagaatgtgctgctcaaccgcagcatacgcgacaatatcgcgctgacggatacgggtatgccgctggaacgcattatcgaagcagccaaactggcgggcgcacacgagtttattatggagctgccggaaggctacggcaccgtggtgggcgaacaaggggccggcttgtcgggcggacagcggcagcgtattgcgattgcccgcgcgttaatcaccaatccgcgcattctgatttttgatgaagccaccagcgcgctggattatgaaagtgaacgagcgattatgcagaacatgcaggccatttgcgccaaccggacggtgctgattatcgcccaccgtctgtccaccgttaaaacggcacaccggatcattgccatggataaaggcaggattgtggaagcgggaacacagcaggaattgctggcgaagccgaacggatattaccgctatctgtatgatttacagaacgggtag

SEQ ID NO: 50719 - DNA, 480 bp, Neisseria meningitidis; identical to SEQ ID NO: 42689

SEQ ID NO: 50720 - DNA, 462 bp, Neisseria meningitidis
atgaatattattatggactcaacaagaaaatttgggattttatgggaaaaaaactctgaatgtaatggttttatttatggaaaaattcagataataataggagagaatatatatcctaagatatgtccatatgggtattttacactaaatacagtttttaatagtttgaaatcatcctttgaggagaagtattatgcaggtggaaacaatggtttggattttggagagcaactatttgatatagataaatataattctctggaattatacaatatattttctattgatactgcatatatgagcggagggagtaattgtgaaatagattgtttagtattagaaatgggatattctggtgaggaagagagacttttttatagttttgacaatgggaaaaactttaaagaaatcaggtataagaaaggtacagttgaatctgttatttttcaactgaatctataa

SEQ ID NO: 50721 - DNA, 1215 bp, Neisseria meningitidis; identical to SEQ ID NO: 45034

SEQ ID NO: 50722 - DNA, 2016 bp, Neisseria meningitidis
atgagtaaatcccgtagatctcccccacttctttcccgtccgtggttcgcttttttcagctccatgcgctttgcagtcgctttgctcagtctgctgggtattgcatcggttatcggtacggtgttgcagcaaaaccagccgcagacggattatttggtcaaattcggacctttttgggcgcagatttttggttttctgggactgtatgacgtctatgcttcggcatggtttgtcgttatcatgatgtttttggtggtttctaccagtttgtgcctgattcgcaatgtgccgccgttctggcgcgaaatgaagtcttttcgggaaaaggttaaagaaaaatctctggcggcgatgcgccattcttcgctgttggatgtaaaaattgcgcccgaggttgccaaacgttatctggaggtgcagggttttcagggaaaaaccgtcagccgtgagggcgggtcggttctgattgccgccaaaaaaggcacgatgaacaaatggggctatatctttgcccatgttgctttgattgtcatttgcctgggcgggttgatagacagtaacctgctgttgaaactgggtatgctgaccggtcggattgttccggacaatcaggcggtttatgccaaggatttcaagcccgaaagtattttgagtgcgtccaatctctcatttaggggcaacgtcaatatttccgaggggcagagtgcggatgtggttttcctgaatgccgacaacgggatattggttcaggacttgccttttgaagtcaaactgaaaaaattccatatcgatttttacaatacgggtatgccgcgcgattttgccagtgatattgaagtaacggataaggcaaccggtgagaaactcgagcgcaccatccgcgtgaaccatcctttgaccttgcacggcatcacgatttatcaggcgagttttgccgacggcggttcggatttgacattcaaggcgtggaatttgggtgatgcttcgcgcgagcctgtcgtgttgaaggcaacatccatacaccagtttccgttggaaattggcaaacacaaatatcgtcttgagttcgatcagttcacttctatgaatgtggaggacatgagcgagggcgcggaacgggaaaaaagcctgaaatccacgctgaacgatgtccgcgccgttactcaggaaggtaaaaaatacaccaatatcggcccttccattgtttaccgtatccgtgatgcggcagggcaggcggtcgaatataaaaactatatgctgccggttttgcaggaacaggattatttttggattaccggcacgcgcagcggcttgcagcagcaataccgctggctgcgtatccccttggacaagcagttgaaagcggacacctttatggcattgcgtgagtttttgaaagatggggaagggcgcaaacgtctggttgccgacgcaaccaaaggcgcacctgccgaaatccgcgaacaattcatgctggctgcggaaaacacgctgaacatctttgcacaaaaaggctatttgggattggacgaatttattacgtccaatatcccgaaagagcagcaggataagatgcagggttatttctacgaaatgctttacggcgtgatgaacgctgctttggatgaaaccatacgccggtacggcttgcccgaatggcagcaggatgaagcgcggaatcgtttcctgctgcacagtatggatgcgtacacgggtttgaccgaatatcccgcgcctatgctgctgcaacttgatgggttttccgaggtgcgttcgtcgggtttgcagatgacccgttccccgggtgcgcttttggtctatctcggctcggtgctgttggtattgggtacggtattgatgttttatgtgcgcgaaaaacgggcgtgggtattgttttcagacggcaaaatccgttttgccatgtcttcggcccgcagcgaacgggatttgcagaaggaatttccaaaacacgtcgagagtctgcaacggctcggcaaggacttgaatcatgactga

SEQ ID NO: 50723 - DNA, 777 bp, Neisseria meningitidis
atgaccctcatccacccgaccgccgtcatcgaccccaaagccgaactcgactccggcgtcaaagtcggcgcgtacaccgtcatcggccccaacgtccaaatcggcgcgaataccgaaatcggcccgcacgccgtcatcaacggccacaccagcatcggcgaaaacaaccgcattttccaatttgccagcctcggcgaaatcccgcaggacaaaaaataccgcgacgagccgaccaagctgattatcggcaacggcaacaccatccgcgaattcaccacctttaatttaggcacggtaaccggcatcggcgaaacccgtatcggcgacgacaactggattatggcgtactgccacctcgcgcacgactgcgtggtcggcaaccacaccattttcgccaacaacgcctcgcttgccggacacgttaccatcggcgactacgtcgttttgggcggctacacgctggttttccaattctgccgcatcggcgactacgccatgaccgcgtttgccgcaggcgtacacaaagacgtgccgccctactttatggcatcgggctaccgcgccgaaccggcggggctcaacagcgaaggcatgcgccgcaacggttttaccgcagaacagatttccgccgtcaaagacgtgtacaaaaccctctaccatcgcggcattccgtttgaagaggccaaggcagacatcctccgccgcgccgaaacccaagccgagcttgccgtattccgagactttttcacacaatcgacgcgcggcatcatccgctga

SEQ ID NO: 50724 - DNA, 621 bp, Neisseria meningitidis
atggctgtacgttccaaatcctcaaaagcgtggctgcacgaacacgtcaacgaccactacgtccatatggcgcaaaaagacggctaccgcgcccgtgccgcatacaaacttttggaaatcaacgaaaaagacaaattaatcaaacccggcacggtacttgccgacttgggcagcgcaccgggaagctggtcgcaggttgccgccaagctgacgggtacttccggcgcggtattcgccttggacatcctgcctatggaagccatagggggcgtctccttcattcagggcgacttccgcgagaacgacgtactggcacaattcgaaaccttgttggacaaccgcccgctcgaccttgtaatttgcgatatggcgcccaatatgtcgggaaacgccgtaagcgatcaggcacgcagcttttatctgtgcgaactggctttagacttcgcctcgcaacacctgaaaaccggcggcagctttttggtcaaagtctttcagggtgcaggctatcaggaatacatggcagccatgcgcgaaattttcggcacggtgcagacgcgcaaacccgaagcctcgcgcaatcgctccagtgagatttatttattgggcaaaaataaacgctga

SEQ ID NO: 50725 - DNA, 1659 bp, Neisseria meningitidis
atgaatcttgctttgaaattaaattcaaggatgattcatttttcattattggcaatggaaaaattgatgtttcggattctaataatttcttttctgtttcttttgagtgctaaatctttttcagcagatttagaaattaaaaatgggaaattgatgtatgcactttcggaaaaatataacgataatggatttaaggcatacaaagttttaggtgagggaggaggaattcatacagaatataattacaaatttgataaaagtttgaatttgaatgtattagaaagttcaacaggcgcacgctctcttgaaaaagtccccgttaaagtaactgcatcagtttcccgcgccgccgtcttgtcaggagtcggcaaacttgcccgcttaggcgcgaaattaagcacaagggcagttccttatgtcggaacagcccttttagcccatgacgtatacgaaactttcaaagaagacatacaggcacaaggctaccaatacgaccccgaaaccgacaaatttgtaaaaggctacgaatatagtaattgcctttggtacgaagacaaaagacgtattaatagaacctatggctgctacggcgttgacagttcgattatgcgccttatgtccgatgacagcagattccccgaagtcaaagaattgatggaaagccaaatgtataggctggcacgtccgttttggaattggcataaagaagaactgaataaattaagttctttggattggaataattttgttttaaatcgttgcacatttaattggaatggcggagattgtttggtcaataaaggtgatgatttcagaaatggggctgatttttcccttattcgcaattcaaaatacaaagaagaaatggatgccaaaaagctggaagagattttatcgttgaaagtcgatgccaatcccgacaaatacataaaggcaaccggttatcccggttattccgaaaaagtagaagtcgcacccggaacaaaagtgaatatgggtcccgtcacggacaggaacgggaatcccgttcaggttgtcgcaacattcggcagggattcgcaaggcaacaccacggtggatgttcaagtaatcccgcgtcccgacttgacccccggaagcgcggaagcaccgaacgcacagccgctgcccgaagtatcgcccgccgaaaaccccgcaaacaacccgaaccccaatgagaaccccggcacgagccccaatcccgaacccgaccccgatttgaatcccgatgcaaatcccgatacggacggacagcccggcacaagacccgattcccccgccgttccggaccgcccaaacggtaggcatcgcaaagaaaggaaagaaggcgaagacggcgggcttttgtgcgattattttccggaaatcctagcctgtcaggagatgggcaaaccttcagacggcatgtttcacgatataagcataccgcaggttatagacgataaaacatggtcttcacataactttttaccgtctaacggcgtatgtccgcagccgaaaacctttcatgttttcggtaggcaatatcaggcaagctatgagccgttatgcgtgtttgccgaaaaaatccgttttgccgtactgctcgcctttatcattatgtcggcttttgtcgttttcggttcgttgaaggggaaataa

SEQ ID NO: 50726 - DNA, 291 bp, Neisseria meningitidis
atggcgaaatactttaccgagacgggtattagcgtccgtgagcattttgatttcttcggtgagtttgtcgtttcgccggcagcacgttcgggtgatttggcacttacttacggtttgaggctggaagcgggcgaagagggtttgagccttgccgagcttttcgataagcgttccgatagtcaggagccggtcgagggcggccgtattgacatcggcggctttatgctgaccgcgaaggaggttgacggggacggcaatatcgggtctatggggctgaaagtaccgcgttag

SEQ ID NO: 50727 - DNA, 1071 bp, Neisseria meningitidis
atgaacctgatttcacgttacatcatccgtcaaatggcggttatggcggtttacgcgctccttgccttcctcgctttgtacagcttttttgaaatcctgtacgaaaccggcaacctcggcaaaggcagttacggcatatgggaaatgctgggctacaccgccctcaaaatgcccgcccgcgcctacgaactgatgcccctcgccgtccttatcggcggactggtctctctcagccagcttgccgccggcagcgaactgaccgtcatcaaagccagcggcatgagcaccaaaaagctgctgttgattctgtcgcagttcggttttatttttgctattgccaccgtcgcgctcggcgaatgggttgcgcccacactgagccaaaaagccgaaaacatcaaagccgccgccatcaacggcaaaatcagcaccggcaataccggcctttggctgaaagaaaaaaacagcattatcaatgtgcgcgaaatgttgcccgaccatacgcttttgggcatcaaaatttgggcgcgcaacgataaaaacgaattggcagaggcagtggaagccgattccgccgttttgaacagcgacggcagttggcagttgaaaaacatccgccgcagcacgcttggcgaagacaaagtcgaggtctctattgcggctgaagaaaactggccgatttccgtcaaacgcaacctgatggacgtattgctcgtcaaacccgaccaaatgtccgtcggcgaactgaccacctacatccgccacctccaaaacaacagccaaaacacccgaatctacgccatcgcatggtggcgcaaattggtttaccccgccgcagcctgggtgatggcgctcgtcgcctttgcctttaccccgcaaaccacccgccacggcaatatgggcttaaaactcttcggcggcatctgtctcggattgctgttccaccttgccggacggctcttcgggtttaccagccaactctacggcatcccgcccttcctcgccggcgcactacctaccatagccttcgccttgctcgccgtttggctgatacgcaaacaggaaaaacgttga

SEQ ID NO: 50728 - DNA, 924 bp, Neisseria meningitidis
atgaaaaaacgcaataatcctcttccgctgttgaacggtgtcaaacccagttatttggtgctgccgcatgaaaagcagttttacgggctgccgctgctgcattttctgtgcatccgctttccttttgtgggcgcggacgattggcgcaggcggttgaacagcggttttgtggtcggttcggatggtgcggcgttggacgaacattctttgttcgagccgggtaaggtgatgttttattaccgtaaaaccagccgtgagagcgagccgcgtattccgtttgaagaaaagattttgcatattgatgagcatttgattgtggtggacaaaccgcattttctgcccgtcatccccagcggcaggtttttgcgggaaaccctgctcacgcgcctgcgtttgcggcctgaattgcagcatttgaatgttgaggacattacgccgctgcaccgcttggacaaggatacggcaggcgtgatgttgttgtcgcacaatcctgccacgcgtggggcttatcagacgatgtttcaaaacaaaacggtatggaaaacgtatgaggcgcttgcgccgacaaggacggatttgccgtatccgattgatgtggtttcgcgtttggtaaggggtgagaaattttttacgacgcaagaggcggaaggcgaaccaaacgcacatacgacggtcgaactgattgaaaacaggggggaattcagcctttaccgccttacgccgcataccggcaagaaacaccagttgcgcgtgcatatgatgggtttgggtatgccgctgttgaatgacgcgctctatcccgtgccgtctgaagcgggcagcgaggattatcggaaacctttgaagctattggcaaaaaagattgcgtttgcagatcctttgtcgggtcgggaaagggtgttttgcagcggattttgcctataa

SEQ ID NO: 50729 - DNA, 117 bp, Neisseria meningitidis; identical to SEQ ID NO: 42842

SEQ ID NO: 50730 - DNA, 1356 bp, Neisseria meningitidis
atgagtatccaatccggcgaaattttagaaaccgtcaaaatggttgccgaccagaatttcgatgtccgcaccattaccatcggcattgatttgcacgactgcatcagcaccgacatcgacgtgttaaaccaaaacatttacaacaaaattaccacggtcggcaaagacttggtggcgacggcaaaatatctgtctgccaaatacggcgtgccgattgtgaatcagcgcatttccgttacgccgattgcccaaatcgcggcggcgagcaaagccgattcttacgtcagcgtggcgcagactttggacaaggctgccaaagccatcggcgtgtcctttatcggcggcttttccgcgctggtgcaaaaaggcatgtcgccttcagacgaggtgttaatccgttccattcccgaagcgatgaagaccaccgacatcgtgtgcagctccatcaatgtcggcagtacgcgtgccggtatcaatatggatgcggtcaagctggcaggcgaaaccatcaaacgcacggctgaaattacgcccgaaggtttcggctgcgcgaaaatcgtcgtgttctgcaatgcggtggaagacaacccgtttatggcgggcgcgtttcatggttcgggcgaagcggatgccgttatcaatgtcggcgtatccggcccaggtgtcgtaaaagccgcgttggaaaattcagatgcaacgacattgaccgaagttgcggaagtagtgaagaaaactgctttcaaaattacccgcgtgggcgaactcatcggccgcgaagcctcaaaaatgctgaatatcccgtttggtattctcgacttgtcgctggcaccgacccctgccgtcggcgactcggtggcgcgcattcttgaagaaatgggtttgagcgtctgcggtacgcacggcacaacagcagctttggcattgctgaacgatgccgtgaaaaagggcggcatgatggcttcgagcgcggttggcggtttgagtggcgcgtttatccccgtttccgaagacgaaggtatgattgccgccgccgaagcaggcgtgctgacgttggataaactcgaagcgatgaccgccgtttgttcggtcggcttggatatgattgccgttcccggcgacacacccgcgcacaccatttccggcattatcgccgacgaagccgccatcggtatgattaacagtaaaaccactgccgtgcgcattattccggtaaccggtaaaaccgtcggcgacagcgtcgagtttggcggcctgttgggctacgcacctgtgatgccggtaaaagaaggttcgtgcgaagtgttcgtcaaacggggcggcagaattcccgctccggtccaatcgatgaaaaactga

SEQ ID NO: 50731 - DNA, 915 bp, Neisseria meningitidis; identical to SEQ ID NO: 40510

SEQ ID NO: 50732 - DNA, 561 bp, Neisseria meningitidis
atgaaaacagcacaagaactgcgcgccggcaatgtatttatggtcggcaacgatcctatggtcgttcaaaaaaccgaatacatcaaaggcggccgctcttccgccaaagtcagcatgaaactgaaaaacctgctgaccggcgcggcttccgaaaccatttacaaagccgacgacaaattcgacgtggtcatcctgtcccgcaaaaactgtacgtacagctactttgccgacccgatgtacgtctttatggatgaagaattcaaccaatacgaaatcgaagccgacaacatcggcgacgcgttgaaattcatcgttgacggtatggaagaccaatgcgaagttaccttctacgaaggcaaccccatttctgtcgaactgcccaccatcatcgtacgcgaagtcgagtataccgagcctgccgtcaaaggcgatacttcaggcaaagtgatgaaaaccgcgcgcctggtcgggggcaccgaaatccaagtgatgtcttacatcgaaaacggcgacaaaatcgaaatcgatacccgcaccggcgaattccgcaaacgcgcttga

SEQ ID NO: 50733 - DNA, 1410 bp, Neisseria meningitidis
atgacctccacattcccccgccgcctcgcccgcaaaatccgccaaacccgccgcctgtcgcgcaaaagcatcgcctttctgttccttttggcaggttcggcactcgtcgccctgaccgcgctgttttttgcccatcttgccgattttgcgctggaactgaacgccaaactggttcaacaatacccgtggttcgcgtgggtcgcgcttcctttgggtttgccgcttattgcgtggctcacacgcaaattcgcccccttcaccgccggcagcggcatcccgcaggtcatcgcctcactgtcgctgccctacggcgcacagaaaacgcggctgatccgcctcgggcagacgctgctgaagattccgctgacctttttgggtatgctgttcggcgtgtccatcggacgcgaaggtccgtccgtgcaggtcggcgcggcagtgatgggcgcgtggggcgcgtggtgcaagaaacacggcttggcattcaaagggatgcaggaaaacgatttgatggcggcgggcgcggcgggcggtttggcagccgcgttcaacgcgccgctggcgggcgtgattttcgccattgaggaactcgggcgcggcatcatgttgcgctgggagaggcaaattcttttgggcgtgctcgcctccggtttcatacaggtcgccattcagggcaacaacccgtatttttcgggtttcaacggcggcgtattggaacatatctttctgtgggtcgcactgtccggcctggtttgcggcgcggcgggcggcctgttcggacgtttgctctatcgcggtgcggcggcgtttgcaccgcgcaagatacgcggcttcatccgcaaccgtccgctgctgctggcggcactgatggggctgctgctcgccctgctcggcacgttctaccaaggcaaaacctacggcaccggctaccacgaagccgcccaagccctgcacggcatctacgaagcccccttcggactcgccgccgccaaatggctcgccaccgtattcagctattgggcaggcattccgggcggcattttcactccctcgctgaccataggcgcggttttgggcgagcatatcgccgccatcgccgacatatcgcagggtgcaaacatcatcgtcctcatctgcatggcggcatttctggcgggcgcgacacaatccccgattacttccgccgtcgtcgtcatggaaatgacgggcggacaaagcctgctgttttggatgctgattgcctgcattttcgcctcgcaggtttcgcgccagttttcgccgcgtccgttctaccacgcatcgggaatgcgcttccgccagcgcgtgcttcaagaaaccgccgcccaaaccggcaatgcgtccgcaagaccgcaaacagcaaacagcaaaacgggaatgccgtctgaaaattaa

SEQ ID NO: 50734 - DNA, 1341 bp, Neisseria meningitidis
ttgcacacccttctagcttttatcttcgccatcctgattttggtcagcctgcacgagttcggacactacatcgttgccagattgtgcggtgtcaaagtcgtacgcttttccgtcggcttcggcaaaccgtttttcacccgaaagcgcggcgacaccgaatggtgcctcgccccgattccgttgggcggttacgtcaaaatggtcgacacgcgcgaaggcgaagtatcagaagccgatttaccctacgcttttgacaaacaacaccccgccaagcgcatcgccatcgtcgccgccggcccactgaccaatctcgcactggcggttttgctgtacggactgagcttttccttcggcgtaaccgaactgcgcccctacgtcggcacagtcgaacccgacaccattgccgcccgcgccggcttccaaagcggcgacaaaatacaatccgtcaacggcacacccgttgcagattggggcagcgcgcaaaccgaaatcgtcctcaacctcgaagccggcaaagtcgccgtcggcgttcagacggcatcgggcgcgcaaaccgtccgcaccatcgatgccgcaggcacgccggaagccggtaaaatcgcaaaaaaccaaggctacatcggactgatgccctttaaaatcacaaccgttgccggcggcgtggaaaaaggcagccccgccgaaaaagcaggcctgaaaccgggcgacaggctgactgccgccgacggcaaacccatcgcctcatggcaggaatgggcaaacctgacccgccaaagccccggcaaaaaaatcaccctgaactacgaacgcgccggacaaacccataccgccgacatccgccccgatactgtcgaacagtccgaccacaccctgatcgggcgcgtcggcctccgtccgcagccggacagggcgtgggacgcgcaaatccgccgcagctaccgtccgtctgttatccgcgcattcggcatgggctgggaaaaaaccgtttcccactcgtggacaaccctcaaatttttcggcaaactaatcagcggcaacgcctccgtcagccatatttccgggccgctgaccattgccgacattgccggacagtccgccgaactcggcttgcaaagttatttggaatttttggcactggtcagcatcagcctcggcgtgctgaacctgctgcccgtccccgttttggacggcggccacctcgtgttttatactgccgaatggatacgcggcaaacctttgggcgaacgcgtccaaaacatcggtttgcgcttcgggcttgccctcatgatgctgatgatggcggtcgccttcttcaacgacgttacccggctgctcggttag

SEQ ID NO: 50735 - DNA, 324 bp, Neisseria meningitidis; identical to SEQ ID NO: 43824

SEQ ID NO: 50736 - DNA, 177 bp, Neisseria meningitidis; identical to SEQ ID NO: 38352

SEQ ID NO: 50737 - DNA, 1344 bp, Neisseria meningitidis
atgaaccaaaaccatactattttacaaaacctccccgtcggtcagaaagtcggcatcgccttctccggcggacttgatacctccgccgcgctgttgtggatgaaactcaaaggcgcactgccttatgcctacactgccaacctcggtcagcccgatgaagacgactacaacgccattcccaaaaaagcgatggaatacggtgcggaaaacgcccgcttaatcgactgccgcgcgcagttggcacatgaaggcatcgccgccatccaatgcggcgcgttccacgtttccaccggcggtatcgcctatttcaacaccacgcctctgggtcgcgccgtaaccggcactatgcttgtttccgccatgaaagaagacgatgtgaatatttggggcgacggcagcacctacaaaggcaacgacatcgagcgtttctaccgctacggtttgctcaccaatcccgcgctgaaaatctacaaaccctggctcgaccagcaatttatcgacgaactcggcggccgccacgaaatgagcgaatttctgattgccaacggcttcaactacaaaatgtcggttgaaaaagcctactccaccgattccaatatgctcggcgcgacccacgaagccaaagatttagaattcctcaacagcggcatcaaaatcgtcaaacctattatggacgttgccttctgggacgaaaacgtcgaaatcaaacccgaagaagtcagcgtgcgctttgaagaaggcgtgccggttgcactgaacggcaaagaatacgctgatcccgtcgaactcttcctcgaagccaaccgcatcggcggccgccacggtctgggtatgagcgaccaaatcgaaaaccgcatcatcgaagccaaatcgcgcggcatctacgaagccccgggaatggcgttgttccacatcgcctacgagcgtttggtgaccggtatccacaacgaagacaccatcgaacaataccgcatcaacggcctgcgcctcggccgcctgctctaccaaggccgctggttcgacagccaagccttgatgttgcgcgaaaccgcccaacgctgggttgccaaagccattaccggcgaagtaaccctcgaattgcgtcgcggcaacgactactcgattctgaacaccgaatcgcccaacctgacctaccaacccgaacgcctgagtatggaaaaagtcgaagacgcagcgttcacaccgctcgaccgtatcggacaactgactatgcgcaacctcgacattaccgacacccgcgccaaactgggcatttactcgcaaagcggtttgttggcattgggcgaaggttcggtattgccgcagttgggtaataagcaataa

SEQ ID NO: 50738 - DNA, 1284 bp, Neisseria meningitidis
atgtccaaatcaattaaactcaacgtaccgggtcaggcaggtttggagctgccggtattggaagccagcatcgggcacgatgtggttgacattcgggggctgacaaaaaatacaggtttgttttccttcgaccccggatttgtttcaaccgcaagctgtgagtctaaaattacttacatcgacggcgatcaaggcttgctttattatcgcggataccccatcgagcagctggccgaaaagtccgattatttggaagtctgctacctgttgatttacggcgaactgccgactcccgagcaaaaggcagaatttgacaataccgtccgccgccacacgatggtgcatgaacagctgacttggttcttccgggggttccgccgcgacgcgcatccgatggcgatgatggtcggcgtggtcggcgcgctgtctgcgttctaccaagacagcttggacattagcaatcccgaacaccgcaaaatcgcgatttaccgcctgatttccaaaatcccgaccattgcggcaatgtgctaccgctattcaaacggtctgccgttcaattatccgaagaataatctttcttattccgaaaacttccttcatatgatgttcgccacgccgtgtgaagactacaaacccaatcccgttttggcacgcgcgctcgaccgcatctttattttgcatgccgaccacgagcaaaacgcctcaacttcaaccgtccgtctggcaggctcttcgggtgcgaatccgtttgcctgtattgctgccggtatcgcctgcctgtggggtgcttcgcacggcggtgcgaacgaagccgtgttgaaaatgttggacgaaatcggcgatgtgtctaatgttgccgcatacatggaaggtgtgaaacaacgcaaataccgtctgatgggcttcggtcaccgcgtgtaccgcaatatggatccgcgtgccagcattatgcgcgaaacctgctatgaagttttgaaggaattgggcttggaagacagtccgaaattcaaactggcgatggaattggaacagattgcgctgaaagacccgttctttatcgaacgcaaactgtatccaaacgtcgatttctattccggcatcgtcctgtccgcgctgggcatcccgaccgaaatgtttaccgtcatcttcgccctgtcgcgcagcgtgggctggatttcgcactggcacgagatgattagcgatccttcgctgaaaatcggccgcccgcgccagctttataccggttcggaacgccgcgattatgtgccgccaggcgagaggtaa

SEQ ID NO: 50739 - DNA, 300 bp, Neisseria meningitidis; identical to SEQ ID NO: 37288

SEQ ID NO: 50740 - DNA, 1479 bp, Neisseria meningitidis
atgttcagcaagttaacccctttggctgaaaccggcatcccgaccctgtcgtgtgcaaacgcggcagggcgtttgttgcattcagacagccgccaaatcaaacaaggcgatattttcgttgcctgtccgggcgaatatgccgacggacgcagttatatccccgccgccgttgccaacggcgcggcttttgttttttgggacgacgacggcaaatttgcgtggaatcccgaatggaaagtccccaatcaaggcatcaaagatttgaaacaccgtgccggcatattggcggcgcaagtttacggcaacgtttcagacggtctcaaattctggggcgtaaccggaaccaacggcaaaacctccatcacgcaatggctggcgcaagctgccgatttgttgggcgaaaaaaccgccattgtcggcacggtcggcaacggcttttggggtgcattggaagaaaccacgcataccacacccgcccccgtcgatgtccaaaccctgctctaccgtttccgtcaacaaggcgcaacagtcgccgcgatggaagtctccagccacgggcttgaccagtcgcgcgtcaacggcgtgtcattccgcagcgcaatctttaccaacctcacccgcgaccacctcgactaccacggcacgatggaagcctacggtgccatcaagtcgcgcctgttttactggcacggcttgaaacacgcagtcatcaacgtggatgacgaatacggcgcggaactcgcaggtcgtctgaaaaaagattgtcccgatttagccgtttacagttacggcttcagcgagcaagccgacatccgcattatcgatttcaccgcctcttcagacggcatagcagccgtattccaaaccccgtggggcgaagggaaatgccgcacgcgcctgctcggacggttcaacgcgcaaaacctcgccgcctgcatcgccttgctgtgcgccaacggctatccgcttgataatgtattggatgtgctggcaaaaatccgtcccgcttcagggcgcatggactgcatcatgaacagcggcaaacctttggtcgttgtcgattatgcccacacgcccgacgcattggaaaaagcactcgccaccttgcaggaaatcaaaccgcagggtgcggctttgtggtgcgtattcggttgcggcggtaaccgcgatcgcggcaaacgcccgctgatgggcgcggcagccgtacagggcgcggataaagtcgtcgtcaccagcgacaatccgcgtttggaaaatccgcacgacatcatcaacgacatcctgcctgccgttcccgcgcccgaatgcgtcgaagccgaccgtgccgccgccatccgttatgcggttgaacaagccgccgcaaacgacatcatcctgattgccggcaaagggcatgaaaactatcaggatgtacaaggcgtgaagcaccgtttttccgatcttgaaatcgtcggacaggctttgttaactcgtaaataa

SEQ ID NO: 50741 - DNA, 759 bp, Neisseria meningitidis; identical to SEQ ID NO: 43846

SEQ ID NO: 50742 - DNA, 306 bp, Neisseria meningitidis; identical to SEQ ID NO: 36883

SEQ ID NO: 50743 - DNA, 303 bp, Neisseria meningitidis; identical to SEQ ID NO: 39071

SEQ ID NO: 50744 - DNA, 2829 bp, Neisseria meningitidis
atgatggacgaaaaactcaatttctcttacctgttcggttcgaacgcaccctacattgaggaattgtacgaggcttttttggaaaaccccgatgcggttgatgaaaaatggaagcagtatttcaccgatttgagcaaacagccggggacggttgctgtcgatgtcgcacacacaccgattcgcgaatcatttgttactttggcgaaaaagaaaattgcatctgccgttgtgggcggtgcggatgaggcaatgctgaaaaagcaagtcagcgttttacggctgatttccgcctatcgtatccaaggcgtgggtgcagcccaacttgatccgctcaaacgtatccccccgcgcgatattgaagccctcgatccgaaattccacggtctgtcagatgccgatatggcgcttcaattcaatatgggcgagggcgattttgccaatcgcggcaaactgcctttgtcccaaatcatcagcaacctcaaacaaacctactgcggccacatcgcattggaatatatctatattcccaataccgaagagcgccgctgggtacgcaattattttgaaagcgtattgtccacaccgcattacaatgccgatcaaaaacgccgtatcttgaaagagatgactgctgccgaaactttggaacgttatctgcataccaaatatgtcggtcagaaacgtttcggtgtcgaaggcggcgaaagcgcgattgccggtttgaactacctgattcaaaacgccggtaaagacggcgtggaagaagtcatcatcggtatggcgcaccgtggccgtctgaatgttttggtgaacattttgggcaaaaaacccggcgatttgtttgccgaatttgaaggtcgtgccgaaatcaaactgcccagcggcgacgtgaaataccatatgggcttcagctccgatattgctaccccgcacggcccgatgcatgtttctttggcgttcaacccgtcacacttggaaatcgtcaacccggtggtggaaggttctgcgcgcgccaaacaaaaacgtttgggcgaaaacggccgcgacaaagtcttgccggtattgattcacggcgactccgcatttatcggtctgggtgtcaaccaagcaacattcaacctgtctaaaacacgcggttataccaccggcggtacggttcatatcgtcatcaacaaccaaatcggctttaccacttccgatatccgcgatacccgttcaaccgtacactgtaccgatatcgcaaaaatggtttccgccccggttatccatgtgaacggcgatgatcctgagcgtgtttgctttgctatccaagccgctttggattaccgcaaaaaattccataaagacatcgtgattgacgttgtctgctaccgtaaatggggtcacaacgagggcgatgatccgaccttgacccaaccgatgatgtacaaaaaagtatcgcaacaccccggtgcgcgtgctttgtacaccgagcaactgattgccgaaggcgtggtaactcaagcagaagctgatgcttacatccaagcctaccgtgatgctttggacaaaggcgaacatgttgagcaaacaacgttgagcaatttccaacgcacacaaatcgattggagcaaataccaaggcaaagattggcgcgaacacatcgaaaccggtttgcctgccgcggatattgagcgtcttaccgagaaatttaccgccgtaccagaaggctttgccctgcatccgactgcaaaacgtgtgattgaagcgcgtaaagccatggcatccggcaaacaagccatcgactggggtatggccgaaaccttggcatacgcaagccttgtaaccaaaggtcatggcgtgcgtatctccggtgaggactccggtcgcggtacgttctcgcaccgccatgccgtattgcacgatcaaaaccgtgaaaaatgggacgacggtacttatgttcctctgcgccatatgggcgaaggcatgggcgagttcctggttatcgactccattttgaacgaagaagcagtaatggcgttcgagtacggctttgcctgctccgcgcctgacaagctgaccatttgggaagctcaattcggtgacttcgccaacggcgcgcaagtgacgattgatcaattcctgtcgtcaggcgaaaccaaatggggtcgcttgtgcggtctgaccaccatcctgccgcacggttacgacggtcaaggccctgagcactcttctgcacgcgtagaacgttggttgcaactgtgttctgagaacaatatgcaagtcattatgccgtctgaagcgtcgcaaatgttccacctcttgcaacgtcaagtcttgggttcataccgcaaaccgctggtgattttcatgtccaaacgcctgttgcgcttcaaaggtgcaatgagctcgctggaaaacttcaccgaaggttcgaccttccgtccggttatcggcgatacagccgaacgtgcaagcaacgacagcgtgaaacgcgtggtattgtgtgccggtcaggtttactatgacttggaagccggccgtgctgagcgtaaactggaagatgatgtcgctatcgtccgcgttgagcagctgtatccgttcccatacgaggaggttaaagccgaactggcgaaatatccgaacgcaaaatctgtggtttgggcacaagaagagccgaaaaaccaaggtgcgttctaccaaatccgccaccgcatcgaagacgttatcagcgaagagcaaaaactgtcttatgccggtcgtccaagcagcgcatcgcctgcagtgggctactcaagcaaacatattgcccaattgaaacaattggttgaagacgctttggcgttgtaa

SEQ ID NO: 50745 - DNA, 588 bp, Neisseria meningitidis; identical to SEQ ID NO: 37602

SEQ ID NO: 50746 - DNA, 1539 bp, Neisseria meningitidis
atgaatatgctgggagctttggcaaaagtcggcagcctgacgatggtgtcgcgcgttttgggatttgtgcgcgatacggtcattgcgcgggcattcggcgcgggtatggcgacggatgcgttttttgtcgcgttcaaactgcccaacctgcttcgccgcgtgtttgcggagggggcgtttgcccaagcgtttgtgccgattttggcggaatacaaggaaacgcgttcaaaagaggcggcggaggcttttatccgccatgtggcggggatgctgtcgtttgtactggttatcgttaccgcgctgggcatacttgccgcgccttgggtgatttatgtttccgcacccggttttgcccaagatgccgacaaatttcagctctccatcgatttgctgcggattacgtttccttatatattattgatttccctgtcttcatttgtcggctcggtactcaattcttatcataagttcggcattccggcgtttacgcccacgtttctgaacgtgtcgtttatcgtattcgcgctgtttttcgtgccgtatttcgatccgcccgttaccgcgctggcgtgggcggtctttgtcggcggcattttgcaactcggcttccaactgccctggctggcgaaactgggctttttgaaactgcccaaactgagtttcaaagatgcggcggtcaaccgcgtgatgaaacagatggcgcctgcgattttgggcgtgagcgtggcgcaggtttctttggtgatcaacacgattttcgcgtcttatctgcaatcgggcagcgtttcatggatgtattacgccgaccgcatgatggagctgcccagcggcgtgctgggggcggcactcggtacgattttgctgccgactttgtccaaacactcggcaaaccaagatacggaacagttttccgccctgctcgactggggtttgcgcctgtgcatgctgctgacgctgccggcggcggtcggactggcggtgttgtcgttcccgctggtggcaaccttgtttatgtaccgagaattcacgctgtttgacgcgcagatgacgcaacatgcgctgattgcctattctttcggtttaatcggtttgatcatgattaaagtgttggcatccggcttttatgcgcggcaaaacatcaaaacgcccgtcaaaatcgccatcttcacgctcatctgcacgcagttgatgaaccttgcctttatcggcccactgaaacacgtcggactttcgcttgccatcggtctgggcgcgtgtatcaatgccggattgttgttttacctgttgcgcagacacggtatttaccaacctggcaagggttgggcagcgttcttagcaaaaatgctgctctcgctcgccgtgatgtgcggcggactgtgggcagcgcaggcttacctgccgtttgaatgggcgcacgccggcggaatgcggaaagcggggcagctctgcatcctgattgccgtcggcggcggactgtatttcgcatcactggcggctttgggcttccgtccgcgccatttcaaacgcgtggaaaactga

SEQ ID NO: 50747 - DNA, 1011 bp, Neisseria meningitidis
atgtccatcaaaatcctgattatttctcccagttggataggcgactgcgtgatgacccagcccttgttccgccgtttgaaggaacttcaccccggttgcacgattgatgtgttcgcaccgaagtggtcgatggcggtgttcgagcgtatgccggaagtgaatgaaattcttgagaattcgttcggacatggtgcgttggagttgaaacgccgttggcgggtcggtagggatttggggcggcgcggatacgatcaggttatcgtgttgcccggttctttgaaatcggcaatcatcgcgctggcgacaggtatcggtaaaaggacgggttatgtcggtgaaagccgttattttctgttgaacgatatacgcaggctggataaggaacgtctgcctttgatggtggatcgatatacggctctcgcgcatcagagtcaggaagattttgacgggcattcgggattccccgagttttccattgatgaacggcggcgggaaatttctgtcgaaactttcggtttgaatcttggaaagcctgttctggctttttgtccgggtgcggaattcgggccggcaaagcgttggccgacaaggcattttgccgagttgggcaaacattatctggcggcgggttggcaggtttggctgttcggttcgcaaaaagatgatgaaattgccgaggaaatcaaccgcctttcagacggtatgtgtgtcaatttgtgcggcaaaaccgatttgtcgcaggcaatggatttgctgtcgttggcggacacggtcgtgtgcaacgacagcgggctgatgcacttggcggcggcattgggcaggaaagtggtggcggtttacggttcttccagcccgacgcatacgccgcctttgagcgacagggcgaaaatcgtcagcctgcacttggaatgttcgccctgttttaagcgggaatgtccgctggggcataccgactgcctcaacaggctgtatcccgagaagattgtgcaggcggttgaagaggcggtatga

SEQ ID NO: 50748 - DNA, 1569 bp, Neisseria meningitidis
atgagtcaaaccgatacgcaacgggacggacgatttttacgcacagtcgaatggctgggcaatatgttgccgcacccggttacgctttttattattttcattgtgttattgctgattgcctctgccgccggtgcgtatttcggactatccgtccccgatccgcgccctgttggtgcgaaaggacgtgccgatgacggtttgattcacgttgtcagcctgctcgatgctgacggtttgatcaaaatcctgacgcataccgttaaaaatttcaccggtttcgcgccgttgggaacggtgttggtttctttattgggcgtggggattgcggaaaaatcgggcttgatttccgcattaatgcgcttattgctcacaaaatctccacgcaaactcactacttttatggttgtttttacagggattttatctaataccgcttctgaattgggctatgtcgtcctaatccctttgtccgccatcatctttcattccctcggccgccatccgcttgccggtctggctgcggctttcgccggcgtttcgggcggttattcggccaatctgttcttaggcacaatcgatccgctcttggcaggcatcacccaacaggcggcgcaaatcatccatcccgactacgtcgtaggccctgaagccaactggttttttatggtagccagtacgtttgtgattgctttgattggttattttgttactgaaaaaatcgtcgaaccgcaattgggcccttatcaatcagatttgtcacaagaagaaaaagacattcggcattccaatgaaatcacgcctttggaatataaaggattaatttgggctggcgtggtgtttgttgccttatccgccctattggcttggagcatcgtccctgccgacggtattttgcgtcatcctgaaacaggattggtttccggttcgccgtttttaaaatcgattgttgtttttattttcttgttgtttgcgctgccgggcattgtttatggccgggtaacccgaagtttgcgcggcgaacaggaagtcgttaatgcgatggccgaatcgatgagtactctggggctttatttggtcatcatcttttttgccgcacagtttgtcgcattttttaattggacgaatattgggcaatatattgccgttaaaggggcgacgttcttaaaagaagtcggcttgggcggcagcgtgttgtttatcggttttattttaatttgtgcttttatcaatctgatgataggctccgcctccgcgcaatgggcggtaactgcgccgattttcgtccctatgctgatgttggccggctacgcgcccgaagtcattcaagccgcttaccgcatcggtgattccgttaccaatattattacgccgatgatgagttatttcgggctgattatggcgacggtgatcaaatacaaaaaagatgcgggcgtgggtacgctgatttctatgatgttgccgtattccgctttcttcttgattgcgtggattgccttattctgcatttgggtatttgttttgggcctgcccgtcggtcccggcgcgcccacattctatcccgcaccttaa

SEQ ID NO: 50749 - DNA, 369 bp, Neisseria meningitidis; identical to SEQ ID NO: 37026

SEQ ID NO: 50750 - DNA, 264 bp, Neisseria meningitidis; identical to SEQ ID NO: 37542

SEQ ID NO: 50751 - DNA, 969 bp, Neisseria meningitidis
atgaaactcaccctcgccattccctcgctcaatttggatgaagacgaaacccgaatacctctctgcctgcccgccttcaacaaaatcctgcaatacggctcgctgcaccgccaaagctgcacggcttcggcattttacgcgcgttatttgtggtgcggcagactggcggaacgcgcggcacaaagcctgaatatgccgtctgaagccgtcgcgctcgccacgcccgtctggcaaaagatggggatgcatcaggcaaatgtgctaacggcggaatatctgaacgtcggtacggatgaagcggaacggctctgccgcgacctgtcggcgttttacggcgacattccatggcgtttcgttcccgtcctgcccgaattatggctggtttcccttccttgcgcgtaccgctggggcgcgaagcccgttttggacttgggcggattgttgggcgcggacgatcagccggacggggaagacgcgttggaatggctgcgcgtccaaaccgaaatccaaatgtggctggcggcgcaccccgtcaaccataaccgcaagaaacgcgggctgcccgagttgaacgggctgtggctttgggacagtctgcacggaagcagtcaaggcggcacgcttttcgccgatacggtttggagccgtttccaccccgaccgccgcgcattgcccgacaacttccgcgcctatgaagaaacggcggcatacctacccgacacgcaccatatcctgtttatggacgatttgcgcctgaccgccctgacaggggacagggagcggtatgcggcaatattgcagcagtgggaagaacgctggttcgcaccgatctacgaagccgtccgtaccggcaaaatcaaacggctggacatcaccacggacggacaacacggcggtacgctgaccttcaaacccgccgacaggtggaaattttggcgcggcgcgaaaacctttgacggaatctggtga

SEQ ID NO: 50752 - DNA, 657 bp, Neisseria meningitidis
atgaacagacaaaaagtcatcgccatcgacggcccgggcgcatcgggcaaaggcacggttgccgcccgcgttgccgccgcattgggatacgattatctcgataccggcgcactctaccgcctgactgccctatatgcacaaaaacaaggcgtgggatggcacgatgaagaaaacgtttccgaactggcaaaaaaactgcccgccgtattttcaggcagccgcatcctgctcggcggcgaagacgtttcagacggcatccggacagaagccatcggcatgggcgcatccgcagtcgcacagttgcctaaagtccgcgtcgccctgctgcaacgccaacgcgattttctgaccgaaaaaggactggttgccgacggacgggacaccggatcggtcgtcttcccccaagccgaacttaaaatcttcctgacggcagaatccaaaatccgtgccgaacgccgcgccaaacaaatcggcatcccctgcgaaggtttggcattcgagcgcatcctgtccgacatcgaagccagagacgaggcagaccgaaaccgcaaggttgcccccctgaaacaacaacccgatgccctgcttttggatacgagccgcctgactatagaagaaactgtaaaaaaagtgcttgattggtatcgtaaagtttaa

SEQ ID NO: 50753 - DNA, 819 bp, Neisseria meningitidis
atgaacaccattttcaaaatcagcgcactgaccctttccgccgctttggcactttccgcctgcggcaaaaaagaagccgcccccgcatctgcatccgaacctgccgccgcttcttccgcgcagggcgacacctcttcgatcggcagcacgatgcagcaggcaagctatgcgatgggcgtggacatcggacgctccctgaagcaaatgaaggaacagggcgcggaaatcgatttgaaagtctttaccgaagccatgcaggcagtgtatgacggcaaagaaatcaaaatgaccgaggagcaggctcaggaagtcatgatgaaattccttcaggaacaacaggctaaagccgtagaaaaacacaaggcggacgcgaaggccaataaagaaaaaggcgaagcctttctgaaagaaaatgccgccaaagacggcgtgaagaccactgcttccggcctgcaatacaaaatcaccaaacagggcgaaggcaaacagccgaccaaagacgacatcgttaccgtggaatacgaaggccgcctgattgacggtacggtattcgacagcagcaaagccaacggcggcccggtcaccttccctttgagccaagtgattccgggttggaccgaaggcgtacagcttctgaaagaaggcggcgaagccacgttctacatcccgtccaaccttgcctaccgcgaacagggtgcgggcgacaaaatcggtccgaacgccactttggtatttgatgtgaaactggtcaaaatcggcgcacccgaaaacgcgcccgccaagcagccggctcaagtcgacatcaaaaaagtaaattaa

SEQ ID NO: 50754 - DNA, 1224 bp, Neisseria meningitidis
atgtctgcgcaatcacaaaacaatcatacgtccccattggtcgtcttgaccacgctgttcttcatgatgggttttattacctgcatgaacgacatccttatccctcatttgaaagaaattttcgacctgtcttacgttcaggcgatgctgatccaattctgtttctttaccgcctatgcggtgatgtccatcccgatgggggcttttgtcggcaaagtcggctacaaaaacggcgttatcggcggctttctgctgacggcggtcggatgcctgctgttttatcctgctgcgggtagccattcttacgcggtatttttgggcgcgttgtttattttggcttccggcgtaacgctgcttcaggtcgccggtaatccttatgttaccctgctggcgaaacccggcaaggaatcggcaacactgacgctggttcaggcgtttaacgctttgggtacgaccattgcgccgcaaatcggcgcgttcctgattctggcggacgcaacccaaaccgtcagcaaggcggaacagatttcttccgtacagattccctatttgggactggcggggctgctgattatccttgccgttttcgtgaaaatgatccggctgcccgacgcgcgcaaaattgccgccgaggaaagcgcgcacaaccacgacggcaaaaccagcgtatggcaatacaaacatctcgtgttcggtacggcaggcattttctgctatgtcggcgcggaggtgtctatcggttcgttgatggtcaacgtattgggttatctgaaagggctggatcatgcttctgccgcgcattacctgtcgttctattggggcggcgcgatggtcggacgtttcctcggttcggcggtgatggcgaaattcgcgcccaaccgttatttggcgtttaacgcatcggctgcggtcgtactgcttgccgtcgcgatggcgacgggcagcggcaatgcggatgtggcgatgtggtcgctgcttgccatcggttttttcaactcgattatgttcccgacgattttctctttggcaaccaaaggattgggaaaatttaccaacgcggcttccggtgtactgtgtaccgcgattgtcggcggtgcggtcgttcctgtcgtgcagggctgggtggcagatacttacaccctgatgtcttcgtttgtcgtttccgtcatctgttatctgtatatcgtgttttttgcggtgtacggatatagggcggacaaataa

SEQ ID NO: 50755 - DNA, 396 bp, Neisseria meningitidis
atgcctgtctatttccgcatcccaagcaggaaacgcctgcacaaaatgaaccgccgtcagcataaaaagctgcatttgggcgagtttcaaacattgattttcggcgttcaaggcagtttgcaccaagctgaggacgatgccgaagcgttcggccgctttatggacgagctgattgcgtatcttgcggcaaacggcttggaaatggcgggcgggggcgattgcggcgatttttcgtgcctgtttcaaaaatccggtgcccgaagcttgggcgaaaccgagaaaaaagccattatctcttggctggcaggtcgcgaagatgtcgccactttgcacgccaccccgctggttgacggtttttacggggatgacggctgggaaagttacagcgaaacctaa

SEQ ID NO: 50756 - DNA, 276 bp, Neisseria meningitidis
atgaatgcaacaaactggagcgtttacctgatattgtgcgaaaacagcgcgttctattgcggcatcagcccgaatccgcaacagcggcttgccgcccacacaaccggtaaaggcgcgaaatatacccgcgtattcaaaccggtggcgatgcgtatcgttgcaggcgggatggataaaggcactgcgctcaaacaggaaatcgccgtcaaaaaactgaccgccgcacaaaaacggaaattgtgggaacaggcggaaaaaatgccgtctgaaacctga

SEQ ID NO: 50757 - DNA, 129 bp, Neisseria meningitidis; identical to SEQ ID NO: 45231

SEQ ID NO: 50758 - DNA, 321 bp, Neisseria meningitidis
atgttcggcaagcagctttttgaagaagtcggttcgaaaatcagcgaaaccatcgccaacagccctgccaaagatgtggaaaaaaatattaaggcgatgctgggcggcgcgttcaaccgtatggatctggttacgcgcgaagaattcgacatccagcagcaggttttaatcaaaacccgtaccaaactggcggctttggaagcgcgtttggcaaaactcgaagccgcgcaaaatcccgaacgggcagcattggaagcggctgaagccgctgccgaagaagccgtcgccgaaatcaggcagcaaaccgaagccggcgaataa

SEQ ID NO: 50759 - DNA, 156 bp, Neisseria meningitidis; identical to SEQ ID NO: 41797

SEQ ID NO: 50760 - DNA, 810 bp, Neisseria meningitidis; identical to SEQ ID NO: 37887

SEQ ID NO: 50761 - DNA, 489 bp, Neisseria meningitidis
atgaccgccttgctcgtcatcctcgccctcgccctgatagccgccggtacggcgggcatcgtttaccccgccctgcccggattggcattgatgtttgccggaacctggctgctcgcctactccggcggctaccaaatctacggcgcgggcgttttgtggacggtcggactcatcagccttgccggcatactggcggactatgtggcaggcatatgggggacaaaatataccggagcgggcaagctcgccgttcgcggcgcattggtcggcagcatcatcggcatatttttctcccttcccggactaatactcggtccctttatcggcgcggcggcaggcgaactgatcgatcggcgcaatatgcttcaggcaggtaaagcgggcttgggtacgctgttggggcttatcgtcggtacgacattcaaaatcggctgcgccgtatccatcttgtttatcctgttggtgaaatacatcgcctacctgttttaa

SEQ ID NO: 50762 - DNA, 492 bp, Neisseria meningitidis
atgaaataccgtcgtttttaccgcaatggcggcacttacttttttacggttgtaaccaataaacggcagaagattttgaccgatgatgcggtgcgtttggctttgcggcaggcggtaatggcggtgcgcgaacggtatccgtttgaaattttggcatgggtgttgatgcccgatcatctgcataccatatggcggctgccggacaatgattctgcttattcggaacgctggcggcaaatcaagcggcacagccaatatttaatcggcggcaatctcaggctttggcaaaaacgcttttgggaacatactatccgcgatgaggccgatttttcctgccattttgattatctgcatttcaatccggtcaaacatggctatgtaggacaaatttctgattggcggttttctacgtttcaccgttatgttaaacagggtatttatccgcataattggggtggcggcaatgcggacttttctattggatatgattga

SEQ ID NO: 50763 - DNA, 1296 bp, Neisseria meningitidis
ttgttgacaaaacaaatgtatctatttgtcgcgtgcatgatttttatgtttgtaaatcaatatattgatattattttccgtgttcgggcggcatggaatcgggcggaggacaggtattttccatccttgcacaaagcctgctgcaagcctaaaatcgggcgggttattgttcagaatcaaggctgcatcatgtctctttatccgatttacaatttttccgccggccctgccgtattgcccgaagccgtgttggaaacggcgcggcaggaaatgttggactacaacggtacgggttttcctgtgatggcaatgagccaccgttcggaaatgtttttgagcatcctgcatcatgcggaacaggatttgaggcagcttttgaaagtgcctgacaactataagatattgtttctgcagggcggagcaacaacccaatttaatatggcagccatgaatctggcacacggtttccgcactgccgacgcggtggtaacgggcaactggagccgtatcgcttatgaacagatgagccgtttgaccgatacggaaatccgtttggcggcgcatggcggcgagcagttcgactatctcgacctgccgcctgtggaaacgtgggatgttgcacccgattcggcgtttgtccattttgccgtcaatgaaacggtcaacgggctgcaataccgtgaagtgccgtgcctttcagaaggcatgccgccgctggtgtgcgatatgtccagcgagattttgtcgcgcgagtttgatgttgccgattacggcttgatttacgcaggcgcgcaaaaaaacatcgggccggcaggggttacggtggtgattgtgcgtgaggatttgctcgagcgttgtccgaacgatattcccgatgtgttcaactaccgttcgcatttgaaccgcgacggtatgtacaacacgccgtcaacttacgcgatttatatgtcggggctggtgttccgctggctgcaggcgcagggcggtgtgaaaaaaattgaagcggtcaatcggctgaaggcgcaaaccttgtatgagacgatagatggcagcggcggtttctatatcaaccgtatccgtccgaatgcgcgttctaaaatgaatgtcgtgttccaaacgggggatgaggagcttgaccgccgttttgtgctggaagccgaattgcagggcttgtgcctgcttaagggctataaaaccgtcggcggtatgcgtgccagcatttataatgcgatgccgcttgaaggcgtgcgggctttggcggattttatgcgcgatttccaacggcgttacggttga

SEQ ID NO: 50764 - DNA, 465 bp, Neisseria meningitidis
atgaaatgcccgttttgcgcccaccccgacacccgcgttgccgattcgcgtctgatggaagaacgcaacgccgtgcgccgccgccgccactgccccaactgcggcaaacgcttcggcacgctcgaaaccgccgaactcaaaatgcccgccgtcatcggtccggacaaaaaacgttcgcccttcaatgcacaacgcctccgcaacgacctgaccgccgccgcccgaaaatccgccctgacacccgaacagattgacgaaaccgtccgcctgacggaacacaggctctacacttcgggtcttcgcgacatcccctctgccgaacttgccgacatggtgctaaaagagctgcttgagcacaacacggaagccgccgtccgtttcgccgccctgcacaaacgcttcgacaatccggcagactttgcctcgtggctggcgcaagccgtcaaaacaggcggcaaagcctga

SEQ ID NO: 50765 - DNA, 888 bp, Neisseria meningitidis
atgcagaaatccaaattatcttggttcttgaaactgatgttggcactgtcgctggcgtttctgtatatcccgctggttgttttggtcatctattcgtttaacgaatccaagctggtaaccgtttggggcggcttttcgaccaagtggtacggcgcattgctggaaaacgacaccatcttggaagccgcttggctgtcgctgcggattgccgttgtgtcttcgcttgccgccgtcgttttgggcacgctggcaggctatgcgatggcgcggattaaacgttttcgcggcagtaccttgttcgctggcatgatttccgcacctatggtgatgcccgacgtgattaccggtctgtctatgctgctgctgattattcaggtacagatatttttgcagggcagcgaatggttacaacatctctacttcgatcgtggctttttcaccatcttcctcggacatacgacgctgtgtatggcgtacattaccgttgttatccgttcgcgtctggttgagcttgaccaatcgctcgaagaagccgcaatggatttgggcgcgtgtccgctgaaaatcttttttgtcatcactttgcctttgattgcccctgccatcgcttcaggctttctgctcggcattaccctgtctttggatgatttggtaattacctcattcctctccggccccggttcatccacattgccgcaggtgattttctccaaaatcaagctgggtcttgatcctcagatgaatgtcttggcgaccatcctaatcggcatcatcggaacattggtcatcatcgtcaattattggatgatgaggcaggcaaccaagcgcgaccgagaagcggcagaagcctaccgccaagaaaaattggctgctgagaaagcgcattga

SEQ ID NO: 50766 - DNA, 648 bp, Neisseria meningitidis
  misc_feature 629, 630, 631, 632, 633: 'n' is a, c, g or t
atgaatgcagccatcgaacacgtccaagccgtcgccttcgatttggacggcacactgtgcgattccgtccccgaccttgccgccgccgcagaagcgatgttggaacaactcggtatgaaaccgctgcccgccaaagtggtcgaaagctatgtgggcgacggcatcggcaaactggttcaccgcgtcctctccaacgaccgcgaccgcgaagccgattccgaactgtgggaaaaaggtttcgtatcctatatgaaatactaccgcgaccatttgagcgtcttcacccgcccctatcccgaaaccgcaaccgggctggcattgctcaaatctttgggcatcccgctggcagtcattaccaataaaaacgaaatccttgccgtcgaactgttgaaacagctcggacttgccgactacttcagcctgatactcggcggcgacagcctgcccgagaaaaaacccagccccctgccgctgcggcacgccgccgaagttttgggtatcgatgttgcaaacatggttatggtcggcgactcgcgcaacgacatcatcgccgccaaagccgccggctgcctgagcgtcggcgttaccttcggttacggcgatatgacgctgctctcgcaagacgatgnnnnncacacacttaattaa

SEQ ID NO: 50767 - DNA, 447 bp, Neisseria meningitidis; identical to SEQ ID NO: 42843

SEQ ID NO: 50768 - DNA, 306 bp, Neisseria meningitidis; identical to SEQ ID NO: 38577

SEQ ID NO: 50769 - DNA, 2835 bp, Neisseria meningitidis
atgaacagaaagcatacattcccgcttaccctgactgccttggctgttgccgccgccttcccgtcatatgcggcaaaccctgaaacggcgacacctgatgcggcgcagacccaatccctgaaagaggttaccgtccgtgccgccaaagtgggacggcgatcgaaagaggcgaccggtttgggcaaaatcgtcaaaacgtcggaaacgttgaacaaagaacaggtactcggtatccgcgacctgacgcgctacgatccgggcgtggcggttgtcgaacagggcaacggcgcgagcggcggctactcgatacgcggcgtggataaaaaccgtgtggcggtttcggttgacggcgttgcccaaatacaggcgtttaccgtgcagggatcgttgagcggatacggcggacgcggcggcagcggcgcaatcaacgaaatcgaatatgaaaacatcagcacggtggaaatcgacaaaggtgccggttcgtccgatcacggcagcggcgcgctcggcggcgcggtcgccttccgcaccaaagaggcggcagacctgatttcagacggcaaaagctgggggatacaggcaaaaactgcctacggcagtaaaaaccgccaatttatgaagtcgctcggcgcggggttcagcaaagacggttgggaagggctgctaatccgaaccgaacgccaagggcgggaaacgcgcccgcacggcgatattgcggacggggtggaatacggcatagaccgtttggacgcgttccgccagacatacgatattcagaagcagaataaaaaggcggaatatttcttagcggagggcgagcgtgaacccaagcccgtggcaaaattggcgggcaacggaaactatttgaaaaaccagctcaaccgctgggtggaagaacgtaagaaaaacaatcagcctttaagtgctgaagaagaagcgatggtacgggaggcgcaggcgcgccacgaaaacctgtccgcccaagcttacacgggcggcggcaggatattgcccgatccgatggattaccgcagcggttcgtggcttgccaagctgggctaccgcttcggtggcaggcattatgtcggcggcgtgtttgaggataccaaacagcgttacgacatccgcgatatgacggaaaaacagtattacggtacggacgaggcgaaaaagtttagcgacaagagcggggtgtacgacggagacgatttccgcgacggcttgtattttaggccgaatatagaagagtggaagggcgataaaaatttggtcaagggcataggtttgaaatattcccgcaccaaatttattgatgaacatcaccgccgccgccgtatgggtttgctgtaccgttatgaaaacgaagcgtattctgacaactgggcggacaaggcggtgttgtcgtttgacaaacagggcgtggcaaccgacaacaacacgctgaagctgaattgcgccgtgtatcctgccgtggacaaatcctgccgcgcgtcggcggacaaaccgtattcctacgacagcagcgaccgtttccactaccgcgaacagcacaatgttttgaatgcctcgtttgagaaatcgctgaaaaacaaatggacgaaacatcatctgactttgggcttcggttacgatgcttccaacgcgatctcccgccccgaacagctttcccacaatgcggcaaggatttcggaatccacgggattcgatgataacaatcaagacaagtaccgtttgggtaagcccgaagtcgtcgaagggtcggtctgcggctacatcgaaaccctgcgttcccgcaaatgcgtgccaagaaaaatcaacggcagcaatatccacatttctttgaacgaccgtttttcaatcggcaaatatttcgatttcagcttgggcggcaggtacgaccggcaaaactttaccacgcgggaagaactcgtccgcagcgggcggtatgttaaccgttcgtggaacagtggcatcgtgttcaaaccgagccggcatttttctttgtcttaccgtgcctccagcggcttcagaacgccctcattccaagaacttttcgggatagacatttatcacgattatccgaaaggctggcagcgtcccgccctgaagtcggaaaaggcagccaaccgcgaaatcggtttgcagtggaagggcgacttcggctttttggaaatcagcagcttccgcaaccgttataccgatatgattgccgttgccgatcaaaaaaccaaattgccggattcaacaggacgattgacagagattgatatacgcgattattacaatgcccaaaatatgtcgcttcaaggcattaatatattgggaaaaatcgactggaacggtgtgtacggcaaactgcccgaaggtttgtacaccacattggcgtacaaccgtatcaaaccgaaatcggtatccaaccggccgggactgtccctccgcagctatgctttggatgcggtacagccgtcgcgttatgttttggggttcggatacgaccagccagaggggaaatggggcgcaaacattatgctgacctattccaaagggaaaaaccctgacgagcttgcttatctggcaggcgatcaaaaacgatattcgacaaaaagagcgtcgtcttcttggtcgacggcagacgtttccgcctatctgaatctgaaaaaacggctgaccttgagggcggccatctacaatatcggcaactaccgctacgttacttgggaatccttgcgccagactgcggaaagcacggcaaaccggcacggcggcgacagcaactatggaaggtatgccgcaccgggcagaaacttcagcctcgcgcttgaaatgaagttttaa

SEQ ID NO: 50770 - DNA, 309 bp, Neisseria meningitidis
atgaacaaaaacattgctgccgcactcgccggtgctttatccctgtctttggccgccggtgcagttgccgccgacaaaccggcaagcaacgcaacaggcgttcataaatccgcccatggctcttgcggcgcgtccaaatctgccgaaggttcgtgcggcgcggctggttctaaagcaggcgaaggcaaatgcggcgagggcaaatgcggtgcgaccgtaaaaaaaacccacaaacacaccaaagcatctaaagccaaggccaaatctgccgaaggcaaatgcggcgaaggcaaatgcggttctaaataa

SEQ ID NO: 50771 - DNA, 210 bp, Neisseria meningitidis; identical to SEQ ID NO: 43366

SEQ ID NO: 50772 - DNA, 1587 bp, Neisseria meningitidis
atggcacttttcctcagcatattccccatcgtcctgctgatttggctgatggtgaaaaaaaacagtatgccctcctacgtcgcgctgccgattaccgcagtgctgatttacgccatcaaacttttctacttcgacgatgcgggcatgctgctcaacgccaccgccgcttccggcctcgtcaaaacgctcacgccgattaccgtgattttcggcgcgattatgttcaaccgtatgatggaaaccacgggctgcatcgatgtcatccgcaaatggctggcgaccatcagcccgaaccccgtagcgcaactgatgattatcggctgggcttttgcctttatgattgaaggcgcatccggcttcggcacgcctgccgcgattgccgcgccgattctgatgagcttgggcttcaacccgttgaaagtggcgattttcactttggtgatgaactccgtccccgtctctttcggcgcggtcggtacgccgacctggttcggtttcgcaccgctgaacctgagtgccgaagacatcctcgccatcggcaggcagaccggcgtaatgcacttcttcgcaggtttcgtcatccccgtcatcggcttgggcttcatcgtaccttggtctgaaatccgcaaaaacttgggcttcgtcgccattgccgtcttctcctgcaccattccttatgtcgcattggcgatggtcaacgaagaattcccgtcgctcgtcgccggcgcgatcggcctgatggtgtccgtattcgccgccaaccaaggctggggcttgagcaaagaccacgccaaagacccgaatgccgaaaaagtgccgttcgcccaagtcgccaaagcactcgcccctttgggtatgctgatcggcatgctggtggttacgcgcatcaaacagctcggcatcaaaggcattttgaccagcaaagaagaatggttcagcttccaactgccgtttgatttgtccaaaatcaccgtcagcgactccctgacgattactttcggcaatattttcggacaagatgtcagcgcgtcttaccaaacgctgtacgtcccggcttggattccgtttgtgctgaccgtttggatttgcatcctgctgtataaaaccaaattcaaagatgcctggacgatttatgccgtaactttcaatcaaaccaaaaaaccgctgcttgccctgatgggcgcgctgattatggttcagctgatgctggtcggcggcgacaattcgatggtgaaaatcatcggtaaggaatttgccgcaatggcgggcgaacactgggtttatttctcgccgtatctgggcgcgatcggtgcgttcttctccggttccaacaccgtgtccaacctgaccttcggcccgattcagcagcaaatcgccttggataccggcctgtccgttaccctgattctggcgttgcagtccgtcggcggcgcgatgggcaatatggtgtgcctcaacaacatcatcgccgtatgtaccgtattggatgtgaaaaattccgaaggtgcgattatcaagaaaaccgttatcccgatggcgatttacggcgtgattgccgtcgtcgcggcaatgattttcttcctctag

SEQ ID NO: 50773 - DNA, 1059 bp, Neisseria meningitidis
atgcgccctttgaacgtgcagatcaggttgggcaaccttaggcacaattatcggattttgaaggaaatgcacggaggcaaactgttggcggtagtgaaggccgacgcatacggacacggtgcggtcagatgtgctttcgcgctggcagacttggcagacggctttgccgtggcgacaatcgatgaaggaatcaggctgcgggagagcggcattacccatccgattgtccttttggaaggcgtatttgaagcatcggaatacgaagcggtcgaacaatactcgctttggccggcagtcggaaaccaatggcagcttgaggctttgctgatccgccattggaaaaaacccgtcaaagtctggttgaaaatggattcggggatgcaccgtaccggttttttccctcatgattacgcttcggcatatgcggcattgaaacagtcggaatatgtggacagtattgtcaagttctcgcatttctcctgtgcggacgaacccgaaagcggtatgacggaaatacagatggaagcattcgatttgggtacgaaagggctggaaggcgaagaaagccttgccaattcggcggctattttgaatgttcccgaagcacgcagggattgggggcgcgcgggcttggcgttatacggcatttccccgttcggaggcagcgatgacaggctgaaacccgtgatgaggctttcaacccgtatttttggcgaacgcgttttacagccgcactcccctatcggttatggcgcaacattttataccagcaaatctacgcgcgtcggtctgattgcctgcggttatgcggacggttatccgcgccgcgccccaagcaattcccccgtcgccgtcgacggtaaattgacccgggtcatcggcagggtctctatggatatgatgaccatcgagctggacgcttcgcaagaaggtttgggacacgaggtcgaactgtggggcgatacggtcaacatcaatactgttgccgaagcggccggaaccatcccttacgaattgatgtgcaatatcaaacgtgcaaaattcacttatatcgagtaa

SEQ ID NO: 50774 - DNA, 447 bp, Neisseria meningitidis
atgtatgtagtaaaatcagccaatgatggaggtaattccctatttttaagttcatcagatattgtcaatcagttatctaaaacagaaaccggtaaaaaacacttaaaaacattaacgggcaatttatatccatttaaaacaccagcatcatttgataaaaaacaaggtgtgagatggggtaatatcttatcggtcaatactcaaatgattagatttagaagtgattgtatctataaaggtattgaagaaaatagaaataaagtatcaaaggaaatggtacttgcacttgattatcttgtaaatgttataaaaaatgcgagtgatattcaagaattttctgcacaagatgatggtttgattattattgacaatgtcaatggcttgcatgccagaactgattatacggataaaaacaggcattatattagagcaagaattactgtataa

SEQ ID NO: 50775 - DNA, 1488 bp, Neisseria meningitidis; identical to SEQ ID NO: 39015

SEQ ID NO: 50776 - DNA, 828 bp, Neisseria meningitidis; identical to SEQ ID NO: 38675

SEQ ID NO: 50777 - DNA, 576 bp, Neisseria meningitidis; identical to SEQ ID NO: 37908

SEQ ID NO: 50778 - DNA, 591 bp, Neisseria meningitidis
ttgcagggcgtgcggtgcaaaatgccgtctgaacgcggcggcattctgttaaaatgcgctattggaaaaaattcgagaaccaagatgtttgaacaagaagacgagtggatcagtaaaacccaaatgaaaaagcagatgaacggtttgcaggatttgggtatggaactgaccaagctctcaaacgatacgctgaaaaaaatcggcttggacgaagatttgtacgaagccgtcgttacctataaaaaaattacgtccaacggcgcgctcaagcggcaggcgcaatttatcggcaggctgatgcgcgacacggatcccgcgcccatcgaggcgtttcttgccaagctgcgcggcgacgatgcggcgcacaacgcctttttgcaacgcgtggaacaggcgcgcgtacggctgttggcagacgacggcgcgttgacgcagtttatgtcggattttccgcatgcggacgccggtaaattgcgtaccttgatccgcaacaccaaaaaagagcaggagcaaaacaaaccgccgaaaaatttccgcgccctgtttcaagaattgaaaaccgttatggaaaacggggacgcggaaatttag

SEQ ID NO: 50779 - DNA, 2526 bp, Neisseria meningitidis
atgaatccaaactcaaaacataacactaactttaccaatcttcttaaaccgtctgatagtgatataaaacaatttgccgcacaacacatccgccacctcaccgacctgctcaaccgctatgcctacgaatactacaccctcgacgcgcccagcgtacccgatgccgaatacgacaaattattccgcgagctcgaagcgttggaattaaaccatcccgaattcaaactgcccgacagcccgacccagcgcgtcggcggcgagcctctggcgggatttgccgaagtacgccacgaagtgccgatgctgtcgctgaccaacgccttttccccgcaagatgaaaacggcgtgttcgaccacgccgaaatgtacgctttcgaccaacgcgtgcgcgacggtttggacggcggcaatcccgaatacgttatcgaacccaaattcgacggcctcgccatcagcctgctctaccgcgacggcgtattggtacaggcggcaacgcgcggcgacggcacaacgggcgaagacgttacccaaaacatcaaaaccgtcgccaacatccccctgcggctgcacggcgaaaatacgcccgaactcatcgaagtacgcggcgaagtactgatgcaaaaagccgattttgccgccctcaataaaagacaagccgaaaacgggcaaaaaccctttgccaatccgcgcaacgccgctgccggcagcctgcgccaactcgattcgcgcatcactgcgcaacgcaaactgcactttttcccctactccgtcgcccgccagcaaggcggtttcgtcgcggaagaacacatccaagaactcgcctatttccaagcactcggcttcagtctgccaaatggcaatttcggctgtttcaaaaatatcgacgaagtattggcgttttacgaacaaatgcagcaaaaacgccccgaactgccctacgaaatcgacggtatggtggtcaaagtcaacagcttggcgcaacagcgcgaactcggcttcatctcacgcgcgccacgctgggcgattgcccacaaattccctgccgaagaagccctgaccattgtcgaagcgattgacgtgcaaatcggcaggacgggcgcggtaacgccggttgcccgattacaacccgtattcgtcggcggcgtaaccgttaccaacgccaccctgcacaatcaggacgaagtttcccgaaaagacgtgcgcgtcggcgataccgtcgtcgtgcgccgcgctggagacgtgattcccgaagtcgtgcgtgtgatttttgaacgccgcccgatgcaggaaaccgccgttgctgtttcagacggcatcgggcatcggcaggacgatttgtttgccgaaacaccgtccgctaatcaaacccaatccgttccgctccacaagccctaccgcctgccgacccattgccccatctgccgcagcgaaatcgaacgcgaagaaggcgaagccgtcgcccgatgcagcggcggtatgctttgtcaggcacaacgcgcgcaaggcttaatccacttcgcctcgcgcaaagccatggacatcgacggcttgggtgaaaaacaaatcgaacagcttgtcgcccaagacctcgtccgccacttcgccgacctctaccgcctcgatattccgaccctgcaaaaaatgaaagaaacgacggacaaaaccgttgccgaatcggatcaaacgccgtctgaaggcagttcggtcggcgcgtcgggcaaacataaaaaacaaccggtcaagtgggcggaaaacatcctcgggggcatagaatccggcaaaacgcccgaactcgcgcgcttcctgttcgcgctcggcatccgccacgtcggcgaacgcaccgccaaaacgctggcgcaggcattcggcacattggaacgcgtccgccgcgcccccgaacccgtcctcgcctgcctgcccgacatcggtacggtagtggcgcattccattgcccacttcttcgcccaagccgaacagcaggcgatgatagacgaactgctcgccgcaggcgttgccccgcaaacccaagccgttaccatcccgcccgcccgccacgccgaaccgcaacgctggatcgcccgcctgcccgacttcaaaattagcgaaaacaaagcccaagccttatgggaactcgctggtaaaaacatagaaggtctacaaaacgacaaagccctccccgccgactggcaagcatggcgcagcgaaccacaaaacgccgccctactcgaaaacctgaaaaccttcttcgcgcaaatgccgtctgaagacgaggcggcgcaaggttcagacggcatcaataaagccgtagcaggcaaaacctttgtattaaccggcaccctgcccacgctcaaacgcgaccaagcccaatccctaatcgaagccgcaggcggcaaagtttccggcagcgtgtccaaaaaaaccgactacgtcgtcgccggagaagccgcgggcagcaagctggaaaaagccaatgccttgggtgtttccatcctcagcgaagccgaactgcttaccctgctcggctga

SEQ ID NO: 50780 - DNA, 693 bp, Neisseria meningitidis; identical to SEQ ID NO: 42138

SEQ ID NO: 50781 - DNA, 633 bp, Neisseria meningitidis; identical to SEQ ID NO: 42193

SEQ ID NO: 50782 - DNA, 315 bp, Neisseria meningitidis
atgacaaagtctgagttaatggttcgtttggcagaagtgtttgccgccaaaaacggcacgcatcttctggcaaaagacgtagagtacagcgtaaaagtcttggttgacaccatgactagatcgcttgcccgaggtcaacgcatcgaaatccgcggtttcggcagcttcgatttgaaccatcgtcctgcccgcatcggtcgcaatcccaaaaccggcgagcgtgtggaagtacctgaaaaacatgtaccccacttcaagcccggtaaagaattgcgcgagcgggtcgatttggctttaaaagaaaatgccaattaa

SEQ ID NO: 50783 - DNA, 462 bp, Neisseria meningitidis
atgaccgaagtcatcgcctacctcatcgaacatttccaagatttcgatacctgtccgccgcccgaagacttgggtatgctgcttgaagaagcgggtttcgataccatggaaatcggcaacaccctgatgatgatggaagtattgctcaacagctccgaattttccgccgaacctgccgacagcggcgcattgcgcgtgtacagtaaagaagaaaccgacaacctgccgcaggaagtgatggggctgatgcagtatctgattgaagaaaaagccgtcagctgcgaacagcgggaaatcatcatccacgcgctcatgcacattccgggcgacgaaattaccgtagataccgccaaagtgctgaccctgctgcttttatgggcaaacaagagcgagctgcccgtgttggtcggcgacgagctgatgagcgcgcttttactcgacaacaaacccacgatgaactga

SEQ ID NO: 50784 - DNA, 948 bp, Neisseria meningitidis
atgaccgacatcacaccgtttgccaaccgcttgggcaaaaacatcaaacaccttatgaaatgggcgaaacgcaacggcattgaagcctggcgcatttacgaccgcgacatcccccaattcccctttgccgccgatgtttacggcgatcgaatccaccttcaggaatacgataccggctggctgatgcggcccgaagaatacgaagcgtggcttgccgaagtcttggaagccgtcgctttcgttaccggttttgaacccgaacaaatccgcctcaaacgccgcgaacgccaaaaaggtttgcagcaatacgaaaaaaccggcaaggcgggcgacgatttcgtcatcaccgaaaacggccgcaagttttgggtcaaccttgataagtatttggatacggggctttttttggatcatcgaaacacgcgcaaaaaagtcggcgaaacggcggcgggcaaacgttttttaaacctgttttcctacaccggcagcttcactgtctatgccgccaccggcggcgcggcatccagcgaaactgtcgatttgtctaacacttatctcgattgggcgagacgcaattttgaattgaacggcatcgatacggaacgacacaaaatcgtccgcgccgacgtgttccaatatcttcagacggcatatggggaaggcaggcggttcgacctcattgtgatggacccgcccagtttttccaacagcaagaaaatgtccgacatcctcgacatccagcgcgaccacaaaaagctgattgacggcgcggtgaagctgctcgcttcagacggcattttgtacttttccaacaacctgcgcagcttcgtcttagacgacttggtatcggaacaatacgccgtcaaagacatttccaaacaatccgttcccgaagatttccgcaacaaaaaaatccataggtgctgggaaatccgccacaaatcttaa

SEQ ID NO: 50785 - DNA, 120 bp, Neisseria meningitidis; identical to SEQ ID NO: 43584

SEQ ID NO: 50786 - DNA, 333 bp, Neisseria meningitidis
atgttggacgcaagcccaccgcaagagcggggtagccgccgcgaaacgcgcagccaaaaaaaagcgtcgcaaataactgcctttttccgatggctgggcggcttggtctctaatccggccacaggaaaaatcagccataccaaactttgggcaaacgtcgccgcagccgccatgacttggaagttcgtgcaggcggcggacgcgcccgaatggctttggtgggcatacggcgcgatggtcggcgggtatgcattaatcaaacgcggcatcgccgtcgtaccgcagttggcggaagtcaaaaaatccgcaaatcaggaaggggggcggcaatga

SEQ ID NO: 50787 - DNA, 1542 bp, Neisseria meningitidis
atgaaaatcggtatcccacgcgagtcattatccggcgaaacccgcgtcgcctgcacgcccgccaccgtcgccctgctgggcaaactgggctttgaaaccgttgtcgaaagcggtgcaggtttggcggcaagtttggacgatgccgcttaccaaacagcaggcgcaaccgttgccgacaaagcggcggtttgggtctgccctttgatttataaggtcaacgcgccgtccgaacaggaactgccgcttttgaacgaaggtcaaaccatcgtcagcttcctgtggccgcgccaaaacgaggctttggtcgaagccttgcgcgccaagaaagtgaacgcgctggcgatggatatggtgccccgcatttcgcgcgcgcaggctttggacgctttgtcttcgatggcaaacatcagcggctaccgcgccgtaattgaagccgccaacgccttcggccgtttcttcaccggtcaaattaccgccgccggcaaagtgccgcccgcgcaggttttggtgattggtgcaggtgtggcaggtttggcggcgatcggtacggcaaactcgctcggcgcagtggtacgcgcgttcgatacccgcttggaagtggcggaacaaatcgaatcgatgggcggcaagttcctgaaactcgacttcccacaagaatcgggcggcagcggagacggctacgccaaagtgatgagcgacgaatttatcgcagccgagatgaagctctttgccgagcaggcgaaagaagtggacatcatcatcaccaccgccgccattccgggcaaacccgcgcccaagctgattaccaaagaaatggtggaaagcatgaaatccggctccgtcatcgtcgatttggcggcggcgacgggcggcaactgcgaactcacccgcccgggcgaattgtccgtaaccggcaacggcgtgaaaatcatcggctacaccgacatggcaaaccgccttgccggacagtcttcccagctttacgccaccaacttggtcaacctgaccaagctgttaagcccgaacaaagacggcgaaatcacgttggacttcgaagacgtgattatccgcaacatgaccgttacccacgacggcgaaatcaccttcccgcctccgccgattcaagtttccgcccagccgcagcaaacgccgtctgaaaaagccgcgcctgccgccaagcccgagccgaaacctgtttccctgtggaaaaaactcgcgcccgccgtcatcgccgccgtattggtgctgtgggtcggcgcggtcgcacccgcagcattcctgaaccactttatcgtgttcgtccttgcctgcgtcatcggctactatgtcgtttggaacgtcagccactcgctgcacacaccgctgatgtcggtaaccaacgccatctccggcatcatcgtcgtcggcgcgctgctgcaaatcagccaaggcaacggtttcgttaccctgcttgccttcatcgccatcctgattgccagcatcaatatcttcggcggcttcttcgtaacgcgccgcatgttgaatatgtttaggaaaggataa

SEQ ID NO: 50788 - DNA, 201 bp, Neisseria meningitidis; identical to SEQ ID NO: 38240

SEQ ID NO: 50789 - DNA, 1008 bp, Neisseria meningitidis
atgagcaccttcttccggcaaaccgcccaagccatgattgccaagcacatcgaccgtttcccgctattgaagttggaccaggtgattgattggcagccgatcgaacaatacctgaatcgtcaaaaaacccgttaccttagagatcaccgcggccgtcccgcctatcccctgttgtccatgttcaaagccgtcctgctcggacaatggcacagcctctccgatcccgaactcgaacacagcctcattacccgcatcgatttcaacctgttttgtcgttttgacgaactgagcatccccgattacagcaccttatgccgctaccgcaactggctggcgcaagacgacaccctgtccgaactgttggaactgattaactgccaactgaccgaaaaaggcttaaaagtagagaaagcatccgccgccgtcattgacgccaccattattcagaccgctggcagcaaacagcgtcaggccatagaagttgacgaagaaggacaaatcagcggccaaaccacaccgagtaaggacagcgatgcccgttggatcaagaaaaacggcctctacaaactcggttacaaacaacatacccgtaccgatggggaaggctatatcgagaaactgcacattacccccgccaatacccatgagtgcaaccacctgtcgcctttgttggagggcattgccgaagatacgaccgtctatgccgacaaaggctacgacagtaaggaaaaccggcaacacctgaaagaacatcggttgctggacggcattatgcgcaaagcccagcgtaaccgtccgctgacggaagcgcaaaccaaacgtaaccgatatttgtcgaaaacccgttatgtggtcgaacaaagctttggtacgctgcaccgtaaattccgctacgcccgggcagcctatttcgggctgattaaagtgagtgcgcaaagccacctaaaggcgatgtgtttaaacctgttgaaagcagctaacaggctaagtgtgcctgttgccgcctaa

SEQ ID NO: 50790 - DNA, 393 bp, Neisseria meningitidis; identical to SEQ ID NO: 39912

SEQ ID NO: 50791 - DNA, 225 bp, Neisseria meningitidis; identical to SEQ ID NO: 39182

SEQ ID NO: 50792 - DNA, 390 bp, Neisseria meningitidis
ttgaaagcgggaagcaggctgtttgccgaaagcggcaaaacccaaaccgtccgcaacatcgttgtcaaaccaacaccgctcaaagcctacaatctgaccgttgccgattggcatacctacttcgtcaagggcaatcaggcggaaacggaaggggtgtgggttcataattcttgtccgcctaaaagaacaggaagctccaagaatgaaaaacatggagatggcggtcgaagtcaaatatcagcggaatcaaaaattgctgaattaacaaataaaattattcccggaatgtccaaaaatgaacgcttaaagattaagcaaaaaatcaaaaatattgccaaaaatgccaatcgaaaaacaaaaggagaagagcatggtcgacgcggtcgttaa

SEQ ID NO: 50793 - DNA, 1269 bp, Neisseria meningitidis
gtgaaaccgctgcgcagactgacaaacctccttgccgcctgcgccgtagcggccgctgctttcggacagcccgccctcgcggcggacttggcgcaagatccgttcattaccgataacgcccaacggcagcactacgaacccggcggcaaataccacctcttcggcgacccgcgcggcagcgtttccgaccgcaccggcaaaatcaacgtcatccaagactatacccaccagatgggcaacctgctcatccaacaggcggcaatccaaggcaatcttggttacaccgtccgcttttccggacacggacacgaagaacacgcccccttcgacaaccacgccgccgacagcgcaagcaaagaacaaggcaacgttgacgaaggctttaccgtgtaccggctcaactgggaaggacacgagcaccatcccgccgatgcctacgacggcccgaagggcggcaattaccccaaacctacgggcgcacgcgacgaatacacctatcacgtcaacggcacagcccgcagtatcaaactcaatccgaccgacacccgcgacgtcagacaacgcatatccgacaattacagcaacctcggcagcaatttctccgaccgcgccgatgaagccaacagaaaaatgttcgagcacaatgccaagctcgaccgctggggcaacagcatggagtttatcaacggcgtcgccgccggcgcgcttaacccctttatcagcgcgggcgaagccgttgaccagtggatgcaggaaaaccccaatgccgccgaaaccgtcgaagccctggtcaacgtcctgccgtttgccaaagtcaaaaacctgacaaaggcggcaaaaccggggaaggctgcggttagtggggatttctcagactcctacaagcataacactgcttcaagattatctcagtctgtagatggagaaatgtttcaaacccgcaatgttgattttaaagcaaaatctattgggactaaaattcatgatggagctcaagggaaacatatttcaggacatagaaactacattgaaggtaagagtactttaaatcaaaacattaatcctcaagaattgttgaacggaatacattcaggtgcttatccagttatttctaaaggagcaagaggaaatcctgttgttgattttgggtatcctataggcagcgatgggaaatcaggattaagtaccaattttggtacgattcattcaggtaaaaatggagttcacattgttccggctaaccctaaaaccattaaaaaggtgcaatag

SEQ ID NO: 50794 - DNA, 669 bp, Neisseria meningitidis
ttgccgtctgcttcagacggcattttgagtcattgggaacggcagactgcaatcatgaaaacctcgaacttttccaagagaacatccgcaatgaaaacttttgccctgatactggccgacggtcaggcgagccgtatgggaggcgaggacaaggggcttgctcttttggggggtaaggcactgatagatcatgtcatcgacagggtcaggccgcaggtcagccatatcgccatcagcaccaaccggaatttggaagaatatgctcgaagaagtccgcatatttttccggacgcacggcagtggcagcatttcggcccgctttcggcattgtgtaccgcagccaacgatttgcagttggcgactgccgactggcttttggttgtgccgtgcgatatgccgtatctgccggacgatttggtggcaaggtttgaaaccgtgtcgaaacgcacaccgttgtgcaatgcgtattatgtggaaacgccgataacgatgcactacaacattatgtatatccgcccgcagattctgcaaagcgcgattccctatctgttttcgggtatgaaaacattaagaagctggttgcagcagcaaagggcgcggtcggtcagattcgagtttgacgggcattttgccgacttgaacacgcaaaccgatttgcaggagggataa

SEQ ID NO: 50795 - DNA, 342 bp, Neisseria meningitidis
atgcccaaaatcaccgtacttccacacacgacattatgccccgaaggcgcggttatcgacgacgcgccggaaggcaaaaccgtcctcgacgtactgctcgaccacgacatcgaagtcgatcacgcctgcgaaaaatcctgcgcctgcaccacctgccacgtcatcatccgcaaaggtttcgacagtttggaagaaccgaccgaattggaagaagacctgctcgaccaagcatggggtttggaagccgattcgcgcctgagttgtcaggcggttgtcgccggcgaggatttgattgtggaaatccccaaatacaccatcaaccacgcgcgagaagaacactga

SEQ ID NO: 50796 - DNA, 843 bp, Neisseria meningitidis; identical to SEQ ID NO: 41197

SEQ ID NO: 50797 - DNA, 2406 bp, Neisseria meningitidis
atgaataccaaactgacaaaaatcatttctggtctctttgtcgcaaccgccgcctttcagacagcatcggcaggaaacattacagacatcaaagtttcctccctgcccaacaaacagaaaatcgtcaaagtcagctttgacaaagagattgtcaacccgaccggcttcgtaacctcctcaccggcccgcatcgccttggactttgaacaaaccggcatttccatggatcaacaggtactcgaatatgccgatcctctgttgagcaaaatcagtgccgcacaaaacagcagccgtgcgcgtctggttctgaatctgaacaaaccgggccaatacaataccgaagtacgcgggaacaaagtttggatattcattaacgaatcggacgataccgtgtccgcccccgcacgccccgccgtaaaagccgcgcctgccgcaccggcaaaacaacaggctgccgcaccgtctaccaagtccgcagtatccgtatccgaaccctttaccccggcaaaacaacaggctgccgcaccgtttaccgagtccgtagtatccgtatccgcaccgttcagcccggcaaaacaacaggcggcggcatcagcaaaacaacagacggcagcaccagcaaaacaacaggcggcagcaccagcaaaacaacaggcggcagcaccagcaaaacaacaggcggcagcaccagcaaaacaacaggcggcagcaccagcaaaacaacaggcggcagcaccagcaaaacaacaggcggcggcaccggcaaaacaaaccaatatcgatttccgcaaagacggcaaaaatgccggcattatcgaattggcggcattgggctttgccgggcagcccgacatcagccaacagcacgaccacatcatcgttacgctgaaaaaccataccctgccgaccacgctccaacgcagtttggatgtggcagactttaaaacaccggttcaaaaggttacgctgaaacgcctcaataacgacacccagctgattatcacaacagccggcaactgggaactcgtcaacaaatccgccgcgcccggatactttaccttccaagtcctgccgaaaaaacaaaacctcgagtcaggcggcgtgaacaatgcgcccaaaactttcacaggccggaaaatctcccttgacttccaagatgtcgaaatccgcaccatcctgcagattttggcaaaagaatccgggatgaacattgttgccagcgactccgtcaacggcaaaatgaccctctccctcaaagacgtaccttgggatcaggctttggatttggttatgcaggcacgcaacctcgatatgcgccaacaagggaacatcgtcaacatcgcgccccgcgacgagctgcttgccaaagacaaagccttcttacaggcggaaaaagacattgccgatctgggcgcgctgtattcacaaaacttccaattgaaatacaaaaatgtggaagaattccgcagcatcctgcgtttggacaatgccgacacaaccggaaaccgcaatacgcttgtcagcggcaggggcagcgtgctgatcgatcccgccaccaataccctgattgttaccgatacccgcagcgtcatcgaaaaattccgcaaactgattgacgaattggacgtacccgcgcaacaagtgatgattgaggcgcgtatcgtcgaagcggcagacggcttctcgcgcgatttgggcgttaaattcggcgcgacaggcaagaaaaagctgaaaaatgatacaagcgcattcggctggggggtaaactccggcttcggcggcgacgataaatggggggccgaaaccaaaatcaacctgccgattaccgctgccgcaaacagcatttcgctggtgcgcgcgatttcctccggtgccttgaatttggaattgtccgcatccgaatcgctttcaaaaaccaaaacgcttgccaatccgcgcgtgctgacccaaaaccgcaaagaggccaaaatcgaatccggttacgaaattcctttcaccgtaacctcaatcgcgaacggcggcagcagcacgaacacggaactcaaaaaagccgtcttggggctgaccgttacgccgaacatcacgcccgacggccaaatcattatgaccgtcaaaatcaacaaggactcgcctgcgcaatgtgcctccggtaatcagacgatcctgtgtatttcgaccaaaaacctgaatacgcaggctatggttgaaaacggcggcacattgattgtcggcggtatttatgaagaagacaacggcaatacgctgaccaaagtccccctgttgggcgacatccccgttatcggcaacctctttaaaacacgcgggaaaaaaaccgaccgccgcgaactgctgattttcattaccccgaggattatgggtacggccggcaacagcctgcgctattga

SEQ ID NO: 50798 - DNA, 594 bp, Neisseria meningitidis
atgacgacattacaagaacgcgttgccgcccattttgccgaaagcatccgtgccaaacaggaagccgaaaaagtactggtcgagccgaccgtacaggctgccgagctgatgctgcaatgcctgatgaatgacggcaaaatcctggcctgcggaaacggcggttcggctgccgacgcgcaacacttcgccgccgaaatgaccggtcgttttgaaaaagaacgcatggaactcgccgccgtcgcgctgacaacagacacttccgcgctgaccgccatcggcaacgactacggtttcgaccatatattcagcaaacaagtgcgcgcgctcggacgcgccggcgacgtcctcgtcggcatttccacctccggcaactccgccaacgtcatcgaagccattaaagcggcacacgaacgcgatatgcacgtcatcgccctgaccggccgcgacggcggcaaaatcgccgccatactcaaagacaccgacgttttgctcaacgtcccccatccgcgcaccgcccgcattcaggaaaaccacatcctgctgatacacgccatatgcgactgtatcgactccgtactgctggaaggaatgtaa

SEQ ID NO: 50799 - DNA, 1542 bp, Neisseria meningitidis
ttggcatcagtaaatgttccgggtaaatttgatagggttgaagtttatgatgatggcagatatttaggtattcgaggttcagatgacaaaagaagaagaatttggaaaggtgtatttgatagagaatcgggaagatatttaacttcagaagctcaagatttaaaagttaggcatgtatctactggagcatcaagtacgggtaaagttagttcggttgtatcttcatcagtttcccgcgccggcgtattggcgggggtcggcaaactcgtccgcttaggcgcgaaattcagcacaagggcagtcccttatgtagggacagcccttttagcccacgacgtatacgaaactttcaaagaagacatacaggcacgaggctaccaatacgaccccgaaaccgacaaatttgtaaaaggctacgaatatagtaattgcctttggtacgaagacgaaagaagtattaatagaacctatggctgctacggcgttgacagttcgattatgcgccttatgtccgatgacagcagattccccgaagtcaaagaattgatggaaagccaaatgtataggctggcacgtccgttttggaattggcataaagaagaactgaataaattaagttctttggattggaataattttgttttaaatagttgcacatttagttggaacggcggagattgtgtggtcaataaaggtgatgattacagaaatggggctaatttttcccttatccgcaatccgaaatacaaagaagaaatggatgccaaaaagctggaagagattttatcgttgaaagtcgatgccaatcccgacaaatacataaaggcaaccggatatcccggttattccgaaaaagtagaagtcgcacccggaacaaaagtgaatatgggacccgtcacggacaggaacgggaatcccgttcaggttgtcgcaacattcggcagggattcgcaaggcaacaccacagtggatgttcaagtaattccgcgtcccgacttaacccccggaagcgcggaagcgccgaacgcacagccgctgcccgaagtatcgcccgccgaaaaccccgcaaacaacccggcccccaatgagaaccccggcacgcgtcccaatcccgaacccgaccccgatttgaatcccgatgcaaatcccgatacggacggacagcccggaacaagccccgattccccggccgttccggaccgcccaaacggcagggacggcaaagatggcgggcttttgtgcaaattcttccccgacattctagcttgcgacaggctgcccgagcccaatccggcagaagatttaaatctgccgtctgaaaccgtcaatgtagagtttaagaaatccggaatctttcaagattccgcacagtgtcccgcccccgttacgttcactataaccgtgcttgattcaagcaagcagttcgcgttcagctttgagaacgcatgtaccatagccgaacggctaaggtacatgcttctcgcccttgcttgggcggttgccgcctttttttgtatccgcacagtatcccgtgaagtctag

SEQ ID NO: 50800 - DNA, 360 bp, Neisseria meningitidis; identical to SEQ ID NO: 39361

SEQ ID NO: 50801 - DNA, 174 bp, Neisseria meningitidis
  misc_feature 174: 'n' is a, c, g or t
atgaacacccttcaaaaaggttttacccttatcgagctgatgattgtgattgccatcgtcggcattttggcggcagtcgcccttcctgcttatcaagactacacagcccgcgcacaagtttccgaagccattcttttggctgaaggtcaaaaatcagccgtcaccgagtattan

SEQ ID NO: 50802 - DNA, 579 bp, Neisseria meningitidis
atgaatattttattattagacggcggcaaggcgttcggacattctcacggcgggttaaaccgcacgcttcacaaaaaagcgaaagaagttttgaccgcgctcggacacaatgttcaagaaaccgtgattgatgccggctatgatgttgaggcagaaatcgaaaaattcgtttggatggatgctgtgatttggcagatgccgggctggtggatgcacgagccttggacagtgaaaaaatacatagacgaagtattaaccgctggacacggcaaactctaccaaagcgacggcagacacagcgtcaatccgactgagggctacggcacaggcggcttgttgcaaggcaaaaaacatatgctttcactgacttggaatgcgccgattgaggcgtttacccgcgaaggcgatttctttgaaggcaaaggcgttgatgttttgtatatgcacttccacaaagccaacgagtttttgggtatgacccgcctgccgacattcttatgtaacgatgtggttaaaaatccgcaagtggaaaaatacttggcagattatcaggcacacttggaaaaagtgttcggctaa

SEQ ID NO: 50803 - DNA, 1491 bp, Neisseria meningitidis
ttgtcaggactccccatccccaaagacatcgcgcgcccgcccgaaacgatattggtcaacatcacgccgcaggaaacgcgcgtagcggtgttggaggaaaacaatatctgcgagctgcacatcgagcgcaacagcgaacacagcctagtcggcaatatctatttgggcgtggtgcgccgcgtgctgcctgggatgcagagcgcgtttatcgacatcggcttggaacgcgcggcgtttttacacatcgtcgatgtcctcgaacaacgccgcaaccccgaagaaacccagcgcatcgaacatatgctgtttgaagggcagtctgttttggtgcaggtcatcaaagacccgatcaacaccaaaggcgcgcggctttccacccaaatctcgctggcggggcgtttcctcgtccatcttccgcaagaagaccacatcggcgtgtcccaacgcatcgaagacgatgccgaacgcagcagcctgcgcgaacgcctcgacaagctcctgccggaaaatgcctgccggggctacatcatccgcaccaacgccgaaaacgccaccgacgaacagctccagtccgacatcgactacctgaccaaagtgtgggaacacatccaagaacaggcgaaaatccggccgccggaaaccctgctttatcaggatttgcccttgagtttgcgcgtgttgcgcgatatggtcggctgcgacacgcaaaaaatcctcgtcgattccaccgtaaaccacggccgcatgacgcgttttgccgaacaatacgtccacggcgcattgggcaggatagaattgttcaaaggcgaacgcccgctatttgaaacccacaacgtcgagcaggaaatcagccgcgccctgcaaccgcgcgtcaacctcaacttcggcagctacctgattatcgaatccaccgaagcgatgaccacgatagacgtgaacaccggcggcttcgtcggcgcacgcaatttcgatgaaacgattttccgcaccaacctcgaagcctgccacaccatcgcccgcgaattgaggctgcgcaacctcggcggcatcatcatcatcgacttcatcgatatggcgcaggaaagccaccgcgaagccgtgttgcaggagcttgccaaagccctcgccttcgaccgtacccgcgttaccctgcacggttttaccagcctgggactggtcgagctgacgcgcaaacgctcgcgcgaaaacttaaaccaagtcctctgcgaaccctgcccttcctgccaaggcagaggccgtctgaaaacgccgcaaaccgtatgctacgaaatccagcgcgaaatcgtccgcgaagcgcgccgttacgatgccgaaagtttccgcatcctcgccgcccccaacgtcatcgatttgtttttggacgaagaatcgcaatccttggcaatgctgatagatttcatcggcaaaccgatttctctggcggtcgaaaccgcttacacgcaggaacaatacgacatcgttttgatgtaa

SEQ ID NO: 50804 - DNA, 1893 bp, Neisseria meningitidis
atgcctatccttaccatccgtgaagtgtgcaacattaatcattggggcataggttattatgatgttgacgattccggcgaaatcatcgtccgccccaatccggcgcaacacaatcaaactgcttcactgcaaaaactgactgaagccgtgcaacaaaaacatcaggcgcgcctgcctgttttgttttgttttccgcaaatcctcgaacaccgcctccgcgacattaaccgcgcctttcagacggcacgggaagagtgcggctataagggcggttattgtttggtttaccctatcaaggtcaaccaacaccgccgcgtcatcgaatcgcttatgtcaagcggacaaccgcatggtttggaagctggttctaaagccgaactgatggcggttttggcacacgccggcacccggcaaacattaatcgtctgcaacggctataaagaccgtgaatatatccgtttcgccttgatgggcgaaaaactggggcatcaggtttatttggtgattgagaagctgtccgaaatacaaatggtattggaagaggcggaaaaactcggcatcaagccccgtttgggtgtgcgcgccagactggcttcccaaggttcgggaaaatggcagtcttcgggtggggaaaaatcaaaattcggcttgtcggcttcccaagttttgcaactggtcgatattttgaaacaaaaaaacaggctggattgcctgcagcttttgcatttccatttgggctcgcagcttgggaacatccgtgatgttgccacaggtgtacacgaatcggctcggttttatgttgagttgcacaaactgggggtaaatatccgctgttttgatgtaggcggcgggcttggcgtggattacgaaggaaaccgcacacaatcggattgttccgttaattacagcctcaacgaatatgccgccacagtcgtatggggcatcagtcaggcttgtctcgaacacgggctgccgcatccgacaatcatcaccgagagcgggcgcggcattaccgcacatcacgccgttttggttgctaatgttataggcgttgaacgttacaaaccgcgccggctggatgcgccatcgcccgaagcaccgcgtgtgttgcacagtatgtgggaaacttggacggatatttccgcctcgcgggaaaaacgttccttacgcagctggatacacgaagggcagtttgatcttgctgatgtgcataatcagtataatgtcgggctgttgagtttggcgcaacgtgcgtgggcggagcaactgtatttaaatatctgtcatgaagtcggcgaattgtttaatgaaaaacaccggtctcaccgaaccattattgacgaattgcaagaacgttttgccgataagctgtatgtcaatttctcactcttccaatctttgcccgatgcttggggcatagatcaacttttccctgtttgtcccattaccggtttgaatgaaccgattgcgcgccgcgccgtgttgttggacattacctgcgattcagacggtacgattgaccactacatcgacggagacggcatcgccggtacgatgcctatgcctgattatcccgaagaagagccgccgcttttaggcttttttatggtgggagcatatcaggaaatactcggcaatatgcacaatcttttcggcgacactgccactgccgatgttgttgtaggggaagacggacaatttaccgtcatcgattacgatgaaggaaacaccgttgccgatatgctcgaatacgtttatcaagatccgaaagagctgatgaaacgctatcgcgaacaaatcgaacattcagaccttcctgcctcgcaggctatgtctttcttaaaagaactcgaagcggggcttaatggttatacctatttggaagacgaatag

SEQ ID NO: 50805 - DNA, 1266 bp, Neisseria meningitidis
atgtctgaagcccttgcaaaagaaaccctcaatccgtttgaaatcgcgcgcaaacaggtcaaaaccgcctgcgaccagctgaaaaccgatccggccgtttatgaaatcctgaagagtccgacccgcgtgttggaagtcaatttccccgtcaaactcgacgacggcacggtcaaaaccttcacgggctaccgttcgcaacacaacaacgccgtcggcccctataaaggcggcgtgcgcttccatcccggtgtgaatctggacgaagtcaaagccctgtcgatttggatgaccatcaaatgctgcgtggccggcattccttacggcggcggcaaaggcggcgttaccttggatccgcgcgattattccgaggcggaactggaacgcatcgcccgcgcttattccgaagccatttctccgctgatcggcgagaaaatcgatattcccgcacctgatgtgaacaccaacggcaaaatcatgtcttggatggttgatgcctatgaaaacgtggtgaaacattccgcaccgggcgtatttaccggcaaaccggtcgagttcggcggctctttggcgcgtaccgaagccacgggttacggcgtgaacctcgccgccgtccaagccttggaaaaactgggcaaagacgtgaagggtgccacttacgccattcaaggtttcggtaatgtgggttaccacacaggttattacgcgcatcaatccggcgcgaaagttgttgcggtttctactgtcgatgttgccatttacaacgaaaacggtttggatatggaagccctgttcaaagagttccaagaaaaaggcttcatcaccaacgaagccggttacggcaaggaaattaccaacgccgaacttttggctttggatgtggacgtactcgccccttgcgcgctggaaaatcaactgacttctgaaaacgccggtaaagtccgcgcgaaaatcgtggtcgaaggcgcgaacggtccgactacgcccgaagccgacgttatcctgcgtcaaaacggcgtattggtcgtgcccgatattctggcgaactgcggcggcgtggtcgtttcctatttcgagtgggtgcaaaacctgcaaggctattattgggagtttgacgaagttcaggaaaaagaaaccgtcgtcctgcgccgtgcgttccgcgatatatggaacttggcgcaagagtatgatgtcgatttgcgaaccgcgtcttacatgatgagtatccgccgtgttgaaaaagcgatgaaactgcgcggttggtattga

SEQ ID NO: 50806 - DNA, 687 bp, Neisseria meningitidis
atgagatggattcttagttttagcagcaaaaaaaccgataagaaacagcatactgatttggaaagcatcggggaatacgccctatttcttttgataattgtttgtattttaaatagaaaatttgtcatgccgacagcttttgcatacaatgcacgcatcccgaatagcgacacagatgctgttcagacataccgaaaaccaagttacggaaagagagatattatgcaaggcaatcaagctgttgttgattatatgaacgaattgctgtctggcgagctggcggcacgcgaccaatactttatccactcccgcctctactccgaatggggctacaccaaactttttgaacgtctcaatcacgagatggaagaagaaaccacacacgccgaagacttcatccgacgcatcctgatgctgggcggtacgccgaaaatggcgcgcgccgagctgaatatcggcacggacgtggtttcctgcctcaaagccgacctgcaaaccgaatacgaagtgcgcgacgctttgaaaaaaggcatcaaactgtgcgaagaggcgcaagactatgtcagccgcgatttgatggtcgcccaactgaaagataccgaagaagaccacgcccactggctggaacagcagcttcgcctgatcgagttaattggcgaaggcaactactaccaaagccaactgtaa

SEQ ID NO: 50807 - DNA, 702 bp, Neisseria meningitidis
atgacggaacctgcggccgaaggcggtaaagctgccaaggcgttaaaaaaatatctgattacgggcattttggtctggctgccgattgcggtaacggtttgggtggtttcctatatcgtttccgcgtccgatcagctcgtcaacctgctgccgaagcaatggcggccgcaatatgttttggggtttaatatcccggggctgggcgttatcgttgccattgctgtattgtttgtaaccggattatttgccgcaaacgtattgggccggcagattcttgccgcgtgggacagcttgttggggcggattccggttgtgaagtccatctattcgagtgtgaaaaaagtatccgaatcgctgctgtccgacagcagccgttcgtttaaaacaccagtactcgtgccgtttccccaatcgggtatttggacaatcgcattcgtgtccggtcaggtgtcgaatgcggttaaggccgcattgccgaaggacggcgattatctttccgtgtatgttccgaccacgccgaatccgaccggcggttactatattatggtaaagaaaagcgatgtgcgcgaactcgatatgagcgtggacgaagcgttgaaatatgtgatttcgctgggtatggtcatccctgacgacctgcccgtcaaaacattggcaggacctatgccgcctgaaaaggcggatttgcccgaacaacaataa

SEQ ID NO: 50808 - DNA, 597 bp, Neisseria meningitidis
atgcgcaaacagaacactttgacgggaatcccgacttctgacggacagagggggtttgcactgtttatcgtgctgatggtgatgatcgtcgtggcttttttggttgtaactgccgcgcagtcttacaataccgagcagcggatcagtgccaacgaatcagacaggaaattggctttgtctttggccgaggcggctttgcgggaaggcgaacttcaggttttggatttggaatatgatacggacagtaaggttacatttagcgaaaactgtggaaaaggtctgtgtaccgcagtgaatgtgcggacaaataatactggtaatgaagaggcttttgacaatatcgtggtgcaaggcaatcccaccgttgaggcggtgaagcgtttttgccctgcaaattctaccgacctgtgcattgacaagaaagggatggaatataagaaaggcacgagaagcgtcagcaaaatgccacgttatattatcgaatatttgggcgtgaagaacggagaaaatgtttatcgggttactgccaaggcttggggtaagaatgccaataccgtggtcgtccttcaatcttatgtaagcaataatgatgagtaa

SEQ ID NO: 50809 - DNA, 501 bp, Neisseria meningitidis; identical to SEQ ID NO: 37882

SEQ ID NO: 50810 - DNA, 255 bp, Neisseria meningitidis; identical to SEQ ID NO: 39349

SEQ ID NO: 50811 - DNA, 252 bp, Neisseria meningitidis
ttgatccgcaccgccttactcgcagtcgcagccgccggcatctacgcctgccaaccgcaatccgaagccgcagtgcaagtcaaggctgaaaacagcctgaccgctatgcgcttagccgtcgccgacaaacaggcagagattgacgggttgaacgcccaaatcgacgccgaaatcagacaacgcgaagccgaagaattgaaagactaccgatggatacacggcgacgcggaagtgccggagctggaaaaatga

SEQ ID NO: 50812 - DNA, 345 bp, Neisseria meningitidis; identical to SEQ ID NO: 36580

SEQ ID NO: 50813 - DNA, 1467 bp, Neisseria meningitidis
atggctgaagcgacagacgttgtcttggtgggcggcggcattatgagcgcgactttgggcgttttgctcaaagaactcgaaccgtcttgggaaatcaccctgattgaacgcttggaagatgtggcgttggaatcgtcaaacgcgtggaacaacgccggcacggggcattccgcgctgtgcgaattgaactatgcgccgttgggtgcaaatgggattatcgatccggcgcgcgccctcaatattgccgaacagtttcatgtcagccgccagttttgggcgacgttggtcgcggaaggcaagttggaagacaattccttcatcaatgccgtgccgcatatgtctttggtgatgaatgaagaccattgttcttatcttcaaaaacgttatgacgcgtttaaaacccaaaaactttttgaaaatatggaattttccaccgatcggaacaaaatttccgattgggctccgctgatgatgcgcggccgggacgaaaaccaacccgtcgccgccaactactccgccgaaggtacggatgtcgatttcggacggctgacgcgccaaatggtgaaatatttgcagggcaagggcgtaaaaaccgagttcaaccgccacgtcgaagacatcaaacgcgaatccgacggcgcgtgggtgctcaaaaccgccgatacccgcaaccccgacgggcagctcaccctccgtacccgcttcctcttcctcggcgcgggcggcggcgcgctgaccctgctgcaaaaatccggcatccccgaaggcaaaggctacggcggcttccccgtgtccggcctgttcttccgcaacagcaaccccgaaaccgccgaacaacacaacgccaaagtgtacgggcaggcttccgtcggcgcgccgccgatgtccgtcccgcacctcgacacacgcaacgtggacggcaaacgccaccttatgttcggcccttacgcaggcttccgttccaacttcctcaagcaaggctcgcttatggatttgccgctgtccatccatatggacaacctctatcctatgctgtgcgccggctgggcgaatatgccgctgaccaaatacctgctgggcgaattgcgtaaaaccaaagaagaacgcttcgcctccctgctggaatactaccccgaggcaaaccccgacgactgggaactcatcaccgcagggcaacgcgtccaaatcattaaaaaagactccgaaaaaggcggcgtgctccagtttggtacggagattgtcgcccacgccgacggctcactcgccgcattgctgggcgcgtcgccgggcgcatcgaccgctgtgccgctgatgatccggctgatgcaccaatgcttccccgagcgcgccccgtcttgggaaggccgtctgaaagagctggtaccgggttacggcatcaagttgaacgaaaaccccgaaagggcggatgaaattatcgcctataccgcgaaagtgttggatatttaa

SEQ ID NO: 50814 - DNA, 852 bp, Neisseria meningitidis
atggcacgacacgtttggcaggcaggacggtttgaaatcggtttggacaaaccgaaaatcatgggtatcgtgaatctcacgcccgattctttttccgacggcggcgcgtattcgcaaaatgcccgaaccgctttggcgcacgccgaacggcttttgaaagagggtgcggacattctcgacatcggcggcgaatcgacgcggccgggtgcggattatgtttcgtccgaagaagaatgggcgcgggttgagcctgtattggtagaagtcgcgggatggggcgttcccgtcagtttggacacgcgccgcacggtggttatggaaaaagcgttggcactcggcggcatcgatattattaacgatgtggcggcgttgaccgacgaaggcgcggtcgaattgctggcgcgtcaggcggacacgggcatttgcctgatgcacatgcagggtttgcctgaaaacatgcagattaatccgaaatatcaggatgttgtcggtgaagtggcacgttatctgaaaacacggtcagaagcctgtgttgcggcaggcatcgccccgcaacgcatcacactcgaccccggtttcggcttcggcaaaaccctgcaacacaatatcgcactgatgcggcatttacccgaattgatggcagaaacaggctttccgctgcttatcggcgtatcgcgcaaacgcatgataggcgagctgaccggcgaaaccgacgcggcggcgcgcgtacacggcagcgtggcggcggcactggcttccgtggcgcgcggcgcgcaaatcgtgcgggtgcatgatgtgaaggcgacggcggatgcgttgaaggcatgggaagcgttgggcatcaatctgtaa

SEQ ID NO: 50815 - DNA, 1392 bp, Neisseria meningitidis
atgagcggtcagttgggcaaaggtgcggatgcgcctgatttggtgtacggtttggaggataggccgccgttcggtaatgcgctcttgagcgcggttacccatcttttggcgatttttgtgccgatgattacgcccgcgctgattgtgggcggcgcgctggaattgccggtggagatgacggcgtatctcgtgtcgatggcgatggttgcgtcgggtgtcggcacttatttgcaggtcaaccgcttcgggccggtcggttcggggatgctgtccatccagtcggtgaatttctcgttcgttactgtcatgattgcgctcggcgcggggatgaaagagggcggtttgactaaggatgcgatgatttcgacgctcttgggcgtatcgtttgtcggcgcgtttttggtgtgtttctcggcgtggcttctgccgtatttgaaaaaggtgattacgccgacggtcagcggcgtggtcgtgatgctcattggtttgagtttggtacacgtcggcattaccgatttcggcggcggcttcggcgcgaaggcggacggcacgttcggctcgatggaaaacttggggctggcatcgctggtgttgctgattgtgttggtgttcaactgcatgaaaaacccgctgttgcgcatgagcggcattgcggtcgggctgattgccggctatatcgtcgcgctgtttttgggcaaggtggatttttccgcgctgcaaaacctgccgctggttacgctgcccgtaccgtttaaatatggttttgcttttgactggcacgcgtttattgtggcgggcgcgattttcttgttgagcgtgtttgaggcggtcggcgatttgaccgcaacggcaatggtgtccgatcagccgattgaaggcgaggaatacaccaaacgcctgcgcggcggcgtgttggctgacggcttggtgtcggtgattgcgacggctttgggttcgctgccgctgacgacgtttgcgcaaaacaacggcgtgattcagatgaccggcgtggcttcgcgtcatgtgggcaaatatattgccgtgattttggtgctgttgggtctgttccccgttgtcggtcgcgcgtttacgacgattccgagtccggttttaggcggcgcgatggttttgatgttcggcttaattgcgattgcgggcgtgcggattttggtcagtcacggcatccgcaggcgcgaagcggtgattgcggcaacgtcggtcggtttgggcttgggtgtcgcgtttgagccggaagtgtttaaaaacctgcccgtcttgttccaaaactctatttccgccggcggcattacggcagtcttgctgaatttggtcttgcccgaagataaaaccgaggcggcggtcaagtttgataccgaccacttggaacactga

SEQ ID NO: 50816 - DNA, 765 bp, Neisseria meningitidis
atgagctacacgcaactgacccagggcgaacgataccacatccaatacctgtcccgccactgcaccgtcaccgaaatcgccaaacagctgaaccgccacaaaagcaccatcagccgcgaaatcagacggcaccgcacccaagggcagcaatacagcgccgaaaaagcccagcggcaaagccagactatcaaacagcgtaagcgacaaccctataagctcgattcgcagctgattcagcacatcgacacccttatccgccgcaaactcagtcccgaacaagtatgcgcctacctgtgcaaacaccaccagatcacgctccaccacagcaccatttaccgctaccttcgccaagacaaaagcaacggcagcacgttgtggcaacatctcagaatatgcagcaaaccctaccgcaaacgctacggcagcacatggaccagaggcaaagtacccaaccgtgtcggcatagaaaaccgacccgctatcgtcgaccagaaatcccgtatcggcgattgggaagccgacaccattgtcggcaaaggacagaaaagcgcattattgaccttggtcgaacgcgttacccgctacaccatcatctgcaaattggatagcctcaaagccgaagacactgcccgggcagctgttaggacattaaaggcacataaagacagggtgcacaccatcaccatggataacggcaaagagttctaccaacacaccaaaataaccaaagcattgaaagcggagacttatttttgtcgcccttag

SEQ ID NO: 50817 - DNA, 552 bp, Neisseria meningitidis; identical to SEQ ID NO: 37494

SEQ ID NO: 50818 - DNA, 486 bp, Neisseria meningitidis; identical to SEQ ID NO: 43447

SEQ ID NO: 50819 - DNA, 1647 bp, Neisseria meningitidis
atgaaacaccttcacgacttacccgcatggtcgaaattgtggaaccactttgacgacagcaaaacattgcatatgcgcgaaatgttcgagcaagacccgcagcgtgcggaacgctactggctgcaagtcggcggactgacgctggactactccaaaaaccgcatcaacgacgaaaccatgtcgcttttgttcgagcttgcccgagaagcaggcgtgccggagcggatgcggcagatgttccacggcgaaaaaatcaataccaccgaaaaccgcgccgtcctgcatgtcgcccttcgcaaccgcaccaattcgccgattgtggttgacggtgaagatgtgatgcccaaagtcaaccgcgttttgcaacgtatgggcgaatttgcacacgaagtccgcagcggaagctggctgggctataccaaccaagtcattaccgacgttgtcaacatcggcatcggcggatcggatttgggtccgctgatgatgtgtaccgcgctcaaacctttcggtcatccgcgcctcaatatgcacttcgtctccaacgtggacggctcgcaactgcgcgacgtattgtccaaagtccaccccgaaaccacgttgttcatcatcgcctccaaaacatttaccacgcaggaaacgctgaccaacgcgctgaccgcgcgcgaatggtttttgaatcatgcgggcgacgaagaagccgttgccaaacacttcgccgccgtttccaccaatcaaaaagccgtcgccgaattcggcatcgacaccgccaatatgtttgaattttgggattgggtcggcggtcggtacagcctgtggtccgccatcggattgccgattatgctgtatctcggcgaagaaaacttcatcgaaatgctcaacggcgcgcacctgatggaccaacacttcatcaacacaccgctcgagcgcaacctgcccgtcattctcgccctcatcggcatctggtatatcaactactacggcggcggcagccacgtcatcgcgccttacgaccaacatttgcaccgcctgcccaaattcatccagcagctcgatatggaaagcaacggcaaacaggttacgttggacggcaaagcagtcggacacgaaacctcgccgattatctggggcgaaacgggcattaacggccagcacgccttcttccaactgctgcaccaaggcacgcacattacccccatcgacctgattgcctcgcttgaaaaacgcagcaacctgcccggacaccacgaaatcctgcttgccaacgtcttcgcccaagcagaagcctttatgcgcggcaaaacccccgacgaagtccgcgccgaactcaaagcgcagggtatggatgaggcgcgcatcgaagagctggtcccgcacaaaaccttctccggcaaccgcccgaccaacctcattctcatggacaaggtcaacccgcgcaatatgggcagcctgattgtcatgtacgaacacaaaaccttcgtacaaggcatcatttggggcatcaacagcttcgaccagtggggcgtggaactcggcaaacaactggctaaaaccattttgggcgaactgaccggcgaaaccgggccgcaaaagcacgacagttcgaccgaacgcctgatcaacctctacctgcagaccaaccgcaaataa

SEQ ID NO: 50820 - DNA, 966 bp, Neisseria meningitidis
atgagctacacgcaactgacccaaggcgaacgataccacatccaatacctgtcccgccactgcaccgttaccgaaatcgccaaacagctgaaccgccacaaaagcaccatcagccgcgaaatcagacggcaccgcacccaagggcagcaatacagcgccgaaaaagcccagcggcaaagccagactatcaaacagcgtaagcgacaaccctataagctcgattcgcagctgattcagcacatcgacacccttatccgccgcaaactcagtcccgaacaagtatgcgcctacctgtgcaaacaccaccagatcacgctccaccacagcaccatttaccgctaccttcgccaagacaaaagcaacggcagcacgttgtggcaacatctcagaatatgcagcaaaccctaccgcaaacgctacggcagcacatggaccagaggcaaagtacccaaccgtgtcggcatagaaaaccgacccgctatcgtcgaccagaaatcccgtatcggcgattgggaagccgacaccattgtcggcaaaggacagaaaagcgcattattgaccttggtcgaacgcgttacccgctacaccatcatctgcaaattggatagcctcaaagccgaagacactgcccgggcagctgttaggacattaaaggcacataaagacagggtgcacaccatcaccatggataacggcaaagagttctaccaacacaccaaaataaccaaagcattgaaagcggagacttatttttgtcgcccttaccattcttgggagaaagggctgaatgagaacaccaacggactcatccggcaatacttccccaaacaaaccgatttccgtaacatcagtgatcgggagatacgcagggttcaagatgagttgaaccaccgaccaagaaaaacacttggctacgaaacgccaagtgttttattcttgaatctgttccaaccactaatacactag

SEQ ID NO: 50821 - DNA, 627 bp, Neisseria meningitidis
atgacacaagaacatttcccatcattcttcaaccaagccccgaccatcaccgttagagacccgcttgccgcattcctcggcgcggcgcaagacggcatcctcacttaccgctacgccgatgccgtgcgcctgtgcggacattcctgcccgaccgtcgcgggcgcgtacctgatggttatcaaaggtctgaaagccctttacggcgaagagctgcccgaacgcggcggcatcgaagccgccatgcagggcgggcgagacgaaggcacgaccggtgttaccgcttccgtcgtccaactcctcaccggcgcagccccggaaaccggcttcggaggcatcggaatacagggacgcttcgcccgccgcaacctcttatcctttggtgcaggcgaaattaacggcacactgaccctgcgccgcaaagacaacggcaaaaccgtcgccgtcagcatcaacgccgcgctccaaccctttgcaccacaaatgcgcgaacttatgcccaaagccgtcggcggcagcgcaagcgcagaagaactcgaacgcttcggacaactctggcaggcacgcgttaaagcatttttgaccgaatcggcggacgacccgcagttcgtcatcgtccgcgaagtgtga

SEQ ID NO: 50822 - DNA, 1281 bp, Neisseria meningitidis
atggaaaactcattgaaagaagccgccctcaagttccacgaattacccgttccgggcaaaatttccgttaccccgaccaaatctctggcgaccgacaaagatttggcgttggcgtactctccgggcgtagccgctccttgtatggaaatccatgccgatccgcaaaatgcctacaaatacaccgccaaaggcaacttggtcgctgtcatttccaacggtacggccgttttgggcttgggcgacatcggcgcgctggcgggcaaacccgtgatggaaggcaaaggcgtattgttcaaaaaattcgccggtgtggacgtgttcgacatcgaaatcgatgaaaaagacccgcaaaaactcgtggacatcatcgccgctttagagccgaccttcggcggcatcaacctcgaagacatcaaagcacccgagtgtttctacatcgaacgcgaattacgcaaacgctgcaaaatccccgtattccacgacgaccagcacggcacggccatcattaccgccgccgccgtattgaacgctctgcgttttaccggccgtaaaatcgaagaagcgaccttggtttgctctggtgcgggtgcggccgcgattgcctgcttgaaccaattgctggatttgggcttgaaacgcgaaaacgtaaccgtttgcgactccaaaggcgtgatttaccaaacccgcgaagacaaagatcgcatggacgaatccaaaaaattctacgccgttgaagacaatggccagcgcgtacttgccgatgccgtcaaaggtaaagacatcttcttgggcctctccggcgcgaacctgctgacccccgaaatgttgaacacgatgaacgaaaaacccatcgtgttcgccatggccaacccgaatccggaaatcctgccgccgctggcaaaagaaacccgtccggacgtggttatcggtaccggccgttccgacttcccgaaccaagtcaacaatgtattgtgcttcccgttcatcttccgcggcgcgttggatgtcggcgcgaccaccatcaacgaagaaatgaaacgcgcctgcgtgtatgctttggcggatttggcgatggaagaagtaaccgaagaagtggttgccgcttacggtaagaaatttgaattcggcgcggaatacctgattccgactccgttcgattcccgcctgctgccgcgcgttgctacggctgccgccaaagcagcgatggaaagcggagtggcaacccgtccgattgcagatttggaagcttacgctgccaagctgagcgaatggaagctgtaa

SEQ ID NO: 50823 - DNA, 513 bp, Neisseria meningitidis; identical to SEQ ID NO: 44775

SEQ ID NO: 50824 - DNA, 1035 bp, Neisseria meningitidis
atgcaaaccctgaccattatccgccccgacgatatgcacctgcacctgcgcgacggcgacgcgctcaaagccgttgccccttataccgcccgccaaatggggcgcgccgtcattatgcccaacctcaaaccgcccgtcgtcagtgtagccgacgcgcttgcctacaaagcgcgcattatggcggcgttgcccgaaggtagcgcgtttgagccgttgatgacgctttatttgactgataacgccacgcccgaacttgtacgcgaagccaaagccgccggcatcgtcgccttcaaactctaccctgccggcgcgaccaccaattccgattccggcgtaaccgacctgttcaagctcatccccgtgttggaagaaatggcgaaacagggcattttgttcctcgttcacggcgaagtaaccgaccccgaaatcgacatcttcgaccgcgaagccgcctttatcgggcgcgtgatgaaacccgttttggcgcaagtgccgaatcttaaagtcgtgttcgaacacatcaccaccgccgaagccgcccgcctggttttggaagcaggcgacaacgtagccgccaccgttaccccgcaacacctcctgctcaaccgcaacgacctcttggtcggcggcgtgcgcccccatcatttctgcctgcccgtactcaaacgcgaaacccaccgtcaggcattggtcgccgccgttaccggcgagaaggcgcataaattcttcctcggcaccgactccgcgccgcacgccaaatccgccaaagaaaacgcctgcggctgcgccggtatgttcagtgcgatgaccgctatcgagctttacgccgaagtatttgaaaaagcaggcgcgttggacaaactcgaagccttcgcctcaaaaaacggcgcaaggttctacggcattcctgaaaataccgacacgatcaccctcgtcaaacaaagccaaaccgttcccgcaagtgttccctacggcgacggcgaacttgtcccgatgcgcgcgggcggcgaaatcggctggacggtgcagtattga

SEQ ID NO: 50825 - DNA, 1542 bp, Neisseria meningitidis
atgaccgaaatacaacaacgcgcccaactgcaccgccaaatctggaaaatcgcggacgaagtacgtggtgcggtggacggctgggactttaaacaatatgttctcggcacacttttctaccgctttatcagcgaaaacttcaccgactatatgcaggcaggcgacagcagtattgattacgccgctatgccggacagcatcatcacgcccgaaatcaaagacgatgccgtcaaagttaaaggctatttcatctaccccggccagcttttttgcaatgtcgccgccaaagcccatcaaaacgaagaactcaacaccaatctgaaagaaatctttaccgcgattgaaagctccgcctccggctatccgtccgaacaagacatcaaaggcctgtttgacgacttcgacaccaccagcagccggctcggcagcaccgttgccgacaagaacaaacgccttgccgccgtcctcaaaggcgtggcggaacttgatttcggcagttttgaagaccaccacatcgaccttttcggcgatgcctacgaatacctgatttccaactacgccgccaacgcaggcaaatccggcggcgaatttttcaccccgcaaagcgtatccaagctgattgcgcggctggcggtgcacgggcaggagaaagtcaacaaaatctacgacccagcttgcggctcgggcagcctgctcttgcaggcgaaaaaacagtttgacgagcacatcatcgaagaaggcttcttcgggcaggaaatcaaccacaccacctacaacctcgcccgcatgaacatgttcctgcacaacgtcaattacaaccaattccacatcgaattgggcgacacactgaccaacccaaagctcaaagacagcaaaccctttgatgccatcgtttccaatccgccttattccatcaactggataggcagcgacgaccccaccttaatcaacgacgaccgctttgcccccgcaggcgtacttgccccgaaatccaaagccgattttgccttcatcctgcacgcactgaactacctttccggcagaggccgcgccgccatcgtctcattccccggcattttctatcgcggcggcgcagagcaaaaaatccgccaatatctggtggagggcaactacgtggaaaccgtgattgcccttgcgcccaatctcttttacggcaccggcatcgccgtcaatatcctggttttgtccaaacacaaagacaataccgacatccaatttatcgacgcaagcggcttctttaaaaaagaaaccaacaacaacgtcttaaccgaagaacacattgccgacatcgtcaaactcttcgccgacaaagccgatgtgccgcatatcgcccaaaacgccgcccagcaaaccgtcaaagacaacggctacaacctcgccgtcagcagctatgttgaacccgaagacacacgcgaaattatcgacatcaaacagcttaacgccgaaatcggcgaaaccgtcgccaaaatcgaacggctgcggcgcgaaattgacgaagtgattgcagagattgaggcctag

SEQ ID NO: 50826 - DNA, 966 bp, Neisseria meningitidis
atgagctacacgcaactgacccaaggcgaacgataccacatccaatacctgtcccgccactgcaccgtcaccgaaatcgccaaacagctgaaccgccacaaaagcaccatcagccgcgaaatcagacggcaccgcacccaagggcagcaatacagcgccgaaaaagcccagcggcaaagccggactatcaaacagcgtaagcgacaaccctataagctcgattcgcagctgattcagcacatcgacacccttatccgccgcaaactcagtcccgaacaagtatgcgcctacctgcgcaaacaccaccggatcacgctccaccacagcaccatttaccgctacctccgccaagacaaaagcaacggcagcacgttgtggcaacatctcagaatatgcagcaaaccctaccgcaaacgctacggcagcacatggaccagaggcaaagtacccaaccgtgtcggcatagaaaaccgacccgctatcgtcgaccagaaatcccgtatcggcgattgggaagccgacaccattgtcggcaaaggacagaaaagcgcattattgaccttggtcgaacgcgttacccgctacaccatcatctgcaaattggatagcctcaaagccgaagacactgcccgggcagctgttaggacattaaaggcacataaagacagggtgcacaccatcaccatggataacggcaaagagttctaccaacacaccaaaataaccaaagcattgaaagcggagacttatttttgtcgcccttaccattcttgggagaaagggctgaatgagaacaccaacggactcatccggcaatacttccccaaacaaaccgatttccgtaacatcagtgatcgggagatacgcagggttcaagatgagttgaaccaccgaccaagaaaaacacttggctacgaaacgccaagtgttttattcttgaatctgttccaaccactaatacactag

SEQ ID NO: 50827 - DNA, 375 bp, Neisseria meningitidis; identical to SEQ ID NO: 41186

SEQ ID NO: 50828 - DNA, 2301 bp, Neisseria meningitidis; identical to SEQ ID NO: 43098

SEQ ID NO: 50829 - DNA, 867 bp, Neisseria meningitidis
atggcaggtgaaaccattaccgctgccgactacatcaagcaccacttgcagagcttgaccagtttgtcggatgttactcagggtcagggactgaaaaacattgctgatttttcgtttattaaccttgatgccgtcttttttgccgtcctgttgggcgtaatcggcagctttctgttgtggcgcggtgcaaaaaaagcgacggcaggcgttcccggacgtttccaggccgcagtggaaatcttgtttgagtttgtggacgatatgtgtaagagcatcattcacaacgaaaagtctagaaaagccgtcgcgccgttgggtctgacgctgtttgtctggatttttctgatgaacgcgatggatatgctgccggtcgatttgctgccgatggtatggcagggcattaccggcaaccatcacgccctgctgcgcgtcgtaccgactgccgatttgaacaccactttggcactcgctgtcggcgtgttgctgatttgtatctattacaacatcaaaatcaaaggattgggtggctggtttcacgagttgttcagcgcgccgttcggtgcaaaactcgcacctgcgaacttcctgttgaatttggtcgagtttctttctaaaaccgtatcccacggtatgcggttgttcggcaatatgtatgcgggcgaattggtattcttgctgatagccttgcttggcggtgcttgggcggcttccggcagcgtcgaagtcatggatccgattctgtttgtattccacattattgccggtttggcatgggcgattttccatattttggtgattaccctgcaggcgtttattttcatggcgttggcgttcgtctatatcggacaggcacatgatgcgcactga

SEQ ID NO: 50830 - DNA, 1071 bp, Neisseria meningitidis
atgtatcggaggaaagggcggggcatcaagccgtggatgggtgccggtgcggcgtttgccgccttggtctggctggttttcgcgctcggcgatactttgactccgtttgcggttgcggcggtgctggcgtatgtattggaccctttggtcgaatggttgcagaaaaagggtttgaaccgtgcatccgcttcgatgtctgtgatggtgttttccttgattttgttgttggcattattgttgattatcgtccctatgctggtcgggcagttcaacaatttggcatcgcgcctgccccaattaatcggttttatgcagaacacgctgctgccgtggttgaaaaatacaatcggcggatatgtggaaatcgatcaggcatctattattgcgtggcttcaggcgcatacgggagagttgagcaacgcgcttaaggcgtggtttcccgttttgatgaggcagggcggcaatattgtcagcagtatcggcaacctgctgctgcttcccttgctgctttactatttcctgctggattggcagcggtggtcgtgcggcattgctaaactggttccgaggcgttttgccggtgcttatacgcgcattacaggcaatttgaacgaggtattgggcgaatttttgcgcgggcagcttctggtgatgctgattatgggtttggtttacggcttggggttggtgctggtcgggctggattcggggtttgcaatcggtatggttgccggtattttggtttttgttccctatttgggcgcgtttacaggactgctgctggcaaccgtcgccgccttgctccagttcggttcgtggaacggcatcctatcggtttgggcggtttttgccgtaggacagtttctcgaaagttttttcattacgccgaaaatcgtgggagaccgtatcgggctgtcgccgttttgggttatcttttccctgatggcgttcggacagctgatgggtttcgtcggaatgttggcaggattgcctttggccgccgtaaccttggtcttgcttcgcgagggcgtgcagaaatattttgccggcagtttttaccggggcaggtag

SEQ ID NO: 50831 - DNA, 1083 bp, Neisseria meningitidis
atgtttttatggctcgcacatttcagcaactggttaaccggtctgaatatttttcaatacaccacattccgcgccgtcatggcggcgttgaccgccttagcgttttccctgatgttcggcccgtggacgatacgcaggctgaccgcgctcaaatgcgggcaggcagtgcgtaccgacggcccgcaaacccacctcgtcaaaaacggcacgccgacgatgggcggttcgctgattctgaccgccattaccgtgtccaccctgttgtggggcaactgggcgaacccgtatatctggattctcttgggcgtactgcttgccaccggtgcgctcggtttttacgacgactggcgcaaagtcgtctataaagaccccaacggcgtgtccgccaaattcaaaatggtgtggcagtcaagcgttgccattatcgccggtttggcattgttttaccttgccgccaattccgccaacaatattttgattgtcccgttcttcaaacaaatcgccctgccgctgggcgtggtcggctttttggtgttgtcttacctgaccatcgtcggcacatccaatgccgtcaacctcaccgacggcttggacggccttgcgaccttccccgtcgtcctcgttgccgccggcctcgccatcttcgcctatgccagcggccactcacaatttgcccaatacctgcaattaccttacgttgccggcgcaaacgaagtggtgattttctgtaccgccatgtgcggcgcgtgcctcggtttcttgtggtttaacgcctatcccgcgcaagtctttatgggcgatgtcggtgcattggcattgggtgccgcgctcggtaccgtcgccgtcatcgtccgccaagagtttgtcctcgtcattatgggcggattatttgtcgtagaagccgtatccgttatgcttcaagtcggctggtacaagaaaaccaaaaaacgcatcttcctgatggcgcccatccaccaccattacgaacaaaaaggctggaaagaaacccaagtcgtcgtccgcttttggattatcactatcgtcttggtgttgatcggtttgagtaccctcaaaatccgctga

SEQ ID NO: 50832 - DNA, 354 bp, Neisseria meningitidis
gtgaacagacaaaccgcttacctccttacctctttcagcctgatcgcactgataatcctgtccctttcctgggaactgtggattgcaccgttacgcccgggcggctcgtggctcgcgctcaaagccctccccctctgtctgccgctttcaggcatcttgaaaaagaaaatctatacctaccaatacagctccatgctggttctgatttattttgccgaagccgtcatgcgcctgttcgacgcctatccggcagaacaaatttgcgccgcgctttccgcagtattcagcatcatcttcttcatatcctgcctgtcgttcgtcaaacaatacaaggaaacaaacaatgcccgctga

SEQ ID NO: 50833 - DNA, 702 bp, Neisseria meningitidis; identical to SEQ ID NO: 42609

SEQ ID NO: 50834 - DNA, 711 bp, Neisseria meningitidis; identical to SEQ ID NO: 44788

SEQ ID NO: 50835 - DNA, 780 bp, Neisseria meningitidis; identical to SEQ ID NO: 36766

SEQ ID NO: 50836 - DNA, 552 bp, Neisseria meningitidis
atggaattcctatctctttacccttggtggtctttttttattatattaactattatccttagctatattggattctgtgcacatctccacattcaaaatagggcagttttcttttatagctatcgggatgtaactattattttcttgacacctgtcatcctcatcgctctaagttatttaattaaaaataaagaaatcctgtcagtttgtatcttatgtataactcttattgcattttcatgggcatggattataacctatcgatctaatactaaaaggttttttctttccttattgatagtatgtggaaaattgttattaagtactattgtttgggcaattctcgccatatcacttggcttagctgtaataacagggaacagcaagcgtaaaaaatatgaacgacgtgaccgtcatgctgaacgtaatgaaaaagcttttataggtgcgctattagtaggtttcgaattatcaagaaatttattgaatttatgttgcctacacaaggatttttccaccccatctaaaaacattgaagtcaatcgctcttaa

SEQ ID NO: 50837 - DNA, 324 bp, Neisseria meningitidis; identical to SEQ ID NO: 37053

SEQ ID NO: 50838 - DNA, 663 bp, Neisseria meningitidis
atgaatttgaaattagtgtttgaatcgggcgatcccgtcctgattggtgtgtttgtgttgatgctgttgatgagtatcgtaacgtggtgtttggttgtcttgcgctgcatcaagctgtatcgggcgcgcaaagggaatgccgccgtcaaacggcatatgcgcgatactttgtcgctgaacgacgcggtcgaaaaagtgcgcgccgtcgatgcgcctttgtccaaactggcgcaagaggcattgcagtcttaccgcaactaccgccgaaacgaagcgtccgaactggcgcaggctttgccgttgaacgagtatttggtcattcaaatccgcaacagtatggcgcagattatgcgccggtttgattacgggatgaccgcgcttgcctccatcggcgcgaccgcgccgtttatcgggctgttcggcacggtttgggggatttaccacgccctgatcaatatcgggcaaagcgggcagatgagtattgcggcggttgccggcccgattggcgaggcactggtggcgacggcggcgggtttgttcgtggcgattccggcggtgttggcatacaacttcctcaatcgcggcacaaaaatactgacccaggatttggatgcgatggcgcacgatttgcacgtccgcctgcttaatcaaaaggatagctga

SEQ ID NO: 50839 - DNA, 435 bp, Neisseria meningitidis
atgcgccgggcgttgattgcgaaaattaagattgctcaaaaggagctgggcttggatgacggtacctatcgcgcggtgttggagcgtgtgacgggcaagcggtcgtgtgcggatatggatgtttccgaacttgagtctgttgtcgctgatatgcggtcgcacggatttaagcctaaagcaaaaggtaacccacacggtaaaccacatctgcgtcggacatcatcagcggcaatgttggacaaagtcgaagccctgctgaccgtcggcggcaaacattggaactatgcacacgcaatggcgcggcggatgtttggtaaggataaggtcgaatatttagacgatacgcagctacataaactggttgctgcgttgcagattgcggaaaacaggaaaacggaaaaagcgagtggggatgatggggttcgaaaaagttga

SEQ ID NO: 50840 - DNA, 264 bp, Neisseria meningitidis; identical to SEQ ID NO: 40271

SEQ ID NO: 50841 - DNA, 1578 bp, Neisseria meningitidis
atgcgcgccaaccccaaaacacaggcaatgccgtctgaaaccatatccctgatgaaaacacgcagcctaatttcccttttatgcctccttctctgttcatgttcttcatggttgcccccactggaagaacggacggaaagccgtcatttcaatacttccaaacccgtccgcctggacaacatcctgcaaatccggcacacccctcataccaacgggctatccgatatctatctgttgaacgacccccacgaagcctttgccgcacgcgccgcccttatcgaatctgccgaacacagcctcgatttgcaatactacatctggcgcaacgacatttccggccgactgctgttcaacctgatgtaccttgccgcagaacgcggcgtgcgcgtacgcctgctgttggacgacaacaacacgcgcggattggacgacctcctgctcgccctcgacagccatcccaatatcgaagtgcgcctgttcaaccccttcgtcttacgaaaatggcgcgcactcggctacctgaccgacttcccccgcctcaaccgccgcatgcacaacaaatcctttaccgccgacaaccgcgccaccatactcggcggacgcaatatcggcgacgaatacttcaaagtcggtgaggacaccgttttcgccgacctggacatcctcgccaccggcagcgtcgtcggcgaagtatcgcacgacttcgaccgctactgggcaagccattccgcccacaacgccacgcgcatcatccgcagcggcaacatcggcaagggtcttcaagcactcggatacaacgacgaaacgtccagacacgcgctcctgcgctaccgcgaaaccgtcgaacagtcgcccctctaccaaaaaatacaggcaggacgcatcgactggcagagcgtccaaacccgcctgatcagcgacgaccctgcaaaaggactcgaccgcgaccgccgcaaaccgccgattgccgggcggctgcaagacgcgctcaaacagcccgaaaaaagcgtctatctggtttcaccctatttcgtccccacaaaatccggcacagacgcactagcaaaactggtgcaggacggcatagacgttaccgttctgaccaactcgctacaggcgaccgacgttgccgccgtccattccggctatgtcaaataccgaaaaccgctgctcaaagccggcatcaaactctacgagctgcaacccaaccatgccgtccctgccacaaaagacaaaggcctgaccggcagctccgtaaccagcctgcacgccaaaaccttcattgtggacggcaaacgcatcttcatcggttcgttcaacctcgacccccgttccgcgcgtctcaacaccgaaatgggcgttgttatcgaaagccccaaaatcgcagaacagatggagcgcacccttgccgataccacccccgaatacgcctaccgcgttaccctcgacaggcacaaccgcctgcaatggcacgatcccgccacccgaaaaacctacccgaacgaacccgaagccaaactttggaaacgcatcgccgcaaaaatcctatccctgctgcccatagaaagtttattatag

SEQ ID NO: 50842 - DNA, 645 bp, Neisseria meningitidis
  misc_feature 626, 627, 628, 629, 630: 'n' is a, c, g or t
atgaacactcgcaccgaacacgacaccatgggcaatgtcgaagtcccgtccgaagcctattggggcgcgcagacccagcgcagccgcaacaatttcaaaatcggcggcgaaaccctgccgcagccgctgatttatgctttggcgttggtgaaaaaagccgctgccgcgaccaatgtttccctcggcaggattaagccggaacaggcggatttgattacgcaggcggcggatgatgtgttgaacggcaggcttgacggacagtttcctttagtggtttggcagaccggctccggcacgcagtccaatatgaacatgaacgaagtgctggcaaaccgcgccaacgaaatcgccggtacgggtttggcggcttatcagcccgtccatcccaacgaccatgtgaaccacgcgcaatcgaccaacgacgcattcccgaccgctatccacgttgccgccgcgattgaaatcaaccgccacctcatccccgccgtaaaagccctgcgcgataccttggacaaaaaagcccaagctttcgcccccattgttaaaatcggccgcacccacttgcaagacgcgacgccgctgactttgggacaggaattttccggctacgtttcccagcttgatcnnnnncacacacttaattaa

SEQ ID NO: 50843 - DNA, 729 bp, Neisseria meningitidis
atgtgggataatgccgaagcgatggaacggctgacgcgctggctgcttgtcatgatggcgatgctgcttgctgcgtccgggctggtttggttttacaattcgaatcatctgcccgtcaagcaggtgtcgctgaagggcaacctggtttattccgataagaagacattgggcagtttggcgaaagaatacatccatgggaatattttgaggacggacatcaatggcgcacaggaggcctaccgccggtatccgtggattgcgtcggtcatggttcgccgccgttttcccgacacggttgaggtcgtcctgaccgagcgcaagccggtcgcgcgttggggcgaccatgccttggtggacggcgaaggcaatgtttttgaagcccgcttggacagacccggaatgccggtattcagaggcgcggaaggaacgtctgccgaaatgctccgccgttatgacgaattttcgactgttttggcaaaacagggtttgggcatcaaagagatgacctatacggcacgttcggcgtggattgtcgttttggacaacggcatcaccgtcaggctcggacgggaaaacgagatgaaacgcctccggctttttaccgaagcgtggcagcatctgttgcgtaaaaataaaaatcggttatcctatgtggatatgaggtataaggacggattttcagtccgctatgcttacgacggtttacccgaaaaagaatccgaagaatag

SEQ ID NO: 50844 - DNA, 315 bp, Neisseria meningitidis; identical to SEQ ID NO: 38226

SEQ ID NO: 50845 - DNA, 1146 bp, Neisseria meningitidis
atggaatataaagaatttaatgaaaattatttatataaaaagccatttatttttaaaaatgctttagatgttagttctatctcatggaaagaaattaatgagttgtatcaacgtgcagaccctactgattggcaatttaaatttcgcaaaggggaaataatccccaaagaagcctatgttgaatcattcaatgatgtgggtagaatacgtcatcggtttaataaaacagccgtatatcagtatctgcaagatggtgcaacaatggtttataaccgtattgataatgagccatttgttgacagtattgctaaacaaattgcccagtttgctcaagcacaaactgttgttagtggttatttggcgtttggtagttctccatcatatcgtaatcattgggatactcgtgatgtgtttgcggttcaattgattggcaaaaaacactggacagtttctgctccaaattttgatatgccattgtatatgcagcaagcaaaagatatgccgcacattactccgcctacaacagtagatatggaagtcattttagaagcaggagatattttatatatcccgcgtggttggtggcataatcctatgcctatgaattgtgaaacattccatttagctattggaacttttccgccaaatggttataattatatggaatggttgatgaaaaaaatacctgatatccagagtattcgtcaaaatttcatagactgggaacacgaccaaaaaaatatagataatgcggctcaggcagttactgaaatgatgaagaaccaagaaaattatcaagcattcatacaagattttttgggaaatcaacgcgtaaatactgcatttaatatgcaaatttttggaaatctggataatgacagattacctgaaaatagtacaattaaactcaattcgttggataaccgtacaattaaacaaggatatatcatagcgaatggcatcaaaaccaacttggacaatgatagccaaacgattttgcaatggattgctgacaaacatagtgttaagttaactcaactgtatgaattttgccaaaatcaaaacattaatttggaaaaagtggaaaaattagtgtttgatttgacaatgatcgatgtattggaatgtttaactgatgaaagataa

SEQ ID NO: 50846 - DNA, 483 bp, Neisseria meningitidis; identical to SEQ ID NO: 36693

SEQ ID NO: 50847 - DNA, 384 bp, Neisseria meningitidis
atggaaaaaataaaaaattatatagaattcaagaaattatttaaaaatataacggaaaaatttgtcagggatttagatataacattaattgaagcagctgaatattctataattgaattcgaaatttatttatctgaatatccggaagatagtacatttatttttacagcatgggcaatctatctgttagaaaataactgtctcaatgaaagaggaaaagataattttttcatcgcggaaatgaaaaaatgttatcaacaaactaatttggatagaataaaatctatctattcttcgagtgactatcatatttttgctaaggatgtaaacaagattcaacaaacatttaaattaaatcttgccaatatcatgcagcaagagtag

SEQ ID NO: 50848 - DNA, 921 bp, Neisseria meningitidis; identical to SEQ ID NO: 46298

SEQ ID NO: 50849 - DNA, 192 bp, Neisseria meningitidis; identical to SEQ ID NO: 37158

SEQ ID NO: 50850 - DNA, 396 bp, Neisseria meningitidis
atggataaaaacctgcttgaagccgtcaaatttgacgaaaaaggtttggtttgcgccatcgcccaagatgccgaaaccaaacgtgttttaatggtggcgtggatgaacgccgaagccctgcaaaaaaccgtcgaaaccggctttgcccactattacagccgttcgcgccaaaaacaatggatgaagggcgaagagtcgggacacacgcaaaaagtccgcgaactgcgcctcgactgcgacggcgacgccattgtgatgctcatcgcccaaaacggcggcatcgcctgccacaccgggcgcgaaagctgcttttacaaagtctggcgcggcggcgcgtgggaaaccgccgatgccgtcctgaaagacgaaaaagagatttacggcagcacgcactga

SEQ ID NO: 50851 - DNA, 918 bp, Neisseria meningitidis
atgaacgtatctgttctcaattttggtaacacccctgtatctttccgtcaagacggttttttaaatgcaaccgccattgcatctcactttggcaagttacctaaagactacctaaaaagtgaacaaactcaacaatatatctctgcacttgctgagaatttaagcgttaggagaaaaatcctaacggaagcaaatcaaatagttatcgtgaagcgtggtggcagtgagcaaggcacatggctgcatcccaaactcgctattcactttgcccgttggcttaatccgaaatttgcggtttggtgcgatgagcagattgaaattttacttaacggcaaaatttcagacggcataaaaacagttacccccaaacccacccgcgcccttccggacggcttgaccggcgaacaaatcgaagccgtcaaaaaactgcacaacgccctgaccaaatccgcacccaaagaagcgcaggcgcgtatcgccattaccctttggtctgccgtcaaaagcaagttcggatgcagctacaaagaagtacctgccgaacagttccccgaagttttaagcgtgatgggccgcgtggcagttgaaaacggcgtgctgtacggcgaagtcctcgaccgcgaaccattgcccgcaccgcaacctgccctgcccatcagcggcaacgccctgtacgacctcgccgttgccgtcagatacggcgcgtgggccatccaaatgggcagagacgtttccctgccgctgaagcagctcggctgcaaacaggcggtaacgatgtggacggtctgggcggaaacacgcagccgcctcaaagccgccgcaaacgccctcgaagccttaaacgcacacgccgacgcggaacacgcggcaaaaatccgcccgatgctgcccgaaatccgcaacctgtcgtcggtttga

SEQ ID NO: 50852 - DNA, 2439 bp, Neisseria meningitidis
atgatagaaaaatcccataaaaaaacagcaaaaggcagggcgggaagcccgtccccaacgtccgcacgcaacaagaaagccgacaacggcgcacggggcaataaagtttccgagcggctcaaagcggtcaaagagttgcagaaaaccgaaaccaaaaaggcgcgtcccgaacatgtcgtcaaccttatcggcgacgcactgtggctgatgggtttggcggcaaccttgtatttggcgatttccctgattagtttcgatatgggcgatccgtcttggtcgcacagttcgccggttgtggaagatgtcgccaattggggcggactgttcggcgcgtatgttgccgatgtcggctattatcttttcggctggtcgttctggtggtggatagcggctgcctgcgtcatgctgtataaaaattttcgtctgcacgcaaaacagacggaaaacgaagcatacaaccacaaaatcgctgccgccgcgctgtttgtcctgacggtcttcagccccgtcttggagtattttgtgctgggcggaaaatatgccgactccctgcctgtcggagcaggcggtatggtcggcatacgcgtcggcgcagtgtttgcgtggctgctggggaaatcgggcagcctgctgattatcttggttgttctgctgttgtcgttgtccctgctggtgcagatttcatggctggaatttttgaacggtgcgggcagggcggttcaaaaccgcctgagtgccttatccggcaaggtcatggctttgggaaaacgccggccgaataccaaaacagacggtgtcgatacccaaaatacacggcgcatggtaaaagaagccaagaatattacggccaaacccgttgccttgcccgaaggcagcagcagcaaccgcaaatccgtcgcggtttccgtcgcgccgccgcccaaaattcaggtttctctgtttgaagatgacgaacctcggcaggcgggcgaataccacaagcctacattgaacctattgcggattcctgacagcgaacccgtcagcatcaatcccgccgaattggagcgcactgccgaactgatcgaatccaaactggcagaattcggcatcggcgtacaagtcgtatccgccacatccggccccgtcatcacgcgctacgaaatcgaacccgcgcaaggtgttaaaggcagccaaattgttgccttgtcgaaagatttggcacgctctatgtcgctgcagtccgtgcgtatcgtcgaaaccatcgcaggtaaaaacacgatgggcatcgagttgcccaacgacaaacgccaagacgtgatgttgagcgaaatcttgtcctcgcccgtgtttgccggagccaaatccaagctgaccgtcgcgctgggcaaagacattgccggtacccccgttgtcggcgacttggcgaaaatgccgcaccttttggtcgccggtatgactggttcgggcaagtccgtcggcgtgaacggcatgattatgtctatgcttttcaaagctacgcccgacgaagtccgcttcattatgatagacccgaaaatgctcgagttgagcatttacgacggtattccgcacctgctctgtcccgtcgtgaccgatatgcgcgaagcagggcaggcgttgaactggtgcgtcgccgaaatggaaaaacgctaccgcctgctttcccatgccggtgtgcgtaatttggagggcttcaaccaaaaagtcgaagccgcaaaagcggcaggcaagccgctgctcaatccgttcagcctgaaccccgacgagcccgagccgctggaaaaactgccgttgattgtggtcgttatcgacgaacttgccgacctgatgatgaccgaacgcaaagccgtcgagcagcaaatcgcccgtctcgcccaaaaagcgcgcgccgccggtatccatatgattgtcgccacccaacgtcccagtgtcgatgtcgttaccggcctgattaaagccaacatcccgacgcgtatggcgtttaccgtgcaaagcaaaatcgacagccgtaccatcctcgaccaaatgggcgcggacgaactgctcaaatatggcgattcgctgttccttcagcccggcagtgccgaaccgactcgcctgcaaggcgcgtttgtttcagacgacgaagtacatcaagtcgtcaactacgtcaaatcgcaagccccagccgactatattgaaggtctgctcagcggcgaggccgcgctggaaactgccaatatcgttaatccgaatgcagacagcgacgaattgttcgatcaggcagtcgcctatgttttggaaagcaaaaaaacctccatttcgtctttgcagcggcagctgcgcatcggctataaccgcgcggcaaacctgatggaggcactggaaaatgcgggtgtcgtttcttccaccgacctcaacggcagccgtaaaattttggcgcacaaggaccatttgtag

SEQ ID NO: 50853 - DNA, 414 bp, Neisseria meningitidis
atgataccctcctacacctacgccgccctcgccttttccgccttcacttccgccaccctcctgcccggcacatccgaagccgcctttgccctgttcgtccaccgctttcccgaacacgcatacggcgcgttgctgtgcgccggccttgccaacggattgggcagtatggtttcctattggatggggcgtttgctgccctcccgaaaaatgccgtctgaaaaaacactgaatctgatgcggcgtttcggtatttggctgcttgcgtttgcctggctgcccgtcgtcggcgacgcactgccgcttgccgccggctggctgcggttgaatccgtggacaagcgggctgatgctggttatcggcaaaacggcgcgttacgccttcattctgtggggaatgcaatattacgccgcctaa

SEQ ID NO: 50854 - DNA, 396 bp, Neisseria meningitidis
atgccgtctgatgtcggaatgcggcttcagacagcattcaaacggaagttgaacatgaaaaaaatattgtattttctgatgtttgttttttctacaagcgtatgggccggggatgcggaagacaatctgctcagcatccaatccggctatcgtgccttactgcaaaaacaaaacaatctggacggaaaaatcatcgggatgcagtcggatttggaagatgcgctccggcgtttgcagacggctcaagcagacatcgcccgtttggaagcggaaattcctgcagcaatggcgcaaaaagcccggcaggctgaagagctgaggcaaatcggagtgcgtttggaccatgcttggaatgcggtttacggcgcagggggaacgaaagcgtcggggaattga

SEQ ID NO: 50855 - DNA, 489 bp, Neisseria meningitidis
gtgcgtctgcgtgccgttttgaataatgggaatatcgggagtaggactatggatgtgaaatatgaatttaccctgccttcgagcagcggtgcggattttcattcggcagaacatctgcctttggtcgtgtatttttatccgaaagacagtacgcctggctgtacgacggaaggcttggatttcaatgcgcgtttggaacagtttgaggcattgggttataccgtggtcggtatttcccgcgacggcgtaaaggcgcatcagaatttttgcgccaagcagggtttccggttcgagctgttgagcgacaaggatgaaacagtgtgccgcctgtttgatgtcatcaaattgaagaaactgtacgggaaagagtcgttaggtatcgagcgcagtacgttcgtcttgaataaggatggagaaatcgcccatgaatggcggaaagtcaaagtggcgggtcacgcgcaggaagtattggaaacgctttcccgataa

SEQ ID NO: 50856 - DNA, 1764 bp, Neisseria meningitidis
atgggttttcctgttcgcaagtttgatgccgtgattgtcggcggtggtggtgcaggtttacgcgcagccctccaattatccaaatccggtctgaattgtgccgttttgtctaaagtgttcccgacccgttcgcataccgtagcggcgcagggcggtatttccgcctctctgggtaatgtgcaggaagaccgttgggactggcacatgtacgataccgtgaaaggttccgactggttgggcgaccaagatgcgattgagtttatgtgccgcgccgcgcctgaagccgtaattgagttggaacacatgggtatgccttttgaccgtgtggaaagcggtaaaatttatcagcgtcctttcggcggccatactgccgaacacggtaaacgcgcggtagaacgcgcctgtgcggttgccgaccgtacaggtcatgcgatgctgcatactttgtaccaacaaaacgtccgtgccaatacgcaattctttgtggaatggacggcacaagatttgattcgtgatgaaaacggcgatgtcgtcggcgtaaccgccatggaaatggaaaccggcgaagtttatattttccacgctaaagctgtgatgtttgctaccggcggtggcggtcgtatttatgcttcttctaccaatgcctatatgaataccggcgatggtttgggcatttgcgcgcgtgcgggtattccgttggaagatatggaattctggcaattccacccgaccggcgtggcaggtgcgggcgtgttgattaccgaaggcgtacgcggcgagggcggtattctgttgaatgccgacggcgaacgctttatggaacgctatgcgccgaccgtaaaagacttggcttctcgcgacgttgtttcccgcgcgatggcgatggaaatctacgaaggtcgcggctgcggtaaaaacaaagaccatgtcttactgaaaatcgaccatatcggcgcagaaaaaattatggaaaaactgccgggcatccgtgagatttccattcagttcgctggtatcgatccgattaaagacccgattcccgttgtgccgactacccactatatgatgggcggtattccgaccaactaccatggcgaagttgtcgttcctcaaggcgacgaatacgaagtgcctgtaaaaggtctgtatgcggcaggtgagtgcgcctgtgcttccgtacacggtgcgaaccgcttgggtacgaactccctgctggacttagtggtattcggtaaagctgccggcgacagcatgattaaattcatcaaagagcaaagcgactggaaacctttgcctgcggatgcgggcgagctgacccgccaacgtatcgagcgtttggacaatcaaactgatggtgaaaacgttgatgcattgcgccgcgaactgcaacgctccgtacaattgcacgccggcgtgttccgtactgatgagattctgagcaaaggcgttcgagaagtcatggcgattgccgagcgtgtgaaacgtaccgaaatcaaagacaagagcaaagtgtggaataccgcgcgtatcgaggctttggaattggataacctaattgaagtggcgaaagcgactttggtgtctgccgaagcacgtaaagaatcacgcggtgcgcacgcttcagacgaccatcctgagcgcgatgatgaaaactggatgaaacatacgctgtaccattcagatgccaataccttgtcctacaaaccggtgcacaccaagcctttgagcgtggaatacatcaaaccggccaagcgcgtttattga

SEQ ID NO: 50857 - DNA, 693 bp, Neisseria meningitidis
gtgcaggcggatttagcctatgccgccgaacgcattacccacgattatccgcaagcaaccggtgcaaacaacacaagcacagtaagcgattatttcagaaacatccgtgcgcattccatccacccccgggtgtcggtcggctatgatttcggcggctggaggatagcggcagattatgccagttacagaaaatggaacaacaataaatattccgtcaacacaaaagaggtggaaagaaacaataccagtggcaactggaaagaactgaagacggaaaatcaggaaaacggcagcttccacgccgcttcttctctcggcttatccgccatttacgatttcaaactcaacgataaattcgataaattcaaaccctatatcggtgtgcgcgtcgcctacggacacgttaaacatcaggttcattcagtgaaaaaagaaaccacgactactttccttgcaccaacgggagacgctaaagtgccaggcaagatcgtagaaggtccgttcagcaaacctgcctatcacgaaagccacagcaccagcagcttgggtcttggtgtcatcgccggtgtcggtttcgacatcacgcccaagctgaccttggacaccggataccgctaccacaactggggacgcttggaaaacacccgcttcaaaacccacgaagtctcattgggcatgcgctaccacttctga

SEQ ID NO: 50858 - DNA, 981 bp, Neisseria meningitidis
gtgcagccggggctttgggcttcagacggcatattttcggaatggcggcattcttgccgtcggcgcggcagccgtatggggaagggaggggatattgtggtcggtaacggcaaaaaatatgccgcaccattgctggtgctgggttgcgtggtgttcggtctgggcagtctgattgtcagatccgtccccgtcggttcgtatgcaatcgcattttggcggttgctgatttcggtgttcgtattttggtttttagcacggtttttcaggcaaaaattcccaaaaaacaggaaaaccgtccgatatgccctgacggcgggcgtgtttctctctttcgatttggcgttgtggcacgaaagcatacacgcggtcgggccgggtatttccaccctgctcaacagcctgcaaatcttttttttgtcggcaatcggtgttttctttttcggcgagcgtttgagcgggctgaaaaaggcaggcttaatatcggcagttgccggcgtggcaatgattgccggtgcggaattcggctacaacggtaatgcggtttggggattcgtcagcggtttggtatcgggactgatgctcgccctgtcgatggtgttcgtccgcaaaacccatgaaatcgagacggtggcgcttttcccttcaatgatgattttgagtttgggcggcgcggtatcgctggttgttccggcattgctgatggatggcggcgcgctttatccgacgacttggaaagatgcgggtttggtgcttgtgtacggcgtggtgatgcagtgcttcgcgtgggcgatggttgcctatgcgattccgctgctttcgctgtcgctgacggggctgctgcttttgtccgaaccggttgccgccctgttcatcgattatttcgggttgggcaaaccgattgaaggcgtgcagtgggcaggggtggcgctgacgctttcggcaatttacctcggttcgctgaaacagcagtccgagccttga

SEQ ID NO: 50859 - DNA, 702 bp, Neisseria meningitidis
atgttcagacggcatcggcatttgaaaaatatgcagattaaaaaaatcatgaaatggcttcccgtcgccttgtcgcttttgggtgcgttgggttatacggggtacggcagcgaggcggtgcggacggcggttgccgtactcgacgtactcggcgcggcaggggacgcgggttccgacgcgcccgcccgccgccgagcatcggcgaaatccggccaccgctacacaggcacggtgtccaaagtctatgacggcgacacccttcacgttatcgacggcgacggcgcgaaacacaaaatccggatggcgtatatcgacgcgccggagatgaaacaggcttacggcacgcgttcgcgcgacaacctgcgtgcggcggcggaaggcaggaaagtcagcgtgcgcgtgttcgacaccgaccgctaccagcgcgaagtggcgcaggtttctgtcggcaaaaccgatttgaacctgatgcaagtgcaggacggggcggcgtggcattataaaagttatgctaaagaacagcaggataaggcggattttgccgactatgccgacgctcaaattcaggcggaaagggaacgcaaaggattgtggaaagctaaaaatccgcaagcgccgtgggcgtaccgccgagcaggcaggagcggcgggggcaataaggattggatggatgccgtgggcgaatggttgggcatttggtaa

SEQ ID NO: 50860 - DNA, 204 bp, Neisseria meningitidis; identical to SEQ ID NO: 42415

SEQ ID NO: 50861 - DNA, 1731 bp, Neisseria meningitidis
atgtgcaatgcacctgccgacaattttaaggaaactgccatgagcgcatcacaattactgtcaagactgacccaaaccgtaggcgaaaaatacatcatcaccgaccccgcgaaaaccgaacaataccgccagggctaccgcttcggcgagggtaaggcgttggcggtggtgcgccccggaagcattctggaaatgtggaaaattctacaggcgtgcgtcgaagcggacgtgattgtgattacgcaggcggcgaataccggtttgacgggcggctcgacccccgacggcaacgattacgaccgcgacatcgtgatagtgaacactatgcggatgaacatcatccaaaccatcaacgacaacgaacaagtcgtctgcctgcccggttcgaccctgaaccagcttgaattgctgctgaaacctttggggcgcgaaccgcattcggtcatcggctcttcctgcatcggcgcgtccgtcttgggcggcgtgtgcaacaactctggcggcgcgttggtacagcgcggcccggcctacaccgaaatggcgttgttcgcccaaatcaacgaagaaggcaggttggaactggtcaaccacttgggcatagacttgggcgatacgccggaagaaatcctgaccaacctgcaaggtcatcattatcaaaacaaagacatcaaacaagacgcgggcaaaggacacgaccacgcctattgcgaacacgtccgccaagtggacgaaccgaccgccgcgcgtttcaacgccgaccccgcgcgccattacgaagcctcgggctgcgcgggcaaactgatggtgttcgccgtccgtttggacaccttcccgcaagaaaaacaaaccgccgtgttctacatcggcaccaacgacatcaacgagctgaccgacatccgccgcgccgccttgggcgaatttgaaagcctgcccgtttccggcgaatacatccaccgccacgctttcgatattgccgacgtgtacggcaaagacacgttttacgtcatcaaaaaattcggtacgcaccaactgccgaaattatttgatttgaaggcacgcgtggacaggttcggcaaaaaagccagcttcctgcccaagcatttttccgacaaggtcatgcagttcgtcagcaaattcctgcccgaccacctgcccaaatccatgcgcgattaccgcaataaatacgaacaccacctgattctgaaaatgggcgggaaaggcgtggatgaggcgcgcgcattcttaaaagaatatttttcacaccacggcggcgcgtttttcgaatgcaacgccgaagaaacccaagccgcgatgctgcaccgtttcgccgtcgcctccgccgccatccgctaccgcgccgtgcatgatgacgaagtggaagacttggtcgcgctcgacatcgccctgcgccgcgacgatcgcgactggtttgaaaaactgccgtcggaaatcgacaataaaatcatccataaactctactatggacatttcatgtgccacgttttccatcaggattacatcatcaaaaaaggcaacgactgcatggcgttggaacacgaaatgctgcatcttttagaccaacgcggcgcgcaatatcccgccgaacacaacgtcggtcatttgtatgaagccaaacccgcgctcaaacagttttaccgcaaacttgacccgaccaacagcttcaacccgggcgtaggcaaaaccagcaaaaagaaaaactgggcggaataa

SEQ ID NO: 50862 - DNA, 360 bp, Neisseria meningitidis; identical to SEQ ID NO: 40630

SEQ ID NO: 50863 - DNA, 1002 bp, Neisseria meningitidis
atgattgacagacaaacaaacgaacccaaacaaaaaacccgaatcatccttgcccctatgcagggtctggtcgatgacgtgatgcgcgacctgctgacgcgtattggcggctacgacgaatgcgtcagcgaatttgtacgcattacccataccgtgcattcccgatccatatggttaaaatatgtccccgaaatcgccaacggaaacaaaacgttttccggcacgccctgcaccgtccaacttttgggcagcgatgcggacaatatggcggcgaatgcgctggaagccgtccgcttcggtgcgaacaaaatcgatttgaacttcggctgccccgcgcccaccgtcaacaaacacaaaggcggcgcaatccttttaaaagagccggaactgatattccacatcgtcaaaacgctgcgcgaacgtttgcccgcacatattccgctcaccgcaaaaatgcggctcggttacgaagacaaaagccgggctttggaatgcgcctgtgcgattgccgaagggggcgcatgcggactgaccgtacacgcgcgtaccaaagccgaggcttacgaaccgccggcgcattgggaatggatacgcaaaatccgcgataccgtcaatattcccgttaccgccaacggcgacgttttcagcctgcaggactatatcggcatcaaaacaatcagcggctgcaacagcgtgatgctcggtcgcggcgcggtcatccgccccgatttggcgcggcaaatcaagcaatacgagaacggcgggccggtcaaagacacggattttgccgaagtttccaaatggatacggcagtttttcgagctgtgcctgacaaaagaggcaaacaacaaatatccgctggcgcggctgaaacagtggctgggtatgatgaagaaagaatttgcagcagcacaaaatctgttcgaccgcgtccgaacggttaaggatgcggacgaagttcggaacatcttggctgaatttgagcgagaaatgaatacttga

SEQ ID NO: 50864 - DNA, 540 bp, Neisseria meningitidis
  misc_feature 4, 5, 6, 7, 8: 'n' is a, c, g or t
gtgnnnnngacaagctcggacaggcgttccaattgtgcggcagacggcatttccttcatctctttaggcacggcaaacagggactccgtcggcgcgctcaaacaaatggtcgaagtgtacgggcgcagcggcaacagcattttgggcgtagaaaccgttgaagcatcgcaaaccggctcatacggcatcgtcgaaaccgaacagctcaaacagttccaacgcattaccggcattgtcgaaaaacccaagcccgaagacgcgccctccaaccttgccgttgttggacgctacatcctcaccccgcgcattttcgacctcttaaccaatcttccgcgcggcgcgggcaacgaaatccagcttacagacggcatcgccaagctgctcgatcacgaatttgtcctggcgcacccctttgaaggtacgcgctacgactgcggcagcaaactgggctacctcgaagccaccgtcgcctacggtctgaaacatcccgaaaccggcgaacccttccgccggcttttggaaaaataccgcaccgaataa

SEQ ID NO: 50865 - DNA, 711 bp, Neisseria meningitidis; identical to SEQ ID NO: 38849

SEQ ID NO: 50866 - DNA, 594 bp, Neisseria meningitidis
atgaagaaaatcggactgttcggcggcactttcgacccgatacacaacgggcatctccacatcgcccgcgcctttgccgacgaaatcggcttggacgcggttgttttcctgccgacaggcggcccgtatcacaaagacgccgcctccgcttccgccgccgaccgccttgccatggtcgaactggcgacggcagaagacgcgcgttttgccgtcagcgactgcgacatcgtccgagaaggtgcaacctatactttcgacaccgtccaaatcttccgccagcagttcccgtccgcgcaactctggtggctgatgggcagcgacagcctgatgaagctgcatacttggaaaaaatggcagatgctcgtgcgcgaaaccaatatcgccgtcgccatgcggcagggcgacagcctgcaccaaaccccgcgcgaactgcacgcatggctgggcaatgcccttcaggacggcagcatccgcatcttgtccgccccgatgcataacgcgtcgtcaacggaaatccgccgcgccggtgtttcagacggcatcccacctgccgccgcacgctacatccgcgaacacggtttgtatgaaaaataa

SEQ ID NO: 50867 - DNA, 450 bp, Neisseria meningitidis; identical to SEQ ID NO: 44603

SEQ ID NO: 50868 - DNA, 705 bp, Neisseria meningitidis
atgacctcatgtgaacctgttaatgaacaaaccagtttcaacaatcccgagccaatgacaggatttgaacatacggttacatttgattttcagggcaccaaaatggttatcccttatggctatcttgcacggtatacgcaagacaatgccacaaaatggctttccgacacgaccgggcaggatgcttactccattaatttgatagagattagcgtctattacaaaaaaaccgaccaaggttgggttcttgagccatacaaccagcaaaacaaagcacactttattcaatttctacgcgatggtttggatagcgtggacgatattgttatccgaaaagatgcgtgtcatttgaatcaagacttaggaaaatcgttgcttgatttgggatttaaaaaaatcccgtctgtctatcctgaatatgaagcttatgaagataaaaggtcgattcctgaaaacccatatattcatgaactacagtatattaagaaaggagaaaatccggcgattattactcatcagaactatcataggtatggagagaacgattacagtactgatataggttcctgtattaacggtttcacggtacagtattacccgtttattcgggaaaagcagcagctcacacagcaggagttggtaggttatcaccaacaagtagagcaattggtacagagttttgtaaacaattcaagtaaaaaataa

SEQ ID NO: 50869 - DNA, 801 bp, Neisseria meningitidis
atgaaaaagaccatttttaacattaccaaaatggactgcccgtccgaagaacagctcattcgcatgcgtttaaaagatgtgtctgatatttatgaattacagtttgatattgctgggcggtgcttaaccgtctatcacgataatcaagatacaacgattttacaagtacttgaaccgcttaattttgatagtcatatcatttccaccgaagtgattgttgataagatagtgtttaacaagcctgatgagcacttagaaaaaagattattatatcaagtgctcatgattaactttgtgttttttatcatagagtgttcggttggtatttttgctaattctatggggctgattgctgatagtctagatatgctggcggacagctttgtctatatattggcgctatcagccattggtatgacgctggcgtataaaaaacgtgtggcatttttggcggggataacgcagataatattggcgttatttggggtgatagaagtgattaggcgttttatcggtgctgagcagctgcccaattatcaactgatgattggcacggcatttttggcattgattgcaaactggctgtgcttatatctactgagcaaaaatcaaaataaagaaatccatatcaaagccagcatgatttttacatacaatgacattatcatcaatatcggtgtgatagcggcgggagcattgacgttattgactcattctagctatcctgatttaatcattggcatgattgtctttgtcattgtactatttggtgccagaaatattttaaaattggcaaaataa

SEQ ID NO: 50870 - DNA, 612 bp, Neisseria meningitidis
gtggaatattgggagaaaaggatgtcggaaaagataatactgccggtcttgtcgttgggtggcgtacggctcgaaccgttggatgtgcatcatgaaacgggtttgcgcgaggcggtttgcgatggggaagtttggaagctgggagtaacgtccgcgccccatccggatagggtggcagactatatcgggacagcattggcaacgcgtttggcgtttgcggttgtcgatgaagaggcgggcagggtggtcgggacaacggcgtattatcattttgaaccgcagattccgcgtttggatattggattcacatggtatgcggcatcggcacggcggacacggataaacacctgttgcaaaatcatgctgttggattacgcatttgatgttttggcttgccgttgcgtgggatggcgcacggatattctgaaccttgcctcgcaacgtgccatcgaacggctgggtgcggaaaaagacggcgtgctgcgtatgcatatgctccgtaaagacggcagtgtgcgcgatacggtcgtgtacagtatgctgagggaagattggtgcaaaaacagggaaatcctgaccggcaggttggcagggtatggcgtgcaggtgtga

SEQ ID NO: 50871 - DNA, 183 bp, Neisseria meningitidis
atgggtgtcttacgggaaatggcggaaaaattgggacataaggtattgcctcttgcaccttattcacctgaactcaacccgattgagaaagtgtgggcgaatattaagcggtatctgcaaaccgttttgtctgattacgcccgatttgacgatgcactactgtcctactttgattttaattga

SEQ ID NO: 50872 - DNA, 717 bp, Neisseria meningitidis
atgacagacaccgccgaaaaccaaacacaaaacaactggcaagccgaacacccccgcagcatccgcagtttcgtcctccgccaaagccacatgaccgccgcgcagcaacgcgccatcgataccttatggggcagcttcggcatcgactaccaagcaacaccggccgatcttgatgcccgtttcggaagcagccgacccaaaatcctcgaaataggcttcggtatggggacggcaaccgcagaaatcgcccgcaggctgcccgaaaccgactttcttgccatcgacgtacacggtcccggcgtaggcaatctgctcaaactcatagaagaaaaccatttggaaaacatccgcgtgatgcggcacgacgccgtagaagttgtcgaaaatatgctgcaagacggctcgctcgacggcatccacatattcttccccgacccgtggcacaaaaaacgccaccacaaacgccgtctgatacaagcccccttcatcgccaaactgctgcccaaactcaaaaccggcggctatatccacctggcgacagactgggaagaatatgcacagcagatgcttgaagtcctcagcagcttcgacagcctgcaaaatacggcggcagactacgcccccaccccggactaccgccccgaaaccaaattcgaagcgcgcggcaaacgcctcggacacggcgtttgggacttggtattcaaacggatcggataa

SEQ ID NO: 50873 - DNA, 663 bp, Neisseria meningitidis; identical to SEQ ID NO: 45156

SEQ ID NO: 50874 - DNA, 642 bp, Neisseria meningitidis
atgccatctgaaaaaccaatgaacagaagaaccttcctcctcggcgcaggcgcgttgctgcttaccgcctgcggcagaaaatccgcccgaacccacgccaaaattcccgaaggaagcaccgtacttgccttgggcgattcgcttaccttcggctacggcgcaaaccctggcgaatcctaccccgcgcaactgcaaaaactgacgggttggaatattgtcaacggcggcgtatcgggcgatacatccgcccaagccctgtcgcgcctgcccgcgctgttggcacgcaaacccaagcttgtgcttgtcggcataggcggcaacgactttctgcgcaaagttcccaaggagcagacccgcgccaatatcgcgaaaatcatcgaaaccgtgcagaaggaaaacatccccgccgtcctcgtcggcgtgccgcacattaccttgggcgcgttgttcgggcatttgagcgatcatccgctgtatgaggatttgtccgaggaatacggcattccgctgttcggcggcgcgtgggcggaaattttgggcgataataatctgaaatccgaccaaatccacgccaacggcaaaggctatcggaaatttgccgaagatttgaatcaatttttgagaaaacaggggtttagataa

SEQ ID NO: 50875 - DNA, 363 bp, Neisseria meningitidis; identical to SEQ ID NO: 37674

SEQ ID NO: 50876 - DNA, 1443 bp, Neisseria meningitidis
gtgaattatttccccattttcgccaacctcgccggccgccccgtattggtcgtaggcggcggcgcagtcgccgcacgcaaaatcagcctgctgctgaatgcgggcgcagaggtcagggttgccgcaaaacacctgaatgccgaactctccgcgttggcggcggaaaacaaaatcctgtggcttgccgaagaatttcgtgccgaacacatccgcacggttttcctcatcattgcggcaagcagcgaccaagccctcaaccggcgcgttttccatcttgccgaaagctgccaaaagccggtcaacgtggtggacgaccgcgaccattgcagcttcatcttcccgtcggttatcgaccgcaacccggttcagattgccgtttccagctccggcagcgcgcccgtcctcgcccgactgctgcgtgaaaggctggaagccctgctgcctcattctttgggcgatatggcggaaatctccggaagatggcgcgatgcggtcaaagccaaactgaaatccgttaccgaacgccgccgtttttgggaaaagcagttcaacggccgttttgccgccctcgttaaaaatcaacaaaccgcccaagccgaacaggagttggcaaagcagttggaacaaaattatcaaggcggttttgtgtctttggtcggcgcgggtcccggcgatgcggggctgctgacgctcaaagggctgcaggaaatccagcaggcagacgtggtgctttacgacgcgctggtttcagacggcatactgtccctcgtccgccgcgatgcggaacggatttttgtcggcaagcgcgcccggggcgaccgcaccccgcaagaggacaccaatgcgcttatggtcaggctggcccgcgaaggcaggcgcgtggtgcgtttgaaaggcggagaccctttcgtgttcggacgcggcggcgaagaattggaaaccttggcacgccatcagattccgttttcggtcgtccccggcattaccgccgccgtcggcgcgaccgcctatgccggtatcccgctcacgcaccgcgattatgcccaaagtgcggttttcgtaaccggccaccgcaaggcggatgcgcccgacatcgaatggcagaccctcgcccgcagccgccagaccttggtgatttatatgggtgcgctcaaagccgccctgattgccgaacggctgcaacagcacggacgctcgcccgacacgccggcagccgtcatcagccaaggcacgctgccggctcaaaaaaccgcaaccggcacgctcgccaaccttgccgaactcgccgaaaccgcgccgaatccggcattgattgtcataggcgaagtggtggggctgcacgaaaaactcgcctggttcggtgaaaacggcgaaggagaaaaccgggtcgggcaggcgtatcccgcattgggcggactgaatgccggacaacgggcggcataa

SEQ ID NO: 50877 - DNA, 336 bp, Neisseria meningitidis; identical to SEQ ID NO: 43247

SEQ ID NO: 50878 - DNA, 1563 bp, Neisseria meningitidis
ttgtttgaagtgatgaaaaaacctttgatttcggttgcggcagcattgctcggcgttgctttgggcacgccttattatttgggtgtcaaagccgaagaaagcttgacgcagcagcaaaaaatattgcaggaagcgggcttcttgaccgtcgaatcgcaccaatatgagcgcggctggtttacctctacggaaacgacggtcatccgcttgaaaccggagttgctgaataatgcccggaaatacctgccggacaacctgaaaacagtgttggaacagccggttacgctggtaaaccatatcacgcacggccctttcgccggcggattcggcacgcaggcgtacattgaaaccgagttcaaatacgcgcctgaaacggaaaaagttctggaacgcttttttggaaaacaagtcccggtttcccttgccaataccgtttattttaacggcagcggtaaaatggaagtcagtgttcccgccttcgattatgaagagctgtcgggcatcaggctgcactgggaaggattgacgggaaaaacggtttatcaaaaaggtttcaaaagctaccgcaacagctatgatgcgcccttgttcaaaatcaagctggcagacaaaggcgatgccgcgtttgaaaaagcgcatttcgattcggaaacttcagacggcatcaatccgcttgctttgggcagcagcaatctgaccttggaaaaattctccctagaatggaaagagggtgtcgattacaacgtcaagttaaacgaactggtcaatcttgttaccgatttgcagattggcgcgtttatcaatcccaacggcagcatcgcaccttccaaaatcgaagtcggcaaactggctttttcaaccaagaccggggaatcaggcgcgtttatcaacagtgaagggcagttccgtttcgatacactggtgtacggcgatgaaaaatacggcccgctggacatccatatcgctgccgaacacctcgatgcttctgccttaaccgtattgaaacgcaagtttgcacaaatttccgccaaaaaaatgaccgaggaacaaatccgcaatgatttgattgccgccgtcaaaggagaggcttccggactgttcaccaacaatcccgtattggacattaaaactttccgattcacgctgccatcgggaaaaatcgatgtgggcggaaaaatcatgtttaaagacatgaagaaggaagatttgaatcaattgggtttgatgctgaagaaaaccgaagccgacatcagaatgagtattccccaaaaaatgctggaagacttggcggtcagtcaagcaggcaatattttcagcgtcaatgccgaagatgaggcggaaggcagggcaagtcttgacgacatcaacgagaccttgcgcctgatggtggacagtacggttcagagtatggcaagggaaaaatatctgactttgaacggcgaccagattgatactgccatttctctgaaaaacaatcagttgaaattgaacggtaaaacgttgcaaaacgaaccggagccggattttgatgaaggcggtatggtttcagagccgcagcagtaa

SEQ ID NO: 50879 - DNA, 291 bp, Neisseria meningitidis; identical to SEQ ID NO: 42259

SEQ ID NO: 50880 - DNA, 873 bp, Neisseria meningitidis
gtgaaaggactcgactattgccgtcaaaaagcagaagaaagccgctccagttttttatcgggcttccgtttcctgactcaggaaaaacgggatgcggtaacgattttatatgccttttgccgcgaattggacgatgtggttgacgaatgttccaaccccgatgttgcacaggcaacattgaactggtggcgcggcgatttggacaaggtattcggcggcgcgatgccggaacaccccgtcaatcaggccttgcggcaggttaaggaaaccttcaagctgccgaaatatgaactggaagccttaatcgacgggatgcagatggatttggttcaggcgcgttacggcagttttgaggaattgaaactgtattgccaccgcgtcgcaggcgtagtcggctgcctgattgcgcggattttggggttttcagacggcaaaacgctgcaatacgccgacaagatgggacttgcgctgcaactgaccaacatcatccgcgatgtcggcgaagacgcgcgcaggggacggatttacctgccgatggaggaaatgcagcggtttgatgtccccgcaagcgtgattttgcaatgcagcccgacgggcaattttgccgaattgatggcgttccaaatcaaacgcgcccgtgaaacctaccgcgaagccgtatcgctgctgccggctgccgataaaaaagcccaaaaagtcggactggttatggcggcggtttattacgagctattgaacgaaatcgaccgggacggcgcgcaaaacgtcctcaaatacaaaatcgccctcccttcgccgcgcaaaaaacgcattgccctgaaaacctggttattcggattcaaaccgcgccccggcacgccggaacgggcataa

SEQ ID NO: 50881 - DNA, 1557 bp, Neisseria meningitidis
atggatttcagttggttggcagaaccgcatacctggataggttttgccacgcttttggtgttggaagtcgtattggggatagacaatcttgtctttgtggcgattttggcaaacaaggtccagcccgcacggcgcgaccgcgcacggattatcgggctggggctggcagtcgtcatccgcatcattatgcttgcttttatggcgcacatcatcacgctgaccgagccgctgttccaaatcggcggcctcgccgtttccggcaaggacatgattatgctcgcgggcggtattttcctgctttacaaagccaccaccgaactgcatgaacgcctcgaagggcacaaccgttttactgttgccgacaaccaaaaaaaacacgcgccgttttggggcgtggtcgcgcaaatcctgatactggatgccgtgttttccatcgattcggtcattactgcggtggcgatggtcgatcatatcgtcgtggcgatgggtgcggtcgtcgtcgcaatggctgtaatgatttctgccagcaaactcttgaccgaatttgtcgacagacaccctaccgtcgtgatgctctgccttggttttttgttgatgatcggtttcagcctgattgccgaagccttccatttccacattcccaaaggctacctctacgccgccatcggcttctcgattttaatcgaactgtttaaccagatttcccagcgcaacagccgcaaaaacgactacatcggcagctcgtggcgcaaacggactgctgaaaacgttttgggtatgatgggcatacgcgaaagcgtgcttgccgatgcgggcggcgaatctggggacgacgcgcattttgaagaaaacgaaaaatcgatgatacgcagcgtgctgacgcttgccgaacgcccgattatgggggtgatgatcccacgccgcgacatcgaacggctggacatttcccaaagccgcgaagaacagtatgcccaactgcaaaacacgccttacagccgcctgctcgttgtcggaaaggcgggcgtggacgaacctttgggctacatcaacaaaaaagacctgctgtcccaactgctggaaacaggcggtctcgacattcagacggcattgcgccagccgctcgtcctgcccgacagcaccaccgcgctgggcgcaatcgaactcttccgccaaagcagcgcggattatgctttggtggtggacgagttcggcgcggtattgggcatggtaaccatgaaagacctgctcgaaaccatcgcaggcgagttccccgaagaatttgagcgcgaagaagaaccagccgttcaggggaatcccgatgaaagcctgacggtggaaggcgcgttggaatatgtggagctggcatcccaactcaatctgccgcagcaggaggaagatgccgatttccatacggttgccgggctgattatggaagaattgcaaaccatccccgatgtcggtgattttgccgatttccacggctggcggtttgaagtggtcgaaaaagaagggcagcgcatcgagcgggtcaaaatcaccaaattgcccgaagaataa

SEQ ID NO: 50882 - DNA, 1476 bp, Neisseria meningitidis
atgatcagcaaacaagaataccaagcccaagccgcccaagactacaaccgcatcccgctcgtgcaagaacttcttgccgacttggatacgccgctttccctctatctcaaactcgccaaccgcccctatacctacctgctcgaatccgttgtcggtggcgaacgtttcggccgctattcttttatcggcctgccttgcagccactatctcaaagccagcggcaaacacgtcgatgtttatcaaaacggcgaaatcgtcgaacaacacgacggcaatcccctgccctttatcgaagccttccacaaccgcttcaaaacgcccgaaatcccaagcctgccgcgctttaccggcggactggtcggctacttcggttacgaaaccatctacaattttgaacacttcgcccaccgcctgaaaaacaccaccaaagccgccccgctcggcacgcccgacatcttgctgatgctgtcgcaagaattggcggtgatcgacaatttgagcggcaaaatccatctcgtcgtttacgccgatccgtcgcagcccgacggctacgaacgcgcccgcgaacgcctcgaagacatccgcacccagctgcgccaaagctgcgccatcccactctcgctcggcagcaaacacaccgaagccgtcagcgagttcggcgaagagccgttcaaagcctgcgtcgataaaatcaaagactacatcttcgcaggcgactgtatgcaggtcgtccccagccagcgcatgagcatggaattcaccgacagcccgctcgccctctaccgcgccctgcgcacgctcaacccttcgccttacctcttttactacgatttcggcgatttccacatcgtcggctcctcgcctgaaatcctcgtccgccgcgaacgcgatgacgtcatcgtccgccccatcgccggcacgcgcctgcgcggcaaaacacccgccgaagaccttgccaacgagcaggacttattaagtgacgccaaagaaatcgccgaacacgtcatgcttatcgatttagggcgcaatgacgtcggccgcatcagcaaaacaggcgaagtcaaagtaaccgataaaatggtgattgaaaaatactcccatgtgatgcatatcgtctccaacgtcgaaggccgtctgaaagagggcatgaccaatatggacatcctcgccgccaccttccctgccggcacactctccggcgcaccaaaagtccgcgcgatggaaatcatcgaagaagtcgaaccgggcaaacgcggcatctacggcggtgccgtcggcgtatggggtttcaacaacgacatggatttggcaatcgccatccgcaccgccgtagtaaaaaacaacacgctatacgtccaaagcggcgcaggcgtagttgccgattccgatcctgaatcagaatggcaggaaacgcagaacaaagcccgcgctgtcatacacgcagcgcaaatggtgcaggaagggttggataaatga

SEQ ID NO: 50883 - DNA, 1386 bp, Neisseria meningitidis; identical to SEQ ID NO: 43882

SEQ ID NO: 50884 - DNA, 1263 bp, Neisseria meningitidis
atgtcaaacacacaaaaacagcttgcccttgccaaagcggcaaaaaaatccgtcaacacggcggatacggaagaaaaaaaccgcgcgctgtttgctatggcggacagcttggaagcggcgacggcagatattttggcggcaaaccgtcaagacttggaagccgcggcaggcaacattcccgaaagcatgaccgaccgccttttgttggacggcaaacgcatttgcgcgatggcggacggcatcagggcggttgccgcgctgcccgaccccgtgggcgaaatactggaaacctcgactttgcccaacggcttggaaatcgtcaaaaagcgcgtggcgatgggcgttatcggcattatttacgaaagccgcccgaacgttacttccgatgcggcggctttggcactgaaaagcggcagcgcggtcgtactccgcagcggcaaagatgcattccaatccgcacgcgccatcgttgccgccctgaaaacggggttggcacaaacccgcatcgaccccgacgcgctccagttgattgaagacacagggcgtgagggcagttacgaaatgatgagggcgaaagattatctagacctgctgattccgcgcggcggggcggggctgatacgggcggtggttgaaaatgccgtcgtgccggtcattgaaacgggaacgggcattgtccacatttatatcgacaaggacgctgattgggataaggcactccgtatcgtgtacaacgccaaaaccagccgtccgtccgtgtgcaactcgatggaagtgctgctggtacatgaagacattgctgccgacttcctgcccaagctcgaacggctgttggttcgcgaccgtatagaagccggactgccgcccgtccgcttccgtttggatccgcaggcggcgcggcatatcggcggcgaagcggcgggtgcagacgatttcgataccgagtttttagactacatcctcgccgtgaaaaccgtcgcttcggtcgaagaggcggtcgggcacatcgaaacccacggcacgcaccattcagacggcatcgttaccgaaaaccgccacgctgcggactatttcacgacccatatcgattctgccgccgtgtatgtcaacgcgtccacgcgctttaccgacggtggcgaattcggcttgggttgcgaaatgggcatctccacgcaaaaactccacgcccgaggcccgatgggcttgaaagagctaacgagttataaatacatcgtacaaggcacgggacaggtcagggaataa

SEQ ID NO: 50885 - DNA, 471 bp, Neisseria meningitidis; identical to SEQ ID NO: 39685

SEQ ID NO: 50886 - DNA, 924 bp, Neisseria meningitidis
atgcaatacagcacactggcaggacaaaccgacaactccctcgtttccaataatttcgggtttttgcgcctgccgcttaattttatgccgtatgaaagccaagcagattgggtcattaccggcgtgccttatgatatggcggtttcagggcgttccggcgcgcgtttcggtcctgaagccatccggcgcgcctccgtcaacctcgcttgggagcaccgcaggtttccatggacatttgatgtgcgcgaacgcctgaacattattgattgcggcgacttggttttttcttttggcgacagcagggattttgtcgaaaaaatggaagcgcacgccggcaaattactttcttccggcaaacgctgtttgagtttgggcggcgaccatttcattaccctcccgttgttgcgcgcccacgcccgctatttcggcaaactcgcactgattcattttgacgcgcacaccgacacctacgacaacggcagcgaatacgaccacggtacgatgttctataccgcccccaaggaaggcctcatcgacccgtcccgttccgtacaaatcggcatacgcaccgaacacagtaaaaaattgccttttactgtgttgtccgcccctaaagtcaatgaagacagtgttgaagagaccgtccgtaaaatcaaagaaaccgtcggcaatatgcccgtttacctgactttcgacatcgactgcctggacccgtcgttcgcccctgggaccggtacgcccgtatgcggcggcttgagcagcgacagggcattaaaaatcctacgtgggctgacggatctcgacatcgtcggtatggatgttgtagaagttgccccctcttacgaccaatccgacattaccgctttggccggcgccacaattgccttggaaatgctttaccttcaaggtgcgaaaaaggactga

SEQ ID NO: 50887 - DNA, 714 bp, Neisseria meningitidis
atgttgttccgtaaaacgaccgccgccgttttggcggcaaccttgatgctgaatggctgtacggcaatgatgtggggcatgaacgacccgttcagccaaacgaccgcctataaacacgttgacaaagaccaaatccgcgccttcggtgtggttgccaaagacaatgcccaattggaaaagggcagcctggtgatgatgggcgggaaatactggttcgtcgtcaatcctgaagattcggcgaagctgacgggcattttgaaagccgggttggacaagcagtttcaaatggttgagcccaacccgcgctttgcctaccaagccctgccggtcaaactcgaatcgcccgccagccagaatttcagtaccgacgacctttgcctgcgctacgataccgacagacctgccgacatcgccaagctgaaacagcttgagtttgaagcggtcgaactcgacaatcggaccatttacacgcgctgcgtctccgccaaaggcaaatactacgccacaccgcaaaaactgaacgccgattatcattttgagcaaagtgtgcctgccgatatttattacacggttacgaaaaaacataccgacaaatccaagttgtttgaaaatattgcatatacgcccaccacgttgatactggatgcggcgggtgcggtactggtcttgcctatggcggcgttgattgcagccgcgaattcctcagacaaatga

SEQ ID NO: 50888 - DNA, 1503 bp, Neisseria meningitidis
atgagtcgtgaaatgttacagctggcagaagcactggcaagcgaaaaaaacgttgatgcggaagtcgtcttccaagcactggaattcgccctgtctaccgccgccaagaaaaaggcagaccgcgaacacatggacgtgcgcgtccaaatcaaccgcgacaccggcgaataccaaaccttccgccgctggctgattgtcgccgatgaagactatacctatcccgatgtcgaaaaaaccatcgaggaaatccaagaggaaattcccggcactaccatccaaatcggcgaatactacgaagagcagctgcccaacgaaggcttcggccgccaagccgcgcaaaccgccaaacaaatcatcctgcaacgcatccgcgatgccgagcgcgagcagaatctgaacgagtttctcgccgtcaaagaagacatcgtgtccggcacggtcaaacgcgtcgaacgccacggcatcatcgtcgaagtcgttgccggcaaactggacgcgctgattccgcgcgaccaaatgattccgcgcgaaaacttccgcagcggcgaccgcatccgcgccctcttcctgcgcgtcgaagaaatcggcaacaccggccgcaaacaagtcatcctgagccgtacttccggcgatttcctcgtcaaactgtacgccaatgaagtacctgaaattgcagacggcatgcttgaaatccgcgctgtcgcccgcgacccgggacaacgtgccaaagtcgccgtcaaagccaacgaccagcgcatcgatccgcaaggcacctgtatcggcgttcgcggttcgcgtgtcaatgccgtcagcaacgaattgtccggcgagcgcatcgatgtcgtcctctggtcgcccgaacccgcgcaattcgtgatgagcgcgctctcacccgccgaagtcagccgcatcgtcatcgacgaagacaaacacgccgtcgatgtcatcgttgccgaagaccagctcgcgctcgccatcgggcgcggcggtcaaaacgtgcgccttgcttccgacctgaccggctggcagctcaacatcatgacttccgccgaggcagacgaacgcaatgcggcagaagatgccgccatccgccgcctgtttatggatcacttgaacgtggacgaagaaaccgccgacgtactggttcaggaaggttttgcaaccttggaagaagtcgcctatgttcctgccgccgaactgcttgccattgaaggatttgacgaagaaatcgtcgatatgctccgcaaccgcgcccgcgatgccatcctgaccatggcgattgccgccgaagaaaaactgggcgaagtgtccgacgatatgcgcaacctcgaaggcatagatgccgatatgctccgcagccttgccgaagcaggcattaccacccgcgacgacttggcagagcttgctgtggacgaactgattgaaatcaccggtgtaaacgaagaaaccgcaaaagccgtcatcctgaccgcacgcgaacactggtttaccgaagacaaataa

SEQ ID NO: 50889 - DNA, 708 bp, Neisseria meningitidis; identical to SEQ ID NO: 43156

SEQ ID NO: 50890 - DNA, 168 bp, Neisseria meningitidis
gtgttgttcggacggggcgggacacttcagacggcatactgccgccggtatttcggaggttgcggcccgccggaaatgtatctgcttgttttaaggtattttgtttccaatccgcatatggaaaacaggctgcgtttcggaatagtgccggaaaataggcaggattaa

SEQ ID NO: 50891 - DNA, 966 bp, Neisseria meningitidis
atgagctacacgcaactgacccaaggcgaacgataccacatccaatacctgtcccgccactgcaccgtcaccgaaatcgccaaacagcttaaccgccacaaaagcaccatcagccgcgaaatcagacggcaccgcacccaagggcagcaatacagcgccgaaaaagcccagcggcaaagccagactatcaaacagcgtaagcgacaaccctataagctcgattcgcagctgattcagcacatcgacacccttatccgccgcaaactcagtcccgaacaagtatgcgcctacctgtgcaaacaccaccagatcacgctccaccacagcaccatttaccgctaccttcgccaagacaaaagcaacggcagcacgttgtggcaacatctcagaatatgcagcaaaccctaccgcaaacgctacggcagcacatggaccagaggcaaagtacccaaccgtgtcggcatagaaaaccgacccgctatcgtcgaccagaaatcccgtatcggcgattgggaagccgacaccattgtcggcaaaggacagaaaagcgcattattgaccttggtcgaacgcgttacccgctacaccatcatctgcaaattggatagcctcaaagccgaagacactgcccgggcagctgttaggacattaaaggcacataaagacagggtgcacaccatcaccatggataacggcaaagagttctaccaacacaccaaaataaccaaagcattgaaagcggagacttatttttgtcgcccttaccattcttgggagaaagggctgaatgagaacaccaacggactcatccggcaatacttccccaaacaaaccgatttccgtaacatcagtgatcgggagatacgcagggttcaagatgagttgaaccaccgaccaagaaaaacacttggctacgaaacgccaagtgttttattcttgaatctgttccaaccactaatacactag

SEQ ID NO: 50892 - DNA, 240 bp, Neisseria meningitidis
atgaatgtttgggatatatggggcaggatggtggaaatctatcataagtataagaagccgtgcctggttttggcggtggattttgtgatgggtatggtattcatagagccgaatgaggagctgtgcatcggtagatgctatgcgcctatgtcggagtcccctgattttgctaacgctgttgcgatggctgttgctatgatctgtatcgtatggattgccgttttgtctatgactgattga

SEQ ID NO: 50893 - DNA, 201 bp, Neisseria meningitidis
atggaaaccatcaccatccctaaagaaaatttcgacgctttgctaaatctcgcacgaaccgccgtcgccctgaacgaaaattttattccaaaaataaattacggagcatccaccataccagcagccggctttgccgcacttaacgagtttggaatagctcgctccaccgtggaatctttggaaattctcaaaattaaataa

SEQ ID NO: 50894 - DNA, 825 bp, Neisseria meningitidis
ttgatacaattccgcttttccaacacgcgcaatcatctttatatgaaaaccaagttaatcaaaatcttgaccccctttaccgtcctcccgctgctggcttgcgggcaaacgcccgtttccaatgccaacgccgaacccgccgccaaagccgagtccgccggcaaatccgttgccgcctctttgaaagcgcgtttggaaaaaacctattccgcccaagatttgaaagtgttgagcgttagcgaaacaccggtcaaaggcatttacgaagtcgtcgtcagcggcaggcagattatctacaccgatgccgaaggcggctatatgttcgtcggcgaactcatcaacatcgacacgcgcaaaaacctgaccgaagaacgcgccgccgatttgaacaaaatcgacttcgcctccctgcctttggacaaagccatcaaagaagtgcgcggcaacggcaagctgaaagtcgccgtcttctccgaccccgattgtccgttctgcaaacgcttggaacacgagtttgaaaaaatgaccgacgtgacggtttacagctttatgatgcccattgccggcctgcaccccgatgccgcgcgcaaggcgcaaatcttatggtgtcagcccgaccgcgccaaagcgtggacggattggatgcgtaaaggcaaattcccggtcggcggcagcatctgcgacaatcccgtcgcggaaaccacttccttgggcgaacaattcggcttcaacggcacgccgaccctcgtcttccccaacgggcgcagccaaagcggctacagcccgatgccccaactggaggaaatcatccgcaaaaatcaataa

SEQ ID NO: 50895 - DNA, 534 bp, Neisseria meningitidis; identical to SEQ ID NO: 44316

SEQ ID NO: 50896 - DNA, 114 bp, Neisseria meningitidis
ttgcgtggtaatgccgacaacggaaggcagctttattttgaggcgcaaaggtcttcgatgcacacgatgcgccagacttggcaggtcaatatgggcgtgcgcagtatgttctga

SEQ ID NO: 50897 - DNA, 714 bp, Neisseria meningitidis; identical to SEQ ID NO: 42984

SEQ ID NO: 50898 - DNA, 654 bp, Neisseria meningitidis
atgaagttcaaatatgtttttctgttggcgtgtgttgccgtttctttatcttatcgtttgaatgctgcgccgatgtttaacgataatcctgttgtttacggaaaaatcaaagtgcagagttggaaagagaggcgcgatttcaatattgtaaagcaggatttggatttttcctgcggggcggcttcggtggcgacgcttttgaacaatttttacgggcaaacgctgacggaagaagaagtgttgaaaaagctggataaggagcagatgcgcgcgtcgtttgaggatatgcggcgcattatgcctgatttgggttttgaagcgaaaggctatgccctgtctttcgagcagctcgcgcagttgaaaatccccgtcatcgtgtatctgaaataccgcaaggatgatcatttctcggtattgcgcgggatagacggcaatacggttttgcttgccgacccgtcgctggggcatgtttcaatgagcagggcgcagtttttggaggcttggcaaacccgtgagggaaatttggcaggtaagattttggcggtcgtgccgaaaaaagccgagacaatttcaaataaattgtttttcacacatcatcccaagcggcagacggagtttgcagtcgaacaaatcaggcaagcacgtgcagagtaa

SEQ ID NO: 50899 - DNA, 855 bp, Neisseria meningitidis; identical to SEQ ID NO: 43027

SEQ ID NO: 50900 - DNA, 403 bp, Neisseria meningitidis
atgaacacaacccgactgccgaccgccctcatcttgggctgcctctgcgccgccgcttctgccgccgacaacagcatcatgacaaaagggcaaaaagtgtacgaatccaactgcgtcgcctgccacggcaaaaagggcgaaggccgcggaaccatgtttccgccgctctaccgctccgacttcatcatgaaaaaaccgcaggtgctgctgcacagcatggtcaaaggcatcaacggtacaatcaaagtcaacggcaaaacctacaacggattcatgcccgccactgccatcagcgatgcggacattgccgccgtcgccacttatatcatgaacgcctttgacaacggcggcggaagcgttaccgaaaaagacgtaaaacaggcaaaaaacaaaaaaaaactaa

SEQ ID NO: 50901 - DNA, 1338 bp, Neisseria meningitidis
ttgctttttctttatcgggacggaaccgtgctgactttagatgcgtttgagcaatgcttgaaggattgttttcctcaaggtctgaatggaaaaaaaacagcggtggcattaagcggcggcttggattccgtcgttttgctgcatctgcttgtccgcgccggaaaaaagggcggttttattccggatgcattgcatatccatcacggcttgagtccccgtgccgacgattgggcagatttctgccaaaactattgcgatatgctcggggtggggctggaaacggttaaggtctgcgtggaaaaaaacggtttgggcatcgaggcggcggcaaggcaaaagcgttatgccgcgtttgccgaaaaaggctttgacgttttggcgttggcgcaccacagggacgatcaaatcgaaacctttatgctggcggtcgcgcgcggcggcggtttgcgcgctttggcggctatgcccgccgtccgcccttttggggaaaaaggcatcatctggcggcccttgctgcctttttcacgccaagatatatgggattatgcccaaaaacacggtttgccgaatatcgaggatgaaagcaataccgatacggcttatttgcgaaaccgcttccggcaccgtattttgcccgaactttcggcgcagattccccatttcgggcggcatgtgctgaacaatgtccgcgctttgcaggaagatttggctttgttggacgaggtcgtcgttcaggactgccgttgggtttgcggggccggttatttcgatacggcgcggtggctgacgttttccccgcgccggaaaacccatattttgcggcattttctgaaggaaaacggcattcccgtgccgaatcagaatgcccttgccgacattgcccgggttttgacggaggcaaaaaccggacgttggaacttgcaaggctttgaattgcatcattatgcaggcaggctgtttgtgttccgactggaaaaaacggataaactgcggtttttgaaagacaggcagataagcggaaatttaagggaaatattgacggggcagggatttgtgttggagcggcatccgtttgggcttcctgagcatcttttggagcaggacggaattttgaggacggtagcggcatcggatacgttggccatgggcggcatccataaggatgtgaaaaaaatccttcaggggaaacgggttttgcctgtcctgcgcccaatttggccgcttgttgccgacagcggaaaccgtccattggcgttggcaaactgttgtgcggatttccaatactcggtttcagacggcattttgcccgtccatcctgactttcccattttattttga

SEQ ID NO: 50902 - DNA, 447 bp, Neisseria meningitidis
gtgcgcgcctttcagacggcattgaggccgtcccgcatcctgaacatcctgaccgtatcgctccactcggcttcccttgccgtctgcctgacctggttttacggccggatgatgtggttcggtttggcggctttggcggcaagttacgcatactcgctcaggataacgaatctgaaacaccgccatgccataaccgccattaccatagaccgcgacggacaggcggaaatcgtatccggcaaagaaaaaacggcaaaggcggcggcactgtcgggcagcagtatggttacgccttatgccttattcttacaatgggacaccggcggcaaaaccgtccgccactgcatcacccacgatatggcggacccggaatcctaccggcggctgaaagtctgggtgctttggcggcagccgaaaaaaaccgccgaaaccgatacaccaagctga

SEQ ID NO: 50903 - DNA, 729 bp, Neisseria meningitidis
atgcttttaggtgtcaacatcgaccacatcgctaccgtccgcaatgcgcgcggcacgacttatcccagccccgtggaggcggcactggttgccgaaacgcacggtgccgacctgattaccatgcacctgcgcgaagaccgccgccacatcaaagacgcggatgtgtttgccgtcaaaaacgccatccgcacgcgcctgaaccttgaaatggcgttgacggaagaaatgctcgaaaacgcgcttaaagtgatgccggaagacgtgtgcatcgtgccggaaaaacgtcaggaaatcacgaccgaaggcggtttggacgtattggcgcaacaagacaaaattgccgagttcaccaaaatcctgaccgacgcaggcatacgcgtgtccttgtttatcgatgcggacgacaggcaaatccaagccgcctatgatgtcggcgcgcccgttgtcgagctgcacaccggcgcgtatgccgacgcgcgcagccacgccgaacaaatcaggcagttcgagcgcatccaaaacggcgcgcatttcgccggcgatttgggcttggtcgtcaacgccggacacggactgaccatacacaacgttacccccatcgcccaaatcctcgccatccgcgaactgaacatcgggcattcgctgattgcccaagccctctttctcggactgcccgaagccgtgcgccaaatgaaggaggcgatgttcagggcaaggctgctgccgtaa

SEQ ID NO: 50904 - DNA, 975 bp, Neisseria meningitidis
atgctcgagaatctgccctatttccagcgacatctgcctgaagaccttgccaaagtcaatgaagtcatcaaccgtgcggtgcaatccgatgtcgcactgatttcgcaaatcggtacatatatcatcagcgcgggcggcaaacgcctgcgtccgattatgacgattttggcgggtaaggcggtcggttatgatgacgagaaactgtatgcgctggcggcgatggtcgagtttatccacacttccaccctcctgcacgacgatgtcgtcgatgaaagcgatttgcgccgtgggcgggcaacggcaaacaatctgttcggcaatgcggcggctgtgttggttggcgactttttatacacgcgcgcctttcaactgatggttgcctcgggcagtatgcgcgttttggaagtgatggcggatgcaaccaacattattgccgagggcgaagtcatgcagctgatgaacatcggcaatacggacattaccgaagaacaatatatccaagtcatccaatataaaacggcaaaattgtttgaagctgccgctcaagtcggcgcaattttgggcaaggcttcccccgaacacgaacaggcgttgaaagactacggtatgtatgtcggtacggcattccaaattattgacgatgtgctggactattctggcgaaaccgaagaaaccggcaaaaacgtcggcgacgatttggcggaaggaaaaccgactttgcctttgatttatctgatgcgtcagggttccgaacaggttgcgaacgatgtgcgtactgctttggaaaatgcagatcgcagctattttgagaaaatccacgattatgtcgtccgttcggatgctttggcatattcgataggcgaggcgcgcaaagcagtcgattgtgccgttaccgccttggatgccctgcccgacagcgaagtgaaggatgccatgattcagctggcgaaggaatctttggtcagggtgtcttga

SEQ ID NO: 50905 - DNA, 1515 bp, Neisseria meningitidis
ttgtatttcagatacggctttttggttgtttggtgtgcggcaggtgtttctgccgcctatggggcggatgcgcccgcgattttggatgacaaggcattgttgcaggtgcagcggtcggtgtcggataagtgggcggaatcggattggaaagttgaaaatgatgccccgcgcgtggttgacggggattttttgttggcgcatccgaaaatgttggaacatagtttgcgcgacgcgctcaacggcaatcaggcggatttgatcgcttcgttggcggatttgtatgccaagctgccggattatgacgcggttttgtacggcagggcgcgggctttgctggcgaaattagcgggaaggccggcggaggcggtggcgcggtatcgggaactgcacggggaaaatgcggcagacgagcggattttgctggatttggcggcggcggagtttgacgatttccgactgaagtcggcagaaaggcattttgcggaggcggcaaaattggatttgccggcgccggttttggaaaatgtggggcgttttcggaaaaaaacggaggggctgacgggctggcgtttttcgggcggcatcagcccggcggtcaatagaaatgccaataatgccgcgccgcagtattgccggcaaaacggaggccggcagatatgcagtgtcagccgggcggagcgggcggcagggttgaattatgaaatcgaggcggaaaaactgacggcgttggcggacaatcattatttgttgttccgttccaatatcggcggcacgagctattatttcagtaaaaaatcagcttatgacgacgggttcggcagagcgtatttgggttggcagtataaaaatgcacggcagacggcggggattttgccgttttatcaggtgcagttgtcgggcagcgacggctttgatgcgaaaacaaaacgggtaaacaaccgccgcctgccgccgtatatgctggcgcacggagtcggcgtgcagctgtcccatacttaccgcccaaacccgggatggcaattttcggtcgcgctggaacattaccgccaacgctaccgcgaacaggatagggcggaatacaataacggcaggcaggacgggttttatgtttcgtcggcaaaacgtttgggcgaatcggcaactgtgttcggcggctggcagtttgtgcggtttgtgccgaaacgcgaaacggtgggcggcgcggtcaataatgccgcctaccggcgcaacggtgtttatgccggttgggcgcaggagtggcggcagttgggcggtttgaacagtcgggtttccgcgtcttatgcccgccgcaactataagggcgttgcggctttctcgacagaggcgcaacgcaaccgcgaatggaatgtctcgctggctttgagccacgacaagttgtcgtacaaaggtatcgtaccggcgttaaattatcgtttcggcaggacggaaagtaatgtgccgtatgcgaaacgccgcaacagcgaggtgtttgtgtcggcggattggcggttttga

SEQ ID NO: 50906 - DNA, 549 bp, Neisseria meningitidis
gtgtctcaaaacactccaatcaaaccttggtacaaacacgtctggccgtggatcttgatggcggggccgatttttgtcgtcatcgccagcgtcgctatgttttttgtcgcgcagcagcacgcgacagatttggttacggacgattattataaagacggcaaacatatcgacatccagcttcatcgggatgaagaagccatcagacggcatatcggggtgcaggttctcatttcccccgatatgaatgcggcaaaagtgtttgtcggcggcgagtttgacggcaaacagcctttgaacctgctgctgatgcacccgacccgcaaggcggacgatcaaaccgtcgccctcaagcccgtcggcagcgcgcagaacggcagggcggaatatgaggcggtgttcaaaaccctttcgccgaccaaccactggtatgtgcgcgtggaggacgcggcaggcgtgtggcgcgtcgagaacaaatggattaccagccaagggaatgcggtggatctgaccccgatggataaacttttcaataatgccggaagcaaataa

SEQ ID NO: 50907 - DNA, 2751 bp, Neisseria meningitidis
atgaccgacgcaaccatccgccacgaccacaaattcgccctcgaaaccctgccggtaagccttgaagacgaaatgcgcaaaagctatctcgactacgccatgagcgtcattgtcgggcgtgcgctgccggacgttcgcgacggtctcaagccggtacaccgccgcgtactgtacgcgatgcacgaattgaaaaacaactggaatgccgcctacaaaaaatcggcgcgcatcgtcggcgacgtcatcggtaaataccacccccacggcgataccgccgtatacgacaccatcgtccgtatggcgcaaaatttcgctatgcgttatgtgctgatagacggacagggcaacttcggatcggtggacgggcttgccgccgcagccatgcgctacaccgaaatccgcatggcgaaaatttcccacgaaatgctggcagacattgaggaagaaaccgtcaatttcggcccgaactacgacggtagcgaacacgagccgcttgtactgccgacccgtttccccacactgctcgtcaacggctcgtccggcatcgccgtcggcatggcgaccaatatcccgccgcacaacctttccgataccgtcaatgcctgcctgcgcctgctcgatgcacccgacaccgaaatcgacgaactgatcgacattatccaagcccccgacttcccgaccggggcaaccatctacggcttgagcggcgtgcgcgaaggctataaaacaggccgcggccgcgtcgttatgcgcggtaagacccatatcgaacccataggcagaaacggcgaacgcgaagccatcgttatcgacgaaatcccctatcaggtcaacaaagccaagctggtcgagaaaatcggcgatttggttcgggaaaaaacactggaaggcatttccgagctccgcgacgaatccgacaaatccggtatgcgcgtcgttatcgagctgaaacgcaacgaaaatgccgaagtcgtcttaaaccaactctacaaactgactccgctgcaagacagtttcggcatcaatatggtggttttggtcgacggacaaccgcgcctgttgaacctgaaacagattctctccgaattcctgcgccaccgccgcgaagtcgttacccgacgtacgcttttccggctgaagaaggcacgccatgaagggcatattgccgaaggcaaagccgtcgcactgtccaatatcgatgaaatcatcaagctcatcaaagaatcgcccaacgcagccgaggccaaagacaaactgcttgcgcgcccttggcgcagcagcctcgttgaagaaatgctgacgcgttccggtctggatttggaaatgatgcgtccggaaggattggctgcaaacatcggcttgaaagagcaaggttattacctgagcgagattcaggcagatgctattttacgcatgagcctgcgaaacctgaccggcctcgatcaagaagaaattgtcgaaagctacaaaaacctgatgggtaaaatcatcgactttgtggatatcctctccaaacccgaacgcattacccaaatcatccgcgacgaactggaagaaatcaaaaccaactatggcgacgaacgccgcagcgaaatcaacccgttcggcggcgacattgccgatgaagacctgattccgcaacgcgaaatggtcgttaccctgacacatggcggctatatcaaaacccagccgaccaccgactatcaggcgcagcgtcgcggcgggcgcggcaaacaggcggctgccaccaaagacgaagactttatcgaaaccctgtttgttgccaacacgcatgattatttgatgtgctttaccaatttgggcaagtgtcattggattaaggtttacaaactgcccgaaggcggacgcaacagccgcggccgtccgattaacaacgtcatccagttggaagaaggcgaaaaagtcagcgcgattctggcagtacgcgagttccccgaagaccaatacgtcttcttcgccaccgcgcagggaatggtgaaaaaagtccaactttccgcctttaaaaacgtccgcgcccaaggcattaaagccatcgcgctcaaagaaggcgactacctcgtcggcgctgcgcaaacaggcggtgcggacgacatcatgctgttctccaacttaggtaaagccatccgcttcaacgaatactgggaaaaatccggcaacgacgaagcggaagatgccgacatcgaaaccgaaatttcagacggcatcgaagatgaaaccgccgacagcgaaaacgcactgccgaacggcaaacacggtgttcgcccgtccggtcgcggcagcggcggtttgcgcggtatgcgcctgcctgccgacggcaaaatcgtcagcctgattaccttcgcccctgaaaccgaagaaagcggtttgcaagttttaaccgccaccgccaacggatacggaaaacgcaccccgattgccgattacagccgcaaaaacaaaggcgggcaaggcaatattgccattaacactggcgagcgaaacggcgatttggtcgccgcaaccttggtcggcgaaaccgacgatttgatgctgattaccagcggcggcgtacttatccgcaccaaagtcgaacaaatccgcgaaaccggccgcgccgcagcaggcgtgaaactgattaacttggacgaaggcgaaaccttggtatcgctggaacgtgttgccgaagacgaatccgaactctccgacgcttctgtaatttccaatgtaaccgaaccggaagtcgagaactga

SEQ ID NO: 50908 - DNA, 312 bp, Neisseria meningitidis; identical to SEQ ID NO: 38411

SEQ ID NO: 50909 - DNA, 1641 bp, Neisseria meningitidis
ttgtctttaccgtacaaacgctggcactatttcaacctgataaaaaacagccttcaaaaaggttgcttaaaacagcagcagacacttaccgccacaaccttgaaaaggaacacaatcatgaccgtcatcaaacaggaagactttatccaaagcatttgcgatgccttccaattcatcagctactaccatcccaaagactacatcgacgcgctctataaagcgtggcagaaagaagaaaaccccgccgccaaagacgcgatgacgcagattttggtcaacagccgcatgtgtgccgaaaacaaccgccccatctgccaagataccggtatcgcgaccgtcttcctcaaagtcggtatggatgtgcagtgggatgcggacatgagcgtcgaagaaatggttaacgaaggcgtgcgccgcgcctacacttgggaaggcaatacgctgcgcgcttccgttctcgccgaccccgccggcaaacgccaaaataccaaagacaacacgcccgccgtcatccatatgagcatcgtgccgggcgacaaagtcgaagtaacctgcgcggcaaaaggcggcggttctgaaaacaaatccaaactcgccatgctcaatccttccgacaacatcgtcgattgggtattgaaaaccatcccgacgatgggcgcgggctggtgtcctcccggcatcttgggcatcggcatcggcggcacgcctgaaaaagccgtgttgatggcaaaagagtccctgatgagccacatcgacatccaagaattgcaggaaaaagccgcgtccggcgcggaattgtccaccaccgaagccctgcgcctcgaactctttgaaaaagtcaacgcgctgggcatcggcgcacaaggtttgggcggtctgaccaccgtgttggacgtgaaaatcctcgattacccgacccacgccgcctccaaaccgattgccatgattccgaactgcgccgccacccgccacgtcgaatttgaattggacggctcaggccctgtcgaactcacgccgccgcgcgtcgaagactggcccgatttgacttacagccccgacaacggcaaacgcgtcgatgtcgacaagctgaccaaagaagaagtggcaagctggaaaaccggcgacgtattgctgttgaacggcaaaatcctcaccggccgcgatgccgcacacaaacgcctcgtcgatatgctcaacaaaggcgaagaattgcccgtcgatttcaccaaccgcctgatttactacgtcggccccgtcgatccggtcggcgatgaagtcgtcggtccggcaggtccgaccacagccacccgcatggacaaattcacccgccaaatgctcgaacaaaccggcctcttgggcatgatcggcaaatccgaacgcggcgcggcggcgtgcgaagccatcgccgacaacaaagccgtgtacctgatggcggtcggcggcgcggcatacctcgtggcaaaagccatcaaatcttccaaagtcttggcgttccccgaattgggtatggaagccatttacgaatttgaagtcaaagatatgcccgtaaccgtcgccgtagacagcaaaggcgaatccatccacgccaccgccccgccccaatggcaggcgaaaatcggcatcatccccgtcaaatcttga

SEQ ID NO: 50910 - DNA, 747 bp, Neisseria meningitidis
atgagcacacaagatttaaacggcaaaatcgctttggtaacaggcgcatcgcgcggtatcggtgcagcaattgccgacacgctggcggcagccggtgccaaagtcatcggtacggcgaccagtgagagcggtgcggcggcgattagcgagcggttggcgcaatggggcagcgaaggccgcgtattaaattccgccgaacctgaaaccatcgaaagcctgattgccgacatcgaaaaagcgttcggcaaactcgatattctggtcaacaacgccggcatcacccgcgacaacctcctgatgcgcatgaaagaagaagagtgggacgacatcatgcaggtcaacctcaaatccgtgttccgcgcttctaaagccgttttgcgcggtatgatgaaacaacgttccggccgcatcatcaacatcacatccgtcgtcggcgtgatgggcaatgccggtcaaaccaactatgccgcggcaaaagcaggcttaatcggtttctccaaatccatggcgcgcgaagtcggcagccggggcattaccgtcaactgcgtcgcccctggctttatcgataccgacatgacacgcgccctgccggaagaaacccgccaaacctttaccgcccaaaccgccttgggcagattcggcgacgcgcaagacatcgccgatgcggttctgttcctcgcttccgaccaagcaaaatacatcaccggccaaacgctgcacgtcaacggcggtatgctgatgccttaa

SEQ ID NO: 50911 - DNA, 1677 bp, Neisseria meningitidis
atgagcttcaaaaccgatgccgaaatcgcccaatcctccaccatgcgcccgattggcgaaattgccgccaagctgggtctgaatgccgacaacattgagccttacggtcattacaaggcgaaaatcaatcctgccgaagcgttcaaactgccgcaaaaacagggcaggctgattttggttaccgccattaatccgactccggcgggcgaaggcaaaaccaccgtaaccatcggtttggcggacgcgttgcgccacatcggcaaagatgccgtgattgccctgcgcgaaccttctctggggccggtgttcggcgtgaaaggcggcgcggcaggcggcggctatgcccaagttttgccgatggaagacatcaacctgcacttcaccggagattttcacgccatcggtgcggcaaataatctgcttgccgcgatgctcgacaaccatatctatcagggcaacgagttggacatcgaccccaaacgcgtgctgtggcggcgcgtggtcgatatgaacgaccgccagttgcgcaacatcatcgacggcatgggtaaacccgttgacggtgtgatgcgccccgacggttttgatatcaccgttgcctccgaagtgatggcggtattctgccttgccaaagacatcagcgatttgaaagagcgtttgggcaacatcctcgtcgcctacgccaaagacggcagccccgtttacgccaaagatttgaaggcacacggcgcgatggcggtcctgctcaaagatgcgattaagcccaatttggtgcaaaccatcgaaggcacgcccgccttcgtacacggcggcccgttcgccaacatcgcccacggctgcaactccgtaaccgcaacccgtctggcgaaacaccttgccgattacgccgtaaccgaagcaggcttcggcgcggatttgggcgcggaaaaattctgcgacatcaaatgccgccttgccggtttgaaacctgatgcggcggtcgtcgtggcgactgtccgcgctttgaaatacaacggcggcgtggaacgtgccaacctcggtgaagaaaacctcgaagccttggcaaaaggtttgcccaacctgctgaaacacatttccaacctgaaaaacgtattcggactgcccgtcgtcgttgcgctcaaccgcttcgtgtccgactccgatgccgagttggcgatgattgaaaaagcctgtgccgaacacggcgttgaagtttccttgaccgaagtgtggggcaaaggcggcgtgggcggtgcagacttggcgcgcaaagtcgtcaacgccatcgaaaaccaaccgaacaacttcaatttttcctacgatgttgagctgagtattaaagacaaaatccgtgcgattgcccaaaaagtgtacggcgcggaagatgttgatttcagcgcggaagcgtctgccgaaatcgcttcactggaaaaactgggcttggacaaaatgccgatctgcatggcgaaaacccaatactctttgagtgacaacgccaaactgttgggctgccccgaaggcttccgcattaccgtgcgcggtatcactgtttccgcaggcgcaggtttcatcgtcgccctgtgcggcaacatgatgaaaatgcccggcctgcccaaagttccggctgccgagaaaatcgatgtggacgaacacggcgtgattcacggcttgttctga

SEQ ID NO: 50912 - DNA, 966 bp, Neisseria meningitidis; identical to SEQ ID NO: 50826

SEQ ID NO: 50913 - DNA, 423 bp, Neisseria meningitidis
atgaataaaaaccgtaaattactgcttgccgcactgctgctgattgcctttgccgccgtcaagctcgttttgttgcaatggtggcaggcgcagcagccgcaagctgtggcggtgcaatgcgatttgaccgagggttgcacgctgccggacggaagccgcgtccgcgccgccgccgtttcaaccaaaaaaccgtttgatatttatatcgaacacgcgcccgccggcacggaacaggtcagcatcagcttcagtatgaaaaatatggatatgggtttcaaccgctatatgttcgagcggcaaccgtcggggacttggcaggcagtacgcatccgcctgcccatctgtgtcgaaggcaggcgcgattttacggcggacattacaatcggcagtcggacatttcagacggcatttaccgccgaataa

SEQ ID NO: 50914 - DNA, 123 bp, Neisseria meningitidis
ttgagcaagcattattttgtctcctgttgtacggtttcagacggcatcggtttgccacgtttgtaccaagtggcgcgggaaatgccgagactctcccacggtttatcgcggctgcaattttaa

SEQ ID NO: 50915 - DNA, 3435 bp, Neisseria meningitidis
atgaccgagccgacctacatccccttgcgcctgcataccgagttctcaattaccgacggtatggtgcggattaaaaaactggttgccaaagcgcaggaatacggtttgcctgctttgggcatcagcgatttgatgaacgaattcggcttggtgaaattctataaagcctgccgcggcgcagggattaaacccatcggcgcggcggacgtgtggataggcaatccgaatgcgcccgacaagccgtttcgcgccatgctgattatccgcaacgatgcgggctatctgcgcttgagcgagcttctgacggcggcttatgtcggcaaagaccgcaatatccatcatgcggaactcaatcccgaatggctggaaaacggcgacaacagcggcttgatttgtttgagcggcgcacattacggcgaagtgggcgtgaatctgttgaacggcaatgaagacgcggcgcgtgcggcggcgttgaaatatgcggcatggtttcccgatgcgttttatttagagctgcaacgcctgcccgaacgccccgaatgggaggcttgcgtttccggcagcgtgaagctggcggaggaactgggtttgccggtggtggcgacccacccgacgcagtttatgagcagcgatgatttcaacgcgcacgaggcacgggtgtgtattgcgggcggctgggtgctgacggacaaaaaacgtccgcgcgatttcacaccgggccagtttttcattccgccggaaacgatgctggagcgtttcgccgatttgcccgaggccttggaaaacacggtagaaattgccaaacgctgcaatctgcacatcacattgggcaaaaacttcctgccccttttccccacgcccgacggtttatcgcgcgatgactatctcatcaaactctcaaacaagggcttgcaggaacgcatggttcagctttatcccgacgaggcggagcgtgcggcaaaaatgccggaatatcaggaacgtttggattttgagctgaacatcatcatccagatgaaattccccggctatttccttatcgtacaagactttatcaactgggcgaaaacgcacggctgtccggtcgggccgggacgcggttcgggcgcgggttcgctggtggcgtattcgctgaaaattaccgacctcgacccgctgaaatacgcgctgctgtttgaacgtttcttaaaccccgaacgcgtctccatgcccgacttcgacgttgacttctgtcaggcaaaccgcggccgcgtgatcgaatatgtgcgcgataaatacggcgctcaggcggtcagccagattgttaccttcggcacgatgtcgtccaaagcggtcatccgcgacgtggggcgcgtgttggagctgccgtttatgctgtgcgacaaactgtccaagctgattccgttggaagccaacaaacctctgagtttggaaaaagccatggaggccgagccgcagattcaggaattgatcgaggtggaagaagcggacgaactgattacactggcgaaaaagctggaagatttgacgcgcggtctgggtatgcacgcgggcggcgtgttgattgcgccgggcaagatttccgattacagccccgtgtatcaggcggatgaatccgcctcgcccgtatccatgtacgacaagggtgacgtggaagacgtgggcttggtgaaattcgactttttgggtctgcgcaacctgaccattatcgaaatggcgcagaacaacatcaaaaacaccaccggcgacatcatcgatgtcggcaaaattcctctcgacgaccaagccgcctaccaaatcttccgagatgcgaacaccaccgccgtgttccagttcgagtcgaccggcatgaaaaaaatgctgaaaacggcgcacacgaccaagtttgaagaactgattgccttcgtatcgctctaccgccccggcccgatggacaacatccccgacttcgtcgcgcgtatgaaggggcaagaattccaatatatccatccgctgctcgagggcatcctcgcgccgacctacggcattatggtgtatcaggaacaagtgatgcaggcggcacagattatcggcggctactcgctcggcggcgcggacttgctgcgccgcgcgatgggtaagaaaaagcccgaagaaatggtgaaacaccgcgaaatcttcgccgaaggcgcggcaaaacaaggcatttcgcgcgaaaaatccgacgaaatcttcaactatatggaaaaattcgccggctacggtttcaacaaatcccacgccgccgcctacgccctgatttcctaccagaccgcatggctcaaggcgcactaccccgccgaatttatggcggcgaccatgtcgtccgaattggacaacaccgaccagctcaagcatttctacgacgactgccgcgccaacggcatcgagttcctgccgcccgacatcaacgaatccgactaccgctttacgccgtatccggacatgaaaatccgctacgcgctcggcgcgattaaaggcacgggcgaagccgccgtcgaatccatcaccgccgcgcggcaaagcggcggcaagtttaccggcctgttggacttctgcgagcgcgtcggcaaagaacacatgaaccgccgcaccctcgaagccctgatacgcggcggcgcgttcgacagtatcgaacccaaccgcgccatgctcttggcgaacatcgacctcgctatggacaacgccgaccaaaaagccgccaacgccaatcagggcgggctgttcgacatgatggaagacgccatcgaaccggtgcggctcatcgacctgccgaggtggagcgaatcggaaaaactcgccgaagaaaaaaccgtcatcggcttttacctgtccggccacccgttcggcccgtatgcccaagaagtccgccaaatcgcaccgaccaaattagaccgtctgaagccgcaagacagcgtgcgcctcgccggattcgttaccgccgtacgcaccatgatgggcaagcgcggcaaaatcgccttcgtcagccttgaagatttgagcggacaggttgaaatcatggtcggcggtcagacgttggaaaactgcgccgactgcctcaaagccgaccaagtgctgattatcgaatccaaagtcagccgcgacgactacggcggcggcgacgggctgcgtattctggcaaaccaagtcatgaccctgcaaacggcacgcgaacgctacgcccgcagcctcagcctcgccctcgccccgcatcacgacatcggcggactggtacggctgctctcctcccaccaactgcccgacacgccgcgcatcccgctgcaactgtcgtatgccaacgaaaaagcgtcgggcaggcttcaagtgccgccgaaatggacggttacaccgagctccgcattgttcggcgaactggaaacattgctcggcagccggtcggtgcgcgtcaactggtaa

SEQ ID NO: 50916 - DNA, 1134 bp, Neisseria meningitidis
atgtttaaaaaattcaaaccggtactgttgtcattttttgcacttgtatttgccttttggctgggaacgggtattgcctatgagattaatccgcgttggtttttgagcgatacagcaactgaaatacctgaaaatccgaatgcttttgtggcgaaacttgcccgcctgttccgaaatgccgacagggcggttgtcatcgtgaaggaatcgatgaggacggaggaaagtcttgccgaaactgtggatgacggtccgttgcagtcggagaaggattatctcgcgctcgctatccggctcagtcgtttgaaagaaaaggcgaaatggtttcacgtaacggagcaggaacatgggaaagaggtttggctggattaccatatcggcgagggcggtttggttgcggtttcgctttcgcaacgctcgccggaagcgtttgttaatgccgaatatctgtatcggaacgatcgtccgttttctgtaaatgtgtacggcggaacggctcacggagaaaattatgaaacgacaggagaatatcgggttgtttggcaaccggacggttcggtatttgatgcgtcggggcgtgggaaaatcggggaagatgtttatgagcattgtctcgggtgttatcagatggcccaggtatatttggcgaaataccgggatgtcgcgaatgacgagcagaaggtttgggacttccgcgaagagagcaaccggattgcgtcggactcgcgcgattctgtgttttatcagaatatgcgggaattgatgccccgggggatgaaggcgaacagtcttgtggtcggctatgatgcggacggtctgccgcaaaaagtctattggagtttcgacaatggaaaaaaacgccagagtttcgaatattatttgaaaaacggaaatctttttattgcacaatcttcgacggtagcattgaaagcggatggcgtaacggcggatatgcagacctatcatgcgcaacagacgtggtatttggatggcgggcggattgtccgcgaagagaaacagggggacagactgcctgattttcctttgaacttggaagatttggaaaaagaggtgagccgttatgcagaggctgcagcgagacgttcgggcggcaggcgcgacctttctcactga

SEQ ID NO: 50917 - DNA, 729 bp, Neisseria meningitidis
atggcaggccatagcaagtgggcgaatatccagcataaaaaagcccgtcaggatgccaaacgcggcaaaatcttcacccgtttaatcaaagaaatcaccgttgcggcgcgtatgggcggcggcgatcccggcgcaaatccgcgcctgcgcctggctttggaaaaagcagccgaaaacaatatgcccaaagacaatgtgcaacgcgccatcgacaaaggtacgggcaacttggaaggcgtggaatacatcgaattgcgctacgaaggctacggcatcggcggcgcggctttgatggtggactgcctgaccgacaacaaaacccgcaccgttgccgacgtgcgccacgcgtttaccaaaaacggcggtaacttgggtactgacggctgcgtggcgttcaacttcgtgcatcagggctatttggtattcgaacccggcgttgacgaagacgcgctgatggaagcggctttggaagccggtgcggaagacgtggttaccaacgacgacggttccatcgaagtcattaccgcgccaaacgattgggcgggcgtaaaatccgctttggaggcggcaggttacaaatctgttgacggcgacgttacgatgcgcgcccaaaacgaaaccgaactctccggcgacgatgccgtcaaaatgcaaaaactgattgacgcgctggaagacttagacgacgtgcaagacgtttacacttccgccgtattgaatttggactga

SEQ ID NO: 50918 - DNA, 1386 bp, Neisseria meningitidis
atggacggctggacacagacgctgtccgcgcaaaccctgttgggcatttcggcggcggcaatcatcctcattctgattttaatcgtcaaattccgcatccacgcgctgctgacactggtcatcgtcagcctgctgacggctttggcaaccggtttgcccacaggcagcattgtcaacgacgtactggtcaaaaacttcggcggcacgctcggcggcgtggcgcttctggtcggcctgggcgcgatgctcggacgtctggtcgaaacatccggcggcgcacagtcgctggcggacgcgctgatccggatgttcggcgaaaaacgcgcaccgttcgcgctgggcgttgcctcgctgattttcggcttcccgattttcttcgatgccggactaatcgtcatgctgcccatcgtgttcgccaccgcacggcgcatgaaacaggacgtactgcccttcgcgcttgcctccatcggcgcattttccgtcatgcacgtcttcctgccgccccatccgggcccgattgccgcttccgaattttacggcgcgaacatcggccaagttttgattttgggtctgccgaccgccttcatcacatggtatttcagcggctatatgctcggcaaagtgttggggcgcaccatccatgttcccgttcccgaactgctcagcggcggcacgcaagacaacgacctgccgaaagaacctgccaaagcaggaacggtcgtcgccatcatgctgattcccatgctgctgattttcctgaataccggcgtatcggccctcatcagcgaaaaactcgtaagtgcggacgaaacctgggttcagacggcaaaaataatcggttcgacaccgatcgcccttctgatttccgtattggtcgcactgtttgtcttgggacgcaaacgcggcgaaagcggcagcgcgttggaaaaaaccgtggacggcgcactcgcccccgtctgttccgtgattctgattaccggcgcgggcggtatgttcggcggcgttttgcgcgcttccggcatcggcaaggcactcgccgacagcatggcggatttgggcattcccgtccttttgggctgtttccttgtcgccttggcactgcgtatcgcgcaaggttcggcaaccgtcgccctgaccaccgccgccgcgctgatggctcctgccgttgccgccgccggctttaccgactggcagctcgcctgtatcgtattggcaacggcggcaggttcggtcggttgcagccacttcaacgactccggcttctggctggtcggccgtctcttggacatggacgtaccgaccacgctgaaaacctggacggtcaaccaaaccctcatcgcactcatcggctttgccttgtccgcactgctgttcgccatcgtctga

SEQ ID NO: 50919 - DNA, 432 bp, Neisseria meningitidis
atgatggggttcgaaaaagttgaacatttattgccggataccgtgttggacattgtggatgtcatcggactggcagcgacggaacagctggtcaaggcgattggcggggcgcggtttaaatttggtaagggcaaggtggacaccgagcgtttggcaattttggtcgaagccatcggcgaagtgaaaacacatgagctgttgcaggtatatggtggcgaggaattgtatgtcccacggtgcggcaaggcgttaatacagttgagaaaccataggttttatcaggagtttgtcaaattgcgcgatattgataaggagagcgggcttatggcgatgacgaagctatgccctaaatacggcatctcttcacgaacgggatatacgattatcaatgaaatgagccgacctgcggcacagcaggcagctttattttag

SEQ ID NO: 50920 - DNA, 3117 bp, Neisseria meningitidis
atgaataaaacttggaaacggcaggttttccgccataccgcgctttataccgccatattgatgttttcccataccggcgggggggggcaggcgcaagcgcaaacgcaaacgcataaatacgttattgtaatgaacggacaaaagctgcctgaggtaaagtgggggaatgcatattcatcattggcgcacaaaagcaatgaacgcgaagttacccatacgagtaatttcagaatccgaaaaaacgttagtttctcattcaataataccgatgaagttgttgctgaaaaaaaagatgctgttgtttttggtgcagccacctacctgccgccctacggcaaggtttccggttttgatgccaataagctgaaagagcgcaaaaatgccgttgattggattggtacgacccacccggggctgataggctatagctaccaaaatagcacatgcaacagcagcaactgtcctgaagttgcctatagaacccaatttaccttcggcaattccagtttggaaaaaaagaaaacagacggcaaactggatatatacgaagacaaaagccgcgacaattcgcccatttacaaattgaaggattatccttggttgggcgtgtctttcaatttgggcggagagagctccttcaaaccaaagagaaacaatcaattggtatcttcttttagagaggacgtgcagaacaaccaacacaaagaaaacctcgtttatacgacagacgattacaatagtaagaataatcgtaaccatcaggacaaacaccacgccgtcgccttttatctgaacgccaagctgcacttgctggataaaaaacaaatcacaaatatcgcacaaggcagaggatttaatttgggtaccttgagaacacgcatcgagccgacggaagcatggaaaagacagaatagtaacttttttaacggtagttggacgtatgaagataaaggatcagtcagcgtcaaactcaaattgccggaagtcaaagcaggccgctgcatcaacgcaaataaccccaataagagtaccaaagccccttcccccgccctgaccgcccccgcgctgtggttcggacctgtgcaaaatggcaaggtgcagatgtattccgcttcggtttccacctaccccgacagttcgagcagccgcatcttccttcaaaatctgaaaagaaaaaccgacaccagcagacccggccgctattccctcgcagacttggctaagtcggatattgaaaatcgacagccgaatttcacagggcggcaaaccgtcatccgattggatggcggcgtacatgagatcaaacttaaaggcaatgaggtcgaaggttttaagggaaacaacggcaacgacactttcggtattgttaaggacttgggcgtcgatcctgataccaatgagtggaaaaaagtgctgctgccttggacggttcgtgcttccaatgatgacggtcaatttaacacattcaacaaagaagaaaacaacggcaagccaaaatacagccaaaaataccgcagccgcgacagcagcaagcacgagcgcgatttgggcgacatcgtcaacagccccatcgtggcggtcggcgggtatttggctacttccgccaacgacgggatggtgcatatcttcaaaaaaggcaacggcgtggacgagcgcaactatagtctgaagctcagttatatccccggcacgatgccgcgcaaggatattcaaagccaagactccacccttgccaaagagctgcgcgcctttgccgaaaaaggctatgtgggcgaccgctacggcgtggacggcggctttgtcttgcgccaagttaacaacttaaatgggcaagaccgcgtgtttatgttcggcgcgatgggctttggcggcagaggtgcatacgccttggatttgaccaaagccgaaaacggtaacccgaccgccgtttccctgtttgatgtcaaaaatgacgataaaaacaataatggcgtgaaattaggctacaccgtcggcacgccgcaaatcggcaaaacccacgacggcaaatacgccgccttcctcgcctctggttatgcgactaaagacattaacagcacagaaaatcaaaccgcgctgtatgtatatgatttggaaagcagcggcacgctgattaaaaaaatcgaagtacccaacggcaagggcgggctttcgtcccccacgctggtggataaagatttggacggcatggtcgatatcgcctatgccggcgatcgcggcgggaatatgtaccgctttgatttgagcggtcaagatcctaatcaatggtctgtacgcaccattttcagcggcaacaaaccgattacttccgcgcccgccatttcccaactgaaagacaaacgcgtggttatcttcggcacgggcagtgatttgagtgaggaggatgtactcagtacggatgaacaacatatttacggtatttttgacaatgacacaaacacgggtacggcgcaagacgggcagggcaacgggctgctcgagcaagtgctgaaaaaagacggcaatacgctgttcttaagcgactacaaaaggtctaacggctcgggcgataagggctgggtagtgaaattggaagccggacagcgcgttaccgtcaaaccgaccgtggtattgcgtaccgcctttgtaaccatccgcaaatataaagacaacggctgcggcgcggaaaccgccattttgggcatcaataccgccgacggcggcaagctgacgaagaaaagcgcgcgcccgattgtgccagaagccaatacggctgtcgcgcaatattccggccataagaaaaccgccaacggcaaatccatccctataggttgtatggaaaaagacgggggaaccgtctgcccgaacggatatgtttacgacaaaccggttaatgtgcgttatctggatgaaaagaaaacagacggattttcaacaacggcagacggcgatgcgggcggcagcggtatagaccccgccggcaagcgttccggcaaaaacaaccgctgcttctcccaaaaaggggtgcgcaccctgctgatgaacgatttggacagcttggacattaccggcccgacgtgtggtatgaaacgaatcagctggcgtgaagtcttctactga

SEQ ID NO: 50921 - DNA, 480 bp, Neisseria meningitidis; identical to SEQ ID NO: 43074

SEQ ID NO: 50922 - DNA, 759 bp, Neisseria meningitidis
atgaaaaaagtcagcgtattgattgttgccaaaaacgaagcaaaccacattcgggaatgtattgaaagttgccgtttcgataaagaagttatcgttatcgacgaccacagcaccgacaatactgccgaaattgccgagggtttgggtgcaaaagtcttccaacggcatttgaacggggatttcggagcgcaaaaaacatttgccatagaacaggcaggcggagaatgggttttcctgattgatgcagacgaacgctgcacgccggaactatctgatgaaatctcaaaaattgtccaaaccggcgattatgccgcctattttgtcgagcgccgcaaccttttccccaaccatcccgccacacacggcgcgatgcgtcccgacagcgtatgccgtttgatgccgaagaaagacagttcggtgcaaggcaaagtacacgaaaccgtacaaaccccctaccccaaacgccgtctgaaacattttatgtaccattatacgtacgacaactgggaacaatatttcaacaagttcaacaaatatacttccatctcagccgagaaataccgagagcagggaaagcccgtgcgtttcgttagggacattatcctccgtccgatttggggttttttcaaaatttatattctgaacaaagggtttcttgatggaaaaatgggttggattatgtccgtcaaccacagctattacacgatgattaaatatgtcaaactatattatctgtacaaatctggcggaaaattttaa

SEQ ID NO: 50923 - DNA, 783 bp, Neisseria meningitidis
ttgcagaaagtcgtgcgccatatcgcgcaaaccgaaattatgccgcgttttttgaatacgccgtcccaccgcaaggaagacggttcgatgttgagcgaggcggacattgccgcgcagacggcttttgccgccgcgttgccgcttctgatcgattgcccgatgttgggcgaggaaatgtcgcgacaggaacagtcggctctgtgggaacaatattcgggggaaaaggggctgtggattgtcgatccgatagacgggacaaacaattttgtcaacgggctgccgcattttgccgtgtcggtggcgtttgtccgcaacgggcgcgccgaattgggcgtaatctacaatccggtcagcggcgaatgtttttatgctgaacgcgggcagggtgcgtttttaaacgggacacgcctgcctttgcgtctcgtggataagaagttgaatgaggcaatcgcgggcgtggaaatcaaatatctgcgttcgggcaaactgtccagccgcatgagtacgctcgcgccttttggaacgatacggagtatgggcagcagtacgttggactggtgttatctggcgtgcgggcgttatgatgtttatgtccacggcgggcagaagctgtgggattatgccgccggcgcgttgattttcgaggaggcgggcggcaggctgacgactttggaaggcgacgggttttggagtggtgaacacgtgttcaaacgctcggtcgtcgccgcgctcgaaccgaagctgtttgaacgctgggtcgagtggatacgggaaaaccaatag

SEQ ID NO: 50924 - DNA, 333 bp, Neisseria meningitidis; identical to SEQ ID NO: 36327

SEQ ID NO: 50925 - DNA, 1815 bp, Neisseria meningitidis
atgcccgctgaaacgaccgtatccggcgcgcaccccgccgccaaactgccgatttacatcctgccctgcttcctttggataggcatcgtcccctttaccttcgcgctcaaactgaaaccgtcgcccgacttttaccacgatgccgccgccgcagccggactgattgtcctgttgttcctcacggcaggaaaaaaactgtttgatgtcaaaatcccacctatcagcttccttctgtttgcaatggcggcgttttggtatcttcaggcacgcctgatgaacctgatttaccccggtatgaacgacatcgtctcttggattttcatcttgctcgccgtcagcgcgtgggcctgcaagagtttggtcgcacacttcggacaagaacgcatcgtgaccctgtttgcctggtcgctgcttatcggctccctgcttcaatcctgcatcgtcgtcatccagtttgccggctgggaagacacccccctgcttcaaaacatcatcgtttacagcgggcaaggcgtaatcggacacatcgggcagcgcaacaacctcggacactacctcatgtggggcatactcgccgccgcctacctcaacggacaacgaaaaatccccgccgccctcggcgcaatctgcctgattatgcagaccgccgttttaggtttggtcaattcgcgcaccatcttgacctacatagccgccatcgccctcatccttcccttctggtatttccgttcggacaaatccaacaggcggacgatgctcggcatagccgcagccgtattccttaccgcgctgttccaattttccatgaacaccattctggaaacctttactggcatccgctacgaaactgccgtcgaacgcgtcgccaacggcggtttcacagacttgccgcgccaaatcgaatggaataaagcccttgccgccttccagtccgccccgatattcgggcacggctggaacagttttgcccaacaaaccttcctcatcaatgccgaacagcacaacatacacgacaacctcctcagcaacttgttcacccattcccacaacatcgtcctccaactccttgcagagatgggaatcagcggcacgcttctggttgccgcaaccctgctgacgggcattgccgggctgctgaaacgccccctgacccctgcatcgcttttcctgatctgcacgcttgccgtcagtatgtgccacagtatgctcgaatatcctttgtggtatgtctatttcctcatccctttcggactgatgctcttcctgtcccccgcagaggcttcagacggcatcgccttcaaaaaagccgccaatctcggcatactgaccgcctccgccgccatattcgcaggattgttgcacttggactggacatacacccggctggttaacgccttttcccccgccactgacgacagtgccaaaaccctcaaccggaaaatcaacgagttgcgctatatttccgcaaacagtccgatgctgtccttttatgccgacttctccctcgtaaacttcgccctgccggaataccccgaaacccagacttgggcggaagaagcaaccctcaaatcactaaaataccgcccccactccgccacctaccgcatcgccctctacctgatgcggcaaggcaaagttgcagaagcaaaacaatggatgcgggcgacacagtcctattacccctacctgatgccccgatacgccgacgaaatccgcaaactgcccgtatgggcgccgctgctacccgaactgctcaaagactgcaaagccttcgccgccgcgcccggtcatccggaagcaaaaccctgcaaatga

SEQ ID NO: 50926 - DNA, 273 bp, Neisseria meningitidis; identical to SEQ ID NO: 43828

SEQ ID NO: 50927 - DNA, 468 bp, Neisseria meningitidis
gtgcgtttaatcagtgagtcaggcgaacagcttggtgtcgtttcagttcgtgaagctttggctatggccgaagggcaggatgtcgatttggtagagatttccccaactgctaaaccgcctgtgtgcaaactgatggattacggtaaatacaaataccaacaagccaagaagcgcgacgaagccaagaaaaaccaaaagcaggtgcaaatcaaggaaatcaaattccgtccgggtacggatgagggcgattatcaaatcaagatgcgcaacattaaccgcttccttgccgacggcgataaagtcaaagtgacattgcgttttcgcggccgtgaaatggctcaccagcaactcggcgcgcaacttttggaacgtgtaaaagaagatttggctgaagtggcgcaaatcgagtcctttcccaaaatggaaggtcgccaaatggtgatgatgattgcgccgaagaaaaaataa

SEQ ID NO: 50928 - DNA, 324 bp, Neisseria meningitidis
atggacaactgtattttctgcaaaatcgccgccaaagacattccggcgcaaaccgtctatgaagacggcgaagtggtttgtttcaaagacatcaaccccgccgctccggttcatctgctgctgattcccaaagtccatttcgattcgttggcacacgccgcgcccgaacatcagctccttttgggaaaaatgatgctgaaagttcccgaaatcgccaaagcggcaggactggcagacggcttcaaaaccctgatcaacaccggcaaaggcggcggacaagaggttttccacctgcatatacacatcatgggcacacccgtataa

SEQ ID NO: 50929 - DNA, 705 bp, Neisseria meningitidis
atgctgtctgaaggcatttcagacggcatttttcgcggggagatgctacaatttgcaccatttttaccgacacagggaaacaggattatgtttacaggcattgttcaaggcttgggaaaactgacggcaatccaccgcccgtcggaggcatttcagacttatgtcgtcgagcttccgcaagaggcggcggacaatctgcaacgcggcgcatcggtcgccaacaacggctgctgcctgacgattaccgaaatcgaaggaaaccgcgtcagtttcgatttaatggcggaaactttggcaaaaaccaatttagggctgctgaaggaaggcgattgcgtcaacatcgaacgggcggcgcgtttcggagacgaaatcggcggacacgtcatgagcggacacattatggcaaccgtgcctattgtcgaaatcgaacgggacgggtacaaccgcacggtttggttttcgctcccgcacgaactcaaaccctatatcctgaccaaagggttcgtcggcttggacggttgcagcctgaccataggcaaagtcgaagacagccgtttcaatgtccatttgattcccgaaactttggaacggacgctgttcggcagcagaaaggtcggcgacagaatcaacatcgaaatcgatccgaatacgcaggcaatcgtcgataccgtcgaacggctgatggcgcaaagatatgcaaagtga

SEQ ID NO: 50930 - DNA, 354 bp, Neisseria meningitidis
atgggaataaaaaatgaacaaataataatttgtaaaaaatataatacagaaatatatcctgtttccgatgtttcaaaaatcggtgttgctgaaaatgtcaaacagacaggcctgtatccgattaacgggttaaggcaccgtcccaaaggtgatactaacggttggtatatctgggccggtgaaaacttctcctatgataaaaattttttcctgcccttgcatactttccatttgcaaatatggcgacccgaaatcatcccctttttgacacttccgcccggttaccgttttttaattggggaaaacggttatgaagacgtatggtttgatgagttgctattaaatgataattga

SEQ ID NO: 50931 - DNA, 2139 bp, Neisseria meningitidis
atggcaaacgggaacatgaaactgtcgttggtgttaaccgcccgagatgacggagcgagacggctactggctgatactcaacgacaattagatcgtaccgcgaaatcgcgggcgcaacttgaacggcaaagccatacttatgcgttgaccggcatccgctcagaaaaacagattcaacgcgaaatcatgctgacacaggctgcgtttaaccgtttggcgcgcagcggcaaggcatcacaaaatgatttggcacgggcggcggtcgctacgcgtaaccgaattcgcgagctgaacgcggaactgaaacagggcacgggatttgcggacaagatgggaaaaatcggaagattcggtgcagctgcggtggctggtggcgcggcagcgtatacggtgcttaagcctgctatggacaacagaaagcagcttgatgagaacatcaaccgcgtgtccagacaggcatttattgaggataacagtaaatcggcagcgtggattgcaactgaaggtgcgcaacagatcaaggatttggcacttgaacttgtcgagaaaaatggcgggacccacgataaggctttggatttaatcagcggcatgatgaccaccagtctgaattttgcccaaaccaagaatgaagcgcaggcggcatatgcttttgcacttgcctcagaaggcagtggcgaggatacggcaaaactgattaaaaccctgaaagatggcggcatgagcggtaaagacctgcaactcgggcttgagcacgtcttgcaatcgggtttagacggcactttcgaggtgcgggatatggttcgggagctgccgagcctgctccctgccgcgcaacaggcagggatgaatggtgtcggcggtttggactacctgctctcactcttacaatctgcggcgaataaatcgggcagtcctgccgaagcggcgactaatgtgcaaaatcttttgagtaaaactctgtcgcctgacacgataggtcgtctgaagaagatggcaaatccgaatgacccgaagaaaggtgtcgattggataggctcggttgtgcaaggcaagcaaaacggcgaaaacgcagtgcaggtgttgtcccgtcttgccgatgccatgctagtaaaggataagcaataccaagattataagaaacgcgcggctgcaggcgataagacggcggcggagcaggcaaatatgcttaagggcgcgcttttggcgcaactgctgcctgatttgcaggcaaaacaaggtttgctggctgcaacggatatgacgcaaatccgtgaatatatggcttcgttggctggcgtaacgttggataacggaaaaattgctaagaacaacgaggcgcgaatgttgtcggcagcggcgcaacaagagcaacaggaatcgctggcaatgttgcgggaaagtctgacgggaacattggtggatatggaaacctcgtttaaaaagctggcagcggaataccctaatgccactctagccctgcaagcattgacgacggcggcaacagcggcgtctgccgcaatgttattaaccgccggtggcggtaaaggtgcaggctttctgaaagatgtaggtagtaaagcgttgggatggggtaaggcttccgcaggcggcgtggcagcaggtgccacagcggcaggcggtaagttgctgtcatggggaaaatctgccggtagcgggctcatgaataatccagcgttagttaaacgggcgggtttgttaggtatgttgctgtattccgagtctttgggtgacggcacattgccaaagggtttgcgtggtaccaagacaactcctgaaatgattaatcgtctgaaaaacaacggtatccgatttgaacctgcgccgaagcgggaacaggcgcggggtggtgtccctcagtatttggctgctccgtcagcgcagcctaccgataagatgttgtctccgttgttttcaactcagacggcggcgtatcaggcagcattggcgcaggatacggctgcagttacaacaggtttggcacaagtgcaaagtgcgatggcgtcggcaagtcagaccatcaataccaatgtgagcctgaatatcgacggacgtgttatcgcgaatgaggtatcgcggtatcaagtggccatgttcggccgtggagcgggtcaataa

SEQ ID NO: 50932 - DNA, 888 bp, Neisseria meningitidis; identical to SEQ ID NO: 42424

SEQ ID NO: 50933 - DNA, 1428 bp, Neisseria meningitidis
atgtttttctccgccctgaaatcctttctttcccgctacattaccgtatggcgcaatgtttgggcggtgcgcgaccagttggaaccgcccaaacgcacggcggaagaacaggcgtttttgcccgcgcatttggaactgaccgatacgccggtctctgccgctccgaaatgggcggcgcgttttattatggcgtttgcgcttttggctttgttgtggtcctggttcggcaaaatcgatattgtggcggcggcttcgggcaaaacggtgtcgggcgggcgcagcaaaaccatccagccgctggaaacggtggtggttaaggcggtacatgtgcgcgacgggcagcatgtgaaacagggagaaacgctggcggaactggaggctgtgggaacagacagcgatgtggtgcagtcggagcaggctttgcaggctgcccaattgtccaaactgcgttatgaagcggtattggcggcattggaaagccgtaccgtgccgcatatcgatatggcgcaagcacggtctttaggtctctccgatgccgatgtgcaatcggcgcaggtgttggcgcagcaccagtatcaggcatgggcggcgcaggatgcgcaattgcagtcggctttgcgcggccatcaggcggaattgcagtcggccaaggcgcaggagcagaagctggtttcggtgggggcgatcgagcagcagaaaacagcagactaccgccgtttgcgggccgacaattttatttcggaacatgcgtttttggagcagcagagcaaatcggtcagcaattggaacgatttggaaagtacgcgcggtcagatgaggcagattcaggcggccattgcacaggcggagcagaatcgggtgctgaatacgcagaacctgaaacgcgatacgctggatgcgctgcgccaggcaaacgaacagattgaccaataccgcggccaaacggataaggcaaagcagcggcagcagctgatgacaatacagtcgcctgcggacggcacggtgcaggaattggccacctatacggtgggcggtgtggtgcaggctgcccaaaaaatgatggtggttgcgcccgatgacgacaaaatggacgtggaagttttggtattgaacaaagacatcggttttgtggaacagggacaggatgcggtggtgaagattgagagttttccctatacgcgctacggttatctgacgggcaaggtgaaaagtgtcagccatgatgcggtaagccacgaacagttgggcttggtttatacggcggtggtgtcgctggacaaacataccttgaatattgacggcaaagcagtgaatctgacggcgggcatgaatgtcacggcggagattaaaacgggtaaacggcgggtgctggattatctgttaagcccgctgcaaaccaaattggacgaaagctttagggagcgatag

SEQ ID NO: 50934 - DNA, 567 bp, Neisseria meningitidis
atgttattgcaaaacatccttccattcgcccattgccttttgcggaaggcacttcccgaaggtggcaatgctttggacggcaccgccggcaacggacacgacacccttttcctcgcacaaaccgcaggcatccgggggaaagtgtgggcattcgacatccagccgcaagccctgagccgcactcgatgccgtctgaaagaagcgagatacgagaatgtgcaactcatcttagacggacacgaaaacctgaaacaatatgtttcagaaccactaaatgccgccattttcaactttggctggctgcccggcggagataaaagccttaccacccatacggaaaccagcattcccgccctttgcgcaaccctctccctgctgaaagaaggcggtatgcttattgccgtcctctatccgggacacgaaaacggcaaacaggaggcagaagcaatcgaacaatgggcaaaaaacctgcctcaagaacagtttgccgttttgcgttacggctttaccaaccggaaaaacaacccgccctatctgttggcatttgaaaagttacgtcaaaaataa

SEQ ID NO: 50935 - DNA, 1110 bp, Neisseria meningitidis
atgagcaactggaaacccgatattccctataacgatttaccacccctgccgccaaaacaggatattgaaagcaaaaccatcctgaaacgttgtatagccgcccgtgcatcccttgcccgtttaaagcaggcggcagaactgataccgaatcaagccatgctgattaacacccttcctgttatggaagcccgtgcaagttcggaaattgaaaacatcgtaaccacaacggacaagctgtttcaatccctgcaaatggatacggaacggcaagaccctgccacgaaagaagccctgcaataccgcaccgccctgtttgcaggctatgaatcactgacgagccgccctttatgcacacaaaccgccatcatggtctgcaacgccatcaagcacccctacgaaatggccatccgcaaaacaggcggcacagccctaaaaggaggcaacagcggaaatgttgtctataccccgcccgaaggagaagaaaccatacgcggcaagctggcaaattgggagcggtttattcacgaaagcggcgatttagacccgcttatcatcatggcggcggcacattaccaatttgaagccatccatccgtttacggacagcaacgggcggacggggcgcatattgaacagcctgctattgattgaaaaagggcttttggatttgcctattttgtatttgagccgctacatcatcgaaaacagggcggactattaccgcctgcttttaggcgtaaccgaacggcaggattgggaaagctggataatctacatcttagacggcgtagccgacaccgccgattggacggtatcgaaaatagatgcgatacgctgcctgttcgagcagacacgtcaacacatacggacacacgcacaaggaatctacacgcacgaactggtaaatcttctgtttgagcagccatatacacgcattgccaacctagaagcggcagggatagccaaacggcagacggcctctaagtacctgaaagagctttcagacataggtgtgctgcaagaaatcgtcatcggcagggacaaactattcattcatccgcgcctaatggaactattgcggggagagggcaacagctttacttcattctaa

SEQ ID NO: 50936 - DNA, 504 bp, Neisseria meningitidis
atgtcagacgaattcaaccgatttatcgaacgcgtcctctcccacgagggcggttacgccaaccatcccaaagaccccggcggcgaaaccaattggggcatcactaagcgcaccgcacaggcaaacggctacaacggctccatgcgtgccatgacgcgtgaacaggcaatcagcatttaccgtaaagcgttttgggagcgttaccgcgccgaccaaatgccggaagcggtcgcgttccaattttttgatgcctgcgtcaaccacggttacggcaatgccgcccgtatgctgcaacgcgccgcaggcgtaccggacgacggcgttatcggagcagtcagcctcaaagccatcaattcccttcccgaaaacgaccttttattgcggttcaacgccgagcgtctggtcttttataccaagctcggtacgttcacctctttcggcaagggctgggtacgccgtgtggcgcaaaacctgattcacgcgtctgcagataacactgattaa

SEQ ID NO: 50937 - DNA, 1980 bp, Neisseria meningitidis
atgtctcaactggcaaacgcaatccgcttcctctcggccgatgccgttcaaaaagccaattccggccaccccggcgcgcctatgggtatggcggaaatggcggaaacattgtggacgaaattcctcaatcacaaccccgccaaccccaaattctacaaccgcgaccgcttcgtcctctccaacggccacgcgtctatgctgttgtacagcctgctgcacctgaccggctacaatctgagcattgaagacttgaaaaacttccgccaactgcacagcaaaacccccggccatcccgaatacggctataccgacggcgtggaaaccacgaccggcccattggggcaagggattgccaacgcggtgggtatggcattggcagaaaaaatccttgccgccgaatttaataaagacggtttgaacatcgtcgatcattacacctacgtctttatgggcgacggctgtctgatggaaggcgtatcgcacgaagcctgttcgctcgccggcaccttgggcttgggcaaactgattgttttgtatgatgacaacaatatttccattgatggtaaagtggacggctggtttaccgaaaacatcccgcaacgctttgaaagctacggctggcacgtcgttcccaatgtaaacggtcatgacaccgccgccattcaagccgccatcgaagccgcacgtgccgaaaccggcaaaccgtccatcatctgctgcaaaaccttaatcggcaaaggcagtgccaacaaagaaggcagccacaaaacccacggcgcacctttgggcgcggacgaaatcgaagccacgcgcaaacatttgggctggacttaccccgcctttgaaatcccgcaagaaatttacgatgcgtggaatgccaaagaacaaggcgcgaaactggaagccgactggaacgaactgttcgcgcaatatcaagccaaatatcctgccgaagccgcagaatttgtgcgccgtatggataaaaaactgccggaaaactttgacgagtacgttcagacggcattgaaagaagtgtgcgccaaagccgaaaccatcgctacccgcaaagccagccaaaacagcatcgaaatcttggcaaaagagctgcccgaactggtgggcggttcggccgacctgaccccgtccaacctgaccgactggtcaaacagcgtctccgttacccgcgacaaaggcggcaactacatccactacggcgtgcgcgagttcggtatgggtgcgattatgaacggtcttgccctgcacggcggcgtaaaaccctttggcgcgaccttcctgatgtttagcgaatacgaacgcaacgccttgcgcatggcggcactgatgaaaatcaaccctgtatttgtgttcacccacgattccatcggtttgggcgaagacggcccgacccaccagccgattgagcaaaccgccaccctgcgcctgattccgaacatggacgtatggcgtccgtgcgacaccgccgaatctctggtggcttgggcagaagccgtcaaagccgccgatcatccgtcctgcctgattttcagccgtcaaaacctgaaattccaagcgcgcagcgaacaacaactgaacgacatcaaacgcggcggctacatcatcagcgaagcccaaggcaacgcgcaagccgtcatcattgccaccggttccgaagtcgagctggctttggaagcgcaaaaagccctcgccgcgcaaaacatcgccgtacgcgtcgtttccatgccgtccaccaacgtattcgaccgccaagacgccgcctatcaagccaccgtcctgcccgaaggtctgccgcgcatcgccgtagaagccggacacgccgacggctggtacaaatacgtcggtttgaacggcgcagtcgtcggcatcaaccgcttcggcgaatccgcccctgccgacttactcttcaaagaattcggctttaccgtggacaatgtggtcgatacagtgaaatccgtgctgtaa

SEQ ID NO: 50938 - DNA, 339 bp, Neisseria meningitidis; identical to SEQ ID NO: 42934

SEQ ID NO: 50939 - DNA, 174 bp, Neisseria meningitidis
atgcgaatccgccgtgcgctgaaattcgaccagttgatactcgaatttcctgagcgcggggacggcgcatgggtacacatcggtttccgacgcaacagcccgcaacgcaaccagatactgaccgcaaccaagaaaaacggcaaaaccgtgtatctgcccgggctgcatccttga

SEQ ID NO: 50940 - DNA, 747 bp, Neisseria meningitidis
atggaaaccccgaccaacaccccgcaacgctccctgcgtcaaaacagtatctacctgctgcccaattcctttactatcgccgcgctgttttccgcgttttacgcaatcacccaatccatgcacggacgttatgaaaccgccgctattgccgtattcatttccatgcttttggacggtatggacgggcgcgtggcgcggctgaccaacagccaaagcgcgttcggggagcagctcgacagccttgccgacatggtcagcttcggcgttgcccccgcgcttattgcctacaaatggcagctttggcagttcggcaaaatcggttattccgtcgccttcatctactgcgcctgcgcagccctgcgcctcgccctgttcaacacgctcatcggcaaggtggacaaacgctggtttatcggcgtgcccagtccgactgccgccgcgctgattgtcgggctgatttgggtcaaccacagcgtcgaaaaattccccgccgtccactggtgggcattgggcatcacactgtttgccggcctgtcaatgattgtccaaatccctttttggagttttaaagaaatcaacatccgcagacaagtcccctttgtcggaatgctgcttgccgtcttactgctgcttctggtcacttgggaaccgtcgctcgtcctcttcctgttctttctcggatacagcctgtccggctacattatggcggcacgccgattctggaaaaaatacagaaaggcggattaa

SEQ ID NO: 50941 - DNA, 435 bp, Neisseria meningitidis
atgcagatgccgtctgaaaataaccccctatcaatggagtatcaaaccatgagcagcaacatcccggcagaactgaaatacgttgccagccacgaatggctgcgccttgaagaagacggtatcatcaccgtcggtattacccaccacgcgcaagagctgttgggcgacatcgtgtttgtcgagctgcctgaagtcggcgcaaaccttgccgccgaagaacaagccggtgtggttgagtctgtaaaagccgcgtccgacgtgtacgcaccgattgcaggtgaagtcgttgccgtcaacgaagatttgccaagcgctccggaaactgccaacagcgatccttacggtgcaggctggttcttcaaactcaaaccggcaaacgttgccgattacgacgttctgctgactgccgaacaatacgcgggcgaagtggattaa

SEQ ID NO: 50942 - DNA, 1458 bp, Neisseria meningitidis
atgcacaaaatcctgcccatcgcccacgtcctctcccgactgggtatgctgttttcctttatcctgctgatacccgccgccctctcctacgccttttcggacggcgcgtacaccgccttcgccaccaccgcgaccgttaccctttccggctcgtacatcgtccggctcgccaccctccggttcaggcgcgaactgcgcccgcgcgacggcttcaccctcgtcctgatgttgtggctggcgtttgccgctatggcggcgatgccgatgtacctgtatttcccgaatatgggctttaccgacgcattttttgaatcgatgtcgggactgaccaccaccggcgcgaccgtcatcccccacgtcgacgggctcgccccctccgtcaacttttggcggcatatgctcaactggctgggcgggatgggcatcatcgtccttgccgtcgccatcctgcctatgctcggcgtaggcggcacgcagttattcaaagccgaaatccccggcattgacaaagaaagcaaaatgtcgccgcgcatttcccaagtggcgaaaaaactttggttcggctacaccctgatcaccatcctcgcggcagcctgcctgcattttgccgggatgggctggttcgatgccgtctgtcacgcgatggcgaccctctcgctgggcgggttttccacccacgatgccagcatagcttattacaactcccccctcatcgaagcggtcatcatcgttttcaccattgtcggcggcatcaattttgccaaccatttcgccgccctcaacagccgcagcctcaaaacctattggaaagacgaagaatgccggacgatgctgctgctgctctccggcagcatccttgccgccgccctgtacctgtggcacaccggctattacgccggttttaccgaatccctgcgctacaccgccttcaacttcgtctccatcggattggcaaacgggctggccaacaccgacttcgcacaatggccgctcctgatttccctgtggatgtttttcctcgccaacatcctcgccaactccggctcgaccggcggcggcatcaaaaccatacgcgccctcgtcctgttcaaattcagcctgcgcgaaatgatggtgctgctgcaccccaaagccgtccgcaccgtcaaaatcagcggcaaggccatacccgaccgcctcgcgctgaccgttatgtccttcatcttcatctactttatgaccgtcgtcctcttcagcttcctgctgatggcgagcggtatggaatttaccaccgccttcaccgccgtcatcgcctgcatcaccaacgccggccccggcctgggcgaagtcgggcccgccggcaattacgccggtttggacgtgatgcagaaatggatctgcgttaccgccatgctcttgggcaggctggaaatcttcaccgtcttcatcctcttcacccccgcctactggaagaaataa

SEQ ID NO: 50943 - DNA, 240 bp, Neisseria meningitidis; identical to SEQ ID NO: 43117

SEQ ID NO: 50944 - DNA, 582 bp, Neisseria meningitidis
atgaacctgcgcgatgatttgcaactgatttacgaccggatacccgaaggcagccgcgtcttggacttgggctgcggcgacggcgaactgcttgccgccttggtcgaacacaaaaaatgcagcggctacggcatcgaaatcgacaccgacagcgtgattgccgcgatgtcgcgcggcgtgaatgttatccaagccgatttggaagaaggtttaaccgcattcaacgatcaaagttttgatgtgattgtgttgagccaaaccatccaagcgatgcagaataccgaaaaaatcctgcgctgcctgatgcgcgttgccaaacaggcgattgtcagcttcccgaatttcggctactggcgcaaccgcgtccaaatcgcactcggcggacatatgccggtttccgaacgtatgccctaccattggtacgacacgcccaatatccattggtgcacgctcaaagactttgatttattgtgcgccaaaaacaacatccgcatcctcgagcgcgccgtgatgacgggcaacagacaggtcaaacatttccccaaccttttgggcagtcttgcattttaccgcgtcgggtaa

SEQ ID NO: 50945 - DNA, 297 bp, Neisseria meningitidis; identical to SEQ ID NO: 39905

SEQ ID NO: 50946 - DNA, 438 bp, Neisseria meningitidis
atggacaaaaccgtttacctttacaccgacggcgcgtgcaaaggcaatcccggcgcgggcggctggggcgtgttgatgcgctacggcagccgcgaaaaagaacttttcggcggcgaagcgcaaaccaccaacaaccgcatggagctgaccgccgtcatcgaaggactgaaatcgctcaaacgccgctgcaccgtcatcatctgcaccgactcgcaatacgtcaaaaacggcatggaaaactggatacacggttggaagcgcaacggctggaaaaccgccgccaaacagcccgtcaaaaacgacgacttgtggaaagaactcgacgttctggttgggcagcaccaagtcagctggacttgggttaaaggacacgcgggacacgcggaaaacgaacgcgccgacgatttggcaaaccgtggcgcagcgcagttttcctga

SEQ ID NO: 50947 - DNA, 366 bp, Neisseria meningitidis
ttggactaccgcttcggaaggcagtaccgcttgttaaaaacggatgatttttcatccgtttttgcattcagaaaccgccgcagccgcgacctgctgcaagtttcgcgctcaaacggcaacgggctgggccatccccgcatcggtctggtggtcggcaaaaaaaccgccaaacgcgccaacgaacgaaattatatgaagcgcgttatccgcgactggtttagattgaacaaaaaccggctgccgccgcaggatttcgtcgtgcgcgtccaccgtaaattcgacagggctaccgcaaaacaggcaagggcggaactggcacaactcatgttcggcaaccccgcaaccggatgcaggaaacaggcatga

SEQ ID NO: 50948 - DNA, 1452 bp, Neisseria meningitidis
atgccgtctgaacgcccacgggttttcagacggcatcaggacttttttatggatactacattgaaaaccaccttgacttctgttgcagcagccttcgcattatccgcctgcaccatgattccccaatacgagcagcccaaagtcgaagttgccgaaacgttcaaaaacgataccgccgacagcggcatccgtgcggtcgatttaggttggcatgactattttgccgacccgcgcctgcaaaagctgatcgacatcgcactcgagcgcaataccagtttgcgtaccgccgcattgaacagcgaaatctaccgcaaacaatacatgattgagcgcaacaacctcctgcccacgcttgccgccaatgcgaacgactcgcgccaaggcagcttgagcggcggcaatgtaagcagcagctacaaagtcggactgggtgcggcatcttacgaactcgatctgttcgggcgtgtacgcagcagcagcgaggcggcactgcaaggctatttcgccagcaccgccaaccgcgatgcggcacatttgagcctgattgccaccgttgccaaagcctatttcaacgaacgttacgccgaagaagcgatgtctttggcgcaacgtgttttgaaaacgcgcgaggaaacctacaagctgtccgaattacgttacaaggcaggcgtgatttccgccgtcgccctacgtcagcaggaagccctgatcgaatctgccaaagccgattatgcccatgccgcgcgcagccgcgaacaggcgcgcaatgccttggcaaccttgattaaccaaccgatacccgaagacctgcctgccggtttgccgctggacaagcagttttttgttgaaaaactgccggccggtttgagttccgaagtattgctcgaccgtcccgatatccgtgctgccgaacacgcgctcaaacaggcaaacgccaatatcggtgcggcacgcgccgcctttttcccatccatccgcctgaccggaaccgtcggtacgggttctgccgaattgggtgggttgttcaaaagcggcacgggcgtttggtcgttcgcgccgtctattaccctgccgatttttacctggggtacgaacaaggcgaaccttgatgtagccaagctgcgccaacaggcacaaatcgttgcctatgaatccgccgtccaatccgcatttcaagacgtggcaaacgcattggcggcgcgcgagcagctggataaagcctatgacgctttaagcaaacaaagccgcgcctctaaagaagcgttgcgcttggtcggcctgcgttacaagcacggcgtatccggcgcgctcgatttgctcgatgcggaacgcagcagctatgcggcggagggtgcggctttgtcggcacaactgacccgcgccgaaaaccttgccgatttgtacaaggcactcggcggcggattgaaacgggatacccaaaccgacaaataa

SEQ ID NO: 50949 - DNA, 447 bp, Neisseria meningitidis
atgcagcacgaagaaggcaaccgccaacgccctcaaggcgaactgctcctgcgtaccgtcgctatgccgcgcgataccaatcccaaccaagacattttcggcggctggattatgtcgcagatggatttgggcggcggcatattggcggcggaaatcgcgcggggacgcatcgttaccgtcgccgttcaggaaatgaacttcatccgcccggtcaaggtcggcaacgtcgtctgctgctacgggcattgcgtccgcgtgggcaacacttccctccagcttaaagtcgacgtctgggtgaaaactttgatgaacgattgcgttaccgaagaccgctacctcgtaaccgaagccgtgttcacttatgttgccatcgatgcggaaggcaatccgcgcccgattccgaaagaaggcaaccccaaattggcgggcttattgcctactccgtaa

SEQ ID NO: 50950 - DNA, 378 bp, Neisseria meningitidis; identical to SEQ ID NO: 42275

SEQ ID NO: 50951 - DNA, 1215 bp, Neisseria meningitidis
atgaccgtcaaaacccccgtttacctcgactacgccgccaccacccccgttgacaaacgcgttgccgaaaaaatgattccctatctgaccgaaaccttcggcaacccagcctccaacagccacagcttcggctgggaagcagaagaagctgtagaaaaagcacgtgcagacattgccgccctgattaacgccgactctaaagaaatcgttttcaccagcggcgcgaccgagtccgacaacctcgccatcaaaggcgcggcaaacttctacaaaaccaaaggcaaacacctcatcaccgtcaaaaccgaacacaaagccgtactcgacaccatgcgcgaactcgaacgccaaggttacgaagtaacttatctggacgtacaagaaaacggtttggttgatttagacgtactgaaagccgccatccgcgaagacaccatcctcgtttccgtaatgtgggtaaacaacgaaatcggcgtggttcaagatattcccgccatcggcgaaatctgccgcgaacgcaaaatcattttccacgtcgatgccgcccaagcctgcggcaaagtacctgttgacgttgaagccgccaaagttgatttgttgtctatgtccggccacaaagtatacggccctaaaggcatcggcgcgctgtacgtccgccgcaaaccgcgcgtccgcctcgaagcccaaatgcacggtggcggccacgaacgcggcttccgcagcggcacattaccgacccaccaaatcgtcggtatgggcgaagccttccgcatcgccaaagaagaactcgaacaagatatggcgcactaccgcaaactgcgcgacatcttcctcaaaggcatcgaaggcatcgaagaagtctatatcaacggcgacctcgaacaccgcgccccgaacaacctgaacgtcagcttcaacttcgtcgaaggcgaaagcctgattatggcagtgaaagaactcgccgtatccagcggctccgcctgcacctccgcctcgctcgaacccagctacgtcctgcgcgcattgggcagaaatgacgaattggcgcactcgtccctgcgcatcaccttcggtcgcatgaccactgaagaagaagtgcaatttgccgccgaactgattaaatccaaaatcggcaaactgcgcgaactgtcgccgttgtgggaaatgttcaaagacgggattgatttgaactcgattgaatgggcggcgcattaa

SEQ ID NO: 50952 - DNA, 876 bp, Neisseria meningitidis
atgtttcagaaacatttgcagaaagcctccgacagcgtcgtcggagggacattatacgtggttgccacgcccatcggcaatttggcggacattaccctgcgcgctttggcggtattgcaaaaggcggacatcatctgtgccgaagacacgcgcgttaccgcgcagcttttgagcgcgtacggcattcagggcaaactcgtcagcgtgcgcgaacacaacgaacggcagatggcggacaagattgtcggctatctttcagacggcatggttgtggcacaggtttccgatgcgggtacgccggccgtgtgcgacccgggcgcgaaactcgcccgccgcgtgcgtgaggtcgggtttaaagttgtccctgttgtcggcgcaagcgcggtgatggcggctttgagtgtggctggtgtggcgggatccgatttttatttcaacggttttgtaccgccgaaatcgggcgaacgtaggaaattgtttgccaaatgggtgcgggcggcgtttcctatcgttatgtttgaaacgccgcaccgcatcggggcgacgcttgccgatatggcggaactgttccccgaacgccgtctgatgctggcgcgcgaaatcacgaaaacgtttgaaacgttcttaagcggcacggttggggaaattcagacggcattggctgccgacggcaaccaatcgcgcggcgagatggtgttgatactgtatccggcgcaggatgaaaaacacgaaggcttgtccgagtccgcgcaaaatgtgatgaaaatccttgctgccgaactgccgaccaaacaggctgccgagcttgccgccaagattacaggtgagggcaaaaaggctttgtacgatttggcagtgtcgtggaaaaacaaatag

SEQ ID NO: 50953 - DNA, 432 bp, Neisseria meningitidis; identical to SEQ ID NO: 38610

SEQ ID NO: 50954 - DNA, 621 bp, Neisseria meningitidis; identical to SEQ ID NO: 43359

SEQ ID NO: 50955 - DNA, 453 bp, Neisseria meningitidis
atggcaaaaccgctcaaataccccgtctccgcactggtcgtcctttatagcggggacggcggcatcctgctcatcgaacgcacgcatccgaaaggattttggcagtcggtaaccggcagcctcgaaccaggcgaaaccgtcgcccaaacggcaaggcgcgaagtttgggaagaaaccggcatcctgctggcggacgggcagcttcaagactggcacgacagcacggtttacgaaatctaccaccactggcggcaccgctatccaaaaggcgtgtttgaaaaccgcgaacacctcttctctgccgaaatcccgcgcgatacgcccgtcgtcctgcaacccgaggaacacgtctcctacggctggttcggcttggaagaagcggcggaaaaagtgttttccccgtccaacaggcgcgcaattttggaactgggcaggtttttgggcaaacggtaa

SEQ ID NO: 50956 - DNA, 540 bp, Neisseria meningitidis; identical to SEQ ID NO: 36581

SEQ ID NO: 50957 - DNA, 534 bp, Neisseria meningitidis
atgcccgtatttgccagcctgccgccgcaatatatggacacactgccagaatgcccgattaccaacaccgcctccctgctgccgcacagcgggcgtatggttctgatagaccgcattacccgatacggcgatgattttgtcgaagcaggggcacaggtaagccccaatcacatccttttacttgacgacaaactgccctacacggcatttatcgaactgatggcacaggctgtcggcgcgtatgccggtatccaagcccgaaaaaacgcacggtcggtccggctcggcttcctgctcggcacgcgcaaacttgaaatcttcgcccaatccgtcccaatcggcacgcatctgctggcaacggcgcatatgtctattcaggatgccgggggtatgggcgtgtttgactgcgaactgcgttggacagacgcgccggaaacttcgtccgaaacactcccttcagacggcattttggtgcgcgcctcactcaacgtgtacagccccgaacaccctgccggaacaaccgatgccgtctga

SEQ ID NO: 50958 - DNA, 330 bp, Neisseria meningitidis; identical to SEQ ID NO: 43453

SEQ ID NO: 50959 - DNA, 627 bp, Neisseria meningitidis
atggctgatatgaaacgcttgaaacatttgatgttttcaccctttatcgacaacaacccgattgccttgcaggttttgggtatttgttcggctttggcggttaccaccaaacttcagacggccatcgtgatgggtatttccgtagctttggtaaccggtttttccagcttcttcatttcgctggtacgcaactacatccccaacagcatccgtattatcgtgcaaatggcgattatcgcgtcgctggttacgctggtcgaccaactcttgcaggcatttgcctacgaattgtccaaacagctttccgtattcgtcggtctgattattaccaactgtatcgtgatgggccgcgccgaagcatttgcgatgaaagagccgccgctggaaagcctgatcgacggcatcggcaacggcgcgggctacgggatgatgctgcttgtcgtcgccaccgtccgcgaactgatcggctcgggcaaactcttgggctacaccgttttccaaaccgtgcaggacggcggctggtatcagaccaacggcttgttcctgctcgcccccagcgcgttcttcatcatcggttttttgatttggggactgcgtacctggaaacccgaacaggcggaggaataa

SEQ ID NO: 50960 - DNA, 582 bp, Neisseria meningitidis
atgaagctgaaaaccctgttattacctttcgcctctttggcattgtgcgctggtgcttttgccgccccgcccagcgacgcgtcgctggcgcgttggctggatacgcagaattttgaccgggatatagaaaaaaatatgattgagggctttaatgccggatttaaaccgtatgcggacaaagcctttgccgaaatgccggaagcgaaaaaagatcaggcggcagaagcctttaaccgttatcgtgagaatgttttgaaagatttgattacgcccgaagtgaaacaggctgtccgcaatactttattgaagaatgcccgtgagatatacacgcaagaagaaattgacggcatgattgccttttacggttcgcctgtcggtcagtccgtcgttgccaaaaatccgcgcttaatcaagaaatcgatgagtgaaatagcagtatcttggactgcattgtcagggaaaatcgcgcgacatcatctgcccgcgtttacggaagagttgcggcgcatcatctgcggcggtaaaaatcccgatgcgggctgtaaacaagccggacaggttgggaaaaggcatcagaaataa

SEQ ID NO: 50961 - DNA, 1266 bp, Neisseria meningitidis; identical to SEQ ID NO: 41052

SEQ ID NO: 50962 - DNA, 198 bp, Neisseria meningitidis; identical to SEQ ID NO: 43350

SEQ ID NO: 50963 - DNA, 798 bp, Neisseria meningitidis; identical to SEQ ID NO: 43358

SEQ ID NO: 50964 - DNA, 1113 bp, Neisseria meningitidis; identical to SEQ ID NO: 43071

SEQ ID NO: 50965 - DNA, 204 bp, Neisseria meningitidis; identical to SEQ ID NO: 36264

SEQ ID NO: 50966 - DNA, 693 bp, Neisseria meningitidis
atgaaacgcttcacctatactctttccgacggtttgtgcatcgaaatcgaactcaaacgcagtgccaagaaaaatctgattctgcgccccgtcaatatgcagacggtcagcatcaacgtcccacccttttttcaagaccacgcgttagcaaactggctggcggcaaacgaaacgattttgcggaacacgcttgccaaaacgcccgtgcatcctgtttcccacccaaacttacccgagtggatttggtatcggggaataaagaccaagctggatacccacagccaaagccatatccgtatcacgtcgtctgaaatcctgcttccccgaaaagaaaccgccgcacaaatcgaccacctgcgccgcctgttgaacgaacgcgcccgcgaatacctgctgccccgccttgaaaaacacgcagccgaaacaggactgacgcccaccgccacagacctgagcaacgccaaaaccttttggggcgtatgccgcccgcacaccggcatccgcctcaactggcggctgatcggcgcgcccaagtacgttgccgactatgtctgcatccacgaactctgccacctccgccaccccgaccacagtccgcgcttttggcatttggtgaacacgctgacgccgcataccgacaatgctaaaagttggctgaaggcgcacgggcgggaattgtttgtgctggggtaa

SEQ ID NO: 50967 - DNA, 162 bp, Neisseria meningitidis
atggcatattttggcggctttgttcgcgctttgttcgatcttggcgtgtttgaacgcggcagcgtgaaaggaagggggaaatggttttcccgcgtttggtggcggtcggaggtgctgtgcctgatgtgcggcggcatattttcggtgaaattgattttatag

SEQ ID NO: 50968 - DNA, 510 bp, Neisseria meningitidis
atgacagacactcaaaaccgggtagccatgggctacatcaaaggcgtattcggcataaaaggctggttgaaaattgccgccaacaccgaatattccgacagccttttggactaccccgagtggcatttggtcaaggacggcaaaaccatcagcgttacccttgaagccggaaaagtcgtcaacggcgaactccaagtcaaattcgaaggcataaacgaccgcgacttggcattctcattgcgcggttacaccatcgaaataccccgtgaagcattcgccccgacagaagaagacgaatactactggacagacttggtcggcatgaccgtcgtcaacaaagaccataccgttttaggcaaggtaagcaacctgatggaaaccggcgcaaacgacgtattgatgattgacggagaacacgggcagattctgattccgttcgtttcccaatatatcgaaaccgtcgataccggcagcaagaccattactgccgactggggtttggactactga

SEQ ID NO: 50969 - DNA, 1449 bp, Neisseria meningitidis
atgaaaggcgatattggcgtaatcggtttggcggttatggggcaaaacctgattttgaatatgaacgattgcggatttaaggttgtcgcctacaaccgaacaatcggtaaggtggacgaatttttaaacggcgcggctaagggaacggatattgtcggcgcgtattccctgcaagacttggtcgataagctggcaaaaccgagaaaaatcatgatgatggttcgcgcaggttcggtcgtcgacgactttatcgaacaactgctgcccctgttggacgaggaagacatcattatcgacggcggcaatgccaattaccccgacacgacacggcggacacattaccttgccgaaaaagggattttgtttgtcggcgcgggcgtatctggcggcgaagaaggcgcgcggcacggcccgtccattatgccgggcggggataagcgcgcttgggaagccgtcaagccgatttttcaggcgattgccgccaaaacgccgcagggcgaaccgtgttgtgactgggtcggcagggacggcgcggggcattttgtcaaaatggtgcataacggcatcgaatacggcgatatgcagttgatttgcgaagcgtaccagtttatgaaagacggcttggggctgtcttacgacgaaatgcaccgcgtgtttgccgcgtggaacaaaaccgagctggattcttatctgattgaaatcacagcggcaattttgggctataaggacgaaggcggcgaaccgctggtcgagaaaatcctcgatatggcagggcaaaaaggcacgggcaagtggacgggcatcaatgctttggatttgggtattccgctgacgctgatttccgaagccgtattcgcccgctgcgtttcgtcgttcaaagaacagcgcgtgcagaccggcaagctgttcgcccgaaccgttacgcccgtcgaaggcggcaaacaagaatgggtcgaggcgttgagacaggccctgcttgcctccaaaatcatttcctacgcacaaggcttcatgctgatccgcgaagcgggcgaaagttacggctgggatttggactacggcaacactgcgctgctgtggcgcgaggggtgcatcatccgcagcgcgtttttgggcaatatccgcgacgcgtatgaaaacaatcccgatttggtgttcttgggtggggatccgtatttcaaaaatattttggaaaactgcctgccggcatggcgcaaggtggttgccaaggcggtcgaatgcggcatccctatgccctgcatggcttcggcgattacgttcttggacggctacacgaccgaacgtctgcctgccaacctcttgcaggcacagcgcgactacttcggcgcgcacacgtacgaacgcaccgacaaaccgcgcggcgagtttttccataccaactggacgggcaagggcggagataccgcttcgacaacctacgatatttga

SEQ ID NO: 50970 - DNA, 720 bp, Neisseria meningitidis
atgaaagacgatgttttgaaacagcaggcacacgcggcgatacagaagagactgggctacgcgttccgcgatatttcgcttttgcggcaggctttgacgcacaggagccatcatgcgaagcacaacgagcggttcgagtttgtcggtgattcgattttgaattatacggtggcgcggatgctgtttgacacgtttccgaagttgaccgagggcgagttgtcgcggttgcgggcaagtctggtcaatgagggcgtgctggcggaaatggcggcggaaatgaatgtcggcgacggtctgtacttgggggcgggcgagttgaagagcggcggcttcagacggccttcgatactggcggacgcgatggaggcgatgtttgcggcggtcagcttcgatgccgatttcaacacggcggaaaaggtggtgcgccatttgtttgccgaccgcgtccggtgtgccgatttccaaaatcaggcaaaagacggcaaaactgctttgcaggaggcgttgcaggcacgccgctttgctttgccgaaataccgtatcgaagagcaaatcggccatgccaacgacagtatgtttgtggtttcctgcgatttgggcgaactgggtttcgtgtgccgtgccaaagggacgagccgcaaggcggcggaacaggaggcggcgaaagaggctttgaaatggctggaagagaagctgccgctgaagaagaaaaagaaatga

SEQ ID NO: 50971 - DNA, 483 bp, Neisseria meningitidis
atgacacaacaacgccaactgccttcgcacgaactcattatgtccgaactgatgatgccggacaccgccaatttcagcggcaacgtacacggcggcgaactcctgctcctgctcgaccaggttgcctattcctgcgccagccgttacagcggcaattattgcgttaccctgtcggttgacaaagtcctgtttaaagaacccatccacatcggcgatttggttaccttttacgccgctgtcaactacacgggacgcacctcgatggaaatcggcatccgtgtcgaagcacaaaacatccgcaccggcgaaatccgccacaccaacagctgctacttcacgatggttgcggtcaaagacggcaaacccgtccctgtccctccgctggaaatcctgaccgaccgccaacgctgccgctacgaaaaagccaaaaaacgcagagacatcagcctgcaagcctctgaagacatgtcctgcggctgctga

SEQ ID NO: 50972 - DNA, 234 bp, Neisseria meningitidis; identical to SEQ ID NO: 42120

SEQ ID NO: 50973 - DNA, 609 bp, Neisseria meningitidis
atgaaacccaaaccgcacaccgtccgcaccctgattgccgccattttcagccttgcccttagcggctgcgtcagcgcagtaatcggaagcgccgccgtcggcgcgaaatccgccgtcgaccgccgaaccaccggcgcgcaaaccgacgacaacgttatggcgttgcgtatcgaaaccaccgcccgctcctatctgcgccaaaacaaccaaaccaaaggctacacgccccaaatctccgttgtcggctacaaccgccacctgctgctgctcggacaagtcgccaccgaaggcgagaaacagttcgtcggtcagattgcacgttccgaacaggccgccgaaggcgtgtacaactacattaccgtcgcctccctgccgcgcactgccggcgacatcgccggcgacacttggaacacatccaaagtccgcgccacgctgttgggcatcagccccgccacacaggcgcgcgtcaaaatcgttacctacggcaacgtaacctacgttatgggcatcctcacccccgaagaacaggcgcagattacccaaaaagtcagcaccaccgtcggcgtacaaaaagtcatcaccctctaccaaaactacgtccaacgctga

SEQ ID NO: 50974 - DNA, 789 bp, Neisseria meningitidis; identical to SEQ ID NO: 36434

SEQ ID NO: 50975 - DNA, 603 bp, Neisseria meningitidis
atgttcaacatatcggctgttgccgtttcctatctgatcggctcactttctttcgccgtcatcgtgtccaaatattacggcatggacgacccgcgcacctacggatcgggcaatccgggggcaaccaatgttttacgcagcggcaaaaaaaaggcggccgcgctgacgctcttgggcgatgccgccaaaggtttagttgccgttttgcttgcacgcgtgcttcaagaaccgctcggtttatccgacagcgcaatcgcggccgtcgcactcgccgcgctggtcgggcatatgtggccggtgtttttcggatttaaaggcggcaaaggcgtggcaacggcattgggcgtgcttctggcactctctcctgcaactgccttggtctgcgcgttgatttggcttgtgatggcattcggcttcaaagtatcctcccttgccgcattaaccgccacaatcgccgccccccttgccgcactgttttttatgccgcatacttcttggattttcgcaaccctcgcaatcgccatattggtgttgctccgccataagagcaacatcctcaacctgattaaaggcaaagaaagcaaaatcggtgaaaaacgctga

SEQ ID NO: 50976 - DNA, 963 bp, Neisseria meningitidis
atgcaagcacggctgctgatacctattcttttttcagtttttattttatccgcctgcgggacactgacaggtattccatcgcatggcggaggtaaacgctttgcggtcgaacaagaacttgtggccgcttctgccagagctgccgttaaagacatggatttacaggcattacacggacgaaaagttgcattgtacattgcaactatgggcgaccaaggttcaggcagtttgacagggggtcgctactccattgatgcactgattcgtggcgaatacataaacagccctgccgtccgtaccgattacacctatccacgttacgaaaccaccgctgaaacaacatcaggcggtttgacaggtttaaccacttctttatctacacttaatgcccctgcactctcgcgcacccaatcagacggtagcggaagtaaaagcagtctgggcttaaatattggcgggatgggggattatcgaaatgaaaccttgacgactaacccgcgcgacactgcctttctttcccacttggtacagaccgtatttttcctgcgcggcatagacgttgtttctcctgccaatgccgatacggatgtgtttattaacatcgacgtattcggaacgatacgcaacagaaccgaaatgcacctatacaatgccgaaacactgaaagcccaaacaaaactggaatatttcgcagtagacagaaccaataaaaaattgctcatcaaaccaaaaaccaatgcgtttgaagctgcctataaagaaaattacgcattgtggatgggaccgtataaagtaagcaaaggaattaaaccgacagaaggattaatggtcgatttctccgatatccaaccatacggcaatcatatgggtaactccgccccatccgtagagactgataacagtcatgaggggtatggatacagcgatgaagtagtgcgacaacatagacaagggcaaccttga

SEQ ID NO: 50977 - DNA, 870 bp, Neisseria meningitidis; identical to SEQ ID NO: 43036

SEQ ID NO: 50978 - DNA, 600 bp, Neisseria meningitidis
  misc_feature 4, 5, 6, 7, 8: 'n' is a, c, g or t
gtgnnnnnacagcgtaccgtcggcatcggcgtcgtctcccccgagcgtgccatgcaaaaaggctttaccggcgtgatgttgcgcggttcgggcgtggaatgggacgtgcgtaagacacagccttacgaagtgtacgacaaaatggatttcgacatccctgtcggcgtgaacggcgactgctacgaccgctacctctgccgtatggaagaaatgcgtcaatccgtacgcatcatcaaacaatgttccgagtggttgcgtgtcaatccgggtccggtcattaccacaaaccacaaattcgctccgcccaaacgtaccgaaatgaaaacaggtatggaagacctgattcaccatttcaaactctttaccgagggtatgcacgttcccgagggtgagacctacaccgctgtcgaacatccgaaaggcgagttcggcgtttacatcatttcagacggcgcaaataaaccctaccgcctgaaaatccgcgcacccggcttcgcccacctgcaaggcatggacgaaatggcaaaaggccacatgctggccgacgtcgttgccatcatcggtacgcaggacatcgtattcggggaggttgaccgataa

SEQ ID NO: 50979 - DNA, 1371 bp, Neisseria meningitidis; identical to SEQ ID NO: 44745

SEQ ID NO: 50980 - DNA, 1110 bp, Neisseria meningitidis
atgaaatacaaaagaatcgtatttaaagtcggcacatcttcgattacccattcggacggcagtctctcgcgcggcaaaatccaaaccatcacccgccagcttgccgcattgcatcatgcgggacacgagctggtcttggtgtcttccggcgcggttgcggcagggttcggtgcgctgggtttcaaaaaacgtccggtcaaaatcgccgacaaacaggcttccgccgccgtcgggcaggggctgctgatggaagaatatacggcaaacctgtcttcagacggcatcgtgtccgcgcaaatcctgctcagccgcgccgactttgccgacaaacgccgctaccaaaatgccggcggcgcactttccgtgctgctgcaacgccgcgccgtccccatcatcaatgaaaacgatacggtttcggttgaggaattgaaaatcggcgacaacgacacattgagtgcgcaagtggcggcgatgatacaggcagacctcttggtgctgctgaccgacatagacggtctttacacgggcaacccgaacagcaatcccgatgccgtacggctggacaaaatcgaacacatcaaccatgaaatcatcgaaatggcgggcggatcgggttcggcaaacggcacgggcggtatgctgaccaaaatcaaagcggcaaccatcgccgccgaatccggcgtaccggtgtatatctgttcctcgctcaaacccgatgcacttgccgaagctgccgaacatcaggcggacggctcgtttttcgtcccccgtgccaaaggtttgcggacgcagaagcaatggctggcgttctattccgaaagccggggcagcgtttatgtggacgaaggtgcggaacacgctttgtccgaacaggggaaaagcctgctgatgtcgggcattgccggaatcgaagggcatttttcccgtatggacaccgtaaccgtgtacagcaaggcaaccaaacagcccctgggcaaagggcgcgtcctgttcggttctgccgccgccgaagacctgctcaaatcgcgtaaggcgaaaggcgtgttcatccatcgggacgactggatttccatcacgcccgaaatacgcctgcttctgaccgaattttag

SEQ ID NO: 50981 - DNA, 417 bp, Neisseria meningitidis; identical to SEQ ID NO: 36952

SEQ ID NO: 50982 - DNA, 990 bp, Neisseria meningitidis; identical to SEQ ID NO: 43651

SEQ ID NO: 50983 - DNA, 1131 bp, Neisseria meningitidis
atgtttaccgatgaaaatatgaccgcaaaggaagaactgttcgcatggctgcgccatatgaaccaaaacaaaggttccgacctgttcgtgacgacccatttcccgcccgcgatgaagttggacggcaaaatcacccgcatcacggacgaaccgctgacggcggaaaaatgtatggaaatcgccttttcgattatgagtgcgaagcaggcggaagaattttcatcgaccaacgagtgcaacttcgccatcagcctgccggacaccagccgcttccgcgtcaatgcgatgatacagcgcggcgcgacggcgttggtattccgtacgattaccagcaagattcccaagtttgaaagcctgaacctgccgccggtcttgaaggatgtcgcgctgaaaaaacgcgggctggttatttttgtcggcggcaccggctcgggcaaatcgacttcgcttgcctcgcttatcgactaccgcaatgaaaattcgttcggacacatcatcactatcgaagacccgatcgagtttgtccacgaacacaaaaactgcatcatcacccagcgcgaggtcggcgtggatacggaaaactggatggcggcgttgaaaaacacgctgcgtcaggcgccggatgtcatccttatcggcgaaatccgcgaccgcgaaacaatggactacgccattgcctttgccgaaacggggcatttgtgtatggcgacgctgcacgccaacagcaccaatcaggcactcgaccgcatcatcaactttttccccgaggagcggcgcgaacaattgctgacggatttgtcgctcaaccttcaggcgtttatttcgcaacgcctcgttccgcgagacggcggcaagggcagggtggcggcagtcgaggtgctgctcaattcgcccctgatttcggagttgattcacaacggcaacatccatgaaatcaaagaagtgatgaaaaaatccactaccctgggtatgcagaccttcgatcaacacctttaccaattgtatgaaaaaggcgatatttccctgcaagaagcattgaaaaatgccgattccgcacacgatttgcgtttggcggtacagttgcgcagccgccgcgcgcaaagttccagccccgatttggaactgctctga

SEQ ID NO: 50984 - DNA, 1512 bp, Neisseria meningitidis
atgaaatggttgaaacgcctgacggtcattgtcgggactttttaccgctatcggctggcaggtctgtgtgcttcgctgatgggtagcggttggatatgcgctctgctgaaaatgatgccgcagtcgtccaaattgaaaaacgaaccgcctgctgtccgtctgcgccttgccttggaaagcctggggccgattttcatcaagttcgggcaggtattatctacgcgccccgatttgattccgcacgattacgccgtcgaactggcaaagctgcaagacaaagtgccgccttttgacgcgcggctttcgcgtgaacaaatcgaaaaatcgttgggtcagtccatcgaaaagctgtatgcggaatttgaaaccgagcccatcgccagcgcgtccatcgcccaagtacacaaagcccgcctgcattcgggcgaacgagtggcggttaaagttttgcgccccaaccttttgccccttatcgaacaggatttgtcgctgatgcgtttcggcgcggcctgggtcgaacgcttgttttcagacggcaggcgtctgaagccgctcgaagtggtggcggagttcgacaaatacctgcacgacgagttggatttgatgcgcgaagccgccaatgccggacagctcgggcgcaatttccaaaacagcaatatgctgattgtgcccaaggtgttttacgactactgcaccagcgacgtgctgacaatcgaatggatggacggcacgccggttgccgacatcgccaaactcaaagcagacggcatcgatttgcacaaactcgccgattacggcgtggaaatctttttcacgcaggtcttccgcgacggctttttccacgcggatatgcaccccggcaatattttggttgccgccgacaaccgctacatcgccctcgatttcggcatcgtcggcacgctgaccgattacgacaaacgttatctcgccatcaatttcctcgcctttttcaaccgcgattaccggcgcgtcgccaccgcccacatcgaatcgggctgggtgcctgccgacacgcgtgcggaagaattggaagccgccgtccgcgccgtgtgcgaaccggtgttcaacaaaccgatttcgcagatttccttcggcttggtgctgatgcgcctgtttgaagtcagccgctgcttcaatgtcgaaatccaaccgcagcttgtgctgctgcaaaaaacgctgctcaacatcgaaggcttgggccgccagctcgatcccgatttggacttgtggaaaaccgccaaaccgtttttggtgaaatggatgaacgggcaggtcggccctaaagccctttggcgcaacctcaaaaacgaagcccccgactgggcgcaaatcatcccttcattgccgcgcaaaatcagtgcgttgattgatgaaaaccgccagcaggaaatgcgtgatgcctatatccatttggtcaaagtgcagcagcggcaaagcctgtggctggctgtgattgcggttgttttgctgctgattttgcttttgaaatag

SEQ ID NO: 50985 - DNA, 822 bp, Neisseria meningitidis
atgagcagtccgcgccatgtgttttacatttccgaccgtaccggtctgactgccgagaatatcggcgaggcgttgctgaaccagtttggcaatctgtcgttcaaacgccatacgcatccgtttgtcgatacgccggaaaaggcgcgcgcggtggtggagaaggtcaatcggagccggcaggaaaacggtcagcgtccgattgcgtttgtcagtgtggttgatgacgaaatccgtcggattatcaaaggggcggatgcttttcagattaatttctttgagacttttttgggactgttggagaaagaactcaataccgaagccacggcatccgagcaggggcatcacagtatcggtaatacgaagcgttacgatgcgcgtatggaggcggtgaatttctcattgaaccacgatgacggggtcagcgataagaaccttcaggaagcggatgtaatcttgatgggtgtatcgcgttcgggcaaaacgccgacctgcctttacctcgccctgcaatacggcatccgtgcggcaaactatccgctgattcccgacgatttggaatcggccgatctgccgcgtatggtcaagccttatagggataagctgttcgggttgaccatccagccggaacgtttgcaggccatccgccaagagcgccgcccgaattcaacttatgccaaaatcgatacatgccgcagcgaggtggcagacgcgcagagtatgttcagacggcatgggattccgtttgcgaatacgacggataaatcagtggaagagcttgccgtacacatccttcaggcgtgcaagctcaaacgcaggttttga

SEQ ID NO: 50986 - DNA, 2364 bp, Neisseria meningitidis
atgcaattctcctactcatggctgaaaacccaagccgataccgaactttcctccgataagctggaacatctgttaacgatgtccggcttggaagtggaagaagccgagactgccgcacctgcctttgcgggcgtggttgttgccgaagtgaaatccgttgaaaaacatccggatgcagaccgtttgaacgttacccgagttgatgcgggtacgggagagttggttcagatcgtgtgcggtgcgccgaatgtgaaagcgggcatcaaagtgccgtgttcgttgccgggcgccgttttgccgggcaatttcaaaatcaagccgaccaagatgcgcggtgtggtgtcgaacgggatgttgtgttccaccgacgaactcggtctgcccgacgacggtgtgaacggcctgcacattttgcctgaagacgcgcccgtcggtaccaatatccgtgaatacttggatttggacgatacgctgtttacgttgaaaattacgcctaaccgcgccgactgcttgagcatcaaaggcattgcgcgcgaagtgtccgcattgacggggtgcgcgttcaggcagcccgaaatccataccgcgccgatcacgggcagtcgaaaacagcccgtgcagattaacgcgcctgccgattgcggccgttttatcagccgcgttattgaaaatgtcaatgcgaaagcggctactcccgattggatgaaacaacgtttggagcgcagcggcatccgcagtatttccgtgctggtggacatcggcaattatgtaatgctggaaatcggccagccgatgcacgttttcgatgccgacaaactttccggcagcctgcacatccgccgcgcgcgcgaaggggaaacgctggaatgcctgaacgagaaaaccgtttccctgtctgaaaatacgctggtcgtggcagacgaaaaaggcgcgttgagtttggcgggcttaatgggcggcgcggcgagcgcggtttcagacggcacgcaaaatatcgtgctggaagcggcttggtttgcgcccgaaatcatcgccggcaaatcgcgccaatacggtttcggttcggattcgtcgttccgcttcgagcgcagcgtggattaccgtttgcaggcggatgccattgaacgtgctaccgaattggtgttgcagatttgcggtggtgcggcaggcgagatggtggaagcgcaaggcgaattgcctgaagcgaagcaggttggattgcgtttggaccgtctgaaaaccgtgttgggcgtggacattcctgccgaacaggtggaaaccattttgcaacacttggacctgcagcccgagaaaacggcggaaggcttccgcgttaccgcgccgagcttccgttttgacatcgaaattgaggctgatttgattgaagaaatcggacgcgtttacggctatgaaaacatccccgacgattacacgtcaggccgtctgaaaatgctggaactgcccgaaacacgccgcccgcgttttgccgtttacaacgaaatggcggcgcgcggctaccgcgaagtggtcagctatgcctttgttaacgagcagtgggaacaagattttgccgccaacgccgaccccatccgcctgcaaaacccactggcggcgcaatatgccgtgatgcgttccacactcatcggcggcttggtggaaattttgcaaaacaacctgaaccgcaaacaaaaccgcgtgcgcgtgtttgaaatcgcccgcgtgttcggcaaaggttcagacggccagtttgtccaaaacgaacgcatcggcggcttgtggtacggcgcggcaatgcccgaacaatggggcgggaaaacgcgcaatgcagatttttacgacatcaaggcagatgtggaaaatctgttgaaaaacaaagcagtcgagttcgttaaaaccggacatcctgccctgcatcccggacgcgccgccaatatcgtttcagacggcaaagtcatcggctttgtcggcgaactgcatccgaaatggctgcaaaaatacgacctgccgcaagcgccgctggtatttgaaatcgatatggcggccgtgttggaatgcgggaaaacgcgctatcgggccgtatcgaaattccagccggtgcgccgcgatttggcgtttgtgatgccggaagctatgagccatgatgatttgctgcttgtcttggaaggcgcggcaaacaagttggtacaggaaatcagcgtgtttgacgtgtatcgcggcacgggtttgcccgaagggatgaagagcgtggcggtcaaagtgattttgcaggatatggaaaacacgctgacggatgaggcggtcgagccgcttatcggaaaactgattggcgcggcaacggcggcaggggcgcggcttcgcagttaa

SEQ ID NO: 50987 - DNA, 729 bp, Neisseria meningitidis
atgaccaaacagctgaaattaagcgcattattcgttgcattgctcgcttccggcactgctgttgcgggcgaggcgtccgttcagggttacaccgtaagcggccagtcgaacgaaatcgtacgcaacaactatggcgaatgctggaaaaacgcctactttgataaagcaagccaaggtcgcgtagaatgcggcgatgcggttgctgcccccgaacccgagccagaacccgaacccgcacccgcgcctgtcgtcgttgtggagcaggctccgcaatatgttgatgaaaccatttccctgtctgccaaaaccctgttcggtttcgataaggattcattgcgcgccgaagctcaagacaacctgaaagtattggcgcaacgcctgagtcgaaccaatatccaatctgtccgcgtcgaaggccataccgactttatgggttctgacaaatacaatcaggccctgtccgaacgccgcgcatacgtagtggcaaacaacctggtcagcaacggcgtacctgtttctagaatttctgctgtcggcttgggcgaatctcaagcgcaaatgactcaagtttgtgaagccgaagttgccaaactgggtgcgaaagtctctaaagccaaaaaacgtgaggctctgattgcatgtatcgaacctgaccgccgtgtggatgtgaaaatccgcagcatcgtaacccgtcaggttgtgccggcacacaatcatcaccaacactaa

SEQ ID NO: 50988 - DNA, 495 bp, Neisseria meningitidis
atgatttttaaacagaatcaaaattattgggcagttttttatacgaatgaagaagctctgattgttcaaacatgttcaggtttgggattaacggcaatagaccacctatatccccctcatatcctgccattggataccgacaatgaaactttaggcacaacggtcttgcaagcattggcaaacagcaggactttcgtttatgacagtccagaagaccaagatttttttgataccgaaaaaattcggcaacgctatgaggattgggttgccaagctatgcgggaacttgggctataaaaccagacgcgccctatttaaaaacatgatgagcgtggatatttggctgcacaacggctgcctgaaaatcagcccgagccgccatgtcaagctggaagcgtgggatgccattgatgcagacgatgtcattttatcattggataacagccctgaagaaatcggagcaggtttaaagttggcattgagccgctgccgatag

SEQ ID NO: 50989 - DNA, 579 bp, Neisseria meningitidis
atgtcaaacacaatcaaaatggttgtcggcttgggcaacccgggcaaagaatacgaacagacccgccataatgcaggcttttggttcctcgacgaactggcttggaagtggaaggcttcgtttaaagaagaaaaaaaattcttcggcgaagtcgcccgtgctaccctgcccgacggcgatgtctggctgctcaagccgaccacgttcatgaaccgttccggacaggcagttgccgcccttgcgcagttttataaaatcaaacccgaagaaatcctcgtcgtccacgacgaactcgacattccctgcggacggatcaaattcaaactcggcggcggcaacggtggacacaacggcttgaaagacattcaggcacggctcggcacggccgactattaccgcctgcgcctcggtatcgaccacccgggcgaccgcaacctcgtcgtcggctatgtcctgaacaaacccagtgcggaacaccgccaacagattgatgatgccatcgccaaatccctgcaggccatacccgacatcatttccggcaaatgggaagaagcaacacgtttcctgcacagcaaatga

SEQ ID NO: 50990 - DNA, 2748 bp, Neisseria meningitidis
ttgaagccgatttgtttttatcttatgggtgttatgctatatcatcatagttatgccgaagatgcagggcgcacgggcagcgaggcgcagatacaggttttggaagatgtgcacgtcaaggcgaagcgcgtaccgaaagacaaaaaagtgtttaccgatgcgcgtgccgtatcgacccgtcaggatatattcaaatccagcgaaaacctcgacaacatcgtacgcagcatccccggtgcgtttacacagcaagataaaagctcgggcattgtgtctttgaatattcgcggcgacagcgggttcgggcgggtcaatacgatggtggacggcatcacgcagaccttttattcgacttctaccgatgcgggcagggcaggcggttcatctcaattcggtgcatctgtcgacagcaattttattgccggactggatgtcgtcaaaggcagcttcagcggctcggcaggcatcaacagccttgccggttcggcgaatctgcggactttaggcgtggatgacgtcgttcagggcaataatacctacggcctgctgctaaaaggtctgaccggcaccaattcaaccaaaggtaatgcgatggcggcgataggtgcgcgcaaatggctggaaagcggagcatctgtcggtgtgctttacgggcacagcaggcgcagcgtggcgcaaaattaccgcgtgggcggcggcgggcagcacatcggaaattttggcgcggaatatctggaacggcgcaagcagcgatattttgtacaaacaggggggttgaaattcaattccgacagcggaaagtgggagcgggatttccaaaggcaattctggaaacacaagttgtataaaaaatacgatgacccccaagaactgcaaaaatacatcgaaggtcaagataaagactggcgggaaaacctggcgccgcaatacgacatcacccccatcgatccgtccagcctgaagcagcagtcggcaggcaatctgtttaaattggaatacgacggcgtattcaataaatacacggcgcaatttcgcgatttaaacaccaaaatcggcagccgcaaaatcatcaaccgcaattatcagttcaattacggtttgtctttgaacccgtataccaacctcaatctgaccgcagcctacaattcgggcaggcagaaatatccgaaagggtcgaagtttacaggctgggggcttttaaaggattttgaaacctacaacaacgcgaaaatcctcgacctcaacaacaccgccaccttccggctgccccgcgaaaccgagttgcaaaccactttgggcttcaattatttccacaacgaatacggcaaaaaccgctttcctgaagaattggggctgtttttcgacggtcctgatcaggacaacgggctttattcctatttggggcggtttaagggcgataaagggctgctgccccaaaaatcaaccattgtccaaccggccggcagccaatatttcaacacgttctacttcgatgccgcgctcaaaaaagacatttaccgcttaaactacagcaccaataccgtcggctaccgtttcggcggcgaatatacgggctattacggctcggatgacgaatttaagcgggcattcggagaaaactcgccgacatacaagaaacattgcaaccggagctgcgggatttatgaacccgtattgaaaaaatacggcaaaaagcgcgccaacaaccattcggtcagcattagtgcggacttcggcgattatttcatgccgttcgccagctattcgcgcacacaccgtatgcccaacatccaagaaatgtatttttcccaaatcggcgactccggcgttcacaccgccttaaaaccagagcgcgcaaacacttggcaatttggcttcaatacctataaaaaaggactgttaaaacaagatgatacattaggattaaaactggtcggctaccgcagccgcatcgacaactacatccacaacgtttacgggaaatggtgggatttgaacggggatattccgagctgggtcagcagcaccgggcttgcctacaccatccaacaccgcaatttcaaagacaaagtgcacaaacacggttttgagttggagctgaattacgattatgggcgttttttcaccaacctttcttacgcctatcaaaaaagcacgcaaccgaccaacttcagcgatgcgagcgaatcgcccaacaatgcgtccaaagaagaccaactcaaacaaggttatgggttgagcagggtttccgccctgccgcgagattacggacgtttggaagtcggtacgcgctggttgggcaacaaactgactttgggcggcgcgatgcgctatttcggcaagagcatccgcgcgacggctgaagaacgctatatcgacggcaccaacgggggaaataccagcaatttccggcaactgggcaagcgttccatcaaacaaaccgaaactcttgcccgccagcctttgatttttgatttttacgccgcttacgagccgaagaaaaaccttattttccgcgccgaagtcaaaaatctgttcgacaggcgttatatcgatccgctcgatgcgggcaatgatgcggcaacgcagcgttattacagttcgttcgacccgaaagacaaggacgaagacgtaacgtgtaatgctgatggcttgtgcaacggcaaatacggcggcacaagcaaaagcgtattgaccaattttgcacgcggacgcacctttttgataacgatgagctacaagttttaa

SEQ ID NO: 50991 - DNA, 681 bp, Neisseria meningitidis
atgattttccaaacagtctggttttcagatatggtactgtcggtttcgtggattgtccttatcctgatactggcagcttccgcgccgtccgcattccgctcgcttgcccgctaccgttccgcccttcccctgtgtaccgtaattttttccgcagcatggtgtctgaacgcctctgccggcggcggacagcttgcccagatgaactaccacctgctcgccgtcaatctggttgcactgatggtgggcacttccgccgccttttggcttgccgcgctgctgatgctgccctactgcctgctgtttgccggttctgccggcgcatatccgccgaacgctttagtgctgattctgcccgcgcttgccgtcaaccgcctgtcgcgtatgctggtcaaccgcctgccgcccaatattttcatctttattttcgtcaacggctttctcgcttccgccgccggcattctgttgaccgggctggtgctgaccggtattttggatgctgcaaacgcttttccgtccgaaatattgtggacgaccgccctgcccgtctttattttgctggcgtgggcggaagccttcctcagcggcatttcaactgccatatttgttgcactgaagccccattggattaacactttcgacgacaaccgctatcttaagtccgaccgcggcatatggcggtag

SEQ ID NO: 50992 - DNA, 474 bp, Neisseria meningitidis; identical to SEQ ID NO: 36318

SEQ ID NO: 50993 - DNA, 906 bp, Neisseria meningitidis
gtgcgggggatttcggattcggaagcaacagacgatacgggatttcggaacaatatgaacactttgaaatttaccaaaatgcacggtttgggcaacgattttatggtgattgatgcggtcagtcaggattttacccccgaggacgcgccgattgcggcatgggcggaccgtttccggggcgtgggcttcgaccagcttttggtggtcgggcgttcggaaaccgaaggcgtggatttccgttaccgtattttcaatgccgacggcagcgaggtcgggcaatgcggcaacggagcgcgttgttttgcccgttttgttgcagacaagggtttgaccgataagaaagaaatttgtgttgaaacggcaaatggcgttatttttccgaaattgtccgataacggcatggttacggtcaatatgggcaaaccgaggtttatgccgtctgaaataccgtttgtccccgaatcgggcgagggggatgatgcctgtatttacggggtgcatctcgaatccggcattcagcctgtcagctgcgtcaatatgggcaacccccatgcggtgattgtggtcgatgacgtagaatgcgcgccggtgcgcgaaaccggttcgcttatcgaaccgcacaggcagtttcccgaacgcgtcaacgtcggctttatgcagattatcagccgaaccgcgattcgtttgcgcgtgttcgagcgcggcgtgggcgaaacccaagcgtgcggtacgggcgcgtgtgcggctgtggtggcgggtatccgtctggggttgttggatgaagggaaaacggtagaggtgattttgccgggcggaactttatatatcgaatgggcctgcggcggcgatgtgatgatgaccggccctgcggaaaccgtgtttgaaggcgagttggcgtattcatga

SEQ ID NO: 50994 - DNA, 1146 bp, Neisseria meningitidis
atgaccgaaactcaatccctagagcttgccaaagagctgatttcccgaccatccgttacccctgacgacagggattgccaaaaactccttgccgaacgcctgcacaaaatcggttttgcggctgaagaactccatttcggcgacaccaaaaacatctggttgcgacgcggcacgaaagctcccgtcgtctgttttgcagggcataccgacgttgtaccgacaggtcctgtcgaaaaatgggattcgcccccgttcgaaccggccgagcgcgacggaagattatacgggcgcggcgcggcagacatgaaaaccagcatcgcctgcttcgttaccgcctgtgaacgcttcgttgccgaacatcccgaccaccaaggcagcattgcgcttctgattacttccgacgaagagggcgacgcgttggacggcacgaccaaagtcgtcgatgtattgaaagcgcgcgacgagcttatcgactactgcatcgtcggcgaaccgacagccgtggacaaattgggcgatatgattaaaaacggccggcgcggctcgctgtcgggcaacctgaccgtcaaaggcaagcaaggccatattgcctatccgcatttggcaatcaatcccgtgcatacttttgccccggccttgttagagctgacgcaggaagtctgggacgaaggcaacaaatacttcccgccgaccagctttcaaatttccaatatcaacggcggtacaggcgcgaccaatgtcattccgggcgagctgagcgtcaaattcaatttccgcttctccaccgagtccaccgaagcagggctgaaacaacgcgtccacgccattttggacaaacacggtgtgcaatacgatttgcagtggtcgtgttcggggcagcccttcctgacccacgcgggcaaactgaccgacgtggcacgcgccgccattgccgaaatctgcggcgtagagaccgaattgtccaccaccggcggcacttcggacggacgcttcatcaaagccattgcaaaagaactcatcgaattaggcccgtccaatgcgaccatccaccaaatcaatgaaaacgtgcggctaaacgacattccgaagctgtctgcggtgtatgaggggatattggcgcggttgttggctggaaatgccgtctga

SEQ ID NO: 50995 - DNA, 207 bp, Neisseria meningitidis; identical to SEQ ID NO: 43230

SEQ ID NO: 50996 - DNA, 366 bp, Neisseria meningitidis; identical to SEQ ID NO: 42810

SEQ ID NO: 50997 - DNA, 294 bp, Neisseria meningitidis; identical to SEQ ID NO: 37088

SEQ ID NO: 50998 - DNA, 1434 bp, Neisseria meningitidis
atgtctcaatatgatgtagtagtgattggtgcaggcccgggcggatacgttgccgccatccgtgccgcacaactgggtttcaaaactgcctgtgtcgatgcaggcgttaacaaagcaggcaatgcccctgcattgggcggtacttgcttgaacgtaggttgtatcccttctaaagccctgttgcaatccagcgaacatttccacgctgcgcaacacgattttgccgaacacggtatcactgtcggtgacgtaaaattcgacgcggccaaaatgattgagcgcaaagatgccatcgtgaccaaactgaccggcggcgtgaaattcctgttccaaaaaaataaagtaaccagtctgttcggtacggcttcctttgccggtaaaaatggcgatgcttaccaaatcgaagtcgataacaaaggagagaaaaccgttatcgaagccaaacacgtcatcgtagcgaccggttccgtaccgcgtccgctgccacaagtcgctatcgacaatgtgaacgtattggacaacgaaggcgcattgaacctgaccgaagtacctgccaaactcggcgtgatcggttccggtgtgattggtttggaaatgggttccgtatggaaccgcgtgggtgcggaagttaccattcttgaagccgcgccgaccttcctggctgccgccgaccaacaaatcgccaaagaagccttcaaatacttcaccaaagagcaaggtctgagcatcgaattgggcgtgaaaatcggcgacatcaagtctgaaggcaaaggtgtttccgttgcttacgaaactgctgccggcgaagccaaaaccgaagtattcgacaaactgatcgttgccatcggccgtattccaaacaccaaaggcctgaacgcggaagccgtaggcttggaaaaagacgagcgcggctttatcaaagtagatggcgaatgccgtaccaacctgcctaacgtatgggcaatcggcgacgtggttcgcggcccgatgttggcacacaaagccagcgacgaaggcgttgccgttgccgaacgcattgccggtcaaaaaccgcatatcgacttcaacaacgtaccgttcgtgatttacaccgatcctgaaatcgcttgggtgggtaaaaccgaagagcagctcaaagccgaaggcgtggagtacaaaaaaggtacttcaggttttggtgcgaatggtcgcgcattggcaatgggcaaagccaaaggtacggttaaagtgttggcagacgccaaaaccgaccgcatcttgggcgtacacatgattggtccggttgtcagcgaattgcttaccgaaggcgtgactgcgctcgaattcttcgccagcagcgaagacatcgcccgcattatccatgcccacccaaccttgtccgaagtggttcacgaagctgcattggcggccgacaaacgcgctttgcacggttga

SEQ ID NO: 50999 - DNA, 1527 bp, Neisseria meningitidis
atgaacacgccccttccttattccaattacctcatccgcatcctgacggcatctgtctatgatgtcgcggtcgaaacgcctttggaaccggcacgcagcctttctgtacgtttgaaaaacaacatccttttgaaacgcgaagatttgcagccggttttttcgttcaaaatacgcggcgcgtacaacaaaatgtccaagttgccgaaagatgcgctcgcttgcggcgtgattgcggcaagcgcgggcaatcacgcacaaggcgtggcattgtccgcacagcgtttgggttgccgtgccgttatcgtcatgccggagactacgccgaaaatcaaagtggatgcggtcaaaagccgtggcggcgaggtggttttgcgcggtgtttcatacaacgatgcttacgattatgcgatggagctggcggaacaggaagggctgacctatatcgcaccgtttgacgatcctgatgtgattgcaggacaagggacggtagggatggaaattgtcagccagcatcccgatccaatccgcgccgtattcgtaccgataggcggtggcggtttggcggcgggcgtggcggcatttatcaagcaggtccgtcccgaaatcaaagttatcggcgttcagaccaacgattcctgctgtatgaagcagtcggtcgaagcgggtgaaatcgtccatttgaaagatgtcgggctgttttcagacggcacggcggtcaaagtcgtcggaaacgaaaccttccgtctctgcaaagaacttttggatgaaatcattacagtcgataccgatgcggtttgcggcgcggtcaaggatattttcgatgacacgcgcagcattaccgagccggcgggcgcgttggcgttggcgggtctgaaagcctatatcgcccgagaaggcgcggaaaaccaaaccctgattgccgttaccagcggtgcgaatatgaattttcaccgtttgcgccacgtttcggaacggagcgaattgggcgagggcaacgaaggtatttttgccgttaccatccctgaagaacgcggcagcttccttaagtttgtcaatatattgggaaataggaatattaccgagttcaactaccgctacggcgacgatgaaaaagcgcatatctttgtcggtcttcaagcggcaggcctgcaggatttggcggttatcggcagccggttggatgaggcgggattgcccaatgtcgacctgaccgatgatgagattgccaaaatccatatccgttatatggttggagggcggacggacaaagtagaaaacgagcgtttggtcagttttgagtttccggagcgtccgggggcattggcacgctttttgaaccatatgcagggagggtggaatattacgcttttccattaccgcaaccacggtgcggattacgggcggattttggtcggtatcgatgtgccgccgcacgatgccgccgcatttgacggtttcttggaaagtctgggatacagctatcatgaggaaacgcaaaatgccgcgtacaagctgtttcttgcctga

SEQ ID NO: 51000 - DNA, 666 bp, Neisseria meningitidis
atggcagtattaagcaaagagcaggttctatccgcatttaaaaaccgcaaatcatgccggcattacgatgcggcacgtaaaatcagtgccgaggattttcagtttattttagaactcgggcgtttgtcgcccagttcggtcggttcggagccttggcagtttgttgtggttcaaaaccccgaaatccgacaggcaatcaagccgttttcttggggtatggcggatgctttggataccgccagtcatttggtggtgtttttggcaaagaaaaatgcccgcttcgacagcccgtttatgttggaaagcctcaaacggcgcggcgttaccgaaccggatgccatggcaaaatctttggcgaggtatcaggcgtttcaagccgacgacatcaagattttggacgattcgcgcgccttgtttgactggtgttgccgccagacctatatcgcgttgggcaacatgatgacgggtgcggcgatggcaggtatcgattcctgcccggtggaaggtttcaactatgccgatatggaacgcgtattgtccgggcagttcggtttgttcgatgcggcagaatggggcgtgtccgtcgccgcgacattcggttaccgcgttcaggaaatcgccacgaaggcgcgcaggcccttggaagaaaccgttatttgggcataa

SEQ ID NO: 51001 - DNA, 360 bp, Neisseria meningitidis; identical to SEQ ID NO: 36598

SEQ ID NO: 51002 - DNA, 1773 bp, Neisseria meningitidis
atgaacggcaatgccgtctgcaaaaccttcagacggcatttcaagcacacccgcactgtaaagttccacgttatgtccgtcaaaatccaaacccgctccgtcaataccgacgtttttaatcatttgcttaccgccggtgccgatcctttaatcgcccggctttgtgcctcgcgcggtgtgcaaagtcctgccgaattggacgacaaactcgcttccctcctgccttatcaaacgctgacaaactgcgaagccgccgccggccgtttggcggatgcggttgaacgcaaggaaaaaatcctgattgtcgccgactatgatgccgacggcgcgacggcgtgttccgtcggtatgagcggtttggcggcgatgggggcgaaagtggatttccttgtgcccaaccgctttgagcacggctacggcttaacgcccgagctggctgaaatcgcggcagagcaaggtgtggatttgctgattacggttgataacggtatcgccagcatcgcaggtgtggcgagggcgcaggctttgggtttggatgtcatcgttaccgaccaccatctgcctgccgagaccgtgcccgactgcatcatcgtcaatccgaaccaaaaaggctgcggttttccaagcaaaagcttggcgggcgtgggcgtgattttttatgtattgatggcgttgcgtgccgaattgcgccgccgcaattatttttcagacggcatcaaagagccgaatctgggcgaacttttggatttggtcgcactcggcacggttgccgatgtcgtccctctcgaccacaacaaccgtatcctcgtgtcgcaaggtttgaaacggatgcgttccggcaaaatgcgccccggtatccgcgccttgtttgaagtggcgcggcgcgattggcgcaaagcgcagcctttcgatatgggctttgcgttgggcccgcgcatcaacgccgccggacggctggacgatatgtcggtcggcattgcctgtctgttggcgcaagatgatgccgaggcgcaggaactggcggctcagttgaacaacctcaatatcgaacgccgcgaaattgagcagtctatgctgcaagacgctctgaacgcctttcccgaaaccctccctccgggtcagacgaccctagtcgcctatcgcgacgacttccatcaaggcgtggtcggtattgttgccagccgcctcaaagaccgtttttatcgtccgaccatcgtgtttgcgcctgccgacaacggcgaagtgcgcggttcgggacgctccattcccaatctgcacctgcgcgatgctttggacttggtgtccaaacgccatcccgatttgattttgaaatttggcggacacgcgatggcggcaggtttgagcatactcgaacacaatatccccgcgtttcagacggcatttgaagaagccgtgcgcgagatggtgtgcgaagacgatttgtcgcaaacattcatcaccgacggcagcctgcctgcccgcgacattacgctggaacaggcgcagaaccttgcccgacacgtttgggggcagggcttcgcgccgccgagttttaccgacgaatttcacgttgtccgccagcagcctttgggcgcggaaggcaaacataaaaaagtctggttgcaaaaagacggctacgaatttgaagccatgttttggcgttgcagcgaagacattcccgaatacatccgcacggtgtaccgcctcgttgccaacgaatggcggaataatctcgaattgcagctttatatcgattactgggaagccgcgtag

SEQ ID NO: 51003 - DNA, 882 bp, Neisseria meningitidis; identical to SEQ ID NO: 45356

SEQ ID NO: 51004 - DNA, 768 bp, Neisseria meningitidis
atgtcttcaaataaagcttcaatttttacacgcctgcatcggttgtgccgtttggcggtctggctgtttaaaacagggaaaaacctgcgcggtattgacggcggctgccccgagtcgcgcaatcgggcggtaatcgagttgggcaggggggctctggcggctttggatatcggattggaggtgggcaggcccgcacccgaacatccgaacggtgtcttggttgccgccaaccacgtgtcctggctggatattttcgcgatgagcgcggtttatccgagcagctttatcgccaagcaggaaatcaaaagctggccggtattgggcaagatggggcagaacgcgggaacggtgttcatcaaccgcaattcgcggcgcgacatcgaaccgattaaccgcgccgtctgcgaaaccttgcaacgcggtcaaaacgtcagttttttccccgaagcgcggacttcctccggattggggctcctgccgttcaaagccgcgctgttccaatccgccatcgatgcgggggcaaaggttttggcggtcgcgctgcgttattatgacgaaacgggaaaaaggacggctcgtccctcatatgccgatgtcggtttgccgacctgcctgtggcgcattgtgtctatgaaaaaattaacgataaaagtcgatttcgtttgcgtggcggatgcggcggaaagcgaagaccgttatgctttaaaagataaaatcgaagaaagcatccgtgccgttgtcgccggcgatgcggacgttgccgtctga

SEQ ID NO: 51005 - DNA, 3891 bp, Neisseria meningitidis
atgacctaccccatccccaaaccccgtgaaaaatcccgttggcccaatctttcgcaaggctcgctgcccttggctttggcgcgttatctgccgcataagcagctcaaagtcgtgctgactctagatgcggaacaggcgctacgccttcagacggcatggcggtttttccgtccgcacgatacggcggtgttcctgccggactgggaaacgctgccttacgagcgtttttcgccgcatcaggatttggtgtcggaacggctgtcggcgttgtggcagattaagagcggcgcggcggatgtgttgtttgtgccggttgccacggcgatgcagaagctgccgcctgtgccgtttctggcagggcgcacgttttggctgaaaacagggcagactttggatataggccgtctgaaaagcgatttggtggatgcaggttataaccatgtttcccacgttgttgcggcaggcgagttcgctgtgcgcggcggtattgtcgatttgttcccgatgggcagcgaaatgccgtaccgcatcgatttgttcgacgatgaaatcgacagcattaaaacctttgacaccgaaacgcaacgcaccatttcccccgtttccgaaatccgcctgctgccggcacacgagttccccaccgacagcgaggcgcaaaagattttccgcagccgcttccgagaagaagtcgacggtaatccgaacgatgcggctgtgtacaaagccgtcagcaacggtcatttcggcgcgggcgtggaatactacctgccgctgttttttgaaaacgagttggaaacgctgtttgactatatcggcgaagatgcgctgtttgtctctttaggcgatgttcatgccgaggcaaaccgtttttggagcgatgtcaaatcgcgttacgcgatggcgcagggcgacgaaacctatccgcctttgcttccacagtatttgtatctctctgccgatgtgttcgcaggccgtctgaaaaactacggacaggtgctgcccgatgtttccggcaaggaacacaccctgcctgaccttgccgtcaaccgccaatccgacgagccgttgcaggcattgaaggattttcagacgacctttgacgggcggattctgctgtgcgccgaaagcttgggacggcgcgaaaccatgctcggtttcttgcagcaaaacggtttgaaagccaaacctgtgtccgactggcagggcttcttgtcggcgcatgagccgctgatgattacggtcgcgccgttggcatacgggttcaaactgggcggactgcaatcgccgaaccaacagcaaactacttccgcctccgagggagaaggcgatgcggttaccgaccaaaccgaattttccgcagccgcaacaaaccctctccctagccctctcccgcaggagagggaacaaagtgccgccgccgtttcagacgacctgaaagccaaaagcagcctgcatctcgtcgcaagtaatctgcacgggcaaatccgacagcaacctactccctcccccgtgggggagggttggggagagggcaaagcagttgccgctcaaaccgaatttcccgcatccgcaacaaaccctctccctagccctctcccacaggagagggaacaaagtgccgccgccgtttcagacaacctgaaaaccgaaagcagcctgccccccggtaaaagtaatctgcacgggcaaatccaacagcaacctgccccctcccccgtgggggagggttggggagaaagcaaagcggttgccgaccaaagtgccatcgccgtcatcaccgaatccgagctctaccaatacgtcgcccgttcgcgcgcccacaaccgccgcaagaaacacgccgccgtttcagacggtctgttgcgcgaccttgccgaaatcaatatcggcgaccccgttgtgcacgaagaacacggcatcgggcggtatatgggcttggtcacaatggatttgggcgatgaaaccaacgaaatgatgttgctcgaatacgcgggcgaagcgcagctttatgtgcctgtttcgcaactgcatttaatcagccgctactccggtcaggcgcatgaaaacgtcgccctgcacaagctcggcagcggcgcgtggaacaaggcgaagcgtaaagccgccgaaaaggcgcgcgacaccgccgccgaattgctcaacctctacgcccaacgcgccgcccaatcgggacacaagtttgaaatcaacgagttggattatcaggcgtttgccgacggcttcggctacgaggaaaccgaagaccaggcagccgccatcgccgccgtgattaaagacctgacacagacgaagccgatggaccgactcgtgtgcggcgatgtcggtttcggcaaaacggaagtcgccctgcgcgctgcgtttgtggcggtgatgggtggcaaacaggtcgccgtactcgccccgaccacgcttctggtcgagcagcacgcgcaaaacttcgccgaccgtttcgccgatttccccgtaaaagtcgccagcctttcgcgtttcaacaacagcaaagccaccaaagccgcgctggaaggcatggcggacggcacggtcgatatcgttatcggcacgcacaaattggtgcaggacgacatcaaattcaaaaacttaggtttagtgattatcgatgaagaacaccgattcggcgtgcgccagaaagagcagctcaaacgcctgcgcgccaatgtcgacatcctcaccatgaccgccacaccgattccgcgcaccctcagcatggcgctcgaaggtctgcgcgacttctcgctgattactaccgcgccgagccgccgcctcgccgtcaaaacctttgtcaaacccttcagcgaaggcagcgtgcgcgaagccgtattgcgtgaactcaaacgcggcggacaagtgtttttcctgcacaatgaagtggatacgattgagaatatgcgcgagcggctggaaaccctgctgcccgaagcccgcatcggcgtggcgcacggacaactgcgcgagcgcgagctggaacaagtcatgcgcgactttttgcagcaacgatttaacgtgttgctctgttccaccatcatcgaaaccggtatcgatatccccaacgccaacaccatcatcatcaaccgcgccgacaaattcggactggcgcaactgcaccagcttcgcgggcgcgtcggccgcagccatcaccaagcctacgcctacctgctcacgcccgaatacatcactaaagacgcagaaaaacgcctcgatgccattgcggcggcagacgaactcggcgcaggttttaccctagccatgcaggatttggaaatccgtggtgcaggcgaaatccttggcgaaggacaatccggcgaaatgatacaggtcggcttcacgctctacaccgaaatgctcaaacaagccgttcgcgacctcaaaaaaggccgccagcccgacctcgacgcaccgttgggcatcaccaccgaaatcaaactgcacagccccgccctgctgcccgaagattactgccccgacatccacgaacggctcgtcctctacaaacgcctcgccgtctgcgaaaccgtgcaacaaatcaacaccatacacgaagaactcgtcgaccgcttcggcctgcccgaacaacccgtcaaaacccttatcgaaagccaccacttacggcttatggcaaaagaattgggtatcgatgccattgatgcggccggcgaagcggtaacggtaacctttggtaaaaacaataatgtcgatccaaccgaaatcatcctgctgattcagaacgacaaaaaataccgccttgccggcgccgataagctgcggtttaccgcagagatggaaaatatcgaggtcagaatcaacaccgtaaaaaacgttttaaaaaccttgcaaaacagatgcctgcccaaataa

SEQ ID NO: 51006 - DNA, 279 bp, Neisseria meningitidis; identical to SEQ ID NO: 37465

SEQ ID NO: 51007 - DNA, 939 bp, Neisseria meningitidis
atgcttgaactgaacggactctgcaaacgcttcggcggcaaaacggttgccgacaacatctgcctgactgtcgggcgcggcaaaatactcgccgtactggggcggtcgggctgcggaaaatccaccctgctgaatatgattgcgggcatcgtccggccggacggcggcgaaattcagctgaacggggaaaacattacccgtatgccgcccgaaaaacgccgtatttcgctgatgtttcaagattacgcgctgtttccccatatgagtgcgctggaaaatgcggcattcggtttgaaaatgcaaaaaatgccgaaagccgaagccgaacgccttgccatggcggcacttgccgaagtcggactggaaaacgaggtgcaccgcaagcctgaaaaactttccggaggcgagaaacaacggttggcactggcgcgcgctttggttgtccgcccttccctgctgctgttggacgaatcgttttccagtttggacacgcatttgcgcggcacgctgcgccgcatgactgccgaacgtatccgaaacggcggcatccctgccgttttggtgacgcattcgcccgaagaggcctgcacggcggcggacgaaatcgccgtgatgcatggagggaggattctacaatacggcacacccgaaacattggtcaaaacaccgtcctgcgtgcaggtcgcccgactgatggggctgcccaataccaacgatgaccgccatattccgcaacatgcggtgcgtttcgaccaagacggcatggagtgccgcgtattatcccgtacctgtttgcccgaatcgttcagcctgtccgtcctccatccggaacacggcatcctatggctgaacctcgatatgccgcacgccggtgaaatatcgggaaacgatacggtacgcatccatatcgaagacagggaaatcgtccgcttccgctga

SEQ ID NO: 51008 - DNA, 936 bp, Neisseria meningitidis
  misc_feature 921, 922, 923, 924, 925: 'n' is a, c, g or t
gtgagcattagcgcgccgtatgccaatgaaaacagccgcatcctgctgagcaccacggatatcagttcggaaaacggcaaaatcaaactgcaatcctacggcgaccagttctactacgccggacagggtgagctctacaccttcgataaacgcagctataaaaccggtaagtggtacaaactaaaacatgttactgaaatcaaagagcataaaaacgccaaagccgacccggtgagcctcagtgcgtcacaaggtattgaaatcaaatccggcggcaatatcggtgcccacgccaccttgtttgatgcaccccgcggctccgttaaaatcgaagccggacgtgggctggttctctatgccgtggaagatctcaactacgacaaacttgacacccgtaccaagcgcaaatttatcggcattacctacgacaaggtgcacgacaccaccacccacaccatgaaaaccgccctgccctcaagggtagttgcagaatcggccaacctgcaatcaggctgggacgccaaactgcaaggcacccagtttgaaaccacgctgggcggcgcagccatccgtgcaggtgtaggcgatcaggcacgagcagatgccaagattattcttgaaggcatcaaaagtagtgtgcgcactgaaacagtaagcagtagcaaatctgccctctggcagaaacaggccggacgcggcagcaatatcgaaaccttgcaactgccaagtttcacaggctccgttgcgcccgtactctctgcccccggcggctatatcgttgatattccgaaaggcaatctgaaaaccgaaatcgaaaagctggccaaacagcccgaatacgcctacctgaaacagcttcagacggccaagaacgtcgattggaacaggtgcagcttgtctacgacaagtgggactataaannnnncacacacttaa

SEQ ID NO: 51009 - DNA, 312 bp, Neisseria meningitidis; identical to SEQ ID NO: 38411

SEQ ID NO: 51010 - DNA, 1539 bp, Neisseria meningitidis
atggtttccaaactggacaaatactggcagcaccccgccctctactggcctttgctcatcctttttgccgccgccaccccctttaccttcgcaccctactaccacttttggctgatgcccttgattttcggtgccttcgtccgcctcatcgaactgcgtccgcgttttgctgcctcttccgcctacctgttcggcctgaccgcatacacgacacagttctactggatacacaccgccctgcacgacgtttccggcctgcccgacctctatgccgtaccgctgaccttcctactccccgcctaccttgccctttatccggcactgtgtttctggctgtggaaaaaatttaccctgcctcggggcataaaaatcggtttggtactgcccatcctgtggacgctaaccgagtttgcccgcgaacgtttcctgaccggattcggctggggcgcaatcggctactcccaaatcaccccggacagcccgctcgccggctttgccccattgggcggcatccacatggttacactggcaaccgcctttctcggtgtctggctggttttggcgagtgataacaccgcacgttcgggcaaacgcctgcttccaattatcctgattgccgccctgcttgccgcaggctacaccgcccgacaaaccgacttcacccgccccgacggcagccgcagcaccgtcgccctgcttcaaggcaacatcgaccaaaccctcaaatggcgtgaagaccaagtcatcccgaccatacagaaatattacgaacaggtcggcaaaaccactgccgacatcgtcatcctgcccgaaaccgccatccccgttatgcgccaaaacctgccggaaaacatactggcaaaatttgccgaacaggcgcaaaacaacggcagcgcgctcgccgtcggcatcagccaatacacttcggacggcaacggttacgaaaacgccgtcatcaacctgaccggttatcaggaaaacaatcaggacggcatcccctactacgccaaaaaccacctcgtccccttcggcgaatacaaaccgctgcccttcctgaccacgccgctttacaaaatgatgaatatgcccctttccgacttccgcaaaggcggcggtaagcaatccgccctgctgatgaaaaaccaaaaaatcgccttcaacatctgttacgaagacggattcggcgacgaactgattgccgccgccaaagatgccacactgcttgccaatgccagcaatatggcgtggtacggaaaatccaacgccatgtaccagcacctccaacaatcgcaggcacgggctatggaactcggacgctatatggtccgcgccaccaacaccggcgcaaccgccatcatctcccccaaaggcaacatcatcgcccaagcccaacccgatacggaaaccgtattggaaggacacatcaaaggctatgtcggcgaaacgccctatatgaaaaccggcagttcatggtggttgatgggcatattgaccctagccgcactgattcttttcatcttccgaaacaaagaacactga

SEQ ID NO: 51011 - DNA, 258 bp, Neisseria meningitidis; identical to SEQ ID NO: 40560

SEQ ID NO: 51012 - DNA, 747 bp, Neisseria meningitidis
gtgcagcctgaaacctccgcccaataccagcaccgtttcgcccaagccatacgcgggggcgaagccgcagacggtctgccgcaagaccgactgaacgtctatatccgcctgatacgcaacaatatccacagctttatcgaccgctgctataccgaaacgcggcaatactttgacagcgaagaatggagccgtctgaaagaaggtttcgtccgcgacgcgcacgcccaaacgccctattttcaagaaatccccggcgagttcctacaatattgccaaagcctgccgctttcagacggcattttggcactgatggattttgaatatacccaattactggcagaagttgcacaaattccggatattcccgacattcattattcaaatcacagcaaatacacgccctcccctgcggcctttatccggcaatatcgatatgatgttaccgatgatttgcaggaagcggaaacagccttgttaatatggcgaaacgccgaagatgatgtgatgtaccaaacattggacggcttcgatatgatgctgctggagataatgggttcctccgcgctttcgtttgacaccctcgcccaaacccttgtcgaatttatgcctgaggacgataattggaaaaatattttgcttgggaaatggtcaggctggactgaacaaaggattatcatcccctccttgtccgccatatccgaaaatatggaaggcaattccccgggccaaaaccatctatccgcataa

SEQ ID NO: 51013 - DNA, 171 bp, Neisseria meningitidis; identical to SEQ ID NO: 39871

SEQ ID NO: 51014 - DNA, 231 bp, Neisseria meningitidis; identical to SEQ ID NO: 36464

SEQ ID NO: 51015 - DNA, 855 bp, Neisseria meningitidis
atgtcggcacaactgatcaatggtaaagaagtttcgcaaaaacgcctgcaggcggttgccgaagcggtggcgcaacgccaacaggacaatctgcacatgccttgcctggccgtggttttggtcggaggcgaccctgccagcgcggtttatgtccgcaacaagaaaactgcctgccaaaaatgcggcatcaaatcactgtcttacgaactgcccgaatcaacatcgcaggaagaactgctggcactggtcgaccgcctgaatgccgattccgaagtggacggtattctggttcagctgccgctgccgaagcacctcgacagccaggcggttttggaacgtatttcgccggataaggacgtggacggcttccatccttacaatgtcggcaggctggcggtcaaaatgccgctgatgcgcccgtgtacgcccaagggcgtgatgacgcttttggaagcttacggcattgatccgaaggggaaaaaagcggtcgtggtcggcgcgtcgaatatcgtcggccgcccgcaggctttggaactgctgctggcgcgcgcaacggtaacggtctgccacagcgcaaccgaaaatctgacagacgaggttgccggagccgatattttggtggtcggcgtaggcattccgaactttgtcaaaggcgaatggatcaaacctggcgcggtcgttattgatgtgggcatcaaccgtttggacgacggcagcctgtgcggcgacgtggaatttgaaacggcaaaagaacgggcggcgatgattacgcccgttcccggcggcgtgggtccgatgacgattgccacattgatggaaaacaccctgcacgcggcttcactgcacgatgcttga

SEQ ID NO: 51016 - DNA, 453 bp, Neisseria meningitidis; identical to SEQ ID NO: 43802

SEQ ID NO: 51017 - DNA, 906 bp, Neisseria meningitidis
atgcttaccttccaacaaatcatcttcaaactgcaaaccttctgggcagacaaaggctgcaccgtcatccaacccttcgacatggaagtcggtgccggcacatcccatcccgccacctgcctgcgcgcgctcggtcccgagccttggtttgccgcctacgtccaacccagccgccgccccaaagacggccgctacggcgacaaccccaaccgcctgcaacactattaccaattccaagtcgccctcaaacccgcccccgccaatatccaagacctctatctcgactccctgcgcgaattgggcatcgatcccaaagtccacgacatccgctttgtcgaagacgactgggaaaaccccaccctcggcgcgtggggtttgggctgggaagtctggctcaacggcatggaagtaacccagtttacctatttccaacaagtcggcggcatcgactgcacgcccgtactcggcgaaatcacctacggcatcgaacgcttggcgatgtacctgcaaggcgtggaaaacgtctatgacctcgtttgggcaaaaacgctggacggtaatacagtaacttacggcgacgtgtaccaccaaaacgaagtcgaacaatccacctacaacttcgaatacagcgatgccgactggctgctgcgccagttcaacgactacgaagcgcaagccaaacgcctgcttgccgaagaaaacgccagccttgccttgcctgcctacgagctggtcctcaaagcggggcatacgttcaacctcttggacgcgcgcggcgcgatttccgtaaccgagcgggcaacttatattggacgtattcgtgcattgagccgcgccgtggcgcaaaaatatgttgaaagccgcgaaaaactgggcttccctttaatgaaggcaaatgccgcctaa

SEQ ID NO: 51018 - DNA, 129 bp, Neisseria meningitidis; identical to SEQ ID NO: 43085

SEQ ID NO: 51019 - DNA, 891 bp, Neisseria meningitidis; identical to SEQ ID NO: 43530

SEQ ID NO: 51020 - DNA, 1413 bp, Neisseria meningitidis
gtgaaaatcctcattttaggcaacggacaggtaggttctaccgtcgcacaaaaccttgccgccatacccaacaacgacgtaaccgttatcgacatcgacgaaaaagcattgcaggaaacaggcagccgcctcgatgtccaaaccgttttcggcaacggcgcatcccccttcacattagaacgcgccggcgcggaagatgccgacttgctgctcgcgctctcccgcagcgacgaaaccaacatcgtcgcctgcaaagttgccgccgacctgttcaacatccccggccgcatcgcgcgcgtccgttccagcgaatacctcgaatacctcagccccaagctcgaaaacaacgaaaacggcagcctttccatattcggcataaccgaaaccatcagccccgaacagctcgttaccgaacagcttgccggcctgatagactgcccgggcgcattgcaggttttacgttttgcagacgaccgcgtgcggatggtcatcatacaggcgcggcgcggcgggttgcttgtcggacgcagcattgccgacatcgcccaagatttgcccgacggggccgactgccaaatctgcgccgtttaccgcaacaaccgcctcatcgtccccgcgccgcaaaccgtcatcatcgaaggcgacgaaatcctatttgccgccgccgccgaaaacatcggcgcggtcatacccgaattgcgccccaaagaaaccagcacccgccgcatcatgattgccggcggcggcaacatcggctaccgtctcgccaagcagctcgaacacgcatacaacgtcaaaatcatcgaatgccggccgcgccgtgccgaatggatagccgaaaacctcgacaacaccctcgtcctgcaaggttcggcaaccgacgaaaccctgctcgacaacgaatacatcgacgaaatcgacgtattctgcgccctgaccaacgacgacgaaagcaacattatgtccgcccttttggcgaaaaacctcggagcgaagcgcgttatcggcatcgtcaaccgctcaagctacgtcgatttgctcgaaggcaacaaaatcgacatcgtcgtctccccccacctcatcaccatcggctcgatactcgcccacatccggcgcggcgacatcgttgccgtccaccccatccggcgcggcacggcggaagccatcgaagtcgtcgcacacggcgacaaaaaaacttccgccatcatcggcaggcgcatcagcggcatcaaatggcccgaaggctgccacattgccgccgtcgtccgcgccgaaaccggcgaaaccattatgggacaccataccgaaaccgtcatccaagacggcgaccacatcatctttttcgtctcgcgccggcgcatcctgaacgaactggaaaaactcatccaagtcaaaatgggctttttcggataa

SEQ ID NO: 51021 - DNA, 546 bp, Neisseria meningitidis
atgggcaaaaccgtaaccttaaccgctggacacagcaacaccgacccgggtgcggtcaacggaagcgaccgtgaggcggacttggcgcaggatatgcgcaacattgtggcttcaatcctgcgtaacgattacggcctgaccgttaaaaccgacggcacgggcaaaggcaatatgccgctgcgcgaagcggtcaagctgattcgcggctcggatgtggcgattgagtttcacaccaacgctgccgtcagcaaagcggcgacaggcatcgaagccttgagtaccgttaaaaacaaacgctggtgtcaggtgttgagcaaagccgttgccaagaaaaccggctggaaactgcgcggcgaagacggctttaaacccgacaatgcgggccggcattcgcgcctggcttatgcgcaagccggcggcattgtgtttgagccttttttcatcagcaacgacactgatttggccttgtttaagacgaccaaatggggcatctgccgcgcgattgcggacgcgattgcgatggaattgggagcggcgaaggtatga

SEQ ID NO: 51022 - DNA, 1152 bp, Neisseria meningitidis
atgagtaatagagaccaactttttaaagccccgccgtttgaaaaccacagcccgctgacctggtatcaggctgcctcacaactgcccaacttcatccgcgacgacgcgcaggcagccgccatcgaacacctcgatcggctttggaccgaattgatgatgttcaaacgcaaaagaaaccgttttttaggcaggagtttgcgttccccgcaagtccccaaagggctttatttctatggcggggtcggacgcggcaaaagctttctgatggacgcttttttcggctgcctcccttaccgccgcaaacgccgcgtccactttcatgcctttatggcagaaatccaccagaggctgaaaaccctgaaaagcgaaagcaacccgttgaaatccgttgccgccgagattgccaaagaaacccgcgtattatgttttgacgaatttcatgtcagcgatattgcggatgcaatgattttaggccgtctgctggaaaacctgcttaacgagggcgttgttttggtggcgacttcaaactacgcgccttccgaactctacccgcaaggtcaaaaccggagcagttttcttcccacaatcgcgctcatcgagtccagcctgaccgtcttaaacgttgacggcggtgaagactaccgactgcgtaccctccgccccgccgagattttctttacgcctgccaatgaagaaaatgaggcaaaactggcaaaactgttcaaagaaatgacaggcattaccgatttgaaccccggcatcagcaccatccacggtcgggagattccccacaaagccgagtccggccgtgccatatggtttgatttccgcgcactgtgcttcggcccccgctcacagtccgactatctgtatttggccgaacattatgaaatggtttttatttcaggtttggaacaactctcaccgcaagaaaaggcggaggcgcggcggctgacttggctgattgacgtactctacgatttccgggtcaaactgtgtgccaccggcgcggtagatgtcaaccatatctatacggaaggcgattttgccgaagaatttacccgcaccgccagccggatggtcgaaatgcagtccgaagtttatttggaacagccgcacctgaccctatctcccaaggattcaggcggataa

SEQ ID NO: 51023 - DNA, 471 bp, Neisseria meningitidis
atgaccgatacggatacccaagccgaccgcttcgaacagatgatgtggcaggcggtggacaaactttttgaacagcatgacggcaaactcgaaagcatggacgggcgggaacaggagctggttttgatttggcggacagaagccgatatcggtaacggcagcatactgcaatttgtctgcaactggagtttccccgccgccgaaaagacttgttccgttctgaaaaaaatcggcgcggtacacagcgcaatgctgatccatcgggcggcagacgcattgggaaaagaaatccgccacctccaatcggaaggtaaaaacctgaaagaaatgtgggatataacgcaacatctcgacaacaaaaccgcctcactgccgaacagtctggatgaacaatattggcaagaccccgacaaactgtatctgccgggatggcaatactattccggcaaccctgttcagacgctgttttaa

SEQ ID NO: 51024 - DNA, 942 bp, Neisseria meningitidis
atgccgaccccgaaagcctttgccctgctcgggccgaccgccggaggcaaaaccgcgctcgccctcaaaattgccgaaaccctgcctgtcgaaatcatcagcctcgattccgcgctggtttaccgcgatatggacatcggcacggcgaaaccgtccgcctccgaacgcgcctttgtcccgcaccaccttatcgacatcatcccgcctaccgaatcatacagcgccgcccgctttgtcgaagactgcacgcgcttggtcggggaaatttcctcacgcggcaggtttgcccttattgtcggcggcacgatgatgtatttccgcgccctgacccaaggtttgaacgatttgcccgaagccgacgcctgcctgcgtgccgacttggacgaacaaaaacagatgtacggcttggatttcctctaccgcaccctgcaaaaagtcgaccctgaaaccgcatgccgtctgaaaccgaacgacagccagcgtatcgaacgcgctttggaagtttattatctgaccggcaaaccgatgagcgaacacctcggcagacaaagcccccatacgctccccttcgatttgcataccgccgccctgattcccgaaaaccgcgcccgcctgcatgaaaacatcgccctgcgtttccacctgatgcttgaacagggctttatcggcgaagtagaaaacctgcgccgccgctatcccggcctgaccgccgactcccccgccatccgctgcgtcggctaccgtcaggcatggaaatatctggatggaaaaaccgatttcccggcatttgtcgagaaaggcattgccgccacccgccaacttgccaaacgccaactgacttggttgcgcaaaacacctttagactgcgttgccgacccgttttcagacggcacttcatgcacacgcctgattgaggcggcaaaacggtttttcggcgcataa

SEQ ID NO: 51025 - DNA, 390 bp, Neisseria meningitidis
atgagtgaagcagaatatttttcccatttcatatctaacggcaatgggaagttattagaaattccgcaacgtaggggcaggcaggacggcgtttttatagattggttgtcattcacactgcacgaagattccttgctgaaagtttccggatgccccttagtttccgatgccgaatatatgtttgttttaagcaaaaaattggaggaaatattagggtttggcatcacgagcagatgcaaatcgaagggcaataaattttacgattcgatgtttaggttgggatcggaagaagttgactacggcgaagtccattacggaggtcagcgaaatacggttttaatcgaattgaaaggtgtagttgcaacattgcaaatccaggttgggaattga

SEQ ID NO: 51026 - DNA, 1542 bp, Neisseria meningitidis; identical to SEQ ID NO: 43670

SEQ ID NO: 51027 - DNA, 2019 bp, Neisseria meningitidis
atgatgggcgggaaaggcggattttatcggcatttggcggtagagggcaatttcggcggcacgacccaatccttagcggtttgctcaactatcggcgcaaattctgttaaaatgccgctttccttcctttacacaccgcaccgacaggcagaatttatggctcttttgcagatttcagaaccgggtatgtccgccgccccgcaccggcaccgtttggcggcaggcatcgatttgggtacgaccaacagcttggtcgccaccgtccgcagcggcagtgccgcctgcctgcccgatgccgaagggcgcgttaccctgccttccgtcgtccgctatctggaaaacggcggcattgaagtcggcaaaatcgccctgtccgcccaaaaaaccgacccgctgaacaccgtcagctccgccaaacgccttatcggacggacgcttgccgatctgcatcaaaatacgcattacctgccttaccgtttcggcgacaatcaacgcgttatcgaactgcatacgcggcagggggtgaaaacgcctgtcgaagtgtcggcggaaatcctcaaaacccttaaatcgcgcgccgaagaaaccttggtcggcgatttggtcggcgtggtgattaccgtccccgcctatttcgacgatgcccaacgccaggccaccaaagatgccgcgcgtctggcgggtttgaacgtattgcgcctgctcaacgaacccaccgccgccgcaatcgcctacgggctggacaacgcctcggaaggcacgtttgtcgtgtacgacttagggggcggcacattcgacgtatccgtattgcaactgaccaaaggactgtttgaagtcaaagccaccggcggcaacagcgcgttgggcggcgatgacttcgaccatcgtttgttctgctacctgctcgaacaaaacggactctcccaactcaacgaacaagacagccaactcctgctttcgctcgtccgcgccgccaaagaacaattaaccacgcaaaccgaagcgcgcattcaggcgacgctttcagacggcatggcaatcgacacaagcatcagtcgcgccgagttccacaacctgacgcagcatttggtgatgaaaacgctcgaaccggtcaaacaggcgttgaaagatgccggtgtcggtaaaaacgaagtcaaaggcgtaattatggtcggcggttcgacccgtatgctgcacgtccagcaggcagtcgccacctttttcgggcaaaccccgctgaacaacctcaaccccgacgaagtcgtcgcgctcggcgcagccatacaggcgaacgtcctcgcaggcaacaaagccgacggcgaatggctgctgctggacgttacgcccttgtcgctcggtttggaaacctatggcggcttggcggaaaaaatcatcccgcgcaattccaccatccccaccgcgcgcgcgcaggactttaccaccttcaaagacggtcagaccgcgatgacgatacacgtcgtacaaggcgaacgcgaactggttgccgactgccgcagccttgccaaattcaccctgcgcggcattccgccgatggcggcgggtgcggcgcgtatccgcgtaaccttccaaatcgatgcggacgggctgctgtccgtttccgcccaagaacaaagtaccggcgtacacgcgcaaatcgaagtcaaaccttcctacggtttggacgacggcgcgattacccgaatgcttaaagacagtatggacaacgccgccgaagatatggcggcacgcgcccgcgccgaagccgtggtcgaagccgaaagcctgaccgatgccgtcaacgccgccctcgagttggacagcgatttgctggatgccgaagaattgcaacagattcggcaaggtatcgccgatttgcaaggccgtctgaaagacggaaaagccgaagacatccgcgccgccgccgccaaactcggcagcatcaccgacaatttcgccgccaaacgcatgaaccgcaacatccaacgtgcgctgacaggccagagtgtcgataatatttga

SEQ ID NO: 51028 - DNA, 606 bp, Neisseria meningitidis
atgacccgtcaatctctgcaacaggctgccgaaagccgccgttccatttattcgttaaataaaaatctgcccgtcggcaaagatgaaatcgtccaaatcgtcgaacacgccgttttgcacacaccttcttcgttcaattcccaatctgcccgtgtggtcgtgctgtttggcgaagagcatgataaggtgtggcaatttgtcgaagacgcgctgtgtgccgtcgtgcctgccgacagttttgaaccgaccgcgcaaaaattgaacctgtttaaggcgggtgcggcaactattttgttttatgaagatcaaaatgtcgtcaaaggtttgcaggagcagttccctgcttatgccgccaactttcccgtttgggcggaccaggcgaacgcgatggtgcagtatgccgtttggacgacacttgccgcggtcggcgtaggtgcaaacctgcaacattacaatcccttgcccgatgcggcgattgccaaagcgtggaatatccccgaaaactggttgttgcgcgcgcaaatggttatcggcggtattgaaggggcggcaggtgaaaagacctttgaaccagttgcagaacgtttgaaagtgttcggcgcataa

SEQ ID NO: 51029 - DNA, 921 bp, Neisseria meningitidis
atgcctaatccgctttacagacagcatatcatctccatttcggatttgtcgcgcgaacagttggaatgcctgcttcagacggcattgaagctgaaggcgcatccgcgcggcgatttgttggaaggcaaacttatcggttcgtgcttctttgaaccgtccacgcgcacgaggctgtcgtttgaaacggcggtgcagcggctgggcggcaaggtcatcggcttttcggacggcgcgaataccagtgccaaaaaaggcgagacgcttgccgataccgcccgcatcatttccggctacaccgacgcaatcatccaacgccaccccaaagacggcgcggcgcgcgtggcagcggagttttcgcgcgtccccgtcatcaacgccggcgacggcaccaaccagcaccccagccagaccttgttggatctggtaacgatttatgaaacgcaggggcgtttggacaagctcaaaatcgccatggcgggcgacttgaaatacgggcgcaccgtgcattcgctttgtcaggcgttgaaacgctggggctgcgaatttgcctttgtttcgccgcccagcctcgcgatgcccgactacattaccgaagagttggacgaagccggctgccgataccgtatcctcggcagtttggaagaggcggcggaatgggcggacatcctgtatatgacccgcgtccagcgcgaacgtttcgatgaacaggaatttgccaaaatccaaggcaaattcaacctcgaagcgtctatgctcgcccacgccaaaccgaacctgcgcgtgctgcaccctttgccgcgcgtggacgaaatccatcccgatgtcgatgccacgccgcacgcctattatttcgagcaggcgaccaacggcgtttatgcgcgtatggcgatattgtcgctggtgttgaacgaagaagtgtga

SEQ ID NO: 51030 - DNA, 723 bp, Neisseria meningitidis
atgaaacccgcctatttcatttccgacctgcatttgagcgaaaagcagcccgaactgaccgcgctgttgctgcgttttttacgttcttccgccgccaggcaggcgcgggcggtttacattttgggcgatttgtttgatttttgggtgggcgatgacgaagtttccgagttgaatacttcggttgcgcgtgaaatcaggaaattgtccgacaaaggcgttgccgtgttcttcgtcaggggcaaccgcgacttcctgattggtcaggatttttgccggcaggcaggcatgacgctgctgccggattactcggttttggacttgttcggctgcaaaaccctcatctgccacggcgacactctgtgtacagatgacagggcataccaacgtttccgcaaaatcgtgcatcggaagcggctgcaaaaactgttcctaatgctgcccctgaagtggcgcacgcgccttgccaccaaaatcaggcgtgtcagcaaaatggaaaaacaggtcaagcccgccgatattatggatgtcaatgccgcctttaccgcgcggcaggtacgcgccttcggtgcggaaaggctgatacacggacacacccaccgcgagcatatccatcacgaaaacggctttacccgcatcgttttgggcgactggcataacgactatgcttcaatcctccgcgtggacggggacggcgcggtattcgtgccgctggaaaaatactga

SEQ ID NO: 51031 - DNA, 249 bp, Neisseria meningitidis; identical to SEQ ID NO: 43100

SEQ ID NO: 51032 - DNA, 1305 bp, Neisseria meningitidis
atgaagccgtttgccgaaaatatcccccacagccttcgcggcaactgctgcgacgaagccctgccgccgcatacggtagattgtccggaatgcggctgccgcgcggatgtaccccggttggacagtggagaagcggcgttctgtccccgttgcggacacaaactcttcagggtgggcaggcatcctttttccgccccgcccgcctatgcggcggcttcgctgattttaatggcgtttgcttacggtatgacgtatatcgaggtcgggataccgggtgcggcatccgtcctttcgctgcccgagatgatgcgcctgatggtgtttcaggattatggttttttggccgaagtgatgtttgtgctgaccttcggcgcgccggttctgtttctgctgctgtgcctgtatgtctatgccgcgctgatacggaaacaggcgtatcctgcgctgcgtttggcaacgcgtgtgatgatgcgcttgagacaggcgatgatggtggatgtgttttttgtttccactttggtggcgtatatcaagctctcgtctgtggcagaggttcgcttcggatcggcgttttatctgatgttcgcgctgtcggttatgctgattcggacttcggtatcggttccccagcattgggtgtattttcaaatcgggcggctgacgggggataatgcggttcagacggcatcggaaggtaaaacctgttgcagccgttgcctgtatttccgcgacagtgccgaatccccctgcggcgtgtgcggtgcggaactgtaccgccgacggccgaaaagtctgagtatttcgtcggcgtttctgacggcggcggttattttgtatttccctgccaatatcctgccgattatgatttcgtccaatcctgccgccacggaggtcaataccatccttaacggcatcgcttatatgtgggacgagggcgacaggctgattgcggcggttattttcagcgcgagtattttggtgccggtactgaagattgcggcaatgtcggttttgattgcgtccgcccgcttcgctttgccaacgggtgcaaagaaattgtcgcacctctaccgcatcaccgaagcggtcggccgctggtcgatgattgatatttttgtgattattattttgatgtgttcgttccacacttatgccgcgcgcgtcattccgggcagtgcggcagtctatttctgcctggtcgtgattctgacgatgctgtccgcctattatttcgacccgcgcctgctttgggacaaacgcgcttcagacggcattgctttcaacgaaacggaaaaacatgactga

SEQ ID NO: 51033 - DNA, 1086 bp, Neisseria meningitidis; identical to SEQ ID NO: 38486

SEQ ID NO: 51034 - DNA, 234 bp, Neisseria meningitidis
atgaaccgccgaaaaatctatctgttgtctgttgccctgttcacactggcatttatgctgctcgtcctcttgggtgcttatctgctgaccgtcggcagcaaagccttcgccgtcgcctcctttcttttcgcattcggcgcgctgttcgggcaaatcggcgcactcgccctctatttgcggcacaaatccctacacgccgcccaatccgccacaaaggaaaaccgctatgtctga

SEQ ID NO: 51035 - DNA, 423 bp, Neisseria meningitidis; identical to SEQ ID NO: 45387

SEQ ID NO: 51036 - DNA, 1767 bp, Neisseria meningitidis
ttgtctgaaataataaaacggatattttactataagtgtctgaaaatttgcccgtctgtttcagacggcggggcggttatgttacaatccgaaaattcgaaaaatttaatctcttgttcaataaaggctttaccaatcatgatttctaccaacggcatcaccatgcagttcggcgcgaagccgctgtttgaaaacgtatccgtaaaattcggagaaggcaaccgttacggcctgatcggcgcgaacggttcaggcaaatccaccttcatgaaaatcctcggcggcgatttggaacagacggccggcgaagtggcgattgaaaacggcgtgcgtttgggtaaattgcgccaagaccagtttgcctacgaagacatgcgcgtgctggacgtggtgatgatggggcataccgaaatgtgggcggcgatgaccgaacgtgatgcgatttacgccaatcccgaagccaccgaagacgactacatgaaagccgccgaactggaagccaagttcgccgaatacgacggctacaccgccgaagcgcgtgccgccgaactgttgagcggcgtgggcatttccgaagatttgcacaatgcgaaaatggcggaagtcgccccgggcttcaaactgcgcgtattgctggcgcaggcgctgttctccaagccggatgtattgctcttggacgaaccgaccaataacttggacattaataccatccgctggttggaaggcgtgttgaaccaatacgactccacgatgattatcatcagccacgaccgccactttttgaacgaagtctgcacacacatggcggatttggactacaacaccatcaccatctatccgggcaactacgacgactacatgctcgcttctgcccaatcgcgtgagcgcgccctgaaagacaatgccaaggcgaaagaaaaattgcaggaattgcaagaatttgtggcgcggttcagtgccaacaaatccaaagcccgtcaggcaaccagtcgtctgaagcaggcagacaaaatcaaatcggaaatggtcgaagtcaaaccctctacccgtcaaaacccgtatatccgttttgaagccgatgaaaaagccaagctgcaccgtcaggctgtggaagttgaaaaactggcgaaacgctttgaaacccagttgtttaaaaacctgaacttcatccttgaagcgggacaacgcctcgccatcatcggcccgaacggcgcgggcaaatccaccctgctgaaactcttggccggcgcgtacaaccccgaatattcagacggtctgctgccggacgaaggcagcatcaaatgggcggaaaaagccagcgtcggctactatccgcaagatcacgaaaacgacttcgatgtcgatatggatttgagcgaatggatgcgccaatgggggcaggacggcgacgacgaacaagtcatccgcggcactttggggcgtttgctcttcggcagtaacgatgtcgtgaaaaaagtgaaggttctctccggcggcgaaaaaggccgtatgctttacggcaaactgttgctgttgaaacccaatgtcttagtcatggacgaaccgaccaaccacatggatatggaaagcatcgaatccttgaacatggcgctggaaaaatacaacggcacgctgattttcgtctcccacgaccgtcagttcgtttcttccctggcaacccaaatcatcgaactggacggcaaaggcggatatgaacactacttgggcgattacgaaagttacttggagaaaaaaggcgtagcataa

SEQ ID NO: 51037 - DNA, 1332 bp, Neisseria meningitidis
atgctgttcaaccacaccgcttccgaactcctcgacctctgccgccgcacgctcgacttggcaaaagcgacgggcgcaaccgccgccgaagccgatttcagcgaatcattgggacaaagcgtcagcgtgcggctgggcgaaatcgaacaaatcgagttccagcaggacaagtcgctggacattaccgtttacgtcggcaaacgcaaaggccgcgccggcaccgccgatttctccgaacaagccctgcgcgacaccgtccgcgccgccgccgacatcgcccgccacaccgccgaagacggttgcgccggacttgccgaccccgagttgatggcgcaacacatcggcgaccccgacctttaccacgaatgggatttggatacggaagccgccgtcggctttgcaaaacaatgcgaacaagccgccctgaacgaggatgagcgcatcgaaaactccgaaggcgcggcggtgcaaaccggccattaccaatacgtttacggcaacacccacggttttgccgcacaccggcaaggcacgcaccacagcatttcctgcagcgtcgttgccgccgacgaaaacgggatgcagcgcgactactggtacgattccgcctgccgccatccggatatggacagccccgaaaccatcggtcaaaccgccgcccgccgcactttgcgccgactcggcagccgcagcatcccgacaggcagctaccccgtcctcttcgataccaccgtttcgggcggccttatcggacacctcgtcggcgcactctccggcggcgcgctctaccgccaaagcagtttcctgatcgacagcatcggcaaaaaagtcctgcccgatttcctcaacctgcgcgaagaaccgcacatcccccgctctttccgcagcagctattttgatgcggaaggcgttgccaccgcaccgcgcttcgtgattcaaaacggcattgtcgaaggctatttcctcagcagttacagcgcgcgcaaactcggtatgcagaccacgggcaacgccggcggcgcgcacaacctgtatttgaaccatacgcacgaaacgcaatccgacctgctgaaagaaatggggacgggattattggttaccgaactgatgggacagggcgcgaacaccattaccggtgactactcgcgcggcgcggcgggtttttgggtggaaaacggcgtgattgcctaccccgtccacgagattaccgtagccggacgcttgcaggatatgtaccgcgacattgtcggcgtggcggatgacgctttgcggcgttcgtccaacaaaatcggctcgattctgattgcggggatgacggttgccggaagctga

SEQ ID NO: 51038 - DNA, 435 bp, Neisseria meningitidis
atgtgcgggttgtggctgctgcgcgccctgactgccaaactgccccaacagcgttatgcggctttgtttattacactgttttttgccgcagtattggtgttcgggcggcatgattcgatgtattggtatcccgtcctcgtcaatctgatgatgttggcggtgttcggcggcagcctgtttgccggacagacggtcatagaaaggctcgcgcggctgcaacagcccgacctgcctgaaaaagccgtgcgctatacccgccgggtaacgcaggtttggtgcgtattctttattgccaacgggacgcttgccgctttgttggcacggttggggcgatatgattggtgggcggtttataccggcgtgattgcctatgtattgatggggatgccgtttgccggcgaatggctttaccgcaaactcgttttgaaagtctga

SEQ ID NO: 51039 - DNA, 159 bp, Neisseria meningitidis
atgtgcggcccctgcggctggatttacgatgaagaacacggcgaccccgaacacggcatcgcccccgggacaaagtttgaagacatccccgacgactggaaatgccccgaatgcggcgtgggcaaagaagatttctacctgttggatttcgtgatatag

SEQ ID NO: 51040 - DNA, 1239 bp, Neisseria meningitidis; identical to SEQ ID NO: 38584

SEQ ID NO: 51041 - DNA, 2895 bp, Neisseria meningitidis
gtgctacaataccggttttcctttatttttcaggcggcatccattatgtgcaaccatcatccccaacattcgcacgacaacgacaccatccgcatccgcggcgcgcgcacgcataatttgaaaaacatcgatttagacattccgcgccacaaactcgtggtggtaacaggattgtcgggcagcggcaagtcgtcgctggcgtttgacacgctgtatgccgaagggcaacggcgttatgtcgagagcctttccgcctatgcgcggcagtttttgcagatgatggacaaacccgatgtcgatttaattgaaggtctgtcgcctgcaatttccatcgagcaaaaatccaccagccacaacccacgctccaccgtcggtacggtaactgaaatccacgactatctgcgtcttttatacgcccgtgtcggtaccccgtattgtcccgaacacaagctgccgctgtcgagccaaaccgtatcgcagatggtcgatgccgtattgaaactgccggaagacacgcgtgtgatgattcttgcccccaccgtgcgcgagcgtaagggcgagtttgtcgatttctttgccgacttgcaggcgcagggttttgcgcgggtgcgcgtggacggcgaggtctatcagcttgacgaagtgccgaagctggaaaaaaacatcaagcacaacatcgacgtggtcatcgaccgcgtgaaagtgaaggcggacatcaagcagcggctggcggaaagttttgaaaccgcgctgcgccacggcaacgagcgcgcgctggcaatggagatggacagcggcgaagagcattggttttccgcgcgtttcgcctgccccgtgtgttcatacagcctgcctgaattagagccgcgcctcttttccttcaacaacccgatgggctcctgcccgacttgcgacggcttaggcaacaccaatttcttcgaccccgaaaaagtagtcgcccatcccgaactgtcgttggcaacgggcgcgattgacggttgggacaagcgcaaccagttctatttccaaatgattcagtcgctggcgcggcattacggtttcgatgtgcaggctgcttgggaaacgctgcctgaaaaagtcaaaaaagtcatcctgcacggttcgggaaaggaagtgattgatttcacctacctatccgaacgcggcactaccttcaaccgcagccatgccttcgaaggcatcatccccaatctcgaacgccgctaccgcgaaaccgacagcgaaaccgtgcgcgaaaaactgcgcgaataccaaaaccaccgcgcctgcccgagctgcggtggtgcacgtttgcgcaaagaagcccgctacgtttacgtcagcggcgaaccgctgcacgaagtctccgcctggccgctgaccaaaacccaccgattctttgaaacgctggatttggacggcaacaaaaaacaaatcgccgaaaaaatcctcaaagaaatcaccgaacgtctcggctttttgattaatgtcgggctggattacctgaatctctcccgttccgccgaaaccctttccggcggcgaagcccagcgcatccgcctcgccagccaaatcggcagcggcctgaccggcgtgatgtacgttttggacgaaccctccatcggcctgcaccagcgcgacaacgaccgcctgcttgccaccctcaaacgcctgcgcgatttgggcaacagcgtcatcgtggtcgaacacgacgaagacgccatccgcgaagccgatttcgtcgtcgatatgggcccgggcgcaggcgaacacggcggcaacgtattgattgccgacacgcccgaaaacgtcgccaaatgcgaaaactccgttaccggacaatacctcagcggcaaaaaatccattgccgtgccgtctgaacgcacgcccgtcaatcccgaacgaatgctcgtcctcaaaggcgcgcgcggcaacaacctcaaaaacgttacccttgagctgccgctcggtttgattacctgcatcaccggcgtatccggcagcggcaaatccaccctgattaacgacaccctcgccaaaatcactgcccgcgaactcaaccgcgcccaagaagaacccgccccatacgacgacatccgcggcctcgaacacctcgacaaagtcatcaacgtcgaccaatcccccatcggtcgcaccccgcgctccaaccccgccacctacaccggcctgttcacccccatccgcgaactcttcgccggcgtacccctctcgcgcgaacgcggctacaacgtcggcagattctccttcaacgtcaaaggcggccgctgcgaagcctgccaaggcgacggcgtgattaaagtcgaaatgcacttcctgcccgacgtgtacgtcccctgcgaagtctgccacggcaaacgctacaaccgcgaaaccctcgaaatccaatacaaaggcaaaaacatcagccaagtcctcgacatgaccgtcgaagaagcccgcgaatttttcgacgccgtccccaccgtatcgcgcaaactgcaaaccctgatggacgtaggcctgggctacatccgcctcggccagtccgccaccaccctctccggcggcgaagcccaacgcgtcaaactcgccttggaactctccaaacgcgacaccggcagaacactttatatcctcgacgaacccaccaccggcctgcacttcgccgacatcgccctgctactggaagtcataggccgtctgaaaggcaaaggcaactcgatagtgattatcgagcataatctggatgtgattaaaacagcggattggattgtggacttggggccggaaggcggagatggcggggggaggattattgctaaaggtagtcctgaacaggtggcgaaagttaaggggagttatactgggaagtatttgaaggtggttttgaggtaa

SEQ ID NO: 51042 - DNA, 1413 bp, Neisseria meningitidis
atgaaaatttccagacctccggaatttaccctgttgcaacaggaatatatgcagcatctcactgaaagaatgacgcaaattgccaagctgctgaattcttccgcaaacaatcctgatatagacattcccgattttcttactgaaatcaaagattattcagaattttccgtgacagatgaaaatggaacctacctgcattgggacaaattccgccggattcacacggaagatacgcggatgaaatggcgcgccgttaaggaaagccgcaaaaaaatccaaaaaccaattgatttcccgtttgaacatcagttttggttctgcattcccgactctttgcaggcacggcttcatttgattgacaaaagctgcggcagttctatcggcacgtctagcttgggtggcttcggcagaagcgagcaaaacagattcttgctcaagtctctgattatggaagaagcgattacatccgcccaactggaaggtgcggctaccacgcgtaaagtggccaaggatatgctcaaatcgcagcgtaaacccaaaacaaaagacgaaatcatgatagtgaacaactatcacttgatgaaaaaagcggtagaattgaaaaatacgccgttaagtgttgaaatgattttggatttgcaccgcattgctaccagtaacgctattgaaaacaaggccgagcccggacaattcaggcaggatgacgaaatctttatcgccgatatcaatggtaacagcctgtatcaaccaccgccgcacggacaggttcatacgctgatggaagaggtgtgtgcgtttgccaataatacctatgacggcgtggaaaatccgtttatccatccggttgtccaagctattatcttgcatttcctcatcggctacatccacccatttggtgatggcaacgggcggacagcgcgggctttgttctattggtttatgctcaaaaacggctactggctatttgaatacatatccatcagccgtcttctgaaaaacgctcctgcccaatacgccaaatcctatttgtatgcggaaactgacgatttagatttaacctatttcatctattaccaatgcgatattatcaagcgggcggttgccgatttggagcactacatttccgacaaacaaaaacaccaacaggaattcaaagcagcgattgcccaatatactgaaaagataggaaagttgaaccaacggcaaattggtatcctgcaaaaagcagtggaagaaagcggaaaaatctttactgcacaagaaattgccaaccaatacggcatctccctgaatactgcccgtagcgatttgagtaaactgggagaatatagattcctagtgccgttcaaatcaggaaatgctttagagtatgttgctcctcaggatttattggaaaggttagaaaaaaaatag

SEQ ID NO: 51043 - DNA, 951 bp, Neisseria meningitidis; identical to SEQ ID NO: 42789

SEQ ID NO: 51044 - DNA, 723 bp, Neisseria meningitidis; identical to SEQ ID NO: 42576

SEQ ID NO: 51045 - DNA, 1557 bp, Neisseria meningitidis
atgacactagcagagttttggccgctgtgcctccgccgtcttcacgatatgttgcctcaagggcagtttgcgcaatggattgcgccccttaccgtcggtgaggagggtggcgtatgggtggtgtacggcaagaaccagtttgcctgcaatatgctcaagagccagtttgccggaaaaatagaagcggtgagggaagagttggctgccggccgttccgccttcgtattcaaaccgggagaaggcgtgcgttatgagatggcggtggttgaaggtgctgtcgaacctgccgagccgtccttgcacgcggggtcggaggagatgcctgtgcaggaggttctgttggatgagctgccgtctgaagagcctgtcaaacccgctgcgtcgaaaacggcggcggatattttggcggaacgtatgagaaacctgccgcacgagccgcgccatactgccgaacctgcttcccgtccggaatcggaggtgcttgcgaaagcgcggacggatgcgcagcgcgatgcggaagaggcgcgttacgagcagaccaatctgtcgccggattatacgttcgatacattggtcgaaggcaagggcaaccgccttgcggcggctgccgcgcaggcgattgcggaaagcccggggcagagctacaacccgtttttcctctatggcagtacgggtttgggtaaaacccaccttgtgcaggcggtcggcaacgaactgttgaaaaaccgtcccgatgccaaagtgcgctatatgcattcggacgactatatccgcagctttatgaaggcggttcgcaacaatacctacgacgtgttcaagcagcaatacaagcaatacgacctgctgattatcgacgacatccagttcatcaaaggcaaagaccgtacgatggaggaattcttctatctgtacaatcatttccataacgagaaaaaacagctcatcctcacttgcgatgttttacccgccaaaatcgaaggtatggacgaccgcctcaaatcccgtttttcatggggactgactttggaactcgagccgcccgaattggaaatgcgtatcgccattttgcagaaaaaggcggaagcggcgggcatcagtattgaagacgaagccgcgctgttcattgccaatctgatccgttccaacgtgcgtgagcttgaaggcgcgttcaaccgcgtcggagcgagcagccgctttatgaaccgtcccgtcatcgacatcgatttggcgcgtaccgctttgcaggacattattgccgagaagcacaaagtcatcaccgccgatattattattgatgccgttgcgaaatattaccgcatcaaaatcagcgatgtgctcggtaagaaacggacacgaaacattgcccgtccgcgccaggtggcgatgagcctgaccaaagaactgaccactttgagcctgccgtctatcggcgattcgtttggtgggcgcgaccatacgaccgttatgcacggcatcagggcagtggcgaaactgcgcgaagaagatccggaattggctcaggattatgaaaagctgctgattctgattcaaaactga

SEQ ID NO: 51046 - DNA, 1176 bp, Neisseria meningitidis
atgctgaacactttcctttccccgtggccctgcttcacccaagaagaagccgatgccgtttccaaagtcctgctgtccaacaaagtcaactactggacgggcaacgaatgccgcgaatttgaaaaagaatttgccgcctttgccggcacgcggtacgccgtcgcccttgccaacggcacgctggcgctcgatgtcgcgctcaaagcaatgggcatcggccaaggcgacgatgtgattgttacctcgcgcaccttcctcgcttccgcgtcctgcattgtgaacgcgggcgcaaatccggtgtttgccgatgtggatttgaacagccaaaacatcagcgcggaaaccgtcaaaaccgtgctgaccccgaataccaaagcgattatcgtggttcaccttgccggtatgcccgccgaaatggatggcatcatggctttggcaaaagaacataatctttgggtaatcgaagactgcgcccaagcgcacggcgcgaaatacaaaggcaaatccgtcggcagcatcggacacgtcggcgcatggtcgttctgccaagacaaaatcatgaccacgggcggcgaaggcggcatggttacgaccaacgacaaaaccctgtgggaaaaaatgtggtcgtacaaagaccacggcaaaagctacgatgccgtgtaccaccgcgaacacgcgcccggtttccgctggctgcacgaaagtttcggcacaaactggcgtatgatggaaatgcaggcggcaatcgggcgcatccagctcaaacgcctgcccgaatggactgcctgccgtcaagcgcacgccgccaagctggcggaaagcctaggcaaattcaaaagtatccgcttggttgaagtcgccgactacatcggacacgcgcaatataagttctacgccttcgtcaaacccgaacacctcaaagacggctggacgcgcgaccgcatcgtcggcgaactgaacgcgcgcaaagtcccctgctatcaaggcagctgctccgaagtctatttggaaaaagccttcgacaacacaccttggcggccgaaagagcgtttgaaaaacgccgtcgaactgggcgacaccagcctgatgttcttagtacatccgacgctgaccgacggcgaaatcgcgttctgcaaagaacacatcgaagccgtattgaccgaagccacacgataa

SEQ ID NO: 51047 - DNA, 1134 bp, Neisseria meningitidis; identical to SEQ ID NO: 43834

SEQ ID NO: 51048 - DNA, 231 bp, Neisseria meningitidis
atgaacatcgttaaaaaatacgctgtaaaagcagccttggcagccggtatcttcacaccggccattgttatggcagatacctttgatgcatccgcgattggtacgcaagtagcgaatgtaatcatgggtttcgtgtcaatggtttccgccgtgggtatggcggccattacggtcatcttggcaatccaaggcttcaaaatggcttggagcatgattaaatctgtcagataa

SEQ ID NO: 51049 - DNA, 1011 bp, Neisseria meningitidis
atgccaatttttaagggtttggacatgaaaaactttctttcccttttcgcctccatactgatgtctgccctgattgccgtgtggttcagccaaaaccccatcaacgcctactggcagcagacctaccaccgcaacagtccgctcgaaccgcttgccgcctacggatggtggcggagcggtgcggcgttgcaagaaaacgcctacaccctttcagacggcatcaaagccttcctgtccggcgaaacgccgccgacgccccaagacggcggttcggcagatatgccgcctgaagccgccgcatccgaagccgcccctcaaaccggcgaaatccaagaatggaaacaggacaccgacaccgccgccgtccgcagcggcgacaaagtcttttttgtcggcgactcgctgatgcagggcgttgcccccttcgtgcaaaaaagcctgaaacagcaatacggcatcgaatccgtcaacctcagcaaacaaagcacggggctgtcctacccctcattctttgactggccgaaaacgattgaagaaaccctgcaaaaacatcccgaaatcagcgtgctcgccgtcttcctcggcccgaacgacccgtgggatttccccgtcggcaaacgctacctcaaattcgcttccgacgaatgggcgcaagaatacctgaaacgcgtcgaccgcatccttgaagccgcacacacgcaccgcgtccaagtcgtctggctcggcatcccctacatgaaaaaagccaagctcgacgggcagatgcgctacctcgacaaactgctttcggaacatttgaaaggcaaaatcatcctgattcccaccgcgcacaccctgagcggcgggaaagaccgctacacggactccgtcaacgtcaacggcaaacccgtccgctaccgcagcaaggacggcatacactttaccgccgaaggacaaaaactgctggcggcaaaaataatggaaaaaatcgtttttgaaccaagtacgcaaccatcaagtacacagccatga

SEQ ID NO: 51050 - DNA, 1158 bp, Neisseria meningitidis; identical to SEQ ID NO: 43477

SEQ ID NO: 51051 - DNA, 471 bp, Neisseria meningitidis; identical to SEQ ID NO: 42963

SEQ ID NO: 51052 - DNA, 957 bp, Neisseria meningitidis; identical to SEQ ID NO: 42087

SEQ ID NO: 51053 - DNA, 834 bp, Neisseria meningitidis
atgccgcacgccctcgtcctccaatttccctccgccgaagccctgccttccgacttcccctcccgcctgcccgaacctgattgcgccgatgaaaagcgtatgcgttttatcgttgaagaagggttttctttaagcggggcggacgcggcgttgcttggcagccgtcaaatcgaccacgccgtgttgccggatatggattttggcgaactcggtttgattgtcagcgatatggattcgacgctgattaccatcgaatgcgtcgatgaaattgcggcaggcgtgggtttaaaagacaaggtagcggaaattaccgagcgttcgatgcgcggagagttggatttcgagcagtcgttgcgcagccgcgttgcgctgttggcgggattggacgaacagattttggcggacgtttatgaaaacgttttgaagctctcgcccggtgcggaatttttgttggacgaatgcaaaaggcacgatgtgaaattcctgctggtgtccggcgggttcacgttttttaccgaacgtctgcaacaacgcctcggcttcgaataccaacacgccaatgttttggaaattgaaaacggcaggttgaccggccgtctgaaaggcagaatcatcgacgcgcaggcaaaggcggatttattgcgcgaataccgcagccgcctcggattgcagccacatcaggtgttggcgatgggcgacggtgcgaacgatattccgatgctcaaagaagcgggcataggcgtggcttaccgtgccaaaccgaaagcgcgggccgccgccgatgcctgtatcaatttcggcggtttggagcgtgtacgcggcctgttcggatag

SEQ ID NO: 51054 - DNA, 999 bp, Neisseria meningitidis; identical to SEQ ID NO: 43774

SEQ ID NO: 51055 - DNA, 969 bp, Neisseria meningitidis
atgactgccaaacctttttccctcaacctgaccaacctcctgctgctggcggcgttgtttgccgtcagcctgtcggtgggcgttgccgatttccgctggtcggatgtgttttcgctatccgacagccagcaggttatgttcatcagccgcctgccgcgcacgtttgcgattgtgctgacgggcgcgtcgatggcggtggcggggatgattatgcagattctgatgcgtaaccgttttgtcgaaccttctatggcaggcgcgggtcagagtgcggctttgggtttgcttctgatgtccctgctgctgcctgccgcgccgctgccggtcaaaatgtcggttgccgccgttgccgcgttaatcgggatgctggtgtttatgatgcttatccgccgtctgccgccgaccgcgcaactgatggtgccgctggtcgggattattttcggcggcgtggttgaggcggtggcgacctttatcgcgtatgaaaacgaaatgctgcaaatgctcggcgtgtggcagcagggcgatttttcgagcgtgctgctggggcggtacgagctgctttggattacgggcggtttggcggtgtttgcctatctgattgccgaccggctgacgattttggggctgggcgagacggtcagcgtgaatttgggtttgaaccggacggcggtgttgtggtcggggctgattattgtggctttgattacgtcgctggttatcgttacggtcggcaatattccgtttgtcgggctggtcgtgccgaacatcatcagccgcctgataggcgacaggctgcgccaaagcctgcctgcggtggccttgttgggcgcgtctttggtgttgctgtgcgatattttgggacgcgtgattgtgtttccgtttgaaattccggtctctacggtttttggtgtgttgggtacggctttgtttttgtggcttttgttaaggaaacctgctcatgccgtctga

SEQ ID NO: 51056 - DNA, 8175 bp, Neisseria meningitidis
atgaaccgcaccctgtacaaagttgtatttaacaaacatcgaaactgcatgatagccgttgctgaaaatgccaaacgcgagggcaaaaacacagccgacacccaagctgtaggtattttgccaaatgatattgcgggctttgcgggttttatccattctatctctgttatctcattctccctttcattactgctcggttctgcccttatcctgacttcttcttctgctactgcccaaggtatcgttgccgacaaatccgcacctgcacagcaacagcctaccatcctgcaaacaggtaacggcataccgcaagtcaatattcaaacccctacttcggcaggggtttctgttaatcaatacgcccagtttgatgtgggtaatcgcggggcgattttaaacaacagtcgcagcaacacccaaacacagctaggcggttggattcaaggcaatccttggttggcaaggggcgaagcacgtgtggttgtaaaccaaatcaacagcagccattcttcacaactgaatggctatattgaagtgggcggacgacgtgcagaagtcgttattgccaatccggcagggattgcagtcaatggtggtggttttatcaatgcttcccgtgccactttgacgacaggccaaccgcaatatcaagcaggagaccttagcggctttaagataaggcaaggcaatgttgtaatcgccggacacggtttggatgcacgtgataccgattacacacgtattctcagttatcattccaaaattgatgcacccgtatggggacaagatgttcgtgtcgtcgcgggacaaaacgatgtggccgcaacaggtgatgcacattcgcctattctcaataatgctgctgccaatacgtcaaacaatacagccaacaacggcacacatatccctttatttgcgattgatacaggcaaattaggaggtatgtatgccaacaaaatcaccttgatcagtacggtcgagcaagcaggcattcgtaatcaagggcaatggtttgcctcagccggcaatgtggcagtgaatgctgagggtaaactggtcaacacgggcatgattgcagcgacgggagaaaatcatgcggtttcacttcatgcccgcaatgttcataatagcggtacggttgcctcacaggatgatgccaatattcacagccagacgctggacaattcaggtacggtcttatcctcaggtcgattgactgttcgtaatttaggccgtctgaaaaaccaaaacaacggtacgatccaggctgcccgcttagatatgtcaacaggtggtttggataacacaggtaatattactcaaacaggttcacaagcattggatttggtatctgccggcaaattcgataacagtggcaagattggtgtaagtgacgttccacagaccggtttgaatcccaatccatcagtcataccacagattccgagtactgcaacaggttcaggcagcagcactgtctcggtatctaagcctggttcaaacaatcccgtttcacctacagcacctgcaaaaaactacgccgtaggacgcattcaaacaacaggagcatttgacaatgcaggatcaattaatgcgggtgggcaaattgacattgccgcccaaaacggtttgggaaattcgggtagtctgaatgcggctaaactacgagtatcaggcgattcatttaacaatacggtaaaaggcaaactccaggcacacgatctggctgttaacactcaaactgctaaaaacagcggtcacttattaactcaaaccggcaagattgataaccgtgaactgcataatgccggagaaattgccgccaacaatctgacactcattcattcgggccgcttgagcaatgataaaaaaggcaatattcgagctgcacatttacagcttgataccgccggtttacataatgcaggtaacattcttgccgatagtggaaccgttaccaccaagaataatcttcgcaatacaggaaaagtttctgttgcacgactgaataccgaaggtcagactctagataatacgcgcggacgtatagaggctgaaacggttaacatccaaagtcagcaactgactaaccaaagcggccatattactgctaccgaacaactgactatcaatagtcgaaatgtagacaaccaaaacggcaaactcctatctgcaaaccaagcacaattagctgtttcagacggcctaaacaaccaacatggtgaaattgccaccaaccggcagttgtctattcacgataaaaatcaaaacactttggcgttaaacaatgcggatggcacgattcaatctgccggtaatgtatcgctaaaagccaaatcactcgccaacaatggcacattaacagccggtaacaaactggatattgctttgacggacgatttcgtcgtagagcgcgacctcactgcaggcaaacaattaaatctaagcataaaaggccgtctgaaaaatacccataccctacaagcaggccatacgctcaaactcaatgccggcaatatagataaccaagttacaggcaaaattattggtggagaacaaacggacatcacatccgaacagcatgttgacaacaggggcttgatcaacagcgacggtttgacccacatcggtgcaggtcaaaccctgaccaacaccgggacaggcaaaatctatggcaaccatattgccctggacgcgcaaatactgcttaaccgggaagaaacgacggaaggcagtaccaaagcggggacaatagctgcaaggaaacgtttggatattggagcgaaagagattcataaccaagaaggtgccctactatccagcgaaggtatttttgccgtaggtaatcgactggatgaacaacatcatgcggcaggcatggccgatacctttgttaatggcagtgccggtttggaagtacaaggtgatgcattgatgtccgttcggaatatgcagaatatcaataatcactttaaaacagagacatacttagccaaagcagaaaagcaagttcgtgactacaccgtactggggcaaaatacctactatcaggcaggaaaagacggtttattcgacaactcgcaaggacaaaaagaccaaactactgctacgttccatttaaaaaatggttctcgtattgaggccaaccaatggcatgtccgagactaccacatcgagacttataaagaacgcatcatcgaaaaccggccggcacacattactgtgggcggtaatttgactgcctcaggtcaaaattggctgaacaaagacagccggattgtagtaggcgggcgtattatcactgatgatttaaaccagaaagaaattaccaatcaaagtacaacaggcaaaggtcgcacagatgctgtcggcacacagtgggattcagttacaaaaaaaggatggtacagcggtagaaaaagacaacgccgtactgaaagaaaccatactccttaccatgatacccaactatttacccacgacttcgacacgcctgtatccgtcatccaacagaatgccgcctccccttcctttcaacccgctgcatctgcaatcaaactgattgacggagtatccacagccgccgtcaatggtcagcgcatccataccggtaatgtggtctcgttaaataacgctactgttactctgcctaacagcagcctctataccacccatcctgacaataaaggctggttggttgaaaccgatcctcaatttgcagactaccgccgctggttgggcagcgactacatgttgcaacaactgaaattggacaccaatcatctacacaaacggcttggcgacggctactacgaacaaaaacttgttaatgaacaaatccatcagttaacaggctaccgccgactcgacggctacaggagtgatgaagaacaattcaaagctctgatggacaacggccttactgctgccaaaacattcgctctcaccccaggtatcgccttgagtgcagagcaagttgcccgcttaacttcagatatcgtttggatggaaaatcaaaccgtcaccctgtctgacggttcgactcaaaccgtactggttcctaaagtctatgccctggcgcgcaaaggtgatctcaatacctccggtggcctgattagtgccgaacaagtcttacttaaactgcaaaacggcaacctgactaacagcggtaccattgcggggcgacaggccgtactcatccaggcacggaatattaacagcaacggcaacattcaagccgaccaaatcggcttaaaagctgaaaaaagtatcaatatcgacggcgggcaggtacaagcaggcagactgctgactgcccaagcgcaaaatatcaaccttaacggtacaacccaaacttccggtaatgaacgtaacggcaataccgccatcgatcgtatggccggcattaacgtggtcggaagccatactgaacaagtagataacagaacttcagacggcatcctatccctgcatgccggcaacgatatcaacctcaatgcggccaccgtctctaaccaagttaaagacggcactacccaaattaccgccggcaataatctcaacctcggcaccatccgtaccgaacatcgcgaagcctatggtacattagatgacgagaaccatcgccatgtccgccaaagtaccgaagtcggcagcagtatccgcacgcaaaacggcgcactgcttagagccggtaacgacttaaaaatccgccaaggcgaactagaggccgaagaaggcaaaaccgtccttgccgcgggacgtgatgtcactatcagcgaaggacgccaaataaccgaactggatacctcggtaagcggaaaaagcaaaggcatcctttccagtaccaaaacacaggatcgctaccgcttcagtcatgatgaagcagtcggcagcaacatcggcggcggcaaaatgattgttgcagccgggcaggatatcaatgtacgcggcagcaaccttatttctgataagggcattgttttaaaagcaggacacgacatcgatatttctactgcccataatcgctataccggcaatgaataccacgagagcaaaaaatcaggcgtcatgggtactggcggattgggctttactatcggtaaccggaaaactaccgatgacactgatcgtaccaatattgtccatacaggcagcattataggcagcctgaatggagacaccgttacagttgcaggaaaccgctaccgacaaaccggcagtaccgtctccagccccgaggggcgcaataccgtcacagccaaaagcatagatgtagagttcgcaaacaaccggtatgccactgactacgcccatacccaggaacaaaaaggccttaccgtcgccctcaatgtcccggttgtccaagctgcacaaaacttcatacaagcagcccaaaatgtgggcaaaagtaaaaataaacgcgttaatgccatggctgcagccaatgctgcatggcagagttatcaagcagcccaacaaatgcaacaatttgctccaagcagcagtgcgggacaaggtcaaaacaacaatcaaagccccagtatcagtgtgtccattacctacggcgaacagaaaagtcgtaacgagcaaaaaagacattacaccgaagcggcagcaagtcaaattatcggcaaagggcaaaccacacttgcggcaacaggaagtggggagcagtccaatatcaatattacaggttccgatgtcatcggccatgcaggtactgccctcattgccgacaaccatatcagactccaatctgccaaacaggacggcagcgagcaaagcaaaaacaaaagcagtggttggaatgcaggcgtagccgtcaaaataggcaacggcatcaggtttggaattaccgccggaggaaatatcggtaaaggtaaagagcaagggggaaatactacccaccgccacacccatgtcggcagcacaaccggtaaaactaccatccgcagcggcggggataccaccctcaaaggtgcgcagctcatcggcaaaggcatacaggcagatacgcgcaacctgcatatagaaagtgtacaagatactgaaacctctcagagcaaacagcaaaacggcaatgtccaagttactgtcggttacggattcagtgcaagcggcagttacagccaaagcaaagtcaaagcagaccatgcctccgtaaccgagcaaagcggtatttatgccggagaagacggctatcaaatcaaagtcagagacaacacagacctcaagggcggtatcatcacctccacccgaagtgccgaaagcaaagggaaaaaccgctttcagacggccaccctcacccatcgcgacattcaaaaccacagccgctacgaaggcagaagcttcggcataggcggcagtttcgacctgaacggcggctgggacggcacggttaccgacaaacaaggcaggcctaccgacaggataagcccggcagccggctacggcagcgacggagacagcaaaaacagcaccacccgcagcggcgtcaacacccgcaacatacacatcaccgacgaagcgggacaacttgcccgaacaggcaggactgcaaaagaaaccgaagcgcgtatctacaccggcatcgacacagaaactgcagcccaacacacaggtcgtctgaaaaacagcttcgacaaagacgcggtcgccaaagagatcaacctgcaaagggaagtaacgaaggagttcggcagaaacgccgcccaagccgtagcggccgttgccgacaaactcggcaatacccaaagttacgaacggtatcaggaagcccgaaccctgctggaggccgaactgcaaaacacggacagcgaagccgaaaaagccgctttccgcgcatccctcggccaagtaaacgcctatcttgccgaaaaccaaagccgctacgacacctggaaagaaggcggcataggcaggagcatactgcacggggcggcaggcggactgacgaccggcagcctcggcggcatactggccggcagcggcacttcccttgctgcaccgtatttggacaaagcggcggaaaacctcggtacggcgggcaaagcggcggtcaacgcactgggcggggcggcaatcggctatgcggcgggcgggaatgtcggcacggcggcagtaggggcgaatgtcgattggaacaataggcagctgcatccgaaagaaatggcgttggccgacaaatatgccgaagccctcaagcgcgaagttgaaaaacgcgaaggcagaaaaatcagcagccaagaagcggcaatgagaatccgcaggcagatactgcgttgggtggacaaaggttcccaagacggctataccgaccaaagcgtcatatcccttatcggaatgaaaggcgaagacaaagccttgggttatacttgggactaccgcgactacggcgcaagaaatccgcaaacctacaacgatccgaagctgtttgaggaataccgccgacaggacaaacccgaataccgcaacctgacctggctgcacagcgggacgaaagacaccaaaatcaggcagggagagcggaaaaacgaagagtttgcactgaacgttgccgaaggactgacgagccttgtcaaccccaatccgaggataaaagtcccgattcttgcaggcatccgcaacctgaaaaacatcaagccgacagttaccggcagcgatcccttattggcgggtgcggggaatatccgtatccctgcaaccagcaatgttgcgaaggtggacaggattccggatacggcattggcgtcgaagagtcatcaaaagaatgattttggtacgtctaaaggacagggagcagagtcttctatacctgttcctcaagctatctcaataaaaattaaaaatccagataaaacggttagtgaaactacttatcaatctaaccctaaacatactcctggtcagttagggtttaagtttgatgctggtattgagccaaagaattcagttcaattaattgaaagttcggtacaaattggtaaacagcgatttgcaattgatgataagggacatattcatcgttatatggggggcgataggaaaaatgaaccttggcattgggctggttctacatccgataagaagaatcccttgtccttaacaagtcaacaaaaagcaggaattaaaagagcataccccgagcaatcaaagaacaagttattaaaataa

SEQ ID NO: 51057 - DNA, 126 bp, Neisseria meningitidis; identical to SEQ ID NO: 39360

SEQ ID NO: 51058 - DNA, 141 bp, Neisseria meningitidis
atgatgcccaccatattcaaccatttagaaaataatggtggtaatatttggcaaaacattactccagccaggtatcctgaacagcatcaaggcggcattcatcaggcagatggatcattaaaaattcttctattattgtga

SEQ ID NO: 51059 - DNA, 2610 bp, Neisseria meningitidis
ttgaccgccgaaccatccacctcccttttcccgccaatcgaaagaataaaaatgcctgcaaacctgtcttcagcactggaaaccttcaaacggcagcgcgatgccgccgaagcgcattatttgaaagccaaccgcgtgtcggtatttttcagggaatatacggcggcagtcgaaaccttactggcggcattgtgggtagaacattttcaaaacagcgcgttatgcctgatggcggtgggcggcttcgggcgcggcgaactgtatccctgttcggatgtggatttggcggttgtctcccctgccccgctttcagacggcattcaggaacagattgcccggtttgttcaaaccctatgggactgcaaactgatgccgtctgtaaaaagcggcggcattggcgaactgtgcgaaagcgtgcgcgacgatattacgggggacacggcgtttttagaggcccgttttttgttcggcaaccgccaaacggcggacgaactggcgaaaaaaatgaacgcgcagcgcaatgtgccggcgtttgtcgaggcaaaactggtggagatggaacaccgccacgccaaatcgcaaggctcaggggcggtattggaaccaaacatcaaaagctgtccgggcggtctgcgcgacatccacaccctgctttggatagcgaaggcgcaaggcttggcgaccgacctgcccgacctgctcaaacagcggattttgacgcgtgccgaagccggtatgctttcgcacggctaccgccgcctcgcccacatccgcatccatctgcatttaaacgccaagcgcgccgaagaccgcctgctgttcgatttgcagccgcaagtcgccgaaagcatgggttatgaaggcttgaacctccgccgccaaagcgaagaactgatgcgcgtgttttaccgcgcgattaaaaccgtcaaacaactgggcggcatcctcacgcctatgctgcaaagccgcgtttcctccaccccgttgcgcgttaccctgcggattgacgacgactacatccaagtcaacaaccaaattgccgcgcggcacaccgatatttttttcagacggcccgaacacattttcaaaatcgtcgaaatcatgcagcagcgcaacgatattaccgcgctcgaaccgcaaaccctgcgcgcatggtggggcgcgacgcgcaaaatcaaccgcagcttctaccaaaattctgaaaaccgccaccgcttcgccggctttttccgcaacggcaacggactgacccaaaccctgcgcttcctcaacctctacggcgtattgggacgctacctgcccgcgtgggaaaaaatcgtcggcctgctccagcacgacctgttccacatctatcccgtggacgaccacatcctcaccgtcgtccgcaacgtccgccgccttgccttggatatgcacagccacgagctgccctacgcctctgcactgatgcagtcctttgaaaaacaagacatcctctaccttgccgcctttttccatgacatcgccaaaggacgcggcggcgaccatgccatacaaggcatcgcagacgcgcgccaatttgccgccgaccacttcctgaccgaagaagaaagcgacctgctcgcctggctggttgaaaaccatcttcttatgtccaccgtcgcccaaaaagaagacatccaagaccccagcgtactcgatgccttctgcaaacgcgtccaaacccacgaacgcctcagcgcgctctaccttctgaccatttccgacatacgcggtaccaatcccaagctgtggaacgcatggcgcgccagcctgctggaaagcctcttccatgccgccggccgctaccttacaggcaacggcggcaacccgcacaccctcttcggccgccgccggcaggaagccgccgacttactcacccgcgccgccgtccccgaaaaacagcagaaaaaactatggaacgcgctcggttccgcctacttcgcccgccaccagtcccgcgaaatcctgtggcacgccgccaacctagtccacgactttgaaacccccatcgtccgcagccgcatcctgcccaaaagcgacagctttcaagtcatggttttcatgcccaacggcccgcgcctgttcgcccgcctctgccgcatcttcagccgccacggcttcgatatcctcgccgcccgcgcctttattaccgaacacgactacatcctcgacaccttcatcgtgcaaatcccctcgcagcacgctcccgaagactaccccgacatccaaagcgcgctcgaagccgaactcaacagctttatccacggacacaccgttgccgaaatctccagccatagccgccgcatcagccgccgcagccgctacatgccgatcgcgccaagcatcaccatcacccccgaagaagactatccggactggtactccgtcgaaattaccgccgtcaaccgccccttcctgctcgccgatatggcggaagtctttttcgcccacaacgtcagcctgcgctatgccaaaatctccacactggatgaacgcgccgaagacagttttaccgtttttagcctagacctgaaaaacccaaaaatccagtcctcattgaagcagacgctgctggaacaattatcataa

SEQ ID NO: 51060 - DNA, 1296 bp, Neisseria meningitidis
atgagcgtcatccaagacctgcaatcgcgcggccttatcgcgcaaaccaccgacatcgaagccttagacgctttgttgaacgaacaaaaaattgccctttattgcggcttcgacccgaccgccgacagcctgcacatcggacacctgctgcccgtattggcattgcgccgcttccaacaggcggggcatacgccgattgctttggtgggcggcgcgaccggtatgatcggcgaccccagcttcaaagccgccgaacgcagcttgaattccgccgaaactgttgccggctgggtggaaagtatccgcaaccaattaacccctttcttgagctttgaaggcggaaatgccgccattatggcgaacaatgccgactggttcggcagcatgaactgccttgacttcctgcgcgacatcggcaagcatttctccgtcaacgccatgctgaacaaagaatccgtcaaacagcgcatcgaccgcgacggcgcaggcatttccttcaccgagttcgcctactccctgctgcaaggctacgactttgccgagttgaacaaacgccacggcgcggttttggaaatcggcggctccgaccaatggggcaacatcaccgccggtatcgacctgacccgccgcctgaatcaaaaacaagtgttcggcctgaccctgcctttggttaccaaatcagacggcaccaaattcggcaaaaccgaaggcggcgcggtgtggctgaacgcaaaaaaaacctcgccgtaccagttctaccaattctggctgaaagtcgccgatgccgatgtgtataaattcctgaaatactttaccttcctgtccatcgaagaaatcgatgccatcgaagccaaagacaaggcaagcggcaccaagcccgaagcgcaacgcatcctcgccgaagaaatgacccgcctgattcacggcgaagccgccctgcaagccgcgcagcgcatttccgaaagcctgtttgccgaagaccaaagcagcctgaccgaaagcgacttcgagcagctcgccctcgacggcctgcccgtatttgaaatttcagacggcatcaacgccgtcgaagccttggtcaaaaccggtttggcatcctccaacaaagaagcacgcggctttgtcaacgccaaagcggttttgctcaacggcaaacctgccgaagccaacaaccccaaccacgccgccgaacgccccgacgatgcctgcctgctgaccgacgaacacaaacgtttcggcaaatacaccatccttcggcgcggcaaacgcaaccacgcgcttttggtttggaaataa

SEQ ID NO: 51061 - DNA, 354 bp, Neisseria meningitidis; identical to SEQ ID NO: 36480

SEQ ID NO: 51062 - DNA, 207 bp, Neisseria meningitidis
atgtttacttttttaaataaaaatatatttatcaaaacaattgtacttggctgtttttattcctttttattttttagtttttttgtatctggtaagtcatttggttattcatttgaaatttttaatatggatacaagtgcgcttgcttttttaagtgtatttatgggcttttttataagcgtggctgtgcatatttacgatatttaa

SEQ ID NO: 51063 - DNA, 582 bp, Neisseria meningitidis; identical to SEQ ID NO: 37778

SEQ ID NO: 51064 - DNA, 1188 bp, Neisseria meningitidis; identical to SEQ ID NO: 39794

SEQ ID NO: 51065 - DNA, 186 bp, Neisseria meningitidis; identical to SEQ ID NO: 37303

SEQ ID NO: 51066 - DNA, 477 bp, Neisseria meningitidis
atgccgatagaaatcgaacgccgttttttgattggaaacgacaactggcggcaatacgccgatgagccgctgctgttgaggcagggttatctgtctgttgaaaaagaacgcaccgtccgtgtccgcattgccggaaaacgggcgtggctgacgctgaaaggctatatttcggaaatcagccgcagtgagtttgaatacgaaatcccgcttgccgatgcggaaaagatgatggaaacgatgtgcccgtttaagatggaaaaacggcgttatccggtcagatggggcggcagcctgtttgaagtcgatgttttccttggcgaaaacgcgcctttggtcgtcgcggaaatcgagttgcccgacgagaatgccgattttgaccgtccggactggctgggacgggaaatcactgccgacggtatgtttaccaatgcttatttgagcaggcatccgttctcaagctggaaaaatgccgtctga

SEQ ID NO: 51067 - DNA, 1470 bp, Neisseria meningitidis
atgccgtctgaaaccgatatgttctgtgtcggcaatgtttcagacgaaaacggaaggacaaagattatgaaaaaaattcaagcggatgtcgtcgtaatcggcggcggtactgccggtatgggtgcgtttcgcaatgcccgtttacattcggataatgtttacctgattgaaaacaatgtgttcggcacaacctgcgcgcgcgtgggttgtatgccttccaaactcttgattgccgccgcagaagcgcgccaccacgcattgcataccgacccgttcggcgtgcatttggacaaagacagcatcgtcgtcaacggtgaagaggtcatgcagcgcgttaaatccgagcgtgaccgttttgtcggctttgtcgttgccgatgtggaagagtggcctgccgacaagcgcatcatgggttcggctaaatttatcgacgagcataccgtccaaatcgacgagcatactcaaattacggcaaaaagtttcgtgattgctaccggttcgcgtcccgtcatcctgccgcaatggcagtctttgggcaatcgtttgattatcaacgatgacgttttctcatgggatacgctgcctaagcgcgttgccgtgttcgggccgggtgttatcggtttggaactgggtcaggcattgcaccgtttgggcgtgaaagttgaaattttcggtttgggcggaatcatcggcggcatttccgaccccgtcgtttcagacgaggcgaaagccgtgttcggcgaagaattgaaactgcatctggatgctaaaaccgaggtcaaactagatgcagacggcaatgtagaagtccattgggagcaggacggcgaaaaaggcgtatttgttgccgaatatatgctggcagccgtgggccgccgtccgaacgttgacaatatcggtttggaaaacatcaatatcgaaaaagacgcgcgcggcgtacccgttgccgacccactgaccatgcagaccagcattccgcatatctttattgcgggcgacgcgtccaaccaactgcctctgctgcatgaagctgccgaccaaggcaagattgccggcgataacgcgggccgctacccgaatatcggcggcggtttgcggcgcagcaccatcggcgtggtgtttaccagtccgcaaatcggctttgtcggtctgaaatacgcgcaggttgccgcgcaataccaagccgacgaatttgtcatcggcgaagtatcgttcaaaaaccaaggccgcagccgcgtgatgctggtgaacaaaggccatatgcgcctgtatgccgaaaaagccaccggccgctttatcggcgcggaaatcgtaggccctgccgccgaacatttggcgcacttgctggcatgggcgcatcaaatgaagatgaccgttccgcaaatgctggatatgccgttctaccatcccgttatcgaggaaggtctgcgtaccgcgttgcgcgatgccgatgcgaaattgaaagcctga

SEQ ID NO: 51068 - DNA, 699 bp, Neisseria meningitidis; identical to SEQ ID NO: 42661

SEQ ID NO: 51069 - DNA, 2295 bp, Neisseria meningitidis
gtggaagaggaagcgatgaatacaccgactgatttgaaagtaaccaaacgagacggaagattagaagccattgatttggataagattcaccgtgtcgtcacttgggcggcggacggattggaaaatgtttccgtgtcgcaggtcgagttgaaatcgcacatccagttctacaacggcatccgcaccgacgacatccacgaaaccatcatcaaagccgctgccgatttaatttcggaagataccccggactaccaataccttgccgcgcgtttggcgattttccatcttcgtaaaatagcctacggcgagtacgagccgccgcacctttacgaccacgttaaaaaacttaccgatgccggaaaatacgacaggcatatccttgaggattacagccgcgaagaatttgacgaactgaacgcctatatcgaccacgaacgcgatatgtccttttcctatgccgctgtcaaacagctcgaaggcaaatatctggtacagaaccgcgttacccgccaaatttacgaaacgccgcagtttttatatgttttggtggcgatgtgccttttcagcaaatacccgaaagaggcgcgcttgggttacgtcaaacggttttacgatgccgtttctacatttaaagtatcgctgccgactccgattatgagcggcgtgcgtacgcctacgcgccagttctcaagctgtgtgctgattgaatgcgacgatagtttggattccatcaatgccactaccagcgcgattgtgaaatacgtttcccagcgtgcgggcatcggcatcaatgccggacgtatccgcggtttggacagcgaaatccggggcggcgaagcgcggcataccggctgcattcccttctttaaaatgtttcaggcggcggtcaaatcctgttcgcaaggcggcgtgcgcggcggcgcggcaaccttgttctaccccttgtggcatatcgaagccgaaagcctgctggtgttgaaaaacaaccgcggtgtggaagacaaccgtatccgtcagcttgattacggcgtgcaaatcaaccgcctgctgtacacccgcctgattaagggcggcaacattacgctgttttcgcccaacgaggttccgggattgtacgaagcgttttttgccgaccaagacgaatttgagcggctctatacgaaatacgagcaagaccctgatatccgcaagcgcatcattccggctgccgacctgttttccacgctgatgcaggagcgtgccggaaccgggcgcatctacattcaaaacgtcgatcactgcaatacgcacagcccgttcgatccgcgcgtcgcgcctgttcatcagtccaacttgtgtatggaaatcgccctgccgaccaaaccgctggacaatatcaacgatccgaacggcgaaatcgccctgtgtacactgtctgcctttaacttgggcgcattaaacagcttggacgaattggaagggcttgccgacttgaccgttcgtgcgctcgatgcacttttagattatcagggatatccggtagaagccgcgcgtacctctactatgggccgccgttcgctcggcatcggcgtgattaactatgcttattatctggcgaaaaacggtgtccgctacagcgacggttccgcgctcggtctgacccaccgtacctttgaagccatacagtattacctgctcaaagcatcggcaaaccttgccaaagaatacggtgcgtgcacgctctttaaccaaaccgtttattcgcaaggcaaactgcccatcgacacttacaaaaaagatttggatgccgtctgcggcgagcctttgcattacgactgggaaagcctgcgtgccgaaatcgtcaaatacggcctgcgcaactctactctgaccgcgctcatgccgtctgaaaccagctctcaaatcgccaacgccaccaacggcatcgagccgccgcgcggattggtaacggtcaaagcatcgaaagacggcattttgaaacaagtcgtgccggagtttgaaaccctgaaaaatgcctatgaaaccctgtggcagcttcccggcaacgaaggctacctgaaacttgtcggcgtgatgcaaaaattcgtcgatcaatcgatttccgccaataccgcctacgacccgggcaaattcgaaggcggcaaagtttctatgaaacaaatgctcaaagacctgctgaccgcctacaaatacggcgtcaaaaccctgtactaccataacacccgcgacggtgcggacgatacgcagaccgatattcaggatgacggctgcgcgggcggggcttgtaagatttga

SEQ ID NO: 51070 - DNA, 855 bp, Neisseria meningitidis; identical to SEQ ID NO: 43427

SEQ ID NO: 51071 - DNA, 1416 bp, Neisseria meningitidis
atgaacctgcatgcaaaggacaaaacccagcatcccgaaaacgtcgagctgctcagtgcgcagaagccgattaccgactttaagggcctgctgaccaccattatttccgccgtcgtctgtttcggcatttaccacatcctgccttacagccccgatgccaataaaggtatcgcgctgctgattttcgttgccgcactttggtttaccgaagccgtccacattaccgtaaccgcactgatggtgccgattctcgccgtcgtactcggtttccccgacatggacatcaaaaaggcgatggctgatttttccaacccgattatctacatttttttcggaggcttcgcgcttgccaccgccctgcatatgcagcggctggaccgtaaaatcgccgtcagcctgttgcgcctgtcgcgcggcaatatgaaagtggcggttttgatgttgttcctcgttaccgcctttctgtccatgtggatcagcaacaccgccaccgccgcgatgatgctgcctctagcaatgggtatgctgagccacctcgaccaggaaaaagaacacaaaacctacgtcttcctcctgctcggcatcgcctattgcgccagcatcggcggcttgggcacgctcgtcggctcgccgcccaacctgattgccgccaaagccctaaatctggacttcgtcggctggatgaagctcggcctgccgatgatgctgttgattctgcccttgatgctgctctccctgtacgtcatcctcaaacctaatttgaacgaacgcgtggaaatcaaagccgaatccatcccttggacgctgcaccgcgtgatcgcgctgttgattttccttgccacagccgccgcgtggatattcagctccaaaatcaaaaccgccttcggcatttccaatcccgacaccgttatcgccctgagtgccgccgtcgccgtcgtcgtcttcggcgtggcgcaatggaaggaagtcgcccgcaataccgactggggcgtgttgatgctcttcggcggcggcatcagcctgagcacgctgttgaaaacatccggcgcgtccgaagccttgggacagcaggttgccgccaccttttccggcgcgcccgcatttttggtgatactcatcgtcgccgccttcattatttttctgaccgagttcaccagcaacaccgcctccgccgccctgcttgtaccgattttctccggcatcgctatgcagatggggctgcccgaacaagtcttggtattcgtcatcggcatcggcgcatcttgtgccttcatgctgccggttgccacaccgcctaacgcgattgtgttcggcacgggcttaatcaagcaacgcgaaatgatgaatgtcggcatactgctgaacatcctctgcgtagtattggttgctctgtgggcttatgctgtactgatgtaa

SEQ ID NO: 51072 - DNA, 1260 bp, Neisseria meningitidis
atgaaacagaccgtcctcaaaaataacctgcaaaacctgcttgaaagcgcagaaaatatcctgctgcttcaaggccctgtcggcgatttttttctgcgccttgccgactggctgactgcaaacggcaaaaccgtacataaattcaactttaatgcaggcgacgactatttttatccgcccactcaagcgcataccgttgtttttaacgacaactacgatgcctttcctgagtttttgcaagaatacatcactcaacatcacatccaggccgttgtctgctttggcgacacacgcccttatcacgtcattgcaaaacgcattgcaaacgaaaaccaagccagtttctgggcgtttgaagaaggctatttccgcccctactacatcacattagaaaaagacggcgtcaacgcattttctccgttgccgcgccgtgccgacttttttttggaacaattccccaagctggcccagcaagaatacaaagcgccaacgccggtacgcggtgggtttacgcctatggccaaaaatgccgtccgttactatatcgaattgttccgcaatccgaacaagtacccgaactacatccaccaccgcgcatccaatgccggccattacctcaaactgtggtcaatctccatcctcaagcgtttgaactactatattgaagacatccaaatcgccaaacgcgtggaggcgggcaaatacggcaaattttttattgttcccttgcaggtattcaacgacagccaagtccgcatccattgcgacttttccagcgtccgcagcttcctgctccatgctttggcctcctttgccgcgcacgcgcctgccgataccaacctcatcatcaagcatcatccgatggaccgtggctttatcgactactcgcgcgacatcaaacgctttatcaaaaaacaccccaaactcaaaggtcgtatcacttacgtccacgacgtccccctgcccgttttcctgcgtcacggcctcggcatggtcaccatcaacagcaccagcggcctgtccggattgatccacaatatgccagttaaggttctcggccgcgcccattacgacattcccggcataactgaccaaaataccttggcagaattttggaatcatccgacgccgcctgacagcgacctgttccatgcctaccgtatgtaccacctcaacgtaacccaaattaacggcaacttctacagccaggtgttttttcctaacaaaaacacatccgactcttccacaccaacaacctaa

SEQ ID NO: 51073 - DNA, 1416 bp, Neisseria meningitidis
atgggcgcagatattgcccaattgaacagcaaggtaagaaccgaactgttcagcagtacgggcaatcaaaccattgccaaccttggaggcagattggccaccaacctcagcaatgcaggtatctcagctggtatcaataccgccgttaacggcggcagcttgaaagacaacttaggcaatgccgcattgggagcattggttaatagcttccaaggggaagccgccagcaaaatcaaaacaaccttcagcgacgattatgttgccaaacagttcgcccacgctttggcgggttgtgttagcggactggtacagggaaaatgtaaagatggggcaattggcgcagcagttggggaaatcgtagctgaatccatacttggcggcagaaaccctgctacactcagcgatgcagaaaagcataaagttatcagttactcgaagattattgcgggcagcgtggcggcactcaacggcggcgatgtgaatactgcggcgaatgcggctgaggtagctgtggtgaataatgctttgaattttgacagtacccctaccaatgcgaaaaagcatcaaccgcagaagcccgacaaaaccgcactggaaaaaatcatccaaagtattatgcctgcacatgcggcaggtgcgatgactaatccgcaggataaggatgctgccatttggataagcaatatccgtaatggcatcacaggcccgattgtgattaccagctatggagtttatgcagcaggttggacagctccgctgatcggtacagctggtaaagcagctatcagcacctgtatggctaatccttctggttgtactgtcatggttacgcaggctgctgaagcgggcgcgggaatcgtcacgggtgcggtaacggtaggcaacgcttgggaagctccagtaggagcgttgtcgaaagcgaaggcggctaagcaagctgctcctaaagaaacaataaacaatttggcaaatttagccaaagcagaacagcagattttattccgtattgcccaacgcgatacgcaactggatgcatggaagacgggatttaacaatagagtaaggaaaggagcaggcttgcttgatgcaagtaatattccgataaccattaacggaaaaaccatcaaacctgtacaagccataagcttaaagggagcacccgtttacagcggcgtaagcgaacaggagatttttgcgctttatcggcagatgactggccagaatccgaattttagagttttgcctgacggaagattagcaaatggcattatcagtactggagaatgggcaggaacaaaaattgcattaagaaatttttcaaaaacagagaattcaactcaagcacgatggacattagatttgcagaatcctccatcatttattaaaggtactaaattggagcttaaattccaataa

SEQ ID NO: 51074 - DNA, 810 bp, Neisseria meningitidis
atgaccgccctcccccgctacgccgttttcggcaaccccgttgcacacagtaaatcgccgcaaatccatcagcaatttgcccttcaggaaggcgttgacattgaatacgaacgcatttgcgccgacatcggcggtttcgcgcaggcggtttcgacattttttgaaacaggcggttgcggggcaaacgttaccgtaccgttcaaacaggaagcgtttcatctggcggacgagcattccgaacgcgcattggcggcaggtgcggtcaatacgctgattccgttgaaaaacggcaagctgcgtggcgacaacaccgacggtatcggtttgaccaacgacatcacgcaggtcaaaaatattgccatcgagggcaaaaccattttgcttttgggcgcaggcggcgcggtgcgcggcgtgattcctgttttgaaagaacaccgtcctgcccgtatcgtcattgccaaccgtacccgcgccaaagccgaggaattggcgcagcttttcggcattgaagccgtcccgatggcggatgtgaacggcggttttgatatcatcatcaacggcacgtcgggcggtctaaacggtcagattcccgatattccgcccgatatttttcaaaactgcgcgcttgcctacgatatggtgtacggctgcgcggcaaaaccgtttttagattttgcacgacaatcgggtgcgaaaaaaactgccgacggactgggtatgctagtcggtcaagcggcggcttcctacgccctctggcgcggatttacgcccgatatccgccccgttatcgaatacatgaaagccctataa

SEQ ID NO: 51075 - DNA, 171 bp, Neisseria meningitidis; identical to SEQ ID NO: 38633

SEQ ID NO: 51076 - DNA, 1470 bp, Neisseria meningitidis; identical to SEQ ID NO: 43805

SEQ ID NO: 51077 - DNA, 723 bp, Neisseria meningitidis
atgagtgaggatacggatatgttgcgttctattttggcggcttccctattggcggtatcttttccggcagcggctgaagcattgaattacaatattgtcgaattttccgaatcggcgggtgtcgaggtggctcaggatacaatgtccgcacgtttccaagtggcggcggaaggacgggacaaaaatgccgtcaatgccgagtttgttaaaaaattcaacagttttaacagaaaattgaaaaacggcagctttaaaaccgaattggtatcgcgcagtgcgatgccgcgctatcaatataccaacggcagacgcattcaaacaggctgggaggagcgtgcggaatttaaggtcgaaggtagggattttgatgcgttgaaccgttttattgctgatgttcagacggatgcttcgcttgaatataccgatttcagcgtgtcgcgtgaacgccgaaacgaggtcatcgatcaggtcagcaaggatgctattttgcgttttaagacgcgtgccgaaaaactggcgggcattttgggtgcgtccggttataaaatcgtcaaattaaatttgggacacatcggcagccatatcgcgggagggggagctgctcaggcaaaaatgcttcgtgccatgccgatggcggcaagcgtcaatatggagggtgcggattctgccgcacctggtgtggaggaaatcagcatcagcgtcaatgggacggttcagttctga

SEQ ID NO: 51078 - DNA, 444 bp, Neisseria meningitidis; identical to SEQ ID NO: 38644

SEQ ID NO: 51079 - DNA, 1233 bp, Neisseria meningitidis
atgggcttgaaacattttctggaaaaaatcgaaccgcacttcctgccgggcggcaaacatgaaaaatggtatgccctctacgaagctgcggcgacgattttctatacatccggtgcggtaacgcgcaaagcggcacacgtccgcgatgcgctcgactccaaacgcatgatgattttggtgtggctggctttgttccctgccatgttctacggtatgtacaacgtcggcgcacaggcattcggtgccttaacgcccgatttgctgcaacaaagcatcgccaacgactggcattacgcccttgccaacgctttgggcatcaatatgtcgtctgaagcgggcgtgttgggcaaaatgctgttcggcgcgatttacttcctgccgatttacgcgaccgtatttattgtcggcggtttctgggaagttttgttcgccaccgtgcgcaaacatgaaatcaacgaaggtttctttgttacctcgattctgtttgccttaatcgttccgcccacgctgccgctgtggcaggcagctttgggtatttctttcggcgttgtggttgcgaaagaagtattcggcggtacaggtaaaaacttcatgaaccctgcgctggcaggccgtgccttcctgttcttcgcctaccctgccaacttgagcggcgatgcggtttggacggcggttgacggctattccggcgcaaccgcgctggcgcaatgggcggcacacggtgcagacggcctgaaaaacgccgtaaccggtcaaaccatcacttggatggatgcgtttatcggcaaactgcccggctccatcggcgaagtctccactttggcactcttaatcggcggcgcgtttatcgtgtttgcccgcatcgcttcttggcgcattattgccggcgtgatgatcggtatgattgccatgtcttcgctgttcaacttcatcggttcggacaccaacgctatgtttgctatgccttggtactggcatttggtcgtcggcggcttcgccatcggtatgctgtttatggcgaccgaccccgtttccgcttcctttaccaatgtcggcaaatggtggtacggcgcactgatcggcgtgatgtgcgtattgatccgcgtggtcaaccctgcttaccccgaaggcatgatgttggcgattctgtttgccaacctgtttgccccgattttcgactattttgtcgcacaagcgaacatcaaacgcagaaaggcgcgcagcaatggctaa

SEQ ID NO: 51080 - DNA, 1056 bp, Neisseria meningitidis
atgacacaccattaccccactgacgatattaagattaaagaagttaaagaactgctgccgccgattgcccatctttacgagctgccgatttccaaagaggcttcgggcttggttcaccgcacccgtcaggaaatttccgatttggttcacggtagggacaagcggctgttggttattatcgggccgtgttcgattcacgatccgaaagcggcgttggaatatgcggagcgtttgttgaaactccgcaagcagtatgaaaacgagcttttgattgtgatgcgcgtttatttcgagaagccgaggacgacggtgggttggaaaggtttgattaacgacccgcatttggacggtacgttcgatatcaatttcggtttgcgtcaggcgcgcagcctgttgttgtcgctgaacaatatgggtatgcctgcctctaccgagtttttggatatgattacgccgcaatattatgcggacttgatttcttggggggcaatcggtgcgcggacgaccgaaagccaagttcaccgcgaattggcaagcgggctgtcctgccccgtcggctttaaaaacggtacggacggcaatttgaagattgccatcgacgcaatcggtgcggcgagccattcgcatcatttcttgtctgtaaccaaggccggacattccgccattgtccataccggcggcaatcccgactgtcatgtcattttgcgcggcggaaaagagccgaattatgatgcgggacacgtcagcgaggcggcggaacaactgcgtgcggcaggggtaaccgataagctgatgatagattgcagccacgccaacagccgcaaggattacacccggcagatggaagtggcacaagatattgctgcccaattggaacaggacgggagcaatattatgggcgtgatggtggaaagccatttggtcgaaggcagacaggataagccggaagtgtacggcaaaagcattaccgatgcgtgtatcggttggggcgcgactgaagaactgttggcattgttggcaggtgcaaacaaaaaacgtatggcgcgcgccggttga

SEQ ID NO: 51081 - DNA, 1275 bp, Neisseria meningitidis
atgaaaacactgcaagactggctctcccatttggaaaccgcccacagcggtggcttgatcgatatgggcttggaacgcgtaggcgaagtgaaaaaacggatgaagctcacgccgcaatgccccgtcgtcgttgtcgcgggaacaaacggcaaaggttcggtctgcgcctacctgacacagatttacaaacaggcaggctttaaagtcggtacgctgaccagcccgcatttattgcgttacaacgaacgcatcgccgtcaacgccgaacccgtttcggacgatacgattattgcctctttcgagcgcatcgaagcggcgcgcggcgaaatatcgctgacttattttgaattcaatgccttggcggcggtcgacatcttcatgcgcgaacaggttgacgtgatgatattggaagtcggcttgggcggacgcttggacgcggtcaacgcgtttgacggcgattgcgcggtggttaccagcgtggatttggaccatcaggcatttttgggcgatacggtcgagcaggtcggctttgaaaaagcaggcgtgttccgcagcggcaaacccgccatctgcggtcaaaaccccgcgcccaaatcgttgctttcacacgccgaagccataggcgcgaaactgctgatggtgcagcgcgatttcgagtttcacgcgatggaaaacatccaatggaactaccgcttccggccgcaacattcagacggccccgcacgcaaccgcaatgccctgcctttccctgcattacgcggcacataccagctttccaacgccgcctgcgcgttgaccgtattggaatgcttgaacgacaaattgcctgtggacatcggcgccatcaaacgcggtttgctgctggttgaaaaccccggccgcttccaagtcctgcccggccgtccgctgaccgttttggatgtcggacacaatccccacgctgcccgcgccctgcgccgcagcctgattaatttggcgtttgcgcaaaaacgcaccgccgtattcagtatgctgtccgacaaagacatagacggcgtgttggaaatcgttaaagaccagtttgacgagtggtatatcgcaccgttggacgtaccgcgcggcatgacgctcgagagcctgcaaaacaaactgcacgaacacagcatcgaaaacatacagacattcgccgccgtccgcgaagcataccgggcggcagcctcaaaagcgggcgagaacgacagaatcgtcgttttcggctcatttcataccgttgccgatgtcatgtcggtactttaa

SEQ ID NO: 51082 - DNA, 339 bp, Neisseria meningitidis
atgacgggatttaatgatgccgccggcgtggcatcttcttcaacaatcaaaggcaaatatgttaaggaagttgaagtcaaaaacggcgtcgttaccgccacaatgctttcaaccggcgtaaacaacgaaatcaaaggcaaaaaactctccctgtgggccaagcgtcaagccggttcggtaaaatggttctgcggacagccggttacgcgcgccgccaacgccaaagacgacgttgccgccgccaccggcaccgacaaaatcgacaccaaactaaagaaacctttttacccgataagtttccgcaccgacgaggctggattcccgcttttgcgggaatga

SEQ ID NO: 51083 - DNA, 183 bp, Neisseria meningitidis; identical to SEQ ID NO: 40813

SEQ ID NO: 51084 - DNA, 741 bp, Neisseria meningitidis; identical to SEQ ID NO: 42819

SEQ ID NO: 51085 - DNA, 375 bp, Neisseria meningitidis; identical to SEQ ID NO: 38650

SEQ ID NO: 51086 - DNA, 411 bp, Neisseria meningitidis; identical to SEQ ID NO: 42958

SEQ ID NO: 51087 - DNA, 318 bp, Neisseria meningitidis; identical to SEQ ID NO: 37073

SEQ ID NO: 51088 - DNA, 285 bp, Neisseria meningitidis; identical to SEQ ID NO: 36565

SEQ ID NO: 51089 - DNA, 573 bp, Neisseria meningitidis
atggacaatcacgccgaagcacactggcaaaacggctggcttcaaagcatacgccataccccgtcgcccaatttcagcccgagggaaacgggggaaacggtttccctgatcgtgttgcacaacatttcgctgccgccgttcgaatacggcacagatgcggtggaaaagctgtttgccaaccggctcgaccccgacggacatccgttcttcagcctgatacacactttgcgcgtatccagccatttcttaatcaaacgcgacggagaaacggtacagttcgtttcctgcgacaatatggcataccatgccggcgtatcttcattcggcggcagggaaaaatgcaacgcattttcaatcggcatcgaactggaaggctgcgatttcgaaccgtttgccgaagcgcaataccgttcgctcgaagccttgttggacgcaatctgccgccgctaccccgttaccgcagtaaccggacatcaggacatcgcgcccggccgcaaaaccgaccccggccactttttcgactggcggcggatacgggagaaagggtttcccgtagacagaaatgccgtctga

SEQ ID NO: 51090 - DNA, 1977 bp, Neisseria meningitidis
atggaatatatggatctcaaaagcctgcttaattttgggttgccaaatatgccaagaacagtaatagggctgagaaaaaaagcgcaaagggatggttggcaaacgagaaggcgtcaaggtaagggtggtggtgttgaatatgccctacctattgaaatccgagcagccatcatgaaacggcagtcggacgagctggcggaaaagatgccgaaaatgttgccccaagtcagaccggggacggcgatgtcggctcaggcactggctgaagcggccaagctgttgaacgagaaacaacggtcggtggcggatgcgcgatgtgcggtggtggcggcggtattggggattaaatacgaatacgattgctctgccaaggctgcggtggctcagtttttgggcttgctggcagaaggtaaattggacgcggtcacgcttgggaacttggaaaaggccaatgaccgcagccggtcggcgaaggttggcgaacgtactttagacggctggatatctgcttatttgaaagcggaaaacgcgacggagcggttggttactttggctccgaagacgacgaaggtggttaagccgattgagagctacggttggttgccgatgtttatgcagtttcacaatatcccgtccgcgccgaaactggcgcacagctaccgccggtttgtccagtgggcggaagcggaaaatatgccggtcaatgatgtgcctaacttgagtatggtgcggcgcgtttgggacaagctcccgttgattatgcaggagcgcggtaggaaaacgggggcggcttataaatcgctgctgccttatgtgaaacgtgattggggggctttgaagccgaacgatgtttggatcggcgacggccacagctttaaggcgaaggtggcacatccggtacacggcaggccgtttaagccggaagtgacggtgattattgatggttgtacgcggtttgtggtgggtttttcggtgtcgttggctgaaagttgtgtggcggtatcggatgctctgcgtatcggggtcaagcattttggtttgccgattatctatcactcggataacggcggcggccaaaccggcaagacgatagaccatgaaatcacgggtattacgtcccgactgggtatccggcatgaaacgggtatcgcgggcaacccgcaagggcgcggcatcattgagcgatggtggaaagacaatctgattgagatggcgcgccagtatgagacgtttgcgggcgcggggatggacagtagcacgaagaatctgatgtaccgcaagatggaaagtgcttttaatgctttggaaaaaggcaaggatttaacggaggaacaacagaaatatttgaaaaaactgccgagctggtcgcgttttatcgcggatgtggtcaagtgtatcgatgattacaacaaccgtccgcacggcgagctgccccgacatccggacggtgggcattatacgccgaaggcttatcgggaaatgaggctggaacaggacggtatcgcgccggatatgttgtcggcggaagagctggcgacgatgtttatgccgcaagaggtgcgaaaggtacagcgcggttggctggatttgttcaacaactcttatttctcaaccgagctggcggagtatcacaaagacgaggtacgggtcagctacgatttggacgacgctgattttgtcaatgtatttgatatggatggcaagttcatcgctaaggcgcaaatcaacggcaatacccgcgaggcgttcccggtcagccgacgcgaccaactggcggaaaaccgccgaaaaggcaaaatcaagcgggcggaaaatgcaatcaagctcgcgaatgcggaagtcaatccggcactggaacaggcggcagcttgggacgagctgggaaatttgggcggaaacgtcatcgaggcggagtatgcggtattgccgaaaacgggcacggacgattttgtgctatttgaggcggatagaagttaa

SEQ ID NO: 51091 - DNA, 879 bp, Neisseria meningitidis
atgaattacgcaaaagaaatcaatgcgttaaacaacagcctttccgatttgaaaggcgacatcaacgtttcgtttgaatttttcccgccgaaaaacgaacaaatggaaacgatgctgtgggattccatccaccgtctgcaaaccctgcatcccaagttcgtatccgtaacctacggcgcaaattccggcgaacgcgaccgcacgcacggcatcgtcaaacgcattaagcaagaaaccggcttggaagccgcgccgcacctgaccggcatcgacgcttctcccgacgaattgcgccaaattgccaaagattattgggacagcggcatccgccgcattgtcgccctgcgcggcgatgagccgcccggttacgagaaaaaaccgttttatgccgaagacttggttaagctattacgctccgtcgccgacttcgacatctctgtagcagcatatcccgaagtgcatcccgaagcgaaatccgcacaagccgacctgattaatttgaaacgcaaaatcgatgcgggcgcgaaccacgtcatcacccaatttttctttgacgtagaacgctacctgcgcttccgcgaccgctgcgtgatgttgggtatcgatgtggaaatcgtccccggtattttgcctgttaccaacttcaagcagctcggtaaaatggctcaagtaaccaacgtcaaaatcccaagctggctgtcgcaaatgtatgaaggtttggacgacgaccaaggtacgcgcaatctggtggcggcaagtatcgccatcgatatggtcaaagtcctgtcccgcgaaggcgtgaaagatttccacttctatacgcttaaccgcagcgagctgacttacgccatctgccatattttaggcgtgcgcccttaa

SEQ ID NO: 51092 - DNA, 192 bp, Neisseria meningitidis
ttgttgctttgtattgcggatatgctgctgtaccggttgttgggcggcgcggaaatcgaatgcggccgttgtcctgtaccgccgatgacggattggcagcattttttgctggcgatgggaacggtgtcggcttgggtggcggtgatttgggcatatctgattattgaaagtgaaaaaaacggaagatattga

SEQ ID NO: 51093 - DNA, 1248 bp, Neisseria meningitidis; identical to SEQ ID NO: 44286

SEQ ID NO: 51094 - DNA, 1137 bp, Neisseria meningitidis
atgaaaaacatatctctttctccgcccgccatgctcggcatcctcggcggcggacaattaggcagaatgtttaccattgccgccaaaaccatgggctacaaagtaaccgttctcgaccccgatccggacgcgccggcggcggaatttgccgaccgccatttgtgtgcgccgtttgacgaccaagccgctttggacgagctagcaaaatgcgcggcggttacgaccgaatttgaaaacgtcaatgccgatgcgatgcgttttctcgccaaacataccaatgtttcccccagcggcgactgcgttgccatcgcgcaaaaccgcattcaggaaaagtcatggatacgcaaagcaggcctgcaaaccgcgccgtatcaagcagtttgcaaagctgaagacatcactgaagcaagcacgcaattcctgcccggcattctgaaaacggccactttgggctacgacggcaaaggtcaaatccgcgtaaaaacattggacgaactcaaagccgcgtttgccgaacacggcggcgtggattgcgttttggaaaaaatggtggatttgcgcagtgagatttccgtaattgtatgccgtttgaacaatgacaacgtgcaaactttcgaccctgccgaaaacatccacgaaaacggcatcttggcttattccatcgtccccgcgcgactgagtgccgacgtgcagcaacaggcgcggcagatggcgcaacgcttggcagacgaattggattatgtcggcgtattggcggtagaaatgtttgttgtcggtgacacacatgaattggtcgtcaacgaaatcgcgccgcgtccgcacaactccggccaccataccatcgacgcctgcgcagcagaccaattccagcagcaggtacgcctgatgtgcaacctgccacctgctgacaccaaattgctgagttcttgctgtatggcgaatattttgggcgacgtttggcaggaagacggcggcgaaccggattggtttcccctgcaaagccggccggacgcgcacctgcacctttacggcaaaaaaaccgcgcacaaagggcggaaaatgggacactttaccgttttaaccaccgattcggacaccgcatttcaagaagcaaaaaaactgcatcagtccctataa

SEQ ID NO: 51095 - DNA, 2427 bp, Neisseria meningitidis
atgcacatccctttcaagcccgtattggctgccgccgccatcgcccaagcgtttcccgcctttgcggcagaccccgcgccgcagtccgcccaaacgctgaacgaaatcaccgttaccggcacgcacaaaacccaaaaactcggcgaagaaaaaatccgccgcaaaaccttagacaagctcttggtcaacgacgaacacgacctggtgcgctacgaccccggcatttccgtcgtcgaaggcggcagggcgggttctaacggctttaccatacgcggcgtggacaaagaccgcgtcgccatcaacgttgacgggctggcgcaggcggaaagccgctcttccgaagccttccaagaattgttcggcgcgtacggcaacttcaacgccaaccgcaacacttctgagccggaaaacttttccgaagtaaccatcaccaaaggcgcggactcgctcaaatccggcagcggcgcattgggcggcgcagtcaattaccaaaccaaatccgcaagcgattatgtttccgaagacaagccctaccatttggggataaagggcggcagcgtcggcaaaaacagccaaaagttcagcagcatcaccgccgccggcaggctctttggtttggatgccttattggtttatacccgccgcttcggcaaagaaaccaaaaaccgctcgaccgagggcgatgtcaaaattgaaaacaagggatatgttttcagcccaacccaatcattcagcaagtaccagacctacgtagccacaggggttgcgcgctcccaacccgacccgcaagaatgggtaaacaaaagcaccttgttcaagctgggctacaatttcaacgaccgcaaccgcatcggctggatttttgaagactcccgcaccgaccgttttaccaacgagctgtctaatttgtggacgggtacaatttactctcccgcaacgggcgactaccgccaccgccaagacgtgagctaccgccgccgctccggcgtcgaatacaaaaacgaattggaacacggcccgtgggacagcctcaagctgcgctacgacaagcagcgcatcgatatgaacacttggacttgggacatcccgaaaaattacgatttgcgcggtatcaacagtgaagtttaccattcgttccggcatatccgccaaaacaccgcgcaatggactgccgattttgaaaaacaactcgacttttccaaagccgtttgggcggcgcaatacggcttgggcggcggcagaggggacaatgccaactcggattacagctatttcgtaaaactttacgaccccaaaatcctcacttccaaccaagccaaaatcacaatgctgatcgaaaaccggtcgaaatataaatttgcctattggaacaatgtgtttcacttgggcggcaacgaccgcttccgcctgaatgcgggcatacgctacgacaaaaacagcagcagcgcgaaagacgatccgaaatacaccaccgccatccgggggcagattccccatttgggttcggaacgcgcgcacgcgggcttcagctacggcacggggttcgactggcggtttaccaagcatctgcacttgttggcaaaatacagcaccggcttccgcgcaccgacttcggacgaaacctggctgctgttcccacaccccgatttctacctgaaagccaacccaaacctgaaagccgaaaaagccaaaaactgggaattgggtctggcgggcagcggcaaagcgggcaacttcaagctctcgggcttcaaaaccaaataccgcgactttatcgaattgacgtatatgggcgtttcgtcagacaaccctaacaagcccacctacgccccgctttcagacggtacggcattggtcagctcgcccgtttggcaaaaccaaaaccgcaccgccgcctgggtgaaaggcatagagtttaacggcacttggaacctcgacagcatcgggctgcccaaagggctgcacaccggcctcaacgtcagctacatcaaaggcaaggcaacgcaaaacaacggtaaagaaacgcccatcaacgcgctttcgccgtggacggcggtttacagcttgggctatgacgcgccttccaaacgctggggcatcaacgcctacgccacgcgcaccgccgccaaaaagccgtccgacaccgtccacagcaacgacgatttgaacaacccgtggccttatgccaaacacagcaaggcctatacgctgttcgacctttccgcctacctcaacatcggcaaacaggttacgctccgcgccgccgcgtataacattaccaacaagcagtactacacttgggaatctttacgcagcatccgcgaattcggcacagtcaaccgcgttgacaacaaaacccacgccggcatccaacgctttacctcgccgggcaggagctacaatttcaccatcgaagcgaagttctaa

SEQ ID NO: 51096 - DNA, 822 bp, Neisseria meningitidis
atggattttctgattgtcctgaaagccctgatgatgggcttggtagaaggttttaccgaatttttaccgatttccagcaccggacatttgattgtgttcggcaatctgattgattttcacagcaatcacaaggtttttgaaattgccatccagctcggtgcggttttggcggtagtgtttgaataccggcagcgtttcagcaatgtgttgcatggcgtgggaaaagaccggaaagccaaccgtttcgtccttaatcttgccattgcttttatacctgccgccgtgatggggctgttgttcggcaaacaaatcaaagagtatctgtttaaccccttgagtgttgcagtcatgctggttttgggcggtttttttattttgtgggtggagaaacgccaaagccgggcagagcctaaaattgtcgatgttgatgcattgcgtccgattgatgcgttgatgatcggcgttgcccaagtgtttgcactggttccgggtacgtcccgttcgggcagtacgattatgggcgggatgctttggggaatcgagcggaaaacggcaacggagttttcatttttcttggccgttccgatgatggttgcagcaacggcttatgatgtcctgaagcattaccggtttttcaccctgcatgatgtcggtttgattctgattggctttgttgccgcttttgtttccggtttggtggcggtaaaagcgttgctgaggtttgtttccaagaaaaattatattccttttgcctattaccgcattgtttttggcattgccatcattatattgtggctgtcaggctggataagttgggaatga

SEQ ID NO: 51097 - DNA, 1785 bp, Neisseria meningitidis
atgagcttagttgaattgaaagtgcccgacattggcggacacgaaaatgtagatattatcgcggttgaagtaaacgtgggcgacaccatcgccgttgacgacaccctgattaccttggaaaccgacaaagcgacgatggacgtgcctgccgaagttgcgggcgtggtcaaagaagtgaaagtcaaagtcggcgacaaaatctccgaaggcggtttgattgttgtcgttgaagctgaaggcacggctgccgctcctaaagccgaagcggctgccgccccggcgcaagaagcccctaaagctgctgctcctgctccgcaagccgcgcaattcggcggttctgccgatgccgagtacgacgtggtcgtattgggtggcggtcccggcggttactccgctgcatttgccgctgccgatgaaggcttgaaagtcgccatcgtcgaacgttacaaaactttgggcggcgtttgcctgaacgtcggctgtatcccttccaaagccttgttgcacaatgccgccgttatcgacgaagtgcgccacttggctgccaacggtatcaaataccccgagccggaactcgacatcgatatgcttcgcgcctacaaagacggcgtagtttcccgcctcacgggcggtttggcaggtatggcgaaaagccgtaaagtggacgttatccaaggcgacgggcaattcttagatccgcaccacttggaagtgtcgctgactgccggcgacgcgtacgaacaggcagcccctaccggcgagaaaaaaatcgttgccttcaaaaactgtatcattgcagcaggcagccgcgtaaccaaactgcctttcattcctgaagatccgcgcatcatcgattccagcggcgcattggctctgaaagaagtaccgggcaaactgctgattatcggcggcggcattatcggcctcgagatgggtacggtttacagcacgctgggttcgcgtttggatgtggttgaaatgatggacggcctgatgcaaggcgcagaccgcgatttggtaaaagtatggcaaaaacaaaacgaataccgttttgacaacattatggtcaacaccaaaaccgttgcagttgagccgaaagaagacggcgtttacgttacctttgaaggcgcgaacgcgcctaaagagccgcaacgctacgatgccgtattggttgccgccggccgcgcgcccaacggcaaactcatcagcgcggaaaaagcaggcgttgccgtaaccgatcgcggcttcatcgaagtggacaaacaaatgcgtaccaatgtgccgcacatctacgccatcggcgacatcgtcggtcagccgatgttggcgcacaaagccgttcacgaaggccacgttgccgccgaaaactgcgccggccacaaagcctacttcgacgcgcgcgtgattccgggcgttgcctacacttcccccgaagtggcgtgggtgggcgaaaccgaactgtccgccaaagcctccggccgcaaaatcaccaaagccaacttcccgtgggcggcttccggccgtgcgattgccaacggttgcgacaacggctttaccaagctgatttttgatgccgaaaccggccgcatcatcggcggcggcattgtcggtccgaacggtggcgatatgatcggcgaagtctgccttgccatcgaaatgggctgcgacgcggcagacatcggcaaaaccatccacccgcacccgaccttgggcgaatccatcggtatggcggcggaagtggcattgggtacttgtaccgacctgcctccgcaaaagaaaaaataa

SEQ ID NO: 51098 - DNA, 183 bp, Neisseria meningitidis; identical to SEQ ID NO: 43318

SEQ ID NO: 51099 - DNA, 864 bp, Neisseria meningitidis
atgagaatcctattgacaggctcgaaaagccaactggcacgctgcctgcgcgaccgtcttccggaagactgggaaaccattgcgacggattccgcatccctagacattaccgatgccgatgccgtctgcaacatggtcaaaagtttccaacccgacgccattgtcaacacggctgcctatactgccgtcgacaaagcggaaggcgatgcggcagcggcatttgccgtcaatgcttccgccgtttacaaccttgccttggcagcacatcgcgcccatgcccgattcatccacatctcaaccgactatgtctttgacggaaaagggaaaagaccctaccaggaaagcgactttaccaacccttccaatgtatacggacaatccaaaaccgccggcgaactgctcgcactgtctgccaatcccgacagccttatcctgcggacttcttggctgtttagcgaatacggggacaactttgtccgcaccatgctgaaccttgcgcgggaacgttccccgctgtccgccgtccacaaccaaatcggctgcccgacctatgccggcgacttgtccgccaccatcatccgcctgttgcagcactccaatcccgttcgcggcatttaccactacgccggcggcaaatccgtatcttggtacgaatttgtccaacatattttccaagcggcatcgcaacagcagacatccttccccattcccgaattgactgccgtttcagacaaggaatatccgaccgccgcccccaggcccgcatacagcattttggactgccgcaaaatcgaaaacgacttcggcatcaaaccgtcagactggcaaaaagcccttgcacaggtcgtttccaagctgctctga

SEQ ID NO: 51100 - DNA, 141 bp, Neisseria meningitidis; identical to SEQ ID NO: 49273

SEQ ID NO: 51101 - DNA, 1485 bp, Neisseria meningitidis; identical to SEQ ID NO: 38944

SEQ ID NO: 51102 - DNA, 765 bp, Neisseria meningitidis
atgagctacacgcaactgacccagggcgaacgataccacatccaatacctgtcccgccactgcaccgtcaccgaaatcgccaaacagctgaaccgccacaaaagcaccatcagccgcgaaatcagacggcaccgcacccaagggcagcaatacagcgccgaaaaagcccagcggcaaagccagactatcaaacagcgtaagcgacaaccctataagctcgattcgcagctgattcagcacatcgacacccttatccgccgcaaactcagtcccgaacaagtatgcgcctacctgtgcaaacaccaccagatcacgctccaccacagcaccatttaccgctaccttcgccaagacaaaagcaacggcagcacgttgtggcaacatctcagaatatgcagcaaaccctaccgcaaacgctacggcagcacatggaccagaggcaaagtacccaaccgtgtcggcatagaaaaccgacccgctatcgtcgaccagaaatcccgtatcggcgattgggaagccgacaccattgtcggcaaaggacagaaaagcgcattattgaccttggtcgaacgcgttacccgctacaccatcatctgcaaattggatagcctcaaagccgaagacactgcccgggcagctgttagggcattaaaggcacataaagacagggtgcacaccattaccatggataacggcaaagagttctaccaacacaccaaaataaccaaagcattgaaagcggagacttatttttgtcgcccttag

SEQ ID NO: 51103 - DNA, 297 bp, Neisseria meningitidis; identical to SEQ ID NO: 42747

SEQ ID NO: 51104 - DNA, 759 bp, Neisseria meningitidis; identical to SEQ ID NO: 42687

SEQ ID NO: 51105 - DNA, 246 bp, Neisseria meningitidis; identical to SEQ ID NO: 44944

SEQ ID NO: 51106 - DNA, 1998 bp, Neisseria meningitidis
ttgccgcacgccgtttcaatcccgcaaaattccgatacttggtataaaataccctcttttcccactctaaaaaaccgtacccgataccgtctgaaacagccctgtctttcagacggtataggcacaaggaaacacactatgcctgaataccgctccaaaacctccacccacggccgcaatatggcgggcgcacgtgcattgtggcgcgccaccggcgtgatggaaaccgacttcggcaagcccatcatcgccgttgccaactccttcacccaattcgtgccaggtcatgtccacctgcacaatatgggtcagctggttgcccgcgaaatcgaaaaagccggcgccatcgccaaagaattcaacaccatcgccatcgacgacggcatcgctatgggacacagcggtatgctgtattccctgcccagccgcgatttgattgccgactctatcgaatatatggtcaacgcccactgcgccgacgcgctggtgtgcatttccaactgcgacaaaatcaccccgggcatgctgattgccgcgatgcgcctgaacatccccaccatcttcgtctccggcggcccgatggaagcaggtaaagttatcggcgtggcaaacatccaaccagaacgccgcttggacttgattgacgcgatgattgaatcggcggacgacaatgtcagcaaccggcaagtcgaggaagtcgaacaaaacgcctgcccgacctgcggctcgtgttcgggtatgtttacggcaaactcgatgaactgcctgaccgaagcactcggtctgtccctacccggcaacggttcgtatttggcgacccacgccggccgcaaagaattgttcctcgaagccggccgtatgattgtcgaaatcaccaaacgctattacgagcaaaacgatgaaaccgtgttaccgcgcagcattgccaccaaaaaagcgtttgaaaacgctatgacgatggatattgcgatgggcggcagcaccaacactattttgcatttactcgccgttgccaacgaagcgggcgtggatttcaaaatggcagacatcgaccgcttaagccgcgttgtgccctgcatctgcaaaaccgcacccaacaaccacgactactacatggaagacgtgcaccgagccggcggcatcttcgccatcctgaaagaattggacaaagcgggcaagctgcacaccgacgtgcacactatccacgcaccgacgctgaaagacgcgattgaaaaatgggacgtaaccaaccctgaaaacacccgcgccatcgaacgcttcaaagccgcgcccggcggcgtgcgcaccacccaagcgttctcgcaaaaccgcatgtggaaaaccctcgacctcgaccgcgaaaaaggctgtatccgcgatgtcgaacacgcctactcgcaagacggcggtttggcggtcttgttcggcaacatcgccgagcgcggttgcgtagtgaaaaccgcaggcgtggacgagagcatcctcaaattcaccggccgcgcccgcgtgtttgaaagccaagaagacgcagtagaaggcattttgggcaaccaaatcgtcgccggcgacatcgtcatcatccgctacgaaggcccgaaaggcggccccggtatgcaggaaatgctgtatccgacttcctacctgaaatctaaaggcctcggcaaagcctgcgctctcttaaccgacggacgcttctccggcggcacatcaggtttgtccatcggacacgcctcgcccgaagcggcggaaggtggcgcgatcggtttggtacacgaaggcgataccgtcgaaatcgacatccccaaccgcagcatccaccttgccatttccgatgaagagcttgccgcacgccgtgccgaaatggaagcgcgcggcagcaaagcatggaagcctaaaaaccgcgaccgctacgtctccgccgcattaagagcttacggcgcgatggcgacttccgccgacaaaggcgcggtgcgcgacgtagcgcaaatcgaaagataa

SEQ ID NO: 51107 - DNA, 600 bp, Neisseria meningitidis
atggcttttattacgcgcttattcaaaagcattaaacaatggcttgtgctgctgccgatgctttccgttttgccggacgcggcggcggaggggatagatgtgagccgcgccgaagcgaggataaccgacggcgggcagctttccatcagcagccgcttccaaaccgagctgcccgaccagctccaacaggcgttgcgccggggcgtgccgctcaactttaccttaagctggcagctttccgccccgataatcgcttcttatcggtttaaattggggcaactgattggcgatgacgacaatattgactacaaactgagtttccatccgctgaccaaccgctaccgcgttaccgtcggcgcgttttcgacagactacgacaccttggatgcggcattgcgcgcgaccggcgcggttgccaactggaaagtcctgaacaaaggcgcgctgtccggcgcggaagcaggggaaaccaaggcggaaatccgcctgacgctgtccacttcaaaactgcccaagccttttcaaatcaatgcattgacttctcaaaactggcatttggattcgggttggaaacctctaaacatcatcgggaacaaataa

SEQ ID NO: 51108 - DNA, 2208 bp, Neisseria meningitidis
atgtttcccgaccaatccgcccccaacctgctgcaaggcttgaatcccgaacaactctccgccgtaacctggccgccgcaatccgcacttgtgctggcgggcgcgggcagcggcaaaacgcgcgtgctgaccacgcgcatcgcatggctgttgcaaagcggacaagccagcgtgcacagcattatggcggtaacgtttaccaacaaagccgccaaagaaatgcaaacccgtttgggcgcgatgattcccatcaacgtccgcgccatgtggctcggcacgttccacggcctctgccaccgctttttgcgcctgcaccaccgcgatgccggtctgccgtcatcctttcaaatcctcgacagcggcgaccaactttccctcatcaaacgcctgctcaaaagcctcaacatcgccgaagaaatcatcgcgccgcgttcgctgcaaggctttatcaacgcgcaaaaagaatccggtttgcgcgcttccgtgttgagcgcgcccgatccgcacacaagccgcatgatcgaatgctacgccgaatacgacaaaatctgccaacgcgaaggcgtggtcgattttgccgagcttatgctccgcagctacgaaatgctgcaaagcaacgaaatcctgcgccagcattaccaaaaccgcttcaaccacattctcgtcgacgagttccaagacaccaacaaactgcaatacgcctggctcaaactcatggcgggcggaaacgcagcggtatttgccgtcggcgacgacgaccaaagcatttaccgtttccgtggcgcaaacgtcggcaacatgaccgcgctgatggaagaattccacatcgacgcgcccgtcaaactcgaacaaaactaccgctccgtcggcaacatccttgccgccgccaatgccgttatcgaaaacaacgacgaacgactcggcaaaaacctgcgcaccgacgccgaagcaggcgacaaaattcgctactactccgcctttaccgacctcgaagaagcccggttcatcgtggacgaaaccaaagccctcgaacgcgaaggctgggatttggacgaaatcgccgtcctctaccgtagcaacgcccaatcccgcgttatcgaacaaagcctgttccgcagcggcatcccctacaaaatctacggcggcttgcgcttttacgaacgccaagaaatcaaacacgccctcgcctacctgcgcctcgccgtcaatcccgacgacgacaacgccctcttgcgtgtcatcaacttcccaccgcgcggcatcggtgcacgtaccgtcgaaaatcttcagacggcctcaaacgaacaaggcatcaccctctggcaagccgcctgcaacgccggcgcgaaagccgccaaagtcgtcgccttcgtccgcctgattgaagccctgcgcaaccaagtcggacaactgtccctgtccgaaatcatcgtcggcatcctcaaagacagtggcttgaccgaacactaccgcacccaaaaaggcgacaaccaagaccgtctcgacaaccttgacgaactcgtcaacgccgccatcgagttcaaacccgaagacagcaacttcgaaatcctgcctgaaaacatttcagacgatcccgccttccccatcctcgctttcttgagcaacgccaccctcgaatccggcgaaaaccaagcaggcgtgggcgaaaaagccgtccaactcatgaccgtccacgccgccaaaggcttggaattcaacgccgtcttcctcaccggtatggaagaaggccgtttccccagcgaaatgagccttgccgaacgcggcggcctcgaagaagaacgccgcctcatgtacgtcgccatcacccgcgcccgcaaacgcctctacatcaccatggcgcaacaacgcatgctgcacggacaaacccaattcggcatcgtctcccgcttcgtcgaagagatcccacccgaagtattgcactacctgtccgtcaaaaagcctgcctacgacagttacggcaacacgcgccaaaccgccgcatccaaagacaaaatcatcgacgactacaaacagccccaaacctacgcaggtttccgtatcggacaaaacgtccgccacgccaaattcggcaccggcgtgattatcgatgccgcagataaaggcgaatccgcccgactgaccatcaatttcggcaaacagggcgtgaaagagttggacaccaagtttgcgaaattggaagagatgtaa

SEQ ID NO: 51109 - DNA, 801 bp, Neisseria meningitidis
atgagcccatccccctttatcgaaatgaaagacgtcgccttcgcgtatggcgaccgcccgattctgaagaacatcaatttcagcattccgcaaggcaattttgctgccgtaatgggcggttcgggcagcggcaaaaccacgctgatgcgactgattacaggacagattcgtccgcagtccgggcaggttttgattgaaggacgggatttggcgggcttttcggctgacgagttgtatgaacaccgccgccgtatgggcgtattgttccaacacggcgcgctgtttactgatttgtcggtattcgacaatatcgcttttccgatgcgcgaactgacgcgcctgccggaagcggtgattcgggatttggttttgttgaaattgaacgcggtcggtctgcgcggtgtggaaaacctgatgccgtccgagttgtccggcgggatgtcgcgccgcgtcgcgcttgcccgcacgattgcgctcgaccctgaaattatgttgtacgacgagccgtttaccggcctcgatccgatttccttgggcgtgattgcccacttgatcagccgcgtcaacaaggctttgcgttcgaccagtattatggtaacgcacgacattgaaaaatctttggaaatcgtcgatcaggtgattttcttggcgcacggcgaaattatgttctccggctcgccgcaggaaatgcgcgaactggattcgccttgggtgcgccagtttgtcggcgggctggcagacggccccgtagcataccgttatccggcgcaaacgtcgttgcagcaggatttgctcgggtaa

SEQ ID NO: 51110 - DNA, 3420 bp, Neisseria meningitidis
atgcaaaatatgaaaaaccaagtacgcggatcaggcatggatgcccgatccaatccggccaatgtttcagacggcctgcaaaacagttcgggtcatatcggtaccaacacgcgttaccgcctgaccaaactcggcgaacagatagcgcgcctacccatcgacccgaaaatcgcgcgcattttgctggcggcgaagaaacacgactgcatggcggaaatattggtgattgcgtccgcgctgtcgattcaagacccgcgcgagcggccgctagaagcgcgcgatgcctcagccaaggcgcacgagcgttttaccgacaagcagtccgatttccttgcctatctgaacatttgggacagcttccagcgcgaacgcgataaaggcttgtccaacaagcagctggtgcagtggtgccgccaatatttcctgtcgcacctgcggatgcgcgagtggcgcgagctgcaccaccagcttgcccaaaccgcgattgaaatgggtttaaccaccaaggaagccgctttcagacgacctcccgaagtcaggcagctcacgtcgtctgaaaatgcgggtgaccaagacctatctgctaaactcaaacaaaaacaactggataaaaagcaacaccgcgcccaaatccgcgccgccaaagaagcgggctacgaacaaatccaccgcgccctgctcactggccttatcgccaacgtcggcatgaaatcgcccgacggtaacgactacaccggcgcgcgcggcagccgcttccaccttttccccgcctccgccctgttcaaagccaaacccaaatgggtgatggcggcagaattggttgaaaccacgcgcctttacgcgcgcgacgtcgccgttatccagcccgaatggatagagcaggaagcgccgcacctcgtccgctatcattatttcgagccgcattgggaacaaaaacgcggcgaagtcgtcgccagcgaacgcgtgacgctttacggtctgaccgtattgccgcgccgccccgtgtcttacggcaaagttgcccccgaagaagcgcgcgaaatctttatccgcagcgcgttggtggcgcaggaatgcgatttgaaagcggatttttttgtccacaacaaaaagctgattaaagaaattaccgaactcgaacacaaatcgcgcaagcaagacgtgctggtcgatgacgaagccctgtttgcgttttataacgaacgactgcccgaaatggcttggaaagacgcgcaaggcagcgtttggggaagtgaagattccgtacggattattgaatctgacaaagccgagaggtcgtctgaaaatgagcgcaacgagtttcgtaaaaacaagcgtaatgggtctcgccaaaatgaaaatcacggcaacaccgtaggttgggttgaaaacccaacatcagccgcaactgcaaaaactgttgggtttgacaatccaacctacgctgcccaacaaaccaccccctcccccgtgggggagggtcggggagagggcaaaacagttgccgcacaaaccaacttttccgcaaccgcagcaaaccctctccctaaccctctcccgcaggagagggaacagagtgccgcagcttcaacgatttcagacgacctgcgtcctgcaaatctgcagcaaaccgccccctcccccgtgggggagggctggggagagggcaaaacagttgccacacaaaccaacttttccgcaacctcaacaaaccctctcccgcaggagagggaacagagtgcctcagcttcaacgttttcagacgacctgcgtcctgcaaatctgcagcaaccctctccctcccccgtgggggagggctggggagagggcaaaacagttgccacccaaaccaacttttccgcaacctcaacactttcagacgactccaaacccaaaaagcagcctgcaccccaaaaaaaccgtctgaaacccctacccctcgccgacatccgcaccttccaagcctggctcaaaaccgccgagcgcgacaatccgcgcctgctgttcctcagccgcgacgatctgatgcaacacgccgccgcacacattaccgaagaacagttccccaaattctggcaaaccgcagacggcaaattcaaactttcctaccgcttcgagccgcaccatccgctagacggcgtgaccatgaccgtgccgctgaccgtcctcaaccgcctgcacgcgccgtcgctcgaatggctggtgcccggcatgatacgcgaaaaaatccagttgcaaatcaaagcactgcccaagcaaatccgccgcatctgcgtgcccgtgcccgaattcatcacccaatttttaagccaaaaccccgaccgcaacgcccccatcctgccccaactcgcccaagccatcgccaaaaccgcaggcgacatccgcatattcgagcaaatcaaccaagacgaatgggccgcgttcaggctgcccgaacactgctatttcaacctccgcattatcgacgacggcggacaagagcttgccggcggccgcaaactgcacgaattgcaacaacaactcggtcaagctgccgccgttaccttccgtgacaacacccaagaatttgagcgcgacaacgtcaccgcatgggacatcggcaccctgcccgaatccatcaaattcgcacgcggcaaacaacagctcaccggctatctcggcctacaaaaagaaaaagacggccgcatcgccctgcgcctgtttgataccacagaagccgcagagcaggcacaccgtcaaggtgtcatcgaattgatgaagctgcaattaaaagagcaggtaaaggatttgaacaaaggcatccaaggcttcacccaagctgccatgctgctcaaacacatcaacgccgacactctgcgcgacgacctcacccaagccgtctgcgaccgcgcctttatcggcgaagacgagctgccgcgcaacgaaaaagccttcaaagaacaaatcaaacgcgcccgcagccgcctgcccgccgtcaaagaagccctcagccgctacctgcaggaaaccgccgccgtctacgccgaactcaacagcaaactcggcaaacacccattgacccaccttctaagactacgcctgcaaaccctgctcgccgccggcttcgccacccgaaccccgtgggcacaatggccgcgcctccccatctacctcaaagccatgaccctgcgcctcgaaaaatacagcagcaaccccgcccgcgacgcagcccgcgaagccgatatccaagagctggaacaaatgtggcaggaaaaaacagacagcctgattaaacaaggtctccccatttcagacggcctcgccgcgtttaaatggatgattgaagaattgagggtgtcgctgttcgcgcaggaattgaagacaccgtatccggtgtcggtgaagcggctgttgaaagagtgggaaaaaattgaaaaataa

SEQ ID NO: 51111 - DNA, 435 bp, Neisseria meningitidis; identical to SEQ ID NO: 40706

SEQ ID NO: 51112 - DNA, 672 bp, Neisseria meningitidis
gtgtttcccgacaaatacaagttgagtttgaaagaaaatatttttttggcaaagaaagtattggttgcccaaattcacaacctcagccgttttgagaattgtcagacgaccttgttgcagaccgaacaaattatccatggcaaaaatgtagcctccgcgtcactggaagacatccaaaccatcttgaacctgaaacgtgcctatcaatatgtgatttcgcatatttcaaacggcgaaccggtcgatatttcactccttaaaaaaatcaacaacattgttgccaaggacgattctttggcacccggtgatttccgtaccggttcggtcggcgtaacgctattggacggttcccgtcatgccccgaatccagtgaaggaaattgaagtggcccgcgtgttacaaaatatcggactgcaaagcggttcgacgacggaggcagccgtccgttttatgctttattgtatgcggcagcaggttttttgggacggcaacaaacgaacggcaaccttatttgccaacggtctgatgatggcggggggctgcggcatcttggaaatctccgaaatgcagatgccgcaattcaatgaaaaactgtccgcattctatcgctccggcgacgataccgatatttccaagtttgtgtatcaaaattgtatatcgggcatagactga

SEQ ID NO: 51113 - DNA, 708 bp, Neisseria meningitidis; identical to SEQ ID NO: 43156

SEQ ID NO: 51114 - DNA, 1113 bp, Neisseria meningitidis
atgttttcggacacagatatatccatgatggaaaacgccctccgacttgccgctttggggcgtttttccacttcgcccaatccgcgcgtcggctgcgttatcgcacacggcagccaaattgtcgggcaaggcttccacgtcaaagcgggcgaaccgcacgccgaagtccacgccctgcatcaggcgggcgaaatggctcaaggcgcgaccgcctttgttaccctcgaaccatgcagccattacggacgcacaccgccctgcgccgaagctctgctccgttccggcgtaacacgcgtcgtcgccgccatgcgcgaccccaacccgctggttgcaggcaaagggcttgccctgctcgaagtagctggcatcaagacggaatgcggtttactcgaacatcaggcaagggaactcaaccgaggcttcctgtcgcgcatcgaacgccgccgcccctttgtccgcctcaaatgcgccgtttcgctggacggcaaaaccgccctttcagacggcagcagcttttggattaccggcgaagacacgcgtgccgacgtacaggttttgcgtgccgaaagctgcgcggtgctgaccggcatcggcacggtgttggcggacaatccccggctcaacgtccgcgcttttccaactttgcgccaacccgcacgcatcgtgttagacagccgcctgcgcctgcccttggacagccaccttctgaccgacggacaatctccaacctacatcgccacactcgaacgcaacgaagacagactgcacccctatcgggaacacgcacacatccgcatcctgatgccgtctgaaacggcaggcggcaaaatcgacctgcaccacctgatgcgcctccttgccgacgaaggtttcggcgaaatcatggtcgaagcaggctccgaactcacatccgcatttttggcagaagatttggcggacgaaatcgttttataccgctcgcccaaaatcctcggcggcggcggcggcggtttattttgcctgctcgaaaaccgcgccgccctttccgcaccgcccttgtggacacccgtttcaagcgaaatcctcggacacgacatcaaaaccgtgttccgaaaaaacggcaacgccttttaa

SEQ ID NO: 51115 - DNA, 279 bp, Neisseria meningitidis
atgtcccgaaacctgcttgtccgctggcttgtcgtctgcctcatccctttggcgacacttgccgttttcgtcgccaatccgcccgaagacaaaccccagcatctgatcaacggcatcatccttgcctgcgaagcgacgtttttgttcaaattcgtccttttcgacaccatcaagcatcatttgaaacaagagtttgatttgaaacgtcaaaccatgttgctgtttattccgattgttttgctggttgtgtatttgttccactatttcggcgcgttttag

SEQ ID NO: 51116 - DNA, 594 bp, Neisseria meningitidis
atggccgacggtatgggcaatctgattggctgggaaaaaacggggcttgttgtcggtaagcagtggataaccgcaaaagacgacaaggtgtccgatgtctgcaatgccaacggcgagatgggcgtaatcgggctttacgagcctttctcacacggcgcattgacgatacccggtcatccgaactgccgatgcgaggttgtttccgtatcgggtggcgaattgggggaatttgccgaaaaaaaggagcttcgtaaagcggctatgcagtatgcgcgggataactttatcggcaaaagctatgtcaatgaaaacagcgggcatgaactgaaggtaacttggcaaggtgtgaaacacgctgcgtcaaaggcaaatcaggcggaattatccatcatgacaaaacttgatgacttattgcgctacgcaaaatatgagggttcttattcggataggaaaggtcatcctaatattattgcagcacataagtatcgtgccgttgccaaggttgggaatgagtctttaaatatcggtgtgattgtaagggaatttccagacgaccataaacattacgaccatttcatcttgaaggatgaataa

SEQ ID NO: 51117 - DNA, 1728 bp, Neisseria meningitidis
atgcagttatcaggcgcgcaaatcatagtgcagagtctcaaagccgaaggtgtcgagtacgttttcggttatcccggcggtgcggttatcgaaatctacgatgcccttttccaactcaataaattcaagcacattctgacccgtcacgagcaggcggcagtacacgcggcagatgcgtatgcgcgcgtcagcggtaaggtgggcgtggcattggttacatccggcccgggcgttaccaatgcactgaccggtattgctactgcctatacggattcgattccgatggtggtcatcagcgggcaggtaggcaattccctgattggtacggatgcgttccaagaagttgatacggtgggtattacccgtccgtgcgtcaaacacaatttcctggttacggatatcaatgagttggcggaaaccattaaaaaggcgttccaaattgccgcaagcggccgaccggggcctgtggtggttgatgtcccgaaagatgttacgcaggcgatggcgaaattcagctatcctcaggaagacatttttatccgttcgtatcaaccggttgttcaagggcatatcggtcagattaaaaaggccgtgcagatgttggcatctgccaaacgtccagtcgtctattttggcggcggcgtggtgttgggtaatgcttctgaagagctgacccgatttgtccgaatgacgggtgctccgtgcacgggtacgctgatgggcttgggcgcttatccttccagcgaccgccaattcctcggtatgctcggtatgcacggtacttacgaggcaaaccttgccatgcagaatgcggatgtcgttcttgccgtaggtgcgcgttttgacgaccgtgtggtttccgtaccgtccaaatttttcgagaaggcgaagaaggttatccatatcgatgtcgatccttccagcatcgccaaacgcgtgaaggtggacattccgattgtcggcgacgtgaaaaacgttttgtccgagatggttgcgctgtggcaaaaacaagagtccgtgccgtctgaagatgctttgggcaaatggtggaaaaccatagaggaatggcgttcccaagattgcttgtggtttgacaacggcagcgaaattatcaagccccaatatgtgattcagaagcttgccgagattaccggcaattcggcaatcatcacatcggatgtagggcagcatcaaatgtttgcggctcaatattatcccttcgaacgtccgcgccaatggctcaattccggcggtttgggtacgatgggcgtgggtctgccttatgcgattggtgcaaaacttgccgccccggatcaagacgtattctgtatcaccggcgacggctcgatccagatgaacatccaagagctgtccacctgtttccaatatcggattccggttaacgtcattacgctgaacaacggttatctcggtatggtacgccagtggcaggaaatatattacggcggacgagagtcggaaacctatttcgattctttgcccgatttcgtcaaacttgccgaggcatacggccatatcggtatccgcgtggacaagaagtctgatgtggaaggtgcgttgttggaagcattgaaccaaaaagacaggctggtgtttatcgacttcctgaccgaccagaaacagaatgtgatgcccatggtcggcaacggcaaaggtttggacgaaatggtacttccgccgcatatgcgtgcggacggaaaggcgtaa

SEQ ID NO: 51118 - DNA, 1662 bp, Neisseria meningitidis
atgacagaatccatcacccgcgacagtatgcaatacgatgtcgtgattgtcggcgcaggcccgtcgggtttgtccgccgccatcaaactcaagcagcttgccgaacagaacgggcgcgaaatcagcgtttgcgtggtggagaaaggttcggaggcgggtgcacattcgctggcgggcgcggttatcgatccgattgcgctgaatgagttgattcccgactggaaagaaaaaggcgcgccgctgacgcgtacggtaacgcaggacaaagtgttgttcctgactgagaaaaaagcgttcaatctgcctattaccccaaatttcgacaatcacggcaactacatcgtcagcttgggcgaagtcgtgcgctggttggcggagcaggcggaaaatatgggcgtggaaatctatccgggctttgccgccgccgaagtgctgtatcacgaagacggttcggtcaaaggcattgcaaccggcaatatgggcattggcaaagacggcgagccgaccgattcattccaacccggcatggagctttgggcgcagcaaaccctgtttgccgaaggttgtcgcggttcgctttccaaacaaatcatcgaacgcttcaaactcgaccaaaacagccagccgcaaacttacggcttgggcattaaagaagtttgggaagtgccgtccgaacagcatcagcccggtttggtggtgcacagcgcaggctggccgctggacagcaaaacctacggcggcgcgtttgtttaccatttcgatgacaacaaagtcgccgtcggcttcgtggtcggtttggactatcaaaatccttatctgtcgccgtttgaagagttccaacgtttcaaaacccatcccgaaatccgcaaaacctttgaaggcggccgccgcattgcttacggcgcacgttcgctgattgaaggcggtttgcaaagcctgccgaaactctcgttcaaagggggcattttggtcggcgatgcggcgggtttcctcaatatgccgcgcatcaaaggcattcataccgcgatgaaatccgccatgctcgccgccgaagccgtgttccccttgttggaaaaccttgaagaagtggagggtttcgacagcggcaaagaggcggcggattatcagcaacgttttgaacaaagctggctgtatcaagagctttacgccgcgcgcaacgtccgtccgtcattcaaatggggcgtttacctcggctcgctttataccggcatcgaccagatgattttcagaggcaaagccccgtggaccttgaaacatcacggtaaagacaacgagcagcttaaaaaagccgccgcgtgtaagccgattgattatccgaaacccgacggcgtgttgaccttcgaccgcttgagcagcgtcttccttgccaatctcgcgcacgaagaaaaccagcccgaccatttggtgctgaacaatccgcaaacgatgatagacgtgaactacaaagaatacgcctcgcccgaaacgcgctattgtccggccggcgtgtacgaaattgttgaagaaaacggcaatccgcgcctgcaaatcaacgcggcaaactgcgtgcactgcaaaacctgcgacatcaaagacccgacgcaaaacatcacttggatttgccccgaaggcgcgagcgggccgaattacggcgggatgtga

SEQ ID NO: 51119 - DNA, 546 bp, Neisseria meningitidis
atgagcaaaattatttgtctgactgccggacacagtaacaccgacccgggcgcagtcaacggcagcgaccgtgaggcggacttggcgcaggatatgcgcaacattgtggcttcaatcctgcgtaacgattacggcctgaccgttaaaaccgacggcacgggcaaaggcaatatgccgctgcgcgaagcggtcaagctgattcgcggctcggatgtggcgattgagtttcacaccaacgctgccgtcagcaaagcggcgacaggcatcgaagccttgagtaccgttaaaaacaaacgctggtgtcaggtgttgagcaaagccgttgccaagaaaaccggctggaaactgcgcggcgaagacggctttaaacccgacaatgcgggccggcattcgcgcctggcttatgcgcaggcaggcggcattgtgtttgagccgttttttatcagtaacgacactgatttggccttgtttaagacgaccaaatggggcatctgccgcgcgattgcggacgcgattgcgatggaattgggagcggcgaaggtatga

SEQ ID NO: 51120 - DNA, 2274 bp, Neisseria meningitidis; identical to SEQ ID NO: 47948

SEQ ID NO: 51121 - DNA, 783 bp, Neisseria meningitidis; identical to SEQ ID NO: 43275

SEQ ID NO: 51122 - DNA, 993 bp, Neisseria meningitidis
atgaaaacgcacgaaataagcaaagattcggtcagcctgataggggttgccgaacacgaggcggggcaacgccttgataactatctgataaaaatcctcaagggggttcccaagagccatatccaccgcattatccgcgccggcgaggtgcggttgaacaagaaacgctgcaaacccgacagccgtattgcggagggggatacggtgcggattccgcctgtgcgcgtggcggagaaggaaatgccgtctgaaaggcgtgccgccgtaccggcgcgtgcgtttgacgttgtttacgaagacgatgcgcttttggtcatcgacaaaccgtccggcgttgccgtccacggcggcagcggcgtgagtttcggcgttatcgaacagttgcgccgcgcccgtccggaggcgaagtatttggagttggttcatcgtttggacaaggatacgagcggcttgttgatggtggcgaagaaacgcagcgcgctcgtcaaacttcacgaagccatccgtaacgaccaccccaaaaaaatctaccttgcgctgggggtgggcaaactgccggacgacaatttccatgtcaaactgcccctgttcaaatataccggcgcacaaggcgaaaagatggtacgcgtcagcgaggacgggcagtcggcgcacacggtgttccgtgtgttaagccgtttttcagacggcattttgcacggtgtcgggctgtcgcacctgactttggtgcgggcaacgctgaaaacgggtcgtacgcaccaaatccgcgtccacctgcaatctcaaggctgtccgattgcgggcgacgaacgctacggcgattatcaggcgaaccgtcgtttgcagaagttgggtttgaagcggatgtttttgcacgcgtccgagctgcacttgaaccatccgctcacgggcgagccgctggtgttgaaggcggagctgccgccggacttggcgcagtttgcggtgatgttggaaaacgggacgaaaatgtga

SEQ ID NO: 51123 - DNA, 468 bp, Neisseria meningitidis; identical to SEQ ID NO: 42229

SEQ ID NO: 51124 - DNA, 198 bp, Neisseria meningitidis; identical to SEQ ID NO: 36305

SEQ ID NO: 51125 - DNA, 426 bp, Neisseria meningitidis
atggcgattgaacgtaccatctccatcatcaaacccgatgccgtcggcaaaaacgtcatcggcaaaatatacagccgctttgaggagaacggtctgaaaatcgttgccgccaaaatgaagcagcttaccctcaaagaggcgcaagaattttatgcggttcataaagaccgccccttctacgccggattggttgaatttatgaccggcggtccggttatgattcaagtactggaaggcgaaaacgccgttctgaaaaaccgcgaactgatgggggcgaccaatcccgccgaagccgccgaaggcacgatacgcgcggactttgccacttcggtcagcatcaatgccgtacacggctcggacactccggaaaatgccgctttggaaattgcctactttttcagccaaaccgaaatctgcccccgttga

SEQ ID NO: 51126 - DNA, 192 bp, Neisseria meningitidis; identical to SEQ ID NO: 42043

SEQ ID NO: 51127 - DNA, 1143 bp, Neisseria meningitidis
atgaaggtttttaaacaacagcttgaacaactcggcgcgcaaaaccaatatcgttcgattccggatttgattcatcaagggcggtatattacgcgggaaaaccgcaaaatgctgaatatgtcgtctaatgattatttgggtttggcatcagatgaaaacttgcgccggtcttttttgcagcaatacggcggtaattttccctcttttaccagttcttcatcgcgtttattaacgggcaactttcctatttataccgatttggaagagcttgtcgcacaacgtttccaacgggaaagcgcgttattgttcaacagcggctatcacgccaatctcggtattttgcctgctttgacgacgacgaaaagtttgattttggcagataaatttgttcacgccagtatgattgacggcatccgtttgagccggtgtgcgtttttccgttatcgtcataatgattatgaacatttgaaaaatctgcttgaaaaaaacgtcggaaaatttgaccgcacttttatcgttaccgaatctgttttcagtatggacggcgatgtggcggatttgaaacagcttgtccaattaaaaaaacagtttcccaatacttatctttatgtggatgaagctcacgcaatcggtgtttatgggcaaaacggattggggattgccgaacgggataatttgattgccgagattgatttattggtcggcactttcggtaaagccttagcctcggtgggggcgtatgccgtctgcaaccaagtattgaaagaatgtttgattaatcaaatgcgcccattgattttttcaaccgcattgccgccgtttaatgtggcttggacttattttatttttgaacgattgccgcaattctcaaaagaaagaagccatcttgagcagttaagcgcatttttacggcgggaagtggcgcatcggacgcaaataatgccgagccaaacctgtatcgtcccctatattttaggcgggaatgaagccacccttgccaaagcggaatatctgcaaaggcagggttattattgcctgcccatcagaccgccgacagtacccaaaaacacatccagaatacgattgtctttaacggcagatatgacaacggatgaagtgcggcagtttgcggtatacctgtaa

SEQ ID NO: 51128 - DNA, 1050 bp, Neisseria meningitidis
atgtcatctaaccaatatatccagtcgcttgagttgacaaactttaccgttcttccaaacgatacttttgaattttctgaaaatctcaatgttattgttgccgaaaacggttgtggcaaaacacatttgttaaaaattttatacagcctgctagaagtaacatctaacaccaaaaacagattactgaaaacagaattgcaaaaaagttttgccgataaattactgaatgttttccgtcccgattccttgggcaggttgagcaaacgtttgcaggggcgcgggcgtacggaaatcgttttaaaactgcaaaacggcactacgcatagtagtctgaatttttccagtaactcatcatcgcaagtcaatgttcaaagcatcggattgaaagaaaatgaatatactccgacacctatcttcttacccagccgcgaattaattacactttgcccttggttcacttctttgtatcaaaaccaaagcatccctttcgaagaaacttggtttgatacctgtatgcaattaaatcacccgcttgccaaaggccccagagaaacaaaaattcgagaattgctcgaacctattgagaacgcgatgggaggaaaagtatctgaagaacaaggaaggttttatctatcgctgacaaatacgggcggtaagattgaagcacctttggtagcagagggtttgcggaaatttgtcatgattgcccggttaatcgcaacaggggcattgctggataaaggctatctattttgggatgaaccggaagctaatctgaatcctaaattgatcaaagtggctgcccgtattatttggtctttatctcaacagggtattcaggtttttattgcaacacactctctattcttattgagagaattggaacttttgaagcttgaaaataacacggatttacctgtacgttttttctcgttgattgcttccgatgatggaacaaaagtggagcaagggaacagtattaatgatttgaacacattgatattgttagatgaaaacattatgcaggcagacaggtatctgaatatttga

SEQ ID NO: 51129 - DNA, 2472 bp, Neisseria meningitidis
atgaaaaaaacctgtttccactgcgggctggatgttcccgaaaacctgcatctgaccgtccgctacgaaggcgaagaccgagaaacctgctgcgccggctgtcaggcggtcgcacaaagcattattgacgcgggcttgggcagttattacaaacaacgcaccgccgacgcgcaaaaaaccgagctgccgccccaagaaatcctcgaccaaatccgcctgtacgacctgcccgaagtccagtccgactttgtggaaacccacggcggcacgcgcgaggcggttttaatgctcggcggcatcacctgcgccgcctgcgtctggctgatcgaacagcagcttttgcgtacagacggcatcgtccgcatcgacctcaattacagcacgcaccgctgccgcgtcgtctgggacgacggcaaaatccgcctttccgatattctgttgaaaatccggcagataggctacaccgccgcaccctatgacgcgcaaaaaatcgaagccgccaaccaaaaagaacgcaaacaatacatcgtccgcctcgccgttgccgggctggggatgatgcagacgatgatgttcgcgctgccgacctacctttacggcggcgatatcgaacccgatttcctgcaaatcctccattggggcggctttttaatggtgctgcccgtcgtattttattgcgccgtcccgttttatcaaggcgcgttgcgcgacctgaaaaaccgtcgggtcggtatggacacgccgattaccgtcgccatcattatgacctttatcgccggcgtttacagccttgcgacaaatgcggggcaggggatgtatttcgaatccatcgcgatgctgctgtttttcctgctgggcggacgctttatggaacacattgcctgccgtaaggcaggcgatgccgccgagaggctggtgaagctgattcctgcgttttgccatcatatgcccgattaccccgatacgcaggaaacctgcgaggcagctgtcgtcaaattgaaggcgggcgatatcgtgctggtcaaaccgggcgaaaccatccccgttgacggcacggtgctggaaggaagcagtgccgtcaacgaatctatgctgaccggcgagagcctgcccgtcgccaaaatgccgtctgaaaaagtaaccgccggcacactcaacacgcaaagccccctgattatacgcaccgaccgcaccggcggcggcacgcgactgtcgcacatcgtccgcctgctcgaccgcgccttagcgcaaaaaccgcgcactgccgagttggcggaacaatacgcctcgtctttcatattcggcgaactcctgcttgccgtccccgtcttcatcggctggacgctgtacgccgacgcgcacaccgcattgtggattaccgtcgccctgctggtcattacctgcccctgcgccttatcgcttgccacgccgaccgcgctggcagcttctaccggtacgctggcgcgcgaaggcattttaatcggcggaaagcaggcaatcgaaaccctcgcccaaaccaccgacatcatcttcgacaaaaccggcacgctgacccaaggcaaacccgccgtccgccgtatctcattgttgagaggcacagacgaagcctttgttctcgcggtggcgcaggctttagaacaacagtccgaacatccccttgcccgcgccatcctcaactgccgtgtttcaagcggcagcgtccccgacatcgctattaaacaacgcctcaaccgcatcggcgaaggcgtgggcgcgcaactgaccgtcaacggcgaaacacaggtttgggcattgggcagggcatcctatgtcgccgaaatttcaggtaaagaaccgcaaacagaaggcggcggcagcgcggtttacctcggcagtcaaagcggtttccaagccgtgttctacctgaccgaccccttgaaagacagcgcggcggaggcggtgcggcagttggcaggcaaaaacctgaccctgcacatcctcagcggcgaccgcgaaaccgccgttgccgaaaccgcacgcgccctgggtgtcgcgcactaccgcgcccaagccatgcccgaggacaaactggaatacgtcaaagccttgcaaaaagaagggaaaaaagtgctgatgataggcgacggcatcaacgacgcgcccgttttggcgcaggcagacgtatccgccgccgcagcgggcgggacggatattgcgagggacggcgcggacattgtgttattgaacgaagatttgcgtaccgtcgcccacctgctcgatcaggcgcggcgcacccgccatattatccggcaaaacctgatatgggcgggcgcgtacaatatcattgccgtaccgcttgccgttttgggctatgtccaaccgtggattgccgcactgggtatgagcttcagttcgctggtcgtattgggcaatgctatgcggcttcacaagcaggtggacatgccgtctgaaaaaatgccgtccgaacaatga

SEQ ID NO: 51130 - DNA, 264 bp, Neisseria meningitidis; identical to SEQ ID NO: 46496

SEQ ID NO: 51131 - DNA, 900 bp, Neisseria meningitidis
atggttgcaaaaataaaaaaattctcagattcaaccctttccgttttgaataacggcgagcgtcggttttatgtctattgtctgaccgacctgaaaaaagacaaaatcctctacatcggcaaaggctgcggtaatcgtatcttcgagcatgaatgggttgctagtcgttcacaagacccagtctccggcgagattatcgatcggaaactcaaagccatctccaaatgcaagaaactcggtcgctatatcatcagctatcatctgactgaagtcgaagcgctcgccgccgaatctgccttaattcattttgttaaatctgtcttgggtaaaaaactcaaaaataaaattgccgggcatggtccgggtggtattagcgtagaagaactagatcgccgctttggattctcttctctcccacttgatgagatcaactccaacgagctaattctcgccatcaaaatccacaatgctttcgatttagatactgacgaagaattagactaccttttcgacaaccaagacgatgccaacctcaaatcgcgtacgttgggcaactgggttatcggtaaagatgttgcttcaaaagtgaaatacgttatcggcgttcacaccggtctgcaaaacgctgttgtcagtgcatacgaagtggacggttttgaaacaatggttgaggaaaccaaaaacggtagaaaacaatcccgttaccgtttccgcactacctctcgtagcgaagaggtattagccaaactcggtctgcaacaaaaatgcctgcccgaattgaagtttggtagcgggggagaaaaagcgtatatcagacccaaaacagagacagaaactgaacaagagaatattcagacgacccccaatccaaaaataaaaaaggaaaaaaccaaatcatga

SEQ ID NO: 51132 - DNA, 2751 bp, Neisseria meningitidis
atgctgacaaacattgccaagaaaatcttcggcagccgcaacgaccgcttgctgaaacaataccgtaaatccgttgccagaatcaacgcgctcgaagaacagatgcaagccctaagcgatgctgatctgcaagccaaaactgccgaattcaaacaacgcctcgccgacggtcagactttggacggcattttgcccgaagccttcgccgtctgccgcgaagcgtcccgccgcaccctcggtatgcgccacttcgacgtgcagcttatcggcggtatggtgctgcacgacggcaaaatcgccgaaatgcgtaccggcgaaggcaaaaccctggtcgccaccctcgccgtctatctcaacgcgctggccggcaaaggcgtgcacgtcgttaccgtcaacgactacctcgcctcgcgcgacgcaggcattatggagccgctctacaatttcctcggtctgaccgtcggcgtgattatttcagatatgcagccgttcgaccgtcaaaacgcctatgccgccgatattacctacggcaccaataatgaattcggcttcgactacctgcgcgacaatatggttaccgaccaatacgacaaagtgcagcgcgaactgaatttcgccgtcgttgacgaagtggactccatcttgattgacgaagcgcgcactccgctgattatctccggccaggcagacgacaacattcagttgtaccaaatcatgaacaccgttccgccccacctcgtccgccaagaaaccgaagaaggcgaaggcgactactgggtagatgaaaaggcgcaccaggtcatcctgagcgaagcaggtcacgaacacgccgagcaaatcctaaccaaaatgggattgctggcagaaaacgactcgctctattccgccgccaacatcgccctgatgcaccaccttatggcggcattgcgcgcgcatacgttattccacaaagaccaacattacgttatccaagacggcgaaatcgtcatcgtggacgaattcaccggccggctgatgtccggccgccgctggtcggagggtctgcatcaagccgtcgaagccaaagaaggcgtggaaatcaaacgcgaaaaccaaacccttgcctccatcaccttccaaaactatttccgcctgtacaccaagctctccggcatgaccggcacagccgataccgaagccttcgagttccaaagcatctacaacctcgaaaccgtcatcatcccgaccaaccgccctgtacagcgcaaagacttcaacgaccagattttccgttccgccgaagaaaaattcgaagccgtcgtcaaagacatcgaagaatgccacaaacgtgggcagcccgtcctcgtcggtacgaccagcatcgaaaactccgaactggtctcccaccttctgcaaaaagccggactgccgcacaacgtcctcaacgccaaagaacacgaacgcgaagcgctgattgtcgcccaggcaggcaaagtcggcgcgattaccgttgccaccaatatggcgggacgcggtacggacatcgttttaggcggcaacctgaagcaccaaaccgatgccatccgtgccgacgaaaccttgagcgacgaagagaaacaggcacaaatcgccgcactcgaaaacggctggcaggcagaacacgacaaggttatggaagcaggcggtttgcacatcatcggcacagaacgccacgaaagccgccgtatcgacaaccagttgcgcggacgctccggccgtcagggcgaccccggatccagccgtttctacctctcgtttgaagacccgctgctgcgcctattcgcactcgaccgcgccgccgccatcctcaaccgccttgcacccgaacgcggcgtcgccatcgagcacaacctgctgacgcgccaaatcgaaggggcgcaacgcaaagtcgaaggcagaaacttcgatatgcgcaaacaggttctggaatacgacgacgtcgccaacgagcaacgtaaagtcatttacagccaacgcaacgaaattttaaccagcaaagacatcagcgacctgatgaaggaaatccgttttgatgtcatcggcggacttgtagacatatatatgccgccggacagcatggaagaacaatgggacattccgactctggaaaaccgtctggctgccgaattcagactgcacgaagacattcaatcctggctgaaagcagacaatacaattgacggtcaagacatcaaagagcgcctgatcgaacgcatcgaaaacgaatatgccgccaaaaccgaactggtcggtaagcaggcaatggccgatttcgagcgcaacgtgatgttgcaggtcatcgacaaccaatggcgcgaacacctcgccgctatggactacctgcgacaaggcatccaccttcgcagctatgcccaaaaaaatccgaagcaggaatataaacgtgaagcctttaccatgttccaagacctgtggaacggcatcaaattccatattgcctccctgcttacctcggttcaaatcgaacaaaaccctgtcgcggtggttgaagagcaacccatcggcaacatccagtccatccattccgaatcgcccgatatggaagaacttttgggtcagtcgcaaaccgatttggttaccgaggcctttaatcccgatggaacggatttcagccccgaagccttggaagcgcggggacaaatcgtccaccgcaacgacccctgcccctgcggcagcggtttgaaatacaaacaatgccacggcaaactggcttga

SEQ ID NO: 51133 - DNA, 1116 bp, Neisseria meningitidis
atgggcttgaaaaaggcttgtttgaccgtgttgtgcctgattgttttttgtttcgggatattttatacatttgaccgggtaaatcagggggaaaggaatgcggtttccctgctgaaggacaaactcttcaatgaagagggggaaccggtcaatctgattttctgctataccatattgcagatgaaggtggcagaaaggattatggcgcagcatccgggggagcggttttatgtggtgctgatgtctgaaaacaggaatgaaaaatacgattattatttcaatcagataaaggataaggcggagtgggcgtattttttccacctgccctacggtttgaacaaatcgtttaatttcattccgacgatggcggagctgaaggtgaaggcaatgctgctgccgaaggtcaagcggatttatttggcaagtttggaaaaagtcagcattgccgcctttttgagcacttacccggatgcggaaatcaaaacctttgacgacgggacaatcaatttaattcaaagcagcagctatttgggtgatgagttttctgtaaacgggacgatcaagcggaattttgcccggatgatgatcggagattggagcatcgccaaaacccgtaatgcttccgacgagcattacacgatattcaagggtttgaaaaacattatggacgacggtcgccgcaagatgacttacctgccgctgttcgatgcgtccgaactgaaggcgggggacgaaacgggcggcacggtgcggatacttttgggttcgcctgacaaggagatgaaggaaatttcggaaaaggcggcaaaaaacttcaacatacaatatgtcgcaccgcacccccgccaaacctacgggctttccggcgtaaccacattaaattcgccctatgtcatcgaagactatattttgcgcgaaattaagaaaaacccgcatacgaggtatgaaatttatacctttttcagcggtgcggcgttgacgatgaaggattttcccaatgtgcacgtttacgcattgaaaccggcttcccttccggaagattattggctcaagccggtgtatgccctgtttacccaatccggcatcccgattttgacatttgacgataaagattaa

SEQ ID NO: 51134 - DNA, 996 bp, Neisseria meningitidis; identical to SEQ ID NO: 45012

SEQ ID NO: 51135 - DNA, 606 bp, Neisseria meningitidis
atgctttgtccgaacactgcaagaaacaaggaaaacattatgagcatcaagtccgacaaatggatacgccgaatgagcgaagaattcggcatgatcgaccccttcgagccgaaccaaatcaaagaagccgacggcaaacgcatcatctcctacggtacgtccagctacggctacgacatccgctgcgccaacgaatttaaaatcttcaccaacatcaacagcaccatcgtcgatcccaaaaacttcgacccaaaaaacttcgttaccgttgaagacgactgctgcatcatcccgcccaattccttcgcactggcgcgcacggtcgaatatttccgcatcccgcgcaacgtcctgaccgtctgcttgggcaaatcgacctacgcacgctgcggcatcatcgtcaacgttaccccgttcgaaccggaatgggaaggctacgttaccctcgaattttccaacaccacccccctgcccgccaaaatctacgccggcgaaggcgtggcgcaagtcctgtttttcgagagcgacgaagtgtgcgaaacttcatacaaagaccgcaacggcaaatacatgggacaaaccggcgtaaccctgcccaaagcctga

SEQ ID NO: 51136 - DNA, 774 bp, Neisseria meningitidis; identical to SEQ ID NO: 47967

SEQ ID NO: 51137 - DNA, 1596 bp, Neisseria meningitidis; identical to SEQ ID NO: 42222

SEQ ID NO: 51138 - DNA, 855 bp, Neisseria meningitidis
atggaaacccaagaaaacatgattaaaaccgccttacaagcagctcaaaaacctttttttgagtttgcaccgaacaatactctgcttgtattcacaccagaccaagacggtggctggagatacaaatcacaccccgaattgatgcaaaacccgtaccgcaagtgcggcaaattcctcatgcacgataccgccagtcttattaagtttgtacaaaaacacaaacaggacggcacacaaatctacattgatgccgatttcaaatcagggcgtattgatgtcaccgccgtcatcaacggccatacgcaacaagctccgggctggctcgatttttatgccgtatacaccccgcaacacactacatcggcatccaactggctgaacaacaatgcgcaccgcatgaatcagatggagttttcccatttcctgaccaacaatgcccgcaacatcgtatccaaaaatcccggtaacgaaaattccgtttacccgaccgccgccgaagtattggatttcgcgctcaatctcgagtacaccgaaaaaaccaccttcaaacaaggctatcgtgaacaggacggcagaatcaactttaccttccaatccgaagactcagggcaaacagagaaaaacctcaaaatgtttgaacgtttcggcatcgagttcaccccgcatcaaggcggtgcatcctactttgttgaagccctgttgaaattccgcatcgacaaaaacagcggcgcactcgtcctgtggtacgaattgcagcaaatcgatgctgtaatcgaacaagcggcaaaagacatttccgaagccgtacaaaaagccttccctgaaatcgacatctatttcggcgtaatcgcctaa

SEQ ID NO: 51139 - DNA, 999 bp, Neisseria meningitidis
atgagcagacccgtacccgccgtattcggcagcgtttttcacagtcaaatgcccgtcctcgcctaccgcgaaggcaaatggcagccgaccgaatggcaatcttcccaagacctctccctcgcaccgggcgcgcacgccctgcactacggcagcgaatgtttcgagggactgaaagccttccgtcaggcagacggtaaaatcgtactgttccgtccgactgccaatatcgcgcgtatgcggcaaagtgcggacattttgcacctgccccgccccgaaacccaagcctatctcgatgctttggtcgaactggtcaaacgtgccgccgacgaaattcccgatgcgcctgccgccctgtacctgcgcccgaccttaatcggtaccgatcccgttatcggcaaggccggttctccttccgaaaccgccctgctgtatattttggcttcccccgtcggcgactatttcaaagtcggctcgcccgtcaaaattttagtggaaaccgaacacatccgctgcgccccgcatatgggccgcgtcaaatgcggcggcaactacgcttccgccatgcactgggtgctgaaggcgaaagccgaatacggcgcaaaccaagtcctcttctgcccgaacggcgacgtgcaggaaaccggcgcgtccaactttatcctgattaacggcgatgaaatcattaccaaaccgctgaccgacgagtttttgcacggcgttacccgcgattccgtgctgacggttgccaaagatttgggctataccgtcagcgaacgcaatttcacggttgccgaactgaaagctgcggtggaaaacggtgcggaggcgattttgaccggtacggccgcggtcatttctccggtaacttctttcgtgattgacggcaaagaaatcgaagtgaaaagccaagaacgcggctacgccatccgtaaggcgattaccgacatccagtatggtttggcggaagacaaatacggctggctggttgaagtgtgctga

SEQ ID NO: 51140 - DNA, 1464 bp, Neisseria meningitidis
atgcgtatcgtagaaaaagcctatactttcgacgatgttttgttggttcccgcacattcgaccgtgctgccgcgagacgttaaacttcaaaccaagctcacccgcgaaatcacactcaacctccccctgctttccgctgcgatggacactgttaccgaggcgcgcctcgccatttcgatggcacaggaaggcggcatcggcatcatccataaaaacatgccgcccgaaatgcaggcgcgcgccgtttccaaagtgaaacgccacgaaagcggcgtggtcaaagaccccgtaaccgttgcaccgacaacgctcatccgcgaagtcttggaaatgcgtgcgcagcgcaaacgcaaaatgtccggcctgcccgtcgttgaaaacggcaaagtcgtcggcatcgtaaccaaccgcgacctgcgttttgaaaaccgcgtcgatttgcccgtttccgccattatgaccccgcgcgaacgtctggttaccgtccccgaaggcacaagcatagacgaagcgcgcgaactgatgcacacgcacaaagtcgagcgcgttttggttctgaacgaaaaagacgaactcaaaggtctgattaccgtcaaagatattttaaaaaccaccgagtttcccaatgccaacaaagactccgaaggccgtctgcgcgtcggtgcggcagtcggcaccggcggcgacaccgaagagcgcgtcaaagccttggttgaggccggcgtggacgtgattgtcgtcgataccgcccacgggcacagccaaggcgtgatcgaccgcgtgcgttgggtcaaagaaacctatccgcacatccaagtcatcggcggcaacatcgccactgccaaagccgctttggatttggtcgccgccggcgcggatgccgtcaaagtcggtatcggtccgggatcgatttgcaccacccgtatcgtggcaggtgtcggcgtgccgcaactgaccgccattcacaacgttgccgaagccctcaaaggcacgggcgttccgctgattgccgacggcggcatccgcttctccggcgacatcgccaaagccctcgccgcaggcgcgtacagcgtcatgctcggcggtatgtttgcaggcacggaagaagcgccgggcgaaatcgaactctaccaaggccgctcgtacaaatcctatcgcggtatgggttccttgggcgcgatgagccaaggttctgccgaccgctacttccaagacaaaaccgacagcaccgacaaatacgtccccgaaggcatcgaaggccgcgttccctacaaaggcccgattgtgaacatcatccaccaactgaccggcggactgcgctccagcatggggtatttgggttgcgccaatattgccgaaatgcacgaaaaagcagaatttgtggaaatcacttccgcaggtatgagcgaatcgcacgttcacgacgttcaaattaccaaagaagcaccgaactaccatcgctga

SEQ ID NO: 51141 - DNA, 1290 bp, Neisseria meningitidis
atgatgaagtctatcctcaccgtatccggaaatcgtatgcgtaaacccagaatcacctatttggatgtttgggcaaacgatgaaagaatcggtactttggaaaagggggccatgtatcggttcgcatacgacaatcccaattcttcgttgctgggcctgcattatcaagacagaagcaaggtatatatcagcaacaatatgccgcatatctttgcacagtattttccggaaggctttttggatgcacacatcacaagcaaatatgcttttcatgatgcgccttttgaagacaatgagatgctgcgcttggcaattctgtgcagagagactttgggtcggatacatgtgcgctgtaatgacccgctttttaatgaatggattgacgggttggagatgaaaaatccaagaatattgactgaacgggatttgctgggcataaatgcccgacaggtttttcagcaatatatggcagaaatcttccatcacggccgtttcgtcagtgtatccgggatacagcagaagatgtccttagaggccatccgcagaaataccaagcaaactgcctcatatattgccaaaggttttgatgcatccgaatatccttgcttggctgccaatgaatttttatgcatgcagaccatcaaacaagccggcattgccgttgcacagaccagcctgtcggaagattcatcagtcttattggtacgtcggtttgatgtcagtgaacagggttattttttagggatggaagactttaccagtctgcgccagtattcggtagaagataaatataaaggcagttatgcggctattgcacagattatccgacagatatccggcagaccagatgaagatttaatccatttctttaatcagcttgctgccagttgcatattgaaaaacggcgatgcacacctcaaaaatttttcagtactctatcatgacgaatacgatgttcgtcttgcacctgtctatgatgtattggatacatcaatatacagggttggaacacaaggaatttttgatgcttatgacgatacgctggcattaaacctgactaaccacggtaagaaaacatatccttccaagaatacattgttggattttgctgagaaatattgcgatttgggaagagaagatgcatcctttatgatagatacaatcgttcaagctaaagaacaggttcttgttaaatactcggatgtattgcgtgagaatgaatggttggcgcagaagtggcattttatcccggatgaaaatgaagaaggtctaccgtttacattccggtag

SEQ ID NO: 51142 - DNA, 867 bp, Neisseria meningitidis
atgatgaaaaccttactgccctttttcggcgtggtgcgcgtcagcggcgaagaccgccaaaccttcctgcacggacagctttccaacgacatcaaccaccttcagaccgggcaggcgtgttatgcgacttacaacacgcccaaaggccgcgtcatcgccaatatgattgtcgtcaaccgaggcggcgatttgctgctgattatggcgcaagacttgcttgaagcaacggtcaaacgtttgcggatgtttgtgttacgcgccaaagccgtttttgaaatccttgaagattacgccgtcggcgcggaattagaagcatccgccgaaccgcttgccgcgcaagaacccagcctcgcctttaccgccgaatgcggttcagacggcatctgttccgtcgtcctgccacatcggggcattttgcacatcgcccccaaaaacgccttgccgccttatgatgccgccgccgaaaacgcgtggcggctgcacgaaatccgtagcggttatccgtggatatgcgcggctaccaaagaaaccgccgtcgcccaaatgctcaaccagcacatcatcggcggcgtacacttcaaaaaaggctgctatccgggacaggaaatcattgcccgtgcccagtatcgggggcaggtcaaacgcggcttggcggtattgtcgggaaattcggccgtcgaagcaggaaccctgctgacggcggacggcgaagaggccggcatcgtactcgacagcgttcaagattcggaaaactttaccgcccttaccgtgattaaattctccgccgcacaaaaaacactgaccgtcccaaacggcggtatcttcaaagcggttcatctcttctttaaaaccgaaaatgcagaataa

SEQ ID NO: 51143 - DNA, 606 bp, Neisseria meningitidis; identical to SEQ ID NO: 39821

SEQ ID NO: 51144 - DNA, 1287 bp, Neisseria meningitidis; identical to SEQ ID NO: 42118

SEQ ID NO: 51145 - DNA, 549 bp, Neisseria meningitidis; identical to SEQ ID NO: 39055

SEQ ID NO: 51146 - DNA, 360 bp, Neisseria meningitidis
atgattaacctagaattgaaagccatcaatctttacgattgtgcctttgaagatttcgttcccgaaatcaaagacaatttttgtgtgggaattgatttagacataggaactgatgatagtgatgctgcagatatattttctgttcgcatatgctctcctaaatggattttgcataattgtttccaaaatcaaagggttaaatggggagcgggtatgatgattatgaatgaatttaatcattctgttattaaatcggaaattgagaaaattcttaaagaatgttcaaaagaaacttgggaaaagtcattgacttatttacttcgttttttttcgtgggaatttgaagattatcagtgctaa

SEQ ID NO: 51147 - DNA, 1848 bp, Neisseria meningitidis
atgtacctaccctctatgaagcattccctgccgctgctggcggccctggtgcttgccgcgtgttcttcgacacacgcgcccagcagcaagaccctggcagacaatatagaaactgccggtctttcggcaagcgttcccacccgccctgccgaacccgaaggaaaaacgctggcagattacagcagctacccttccgcactggatgcagtgaaacagaaaaacgatgccgccgtcgccgcctatttggaaaacgccggcgacagcgcgatggcggaaaatgtccgcaacgagtggctgaagtctttgggcgcacgcagacagtggacgctgtttgcacaggaatatgccaaactcaaacctgaagggcgcgcccaagaagtcgaatgctacgccgattcgagccgcaacgactatacgcgtgccgccgaactggtcaaaaatacgggcaaactgccttcgggctgcaccaaactgttggaacaggcagccgcatccggcttgttggacggcaacgacgcctggaggcgcgtgcgcggactgctggccggccgccaaaccacagacgcacgcaaccttgccgccgcattgggcagcccgtttgacggcggtacacaaggttcgcgcgaatatgccctgttgaacgtcatcggcaaagaagcacgcaaatcgccgaatgccgccgccctgctgtccgaaatggaaagcggtttaagcctcgaacaacgcagtttcgcgtggggcgtattggggcattatcagtcgcaaaacctcaatgtgcctgccgccttggactattacggcaaggttgccgaccgccgccaactgaccgacgaccaaatcgagtggtacgcccgcgccgccttgcgcgcccgacgttgggacgagctggcttccgtaatctcgcatatgcccgaaaaactgcaaaaaagcccgacctggctctactggctggcacgcagccgcgccgcaacgggcaacacgcaagaggcggaaaaactctacaaacaggcggtagcgacgggcaggaatttttatgccgtactggcaggggaagagttggggcgcaaaatcgatacgcgcaacaatgttcccgatgccggcaaaaacagcgtcctccgtatggcggaagacggcgcagtcaaacgcgcgctggtgctattccaaaacagccgaaccgccggcgatgcgaaaatgcgccgtcaggctcaggcggaatggcgttttgccacacgcggcttcgacgaagacaagctgctgaccgccgcgcaaaccgcgttcgaccacggtttttacgatatggcggtcaacagcgcggaacgcaccgaccgcaaactcaactacaccttgcgctatatttcgccgtttaaagacacagtaatccgccacgcgcaaaatgttaatgtcgatccggcttgggtttacgggctgattcgtcaggaaagccgcttcgttataggcgcgcaatcccgcgtaggcgcgcaagggctgatgcaggttatgcctgccaccgcgcgcgaaatcgccggcaaaatcggtatggatgccgcacaactttacaccgccgacggcaatatccgtatggggacgtggtatatggcagacaccaaacgccgcctgcaaaacaacgaagtcctcgctaccgcaggctataacgccggccccggaagggcgcgccgatggcaggcggatatcccccttgagggtgcggtatatgccgaaaccatcccgttttccgaaacgcgcgactatgtcaaaaaagtgatgaccaatgccgcctactacgcctccctcttcggcgcgccgcacatcccgctcaaacagcgtatgggcattgttcctgcacgctga

SEQ ID NO: 51148 - DNA, 528 bp, Neisseria meningitidis
atgaaacagaaaatctggtacacctacgatgacatccaccgcgtcatcaaagcattggcagaaaaaatccggaacgccgacatcaaatacgatgccatgattgccatcggcggcggcggctttattccggcacgtatgctgcgctgttttctggaaattccgatttatgccgtaaccaccgcctattacgacagcgacaacgaaggacaggttaccgaagaagtcaaaaaagtccaatggctagaccccgttccagaagccctgcggggcaaaaacgtactcgtcgtcgatgaagtggacgacagccgcgtaaccatggaattttgcctgacagagctgctcaaagaagacttcggtacgatcggcgtcgccgtactgcacgaaaaaatcaaagccaaagcaggcaaaatccccgaaggcattccctatttcagcggcatcaccgtagaagactggtggatcaactatccgtgggacgcactcgacatcgacgaacacaaccgccttgccgaggccggccgaggctga

SEQ ID NO: 51149 - DNA, 318 bp, Neisseria meningitidis; identical to SEQ ID NO: 46008

SEQ ID NO: 51150 - DNA, 1116 bp, Neisseria meningitidis
atgaagattgtaattgcaccggattcgtttaaggaaagcttgacagctcaacaggtagctgaagcaataaaaagaggcttccaacaatcgatagcagatgtggaatgtctcctctgtcctgtcggtgatgggggagaaggcactgtagatgctatccgacattctcttgacctagaagaaaaatgtctccaagtgacaggaccttttggacaaaaagaagtcatgcgctattttcaaaaagaacaactagccctattcgaagttgctgatttggttggtcttggaaaaatcccgctagagaaacgaaatccattacaaatccaaactcgtggtattggagaattgattcgccacctcattagtcaagaaattaaagaaatctatattggcgttggcggtacggccagtaatgatggaggtattgggattgctgctggtttaggttatcaattttatgatgaggatggaaatgccttacccgcttgcggtcaatccttactaaacctagcttctgtttcaacagaaaattgctataaaattcctgaagatgttcacattcgtattttagcagatgttgtgagtcccttatgtggacaccaaggtgcgacctatacgtttggcaagcaaaaagggttggattctactatgtttgaggtcgtagatcaggcaatacaagatttttatgaaaaagtctcccctgcaacattaaaacttaaaggagcaggagctggtggaggcatcgctggtggtttgtgcgcctttgctcaggcaagtatcgtatctggaattgacacctgcctggacttgattgactttgataagaaagtgtcagatgttgacttggttatcgttggtgaaggaagactagatcgtcaaagtttagcagggaaagcgcctattggtgtagcaaaaagaacccctgtcggagttcctgttgtcgctatttgtggcagtctcgttgaagatttgccttccctgccatttgaaaatatccaagctgccttttctattttggagaaaagtgaacctttagaagatagtttgaaaaatgccagtctctatttggagcatacggcttctaatattggacacttattaaatatgcctaagatttag

SEQ ID NO: 51151 - DNA, 567 bp, Neisseria meningitidis
ttgaacatcaaatattcgggcatcgaaaacaggtttgaaaccgccatcctgaagaaaaacggcgtaagatccggcttcgtctccttcgcccccaaccttgccgccgtcaaactgaacgattatgccaaagttagaaaacggattaccaaaaccaaacagaaagccgacatcgtcattgtgatgttccacggcggcgcggaagggaaacaggcggaacacctgccgttcgataccgaaatcttctatggggaaaacaggggcaacgtcgtcgagtttgcacggcttgccgtcgattccggcgcggatgtcgtattcgggcaggggtcgcacgttactcgcgccgtcgaactttaccgcgaccgcttcatctcctacagcggcggcaactttgccacctacggcgcaatcaacacctccggcatcagcggcattgcgccgattttcaaaattatcaccgacaaacaggggcggttcgtttccggcaacattatccccatcactcaaatcggcgataaaatccccaaaatcgaccctgaaaaaccgttatcgggcggattatttatctga

SEQ ID NO: 51152 - DNA, 1311 bp, Neisseria meningitidis; identical to SEQ ID NO: 39684

SEQ ID NO: 51153 - DNA, 1515 bp, Neisseria meningitidis
atgactacctctaaatgccccgtaacccatctgaccatgaacaacggcgcgcccgttgccgacaatcaaaacagcctgaccgccggcccgcgcggccccctgctggcgcaggatttgtggctgaatgaaaaactcgccgacttcgtgcgcgaagtcatccccgaacgccgtatgcacgccaaaggttcgggcgcgttcggcacatttaccgtaacgcacgacatcaccaaatacacccgcgccaaaatcttcagcgaagtcggcaaaaaaaccgagatgttcgcccgtttcaccaccgtggcaggcgaacgcggcgcagccgatgccgaacgcgacatccgcggttttgccttgaaattttataccgaagaaggcaactgggatgtggtcggcaacaacacgcccgtgttcttcctgcgcgatccgcgtaaattccccgacctgaacaaagccgtcaaacgcgacccgcgcaccaatatgcgctctgccacaaacaactgggacttctggacgctgctgcccgaagcactgcaccaagttaccatcgtgatgagcgaccgcggcatccccgccggctaccgccatatgcacggcttcggttcgcatacctacagcttctggaacgaagcaggcgagcgtttttgggtgaaattccacttccgcacccaacaaggcattaaaaacctaaccaacgaagaagccgcaaaaatcatcgccgacgaccgcgaaagccaccagcgcgacctgtacgaagccatcgagcgcggcgagtttccgaaatggacgatgtacatccaagtcatgcctgaagccgatgcggaaaaagtaccctatcatccgtttgacctgaccaaagtttggccgaaaaaagactatccgctgattgaagtgggcgaattcgagttgaaccgcaatcccgaaaacttcttcgccgatgtggaacaatccgccttcgcaccgagcaacctcgttcccggtatcggcgcgagcccggataaaatgttgcaagcccgtttgttcaattacgccgacgcgcaacgctaccgcttgggcgtgaacttccgccaaatccctgtcaaccgtccgcgttgccctgttcacagcaaccagcgcgacggacaaggacgcgccgacggcaactacggcagcctgccgcactacgaacccaacagcttcggccaatggcagcagcagcccgacttcgccgaaccgcctttgaaaatcaacggcgacgcggcaaactgggactaccgccaagacgatgacgactatttcagccaaccgcgcgccctgttcaacctgatgaacgacgcgcagaaacaggcattgttcggcaacaccgccgcagccatgggcgatgcgcccgacttcatcaaataccgccatatccgcaactgccaccgttgcgacccggcatacggcgaaggcgtggcaaaagccctcggattgactgtcgaagacgcacaagccgcccgcgcgaccgaccccgcactcggccagcccggtttgctgtaa

SEQ ID NO: 51154 - DNA, 1056 bp, Neisseria meningitidis; identical to SEQ ID NO: 42767

SEQ ID NO: 51155 - DNA, 687 bp, Neisseria meningitidis; identical to SEQ ID NO: 36558

SEQ ID NO: 51156 - DNA, 1068 bp, Neisseria meningitidis
atgggcggtaaaacctttatgctgatggcgggcggaacgggtggacatattttccccgcgctggcggtggcggattcattgcgcgcgcgcggccatcatgtgatttggctgggcagcaaggattcgatggaagagcgtatcgtgccgcaatacggcatacgcttggaaacgctggcgattaaaggcgtgcgcggcaacggcatcaaacgcaaactgatgctgccggttactttgtatcaaaccgtccgcgaagcgcagcggattatccgcaaacaccgtgtcgagtgcgtcatcggcttcggcggcttcgttacctttcccggcggtctggcagcgaaactcttgggcgtgccgattgtgattcacgagcaaaacgccgtggcaggcttgtccaaccgccacctgtcgcgctgggcgaagcgggtgttgtacgcttttccgaaagcgttcagccacgaaggcggcttggtcggcaaccccgtccgcgccgatattagcaacctgcccgtgcctgccgaacgcttccaagggcgtgaaggccgtctgaaaattttggtggtcggcggcagtttgggcgcggacgttttgaacaaaaccgtaccgcaggcattggctttgctgcccgacgatgcgcgtccgcagatgtaccaccaatcgggacggggcaagctgggcagcttgcaggcggattacgacgcgctgggcgtgaaagccgaatgcgtggaatttattaccgacatggtgtccgcctaccgcgatgccgatttggtgatttgccgtgccggcgcgctgacgattgccgagttgacggcggcgggattgggtgcgttgctcgttccgtacccccacgcggttgacgatcaccaaaccgccaacgcgcgttttatggtgcaggcagaagcaggactgctgttgccgcaaacccagttgacggcggaaaaactcgccgaaatcctcggcagcctgaaccgcgaaaaatgtctcaaatgggcagaaaacgcccgtactttggcattgccgcacagcgcggacgacgttgccgaagccgcgattgcgtgtgcggcgtaa

SEQ ID NO: 51157 - DNA, 279 bp, Neisseria meningitidis; identical to SEQ ID NO: 36930

SEQ ID NO: 51158 - DNA, 327 bp, Neisseria meningitidis; identical to SEQ ID NO: 39180

SEQ ID NO: 51159 - DNA, 1383 bp, Neisseria meningitidis
atggcaaatattgcccgcgacatcttcaaagcctacgacatccgaggcattgtcggcaaaaccctgactgacgatgccgcctatctcatcggcagggccatcgccgccaaagccgccgaaaaaggcatgacccgcatcgcgctcggacgcgacggacgcttgagcggtcccgaactgatggagcacatccaacgcggctttaccgacagcggcatcgacgtcctcaacgtcggtatggtcgccacgcccatgctctattttgccgctatcaacgaatgcggcggcagcggcgtgatgattaccggcagccacaatccgcccgattacaacggctttaaaatgatgctcggcggcgacacgcttgccggcgaagccatccaagaacttttgtccatcattgaaaaagacggttttgctgccgccggcaaacaaggcagcgtcaccgaaaaagacatctccggcgaatacctcaaacacattaccggacacatcaggctcaaacgcccgatgaacatcgccattgacgcgggcaacggcgtgggcggcgcgtttgccggcaaactctacaaaggcttgggcaacgaagtaaccgagcttttctgcgacgtggacggcactttccccaaccaccatcccgacccatccaaaccgaaaaacctgcaagatttgattgccgcgctgaaaaacggtgatgccgaaatcggcttggcgtttgacggcgatgccgaccgcttgggtgtggttaccaaagacggcaacattatttatcccgaccgccaactgatgctgttcgcccaagacgttttgaaccgcaatcccggcgcgaaagtcattttcgacgtgaagtccacccgcctgcttgcgccttggattaaagaacacggcggcaaagccataatggaaaaaaccggccacagctttatcaaatccgccatgaaagaaaccggcgcgccggttgccggcgaaatgagcggacacatcttcttcaaagaacgctggttcggcttcgacgacggtctgtacgccggcgcacgcctcttggaaatcctgtctgcctccgataatccgtccgaagtgttaaacaacctgccgcaaagcatttccacgcccgaactcaacatcgccctgcccgaaggcagcaacggccatcaggttatcaacgaactcgccgccaaagccgaatttgaaggcgcaaccgaaatcatcaccatcgacggtcggcgcgttgaatttcccgacggcttcggtctgatgcgtgcttccaataccacgccgattctggtgttgcgttttgaggcggatacgcaagaagccatcgagcggattcaaaaccaattcaaagccgtcatcgaaagcaatccgaatctaatctggcctctgtaa

SEQ ID NO: 51160 - DNA, 1383 bp, Neisseria meningitidis
atggcaagagacaaccgcatccaaatgtttccgcacgaatggcgcgccagtacgacgctttccggcgtgtacgcgctgcgtatgctgggtatgttcctcgtgctgcccgtattggcggtgtatgccgcctcgctgcccggcgcggaaggcaacaaaacgctggtcgggctggcaatgggcatttacgggctgacacaggctctgctgcaactgcctttgggcatcgcttccgacaagttcgggcgcaagaaaaccatttatgtcgggctgattgtgtttgcagcgggcagcttccttgccgccgccgccgatacgctgcccatgctggtcgccgcacgcgccatacagggtgcgggagcggtcagtgcggcggttaccgcgctgctggcggatttgacgcgcgacggcgtacgtacccgcgcgatggcgatgatcggtttgagtatcggtctgacgttttcggtcagcctcgtcgttgcccctgtgattgccgacgcggtgggcgtacgcggcttgtttctgctgaccggtattttgaccgttgccagtatcggcgtggtggcgtggatgactcccgacccggaggtttccaagctgcacgaagatacgcaggcgcagccttcgcgcataggcgaagttttgaaaaaccgtaggctgctgacgctcgatttcggcattttcgccctgcacgccgcgcaaatggcattgtttaccgcgctgccttttgcgatgacgcagctcggtttggaaaaaatccagcattggaaagtctatctgccctcgaccattacgggcttggtggtgatggttccgctgattatcgtcggcgagacgcgcaacaagctcaaacaggtttttatcttgggcatcgcctgcatcgcggcggcacagctcggtttgctgtccggtatgcgctcggtaggcttgattaccgcttatttggttgtttactttatcggttttaatgtgttggaagcgagcctgccgtctatggtttccaaaatcgcgccgtccgacctgaagggtacggcgatgggcgtgtacaacacgatgcagtcgctcggactgtttgccggcggcgtggcaggcggtttgctgtttcaaaaatacggcttttccggcgtgtttgccttttgcagcatattgatgctgctgtggctggtaattgccgttttatcgcctgcgcccaagcccgtcaaaaacctcagttaccctgtcggcggcgtgtggcagggcaatcaggaagggttataccgcgccttgtcggagcttgagggtgtggaagacatcggtttcagtttcgacgggcagaccgtctatctcaaagtgttgcagaagggtttcgatcaggctgccgctgaaaaaatcatcacaggagtttaa

SEQ ID NO: 51161 - DNA, 1839 bp, Neisseria meningitidis
atgtgcggtatcgtcggcgccatccgcgcccatcacaacgtcgtcgattttctgaccgacggtctcaaacgcctcgaataccggggttatgactcatcaggcattgccgtcaacaccgacggcaaaatcaaacgcgtgcgccgcgtcggacgcgtgcagcttatggaggacgcggcacgcgaaaaaggcatcagcggcggcatcggcatcgggcatacgcgctgggcgacacacggcggcgttaccgagccgaacgcccacccgcacatcagcggcgggatgattgcggtcgtccacaacggcatcatcgaaaactttgaaagcgaacgcaaacgcttggaaggtttgggataccgttttgaatcgcaaacggataccgaagtcatcgcacacagcatcaatcacgaatacgcgcaaaacggcggcaggctgtttgaagcggtacaagaagcggtcaaacgtttccacggcgcatacgccatcgcggttattgcccaagacaagcctgatgaattagttgtggcgcgtatgggctgcccgcttttggtcgctttgggcgacgatgaaacctttatcgcttcggacgtatccgccgtcatcgcctttacgcgccgcgtggcgtacctcgaagacggcgacatcgcgctgctggcttcagacggcatcaaacggctgaccgataaaagcggcctgcctgccgaacgcaaagtcaaggtatccgaactctcgctcgcctctttggaactgggaccgtacagccactttatgcaaaaggaaatccatgagcagccgcgcgcgattgcagacacggcggaggttttcctcgacggcggcttcatccccgaaaacttcggcaaaaacgccaaaagcgtgtttgaaagcatccgcagcgtcaaaatccttgcctgcggcacgtcctattacgccgcgctgaccgccaaatattggttggaatccatcgccaaaatcccggccgatgtcgaaatcgccagcgaataccgataccgcagcgtgattgccgatccggaccaactggtcattaccatttcccaatccggcgaaacgctggacacgatggaggctttgaaatacgccaaatccttgggacaccgccacagcctctccatctgcaacgtgatggaatccgccctgccgcgcgaaagcagcctcgtgctttatacccgcgccggtgcggaaatcggcgtcgcctcgaccaaagcatttaccacgcaactggttgcactgttcggtttggcggtaacgctggcgaaggtacgcggtttggtttccgaagaagacgaagcacgttacaccgaagaactccgccagcttcccggcagcgtgcagcacgctttgaacctcgaaccgcaaattgccgcatgggcgcaacagtttgccaagaaaagcagcgcgctgtttttagggcgcggcatccattatccgattgccctcgaaggtgcgttgaagctgaaggaaatcacctacatccacgccgaagcctatcctgccggcgaactgaagcacgggccgcttgccttagtggacgaaaatatgcccgtcgtcgtcatcgcgcccaacgacagcctattggacaaagtcaaagccaatatgcaggaagtcggcgcgcgcggcggcgaacttttcgtctttgccgacctcgacagcaattttaatgccaccgaaggcgtgcacgttatccgtgcgccgcgccatgtcggcgaactgtcccccgtcgtgcataccatccccgtgcagctcctcgcctaccacaccgccctcgcgcgcggcacggatgtagacaagccgcgcaacctggcgaaatccgtaaccgtcgaataa

SEQ ID NO: 51162 - DNA, 525 bp, Neisseria meningitidis; identical to SEQ ID NO: 39459

SEQ ID NO: 51163 - DNA, 360 bp, Neisseria meningitidis; identical to SEQ ID NO: 39367

SEQ ID NO: 51164 - DNA, 345 bp, Neisseria meningitidis
ttgcgcactcactttgtcatttccaatgttccaagtacacctaatctgctaagaggaagacagcttgaaggaaaacttattttagaagttcctgctcaggtcaatccaattccacaatctgtattaagggcggcacaagaagaaaatgttatcattagagatacaacaggaaggatttacaataggtggtggtttagtattaggtggttgtgcaggtgcacatcttgcaagaaaagaatcattgatactaacagggaaaacaggggcaggtgcgtcagcaattgcaaatgcaagcattggatatcaatggactgtcaatttgtcagagccaaaagaaggagctaa

SEQ ID NO: 51165 - DNA, 1035 bp, Neisseria meningitidis; identical to SEQ ID NO: 42242

SEQ ID NO: 51166 - DNA, 1068 bp, Neisseria meningitidis
atggatttaagtatcgtagttcccatttataatgtcgaaagttatttggaagcgtgtttaagttccatagaacctatattaagtaatgaaaatgtcgaacttatccttgtgaatgacgggtcaaaagacggaagtgaagatatatgttataaatatatagataaaacaacaaacaacaaacaacaaacaacaaacaacaaacaacaaacaacaaacaacaaacaacaaacaacaaacaacaaacaacaaacaacaaacaacaaacaccggacaccaaatatcaaatatatatatcaggataaccaaggattgtcagaggcgagaaataccggaataaaaaattcaaacggaaaatatatagtctttattgattcggatgattttattaattgtcaggtcttgctggattttcttagtaaagatgatattgatatgccggatgtggtttttttaaatgcggttaaatatgataagggaagtgtttcatattttggcgaagattatcagcctgaaaaaatactcaatcaatccaaagtcgaagttttgaaaggattatgccgatttagaaaatttccgggttcggcgtggaataagattataaaaagagaattgatcatcaaagaaaaactattttttgaaaaggggatttattctgaagatatcgaatggtcaatgaggttatttaatgcggcaacaacttttttttatttggacggttgttattactattatcggcagggaagaaaagattctattacgggaactgtttcggaaaaaagtataaagtcattattatatattttggagaaaaatgcggaaatggaatttaatagggatatatcaagttatctttattcctttctttcctacgaatatctcgttttgctttttatcatgacgagtaaaaatatagagtgtgatgctgatataaaaagaagggcgtatcatttaaggtttatgctgttaaagtccaataaattgatatataagctgatattcccgataatcacattattcggggtcgatattacaggcaggattttaaaagtaatcagagggaatgtttaa

SEQ ID NO: 51167 - DNA, 1245 bp, Neisseria meningitidis
atggaacagcagcaaagatacatcagcgtactggatatcggtacgtctaaagtcctcgcactgatcggggaagttcaagatgacgacaaaatcaacatcgtcggtttggggcaggctccttcacggggcttgcgcgcgggcatggtaaccaatatcgatgccaccgtccaagccatcaggcaggcggtcaatgatgccgagctgatggcggataccaaaattacccacgttaccacaggtatcgcaggcaaccacatccgcagtctcaattcgcaaggtgtggttaaaattaaagacggggaagtcacgcaggcagacatcgaccgcgccattgaaacggcaaaggcaatcaatatcccgcccgatcaaaaaattctcgatgctgtggttcaagactacattatcgacacccaacttggcgtgagggagcctatcggtatgagcggtgtgcgtttggatacgcgggtgcacatcattaccggtgcaagtacggcagtgcagaatgtccaaaaatgtatcgagcggtgcggcttgaaaagcgatcagatcatgcttcagccgttggcaagcgggcaggcggtgctgactgaagatgaaaaagacctcggcgtatgcgtcatcgacattggtggcggaacgaccgatattgccgtttatatgaacggcgccatccgccatacgtccgtcattccggccggtggtaatctgattaccaaagatttgtccaaatcgttgagaacacctctcgatgccgccgagtacattaaaatccattatggcgtgacatcatgcgatacggaaggcttgggtgagatgattgaagttccgggcgtgggtgaccggacatcgcgtcaggtttccagtaaggttttggcagcaatcatcagtgcacgtattcaggagatttttggcgtagtgctgggcgagctgcaaaaatcgggtttccccaaagaagtgctgaatgcgggtattgttctgaccggcggtgtgtccatgatgaccgggattgtggaatttgccgaaaaaatcttcgatttgcctgtacgcaccggtgcgccccaagaaatgggcggtttgtccgaccgcgtccgcacaccgcgcttttctaccgccatcgggctgcttcatgcagcatgcaagctggaaggaaacttgccgcagccggaaaacggtgcagtgcaagagagggaagggggcggcggtttgttggcaagattgaaacggtggattgaaaacagcttctga

SEQ ID NO: 51168 - DNA, 1746 bp, Neisseria meningitidis
atgttgattaagagcgaatataagcctcggatgctgcccaaagaagagcaggtcaaaaagccgatgaccagtaacggacggatcagcttcgtcctgatggcaatagcggtcttgtttgccggtctgattgcccgcggactgtatctgcagacggtaacgtataactttttgaaagaacagggcgacaaccggattgtgcggactcaaacattgccggctacacgcggtacggtttcggaccggaacggtgcggttttggcgttgagcgcgccgacggagtccctgtttgccgtgcctaaagagatgaaggaaatgccgtctgccgcacaattggaacgcctgtccgagcttgtcgatgtgccggttgatgttttgaggaacaagctcgaacagaaaggcaagtcgtttatctggattaagcggcagctcgatcccaaggttgccgaagaggtcaaagccttgggtttggaaaactttgtatttgaaaaagaattaaaacgccattacccgatgggcaacctgtttgcacacgtcatcggatttaccgatattgacggcaaaggtcaggaaggtttggaactttcgcttgaagacagcctgcatggcgaagacggcgcggaagtcgttttgcgggaccggcagggcaatattgtggacagcttggactccccgcgcaataaagccccgaaaaacggcaaagacatcatcctttccctcgatcagaggattcagaccttggcctatgaagagttgaacaaggcggtcgaataccatcaggcaaaagccggaacggtggtggttttggatgcccgcacgggggaaatcctcgccttggctaacacgcccgcctacgatcccaacaggcccggccgggcagacagcgaacagcggcgcaaccgtgccgtaaccgatatgatcgaacccggttcggcaatcaaaccgtttgtgattgcgaaagcattggatgcgggcaaaaccgatttgaacgaacggctgaatacgcagccttataaaatcggaccgtctcccgtgcgcgatacccatgtttacccctctttggatgtgcgcggcatcatgcagaaatcgtccaacgtcggcacaagcaaactgtctgcgcgtttcggtgccgaagaaatgtatgacttctatcatgagttgggcatcggtgtgcgtatgcactcgggctttccgggcgaaactgcaggtttgttgagaaattggcgcaggtggcggcctatcgaacaggcgacgatgtctttcggttacggcctgcaattgagcctgctgcaattggcgcgcgcctataccgcactgacgcacgacggcgttttactgccggtcagctttgaaaaacaggcggttgcgccgcaaggcaaacgcatattcaaagaatcgaccgcgcgcgaggtacgcaatctgatggtttccgtaaccgagccgggcggcaccggtacggcgggtgcggtggacggtttcgatgtcggcgcgaaaaccggcacggcgcgcaagttcgtcaacgggcgttatgccgacaacaaacacatcgctacctttatcggttttgcccccgccaaaaatccccgtgtgattgtggcggtaaccattgacgaaccgactgcccacggttattacggcggcgtagtggcagggccgcccttcaaaaaaattatgggcggcagcctgaacatcttgggcatttccccgaccaagccactgaccgccgcagccgtcaaaacaccgtcttaa

SEQ ID NO: 51169 - DNA, 1266 bp, Neisseria meningitidis
atgttcagcttcttccgtcgcaagaaaaaacaggaaacgccggctcccgaggaggctcaagttcaggaaactgcagcaaaagcagaatccgaagttactcaaatagttgaaaatattaaagaagatgctgaatctttagcagaaagcgtcaaagggcaggtcgaatctgccgttgaaaccgtcagcggtgcggttgaacaggtaaaggaaaccgttgccgagatgctgtctgaagcagaggaagcggcggaaaaagcagcggaacaagtcgaagcggcaaaagaagccattgccgaaaccgtcggcgaggctgtcgggcaagttcaagaagccgttgcgacaactgaagaacacaagctcggttgggcggcgcgtttgaaacaaggtttgaccaaatcgcgcgacaaaatggcgaaatcgctggcgggcgtgttcggcggcggacaaatcgacgaagatttgtacgaagagctggaaaccgtgctgattaccagcgatatgggcatggaagccaccgaatacctgatgaaagacgtgcgcgaccgcgtcagcctcaaagggctgaaagacggcaacgaattgcgcggcgcgctgaaagatgcgctgtacgacctgattaagcctctggagaaacctttggtcttgcccgaaaccaaagagcctttcgtgattatgcttgcaggtatcaacggcgcgggcaaaaccacgtctatcggcaaactcgccaaatatttccaagcgcatggaaaatccgtattgctggcggcaggcgatactttccgtgccgccgcgcgtgagcagcttcaagcttggggcgagcgcaacaacgtaaccgtgatttcgcaaaccacgggcgattccgcagccgtttgttttgatgccgtccaagctgccaaagcacgcggcatcgacattgtgctggccgacaccgccggccgcctgcccacgcagcttcatttgatggaagaaatcaaaaaagtgaagcgcgtgttgcaaaaagccatgcccgacgcgccgcacgaaatcatcgtcgtgcttgatgccaacatcgggcaaaacgccgtcaaccaagtcaaagcctttgacgacgcattggggctgaccggtttaatcgttaccaagctagacggcacggcaaaaggcggcatccttgccgcgcttgcctccgaccgcccagttcctgtccgctacatcggcgtgggcgaaggcatagacgatttgcgcccgtttgacgcgcgcgcgtttgtggacgcactgctggattga

SEQ ID NO: 51170 - DNA, 1155 bp, Neisseria meningitidis
atgactgaaactactcaaaccccgactttcaaacctaaaaaatccgttgcgctttccggcgttgcggccggtaataccgaattgtgtaccgttggccgtaccggcaacgatttgagctatcgcggttacgacatcttggatttagcacaaaaatgcgagtttgaagaagtcgcccacctgctgattcacggtcatctgcccaacaaattcgagctggccgcttataaaaccaagctcaaatccatgcgcggcctgcctatccgtgtgattaaagtgttggaaagcctgcctgcacatactcatccgatggatgtgatgcgtaccggcgtatccatgctgggctgcgttcatcctgaacgtgaaagccatccggaaagtgaagcgcgcgacatcgccgacaaactgattgccagcctcggcagcctcctgctgtactggtatcaatattcgcacaacggcaaacgcattgaagttgaaagcgacgaagagaccatcggcggtcatttcctgcacttgttgcacggcaaacgcccaagcgaatcacacatcaaagccatgcacgtttcactgattctgtatgcggaacacgagttcaacgcttctaccttcactgcccgcgtgattgccggtacaggctctgatatgtactccagcattaccggtgcaatcggcgcgttgaaaggtccgaaacacggcggtgcgaacgaagtggcttacgatattcaaaaacgctaccgcaatgccgacgaagccgaagccgacatccgcgaacgcatcggccgcaaagaaatcgtgatcggtttcggtcatccggtgtacaccatttccgacccccgcaacgtggtcattaaagaagtggcacgcggtttgagcaaagaaaccggcgatatgcgcctctttgacattgccgaacgcttggaaagcgtgatgtgggaagagaaaaaaatgttcccgaatctggactggttctctgccgtttcctaccaaaaattgggcgtaccgaccgctatgttcacaccgctgttcgtaatttcccgtacaaccggttggagcgcacacgttcttgagcaacgcaaagacggcaaaatcatccgtccgagcgcaaactacacaggccctgaagatttggcgtttgtggagattgaagaacgataa

SEQ ID NO: 51171 - DNA, 606 bp, Neisseria meningitidis
atggagttgcgcgaacgtttgggtatgatgcctgacgagtatcaaaaaatggagctattcaaacgtaaggttttggatttcgccgtcaagcagatcaatgataaaacggatatttccattacctacgagcagcataaagaaggacgaaaaattgtaggttttacattctcaatcctacataaaatagggtcgaaagacatccctcttgaaaatcaatcggaactttttgccggaatgactgatttggaagccggaacgatacgggtcagggcggaagcatatatcgcttcgctcattgcaaaaggtcagaacgtgactaaagcccataggctgaatattctgaaaaaagccgtagaggaacgttggggatttgaagatgtggctaaagataatggggccaaaaatcctgaaaacaaaaatgcaaaagtcgttttaaacgaatgggaaaagatttctaatggcacacgttttaaggacaaggatggaacaatttgggttaaagattcaggtatgcttaggactgaagggacaaacaggtggatagccgattctcagattgccaaattatttcctatgttaactgtgatggttgaggaaggtatttaa

SEQ ID NO: 51172 - DNA, 495 bp, Neisseria meningitidis
atgaaaaatagatttgcaaaaatcgttaaggatatttttagttttacccaatttgtttccgaagcggaaaataaaattcctaaccaatcctctcgttattacgattgctggcgggaattggaaatcttgaatgcttccgcattggaagattgggaaatatcgggaaagcctgaaaaatgggagaaatggacagaaaaatatcagaccgaagcgttacagtcagtcaagcatctatttgccgaagaagttcctgaaaataatatagtttgcgatatttctcattttttgcattttgccgattgggcagaagccgacattcccaatcaatcacgtttatatgccgaatattggtgggaaatggaaattttcaaaatgtcggttttagaagattgggaacgctcgggaaaaccgttagattggaaaaaatggcaaaggcaatatcgatctgaagcatttgaattagttaaaaaattgaaccgaagcaaacaagagtaa

SEQ ID NO: 51173 - DNA, 1623 bp, Neisseria meningitidis; identical to SEQ ID NO: 43332

SEQ ID NO: 51174 - DNA, 1596 bp, Neisseria meningitidis
atgtgggggcttttgggtacaatcgcaacatcagtgtttcaagtggggaaggcgatggatggacggcgttgggcggtatggggtgcttttgccctgctgccttcggcttttttggcggtaatggtcgttgcgcctttgtgggcggtggcggcgtatgacggtttggcgtggcgcgcggtgctgtcggatgcctatatgctcaaacgtttggcgtggacggtatttcaggcagcggcaacctgtgtgctggtgctgcctttgggcgtgcctgtcgcgtgggtgctggcgcggctggcgtttccggggcgggctttggtgctgcgcctgctgatgctgccttttgtgatgcccacgttggtggcgggcgtgggcgtgctggctctgttcggggcggacggcctgttgtggcgcggcgggcaggatacgccgtatctgttgttgtacggcaatgtgttttttaaccttcctgtgttggtcagggcggcgtatcaggggtttgtgcaagtgcctgcggcacggcttcagacggcacggacgttgggtgcgggggcgtggcggcggttttgggacattgaaatgcccgttttgcgcccgtggcttgctggcggcgtgtgccttgtctttctgtattgtttttccgggttcgggctggcgctgctgctgggcggcagccgttatgccacggtcgaagtggaaatttaccagttggtcatgttcgaactcgatatggcggttgcctcggtgctggtgtggctggtgttgggggtaacggcggcggcgggattgctgtatgcgtggttcggcagacgcgcgggttcggataaggcggttgcccctgtgatgccgtcgccgccgcaatcggtggaggaatatgtgctgctggcgtttgcggcggcggtgttgtctgtgtgctgcctgtttcctttgttggcaattgttgtgaaagcgtggtcggccggcgaatcgtggcgtgtgttaatggaaagtgaaacgtggcaggcggtgtggaatactttgcgcttctcggcagcggcggtgtatgcggcggcggttttgggtgtggtgtatgcggcggcggcgcggcggtcggcgtggatgcgcgggctgatgtttttgccgtttatggtgtcgccggtttgtgtttcggcgggcgtgctgctgctttatccgcagtggacggcttcgttgccgctgctgctggcgatgtatgcgctgctggcgtatccgtttgtggcaaaagatgttttatcagcctgggatgcactgccgccggattacggcagggcggcggcgggtttgggtgcaaacggctttcagacggcatgccgcatcacgttccccctcttgaaaccggcgttgcggcgcggtctgactttggcggcggcgacgtgtgtgggcgaatttgcggcaaccttgttcctgtcgcgtcccgagtggcagacgctgacgactttgatttatgcctatttggggcgtgcgggtgaggataattatgcgcgggcaatggtgttgacattgctgttgtcggcgttcgcgctgggcattttcctgctgttggacaacggcgaaggcggaaaacagacggaaacgttataa

SEQ ID NO: 51175 - DNA, 138 bp, Neisseria meningitidis; identical to SEQ ID NO: 43740

SEQ ID NO: 51176 - DNA, 1230 bp, Neisseria meningitidis
atggcgttcggcaaatccttatttcatgcgatcggccgcgtcagcctggtcaggcagattgccgccggtttggcgttgggcatcgtaatcggttcggtttccccgcaactgggcttggcggcaggcttgttcggcagcctgtttgtcggcgcgctcaaagcggtcgcgccggttttggtatttattttggtggcggccacaatcgcgcagcaccaaaaaggcaacaaggcgcatatcaggccgattatcatcctttacctcattggtacgttttccgcagccctgaccgccgtcatcgccggtatggttttcccgacgcacattgttttggcgggcgcgggcgatgtgtccgccgcgccgccttccggcattgtggaagtgttgaaatcgctgctgatgaacctggtcgccaacccgattaacgcgattgccaatgccaactatatcggcattttggcttgggctttggttttgggcgcggcgttgcggaatcacggttcggacgttacgcggcaggtcgttgccgatttggcggaagcggtttccaccgtcgtgaaatggattatccgttttgcccctttgggcattttcgggctggtgtcgtccacaatcgcggagacgggtttcggcgcgctggcggggtacgcgaagctgcttgcagtgctgttgggctgtatggcgtttatcgcgctggcggtcaatcccgccatcgtgtggtggaaaatccgccgcaacccttatccgctggtgttcacctgcctgcgcgaaagcggcgtgtatgccttctttacccgttcttccgccgccaatatccccgtgaatatggctttggcgaaaaaactggggctgcacgaagacacttattcgatttccatcccgttgggggcgaccgtcaatatgggcggcgcggcgattacgattaccgttttggctatggcggcggcgcacacccaaggcatacaggttgattttgccaccgcgctgctgttgagcctggtggcgacggtcagcgcgtgcggcgcgtccggcgtggcgggcggttcgctgctgctgattccgctggcgtgcagcctgttcggcatcagcaacgatgtcgccatgcaggtggttgccgtcggctttatcatcggcgtgattcaggattcggcggaaacggcgttgaattcttcaaccgatgttttgtttaccgctgccgccgatttgggccgacagagaaaccgggcggaataa

SEQ ID NO: 51177 - DNA, 1521 bp, Neisseria meningitidis
atgttttttatttcaatccgctatatatttgtcagaaaactatggtgcgcaaacggtcagccctttaaaataacgcctttacgcatcgaaaatccaccggaacgcaacattatgatgaaaaatcgagtgaccaacatccattttgtcggtatcggcggcgtcggcatgagcggcatcgccgaagtcttgcacaatttgggttttaaagtttccggttcggatcaggcgcgaaatgccgctaccgagcatttgggcagcctgggcattcaagtttatcccggccataccgcagaacacgttaacggtgcggatgtcgtcgttacctctaccgccgtcaaaaaagaaaatcccgaagttgtcgctgcgttggagcagcaaattcccgttattccgcgcgccctgatgttggcggagttgatgcgcttccgtgacggcatcgccattgccggcacgcacggcaaaaccacgaccaccagcctgaccgcctccatcctcggcgcggcaggacttgacccgactttcgttatcggcggcaaactcaacgccgcaggtaccaacgcccgtttgggcaaaggcgaatacattgtcgccgaagccgacgaatccgatgcctctttcctacatctaaccccgattatgtctgtcgtcaccaatatcgacgaagaccacatggatacctacggacacagcgttgaaaaactgcatcaggcgtttgttgattttatccaccgtatgccgttctacggcaaagcgtttttgtgtatcgacagcgaacacgtccgcgcgattctgcccaaagtgagcaaaccttatgccacttacggcttggacgataccgccgacatctacgccaccgacatcgaaaacgtcggcgcgcaaatgaaattcaccgtccatgttcaaatgaaaggacatgagcaggggtcgtttgaagtcgtgctgaatatgcccggccgccacaatgttctcaatgccttggcagccatcggtgttgcgttggaagtcggcgcatcggttgaagccatccaaaaaggcttgctcggctttgaaggcgtcggccgccgcttccaaaaatacggcgacatcaagttgccaaacggcgggaccgcgctcttggtggacgactacggacaccaccccgtcgaaatggcggcgaccctttccgccgcacgcggcgcgtatctggaaaaacgtttggtactcgccttccagccgcaccgctatacccgcacgcgcgatttgtttgaagactttaccaaagtcctcaataccgttgacgcgctggtgctgaccgaagtgtatgccgccggtgaagagccgattgccgccgccgattcccgcgctcttgcccgcgccatccgcgtgttgggcaaactcgagccgatttactgcgaaaacgttgccgatctgcccgaaatgctgttgaacgttttgcaggacggcgacatcgtgttgaatatgggcgcgggaagcatcaaccgcgtccccgccgcgctgctggcattgtcgaaacagatttga

SEQ ID NO: 51178 - DNA, 495 bp, Neisseria meningitidis; identical to SEQ ID NO: 39710

SEQ ID NO: 51179 - DNA, 312 bp, Neisseria meningitidis
atggcttccatccacgaccaaattaaagaagtagtaacgacacaccgcgtcgtattgtttatgaaaggtacgaagcagtttccgcaatgcggtttctcttcccgcgccgtgcaaatcctgaacgcggcgggctgcaccgattacgttaccgtcaacgtattggaaaatcccgaagtacgccaaggcattaaggaatacagcgattggccgaccatcccccaactttatgtgaacggcgagtttgtcggcggttcggacatcctgatggaaatgtatgaggcaggcgagctgcaagagctgctgaaagcctga

SEQ ID NO: 51180 - DNA, 1194 bp, Neisseria meningitidis
atgacagaggacgaacgtttcgcgtggctgcaattggcgtttacgccctatatcggcgcggaaagcttcctgctgctgctgcgccgtttcggcagcgcgtcaaacgccctgtccgcaccggcggaacaggtcgccccggcggtgcggcacaagcaggcggccgaggcttggcgcaatgcggaaaaacgcgcctcggcgcggcaggcggcagaagcggcgttggaatgggaaatgcgggacggatgccgcctgatgctgcttcaggatgaagatttccccgaaatgctgacgcaggggctgaccgcgccgccggttttgtttttgcgcggcaacgtgcggctgctgcacaagccttccgccgccatcgtcggcagccgccatgccacgccgcaggcgatgcggattgccaaagatttcggcaagtcgttgggcgggcaaaatatccccgttgtgtcgggtatggcttccggtatcgatactgccgcccatcagggcgcactggaggcagaaggcggcaccatcgccgtgtgggggacgggtatagaccgcatttacccgccgtccaataaaaaccttgcctatgaaatcgccgaaaaaggattgattgtcagcgagtttcccatcggtacgcgcccgtatgccggcaactttccgcgccgcaaccgcctgattgccgcgctgtcgcaggttacgctggtggttgaagctgcgttggaatccggttcgctgattaccgccggcttggcggcagaaatggggcgcgaagtgatggcagtacccggttcgatagacaatccgcacagcaaaggctgccacaaactgattaaagacggcgcgaaactgacggaatgtttggacgacatcctgaacgaatgcccggggctattgcaaaatacgggtgcttcgtcatattctataaataaggatacgtccgacacgggcagccgcgccgttcagacggcatacgccccgccgccttcgcctgaaggcaaaatgccgtctgaaggggcggcatgcggcacagaccccggcggcatactggataaaatgggtttcgacccggttcatcccgacgtgcttgccgagcagcttgctatgcctgccgcagatttgtatgccgcactgttggaattggaattggacggcagcgttgccgcaatgcccggcggcagataccagcgtatccgaacttga

SEQ ID NO: 51181 - DNA, 552 bp, Neisseria meningitidis; identical to SEQ ID NO: 37002

SEQ ID NO: 51182 - DNA, 792 bp, Neisseria meningitidis; identical to SEQ ID NO: 42176

SEQ ID NO: 51183 - DNA, 2097 bp, Neisseria meningitidis
atgtcaatatatctatctcgcctatcattcggcttttctcgccgtttactagttgtcttgcaaacggaagcagcagaatgtggattggcgtgtttggtatcggtattggggtttcatggtttttatacggatttgcgccatttaagggcgcgtttttctttgtctcttaaaggcgcaacattggcagatttggtacggtttgctaatagcatgaatttaactgctcgagctgttcggttggatttagatgaattggtaaatttgcgcttaccctgtattttacattgggatttaaatcattttgtggtgttgcatgaagttcatcgtaatcacattgtgattatgaaccctgcttcgggttggcaaaaagtgcgtatggaagaagtctcgcgctgttttacaggtgtagcgttggaactatttcctaacacgcaatttgaagagaaacacgaaacgcgtaaaattcgcgtactaccgatgttgcgcggagtggtgggattaaaaaggtctttatttcagcttctgctgctggcggcagtattacaggtgtttgctttggcaagccctttttttatgcaatgggtaatagaccatgccattgtatcggcagaccgtgatttattgatgacattggcattgtgttttggcttgttgatgattgtgcggcagttagtgtcattgttgcaaacttgggcgggtatgtacttatctacctctttgaatattcaatggaaagctaatgtattacgccgcttaatggatttgcctgtttcttatttcgctaaacgacatttgggcgatgtggtttcacgttttggctcagtggacagtattcaaagtacgctcacttctactttctttgtgttggtgctcaacagcattatggcggtatttacattagggttgatgtatttgtatagcccaagtttaacgacagttgtactggttgttttgctgatttatattggtattcgttgggtggcatattatccattacgccatgcaactcaagaaaatattgttcatgctgccaagcagagcagttatttcatggaaaccatacgtggtattcaaactgttaaattatttgataaaaatgcacaacgccatgcggcttggctgaacttgtttattgacacgattaacacaggtttaatgacacaaaaactttccgcgctgttcggttttacgaatggccttttgtttggtatcgctaatattttaattgtgtattttggtgcggtttctgtattgaacggtggttttaccgttggggcgttaatggcgtttatgtcctacaaaagtcagtttgagagtaaagcaggttcattgattgaccagtttgtacaaatcaaaatgctaggattacacgcggaacgcttggcggatattgtgctagaagaaacggaaaatgaacaaaacaacgatttcagtctgcctaaaaatttagaacattttgatattcaaatagaaaatgtatcatttagctatgctgaaaatgaaccatacattttgcaaaatttcagtttaatcatcaaacaaggaacagccattgcgtttgctggacattcaggctgtgggaaatctacgctcattcaaattctgacaggcagtctgaaacctgaaagcggtcatgtgttattaggtgggcatgacattcatgcgttaccacctgcatttatccgcacatggagcgcaagtgtgatgcaaaatgatgtgttatttactggctcaatcgcagaaaacatcagtttttttgatgatacgcccaatatggaaaaaatcgcattttgcgctcaaatggcgaatattcatcatgaaattgtcgctatgcctatggcgtatgaaacattgattggcgacatggggagtgcattgagtggtgggcaaaagcagcgcatcgtactagctcgtgctttatatcgtgaaccaaaaattttgtttttagatgaagccagtagccatttggacatcaacaatgaacgtgtgattaacgataatctacgccaactcaacattaccaaaatcatggtcgcgcatcgtcaggaaactttaaatactgctgatagcgtagtttatttagacaaggtagcctga

SEQ ID NO: 51184 - DNA, 771 bp, Neisseria meningitidis; identical to SEQ ID NO: 42376

SEQ ID NO: 51185 - DNA, 627 bp, Neisseria meningitidis; identical to SEQ ID NO: 45676

SEQ ID NO: 51186 - DNA, 3606 bp, Neisseria meningitidis
atgtttcattttgcatttccggcacaaactgccctgcgccaagcgataaccgatgcctaccgccgtaatgaaatcgaagccgtacaggatatgttgcaacgtgcacagatgagcgacgaagagcgcaacgccgcctccgagcttgcccgccgtttggttacccaagtccgcgccggccgcactaaagccggcggcgtggatgcgctgatgcacgagttttcactctccagcgaagaaggcatcgcgctgatgtgtctggcggaagccctgctgcgcattcccgacaacgccacgcgcgaccgcctgattgccgacaagatttcagacggcaactggaaaagccatttgaacaacagcccttccctcttcgtcaacgccgccgcctggggcctgctgattaccggcaaactgaccgccacaaacgacaaacaaatgagttccgcactcagccgcctgatcagcaaaggcggcgcaccgctcatccgccaaggcgtaaattacgccatgcggcttctgggcaaacagttcgtaaccggacagaccattgaagaagccctgcaaaacggcaaagaacgcgaaaaaatgggctaccgcttctccttcgatatgttgggcgaagccgcctacacccaagccgatgccgaccgctactaccgcgactatgtcgaagccatccacgccatcggcaaagatgcggcaggacaaggcgtttacgaaggcaacggcatttccgtcaaactttccgccatccatccgcgctactcgcgcgcccaacacggccgtgtgatgggcgaactgttgccgcgcctgaaagagctgttccttttgggtaaaaaatacgatatcggtatcaacatcgatgccgaagaagccaaccgtctagagctgtctttggatttgatggaggctttggtttcagaccctgacttggctggctacaaaggtatcggtttcgttgtccaagcctaccaaaaacgttgtccgttcgttatcgactacctgattgacctagcccgccgcaacaaccaaaaactgatgatccgcctcgtcaaaggcgcgtattgggacagcgaaatcaaatgggcgcaagtggacggcttgaacggctatccgacctacacccgcaaagtccacaccgacatctcctacctcgcctgcgcacgcaaactcttggatgcgcaagatgccgtgttcccacaatttgctacccacaacgcctacaccttaggcgcaatctaccaaatgggcaaaggcaaagactttgaacaccaatgcctgcacggcatgggcgaaaccctgtacgaccaagtcgtcggcccgcaaaacttaggccgccgcgtgcgcgtgtacgccccggtcggcacacacgaaaccctgctcgcctacttggtgcgccgcctgttggaaaacggcgcgaactcgtctttcgtcaaccaaatcgtcgatgaaaacatcagcatcgactgcctgattaagagcccgttcgacaccatcgccgaacaaggcatccacctgcacaacgccctgccgctgccgcgcgatttgtacggcaaatgccgtctgaactcgcaaggcgtggacttgagcaacgaaaacgtattgcagcagcttcaagaacagatgaacaaagccgccgcacaagacttccacgccgcatccatcgtcaacggcaaagcccgcgatgtcggcgaagcgcaaccgattaaaaatcctgccgaccacgacgacatcgtcggcacagtcagctttgccgatgccgcgcttgcccaagaagcggttggcgcagccgttgccgcgttccccgaatggagtgcgacacctgccgccgaacgcgccgcctgcctgcgccgtttcgccgacctgctcgaacagcacacccccgcgctgatgatgcttgccgtgcgcgaagcaggcaaaacgctgaacaacgccattgccgaagtgcgcgaagccgtcgatttctgccgctactacgcaaacgaagccgaacacaccctgcctcaagacacaaaagccgtcggcgcgattgtcgccatcagcccgtggaacttcccgctcgccatctttaccggcgaagtcgtgtccgcattggcggcaggcaacaccgttatcgccaaacccgccgaacaaaccagcctgattgccggttatgccgtttccctcatgcacgaagccggcatcccgacttccgccctgcaactcgtcctcggcgcaggcgacgtgggtgcggcattgaccaacgatgcccgcatcggcggcgtaattttcaccggctcgaccgaagtggcgcgcctgatcaacaaagcccttgccaaacgcggcgacaatcccgtcctgattgccgaaaccggcggacaaaacgccatgattgtcgattccaccgcacttgccgaacaagtctgcgccgacgtattgaactccgccttcgacagcgcgggacaacgctgctccgccctgcgtatcttgtgcgtccaagaagacgttgccgaccgtatgctcgacatgatcaaaggcgcgatggacgaactcgtcgtcggcaaaccgattcagctcactaccgatgtcggccccgtcatcgatgccgaagcacagcaaaacctgttgaaccacatcaacaaaatgaaaggcgttgccaagtcttaccacgaagtcaaaaccgctgccgatgtcgattccgaaaaatccacgttcgtccgccccatcctgtttgaattgaacaacctcaacgaactgcaacgcgaagtcttcggtcccgtcctgcacgtcgtccgctaccgcgccgacaaactcgacagcgtcatcgaccaaatcaacagcaaaggctacgccctgacccacggcgtacacagccgcatcgaaggcacagtacgccacatccgcagccgcatcgaagccggcaacgtttacgtcaaccgcaacatcgtcggcgcagtcgtcggcgtacagcccttcggcggacacggtctgtccggcacaggccccaaagcaggcggttcgttctacctgcaaaaactgacccgcgccggcgaatgggttgccccgaccctgagccaaatcggacaggcggacgaagccgcactcaaacgcctcgaagcactggttcacaaactgccgttcaacgccgaagagaaaaaagccgcagcggccgctttgggacacgcccgcatccgcaccctgcgccgtgccgaaaccgtccttaccggaccgaccggcgagcgcaacagcatctcatggcacgcgcccaaacgcgtttggatacacggcggcagcacggttcaagcctttgccgcactgaccgaacttgccgcctccggcatacaggcagtggtcgaacccgacagccccttggcttcctacactgccgacttggaaggtctgctgctggtcaacggcaaacccgaaaccgtcggcatcagccacgttgccgccctgtcgcctttgaacagcgcgcgtaaacaggaacttgccgcccacgacggcgcactcatccgcatcctcccttcggaaaacggactcgacatcctgcaagtgtttgaagaaatctcttgcagcgtcaacaccacagccgccggcggcaacgccagcctgatggcggtcgccgactga

SEQ ID NO: 51187 - DNA, 1260 bp, Neisseria meningitidis; identical to SEQ ID NO: 42250

SEQ ID NO: 51188 - DNA, 456 bp, Neisseria meningitidis; identical to SEQ ID NO: 45576

SEQ ID NO: 51189 - DNA, 1314 bp, Neisseria meningitidis
ttgccatgccgtctgaaagccgtttcagacggcatttgcattctcatccgacttgaaagcatcatagaacaggcgcaaaatattaacaaattaaacaacgggcgcacgctccgttgccgaacggacaaaaccgaggaatcaccgatgagcaaaaaactccatccgcaaacgctcgccatacgcggcggcaaagaacaaaccgaataccgcgaacacaatcaggcattgtttctgaccagcagcttcatgtgggacaacgcccaacacgctgccgatttgttttcaaaaaaaatcaaagggttcacttatacccgtaccgccaacccgaccacagccgcctttgaaaaacgcatcgccgctttggaaggtgcggaacgcgcggtcgccacttcgacgggtatgtctgcgattcaggcggcgtttttcacctttttgcaggcgggcgaccacgtggtttccagccgcagcctgttcggcacgaccgtcggctttatcaataacatcgttaccaaattcggcatcgaagtgagccacgtgtcgccgactgatataaacgaatggaaagccgccgtcaaagccaacaccaaactgctgtttttggaaacgccgtccaatcccttgggcgaagtggccgacttggaagccttggcggaattggcgcacggcatcggcgcgattttggtggtggacaacagcctgctgtcgcccgtcggctcgcagcctttgaaacacggcgcggatatttccgtttcctccgcgaccaaagccatagacggacacgggcgcgtgatgggcggcgtgttggcgggttcggaagagctgatggcgcaggtcgctatgtattgcaactcttgcgggctggcaatgtcgccgtttaatgcgtggcagttgttgagcggcgtggaaaccctgtcgctgcgtatggaaaaacagttcgacaacgccctgaaaatcgcgcaatggctgcaagcgcagccgcaggttcaagccgtttactacaccggattgcccgaccatccgcaggcggagcttatccgcaaacagcaaaacggcggcggcatcgtcattggctttgaagtcgccgaccaagcagccgcgtggaaagtcgtggacggagtggaactcttttcccgtaccgccaacctcggcgacgtgcgctcgaccatcacccatccgtggacaaccacgcacggcaggatgcagcccgaagaaaaactcgccgccaacatccgccccggattggtgcgcctgtcggtcggtttggaatatgttggcgatttgattgacgatttgaaacaggcactcgcgcgctga

SEQ ID NO: 51190 - DNA, 738 bp, Neisseria meningitidis
atgattattttggacaaggtttccaagcattaccaaacgcgcgacaagacccgttttgccgccgtcgagccgaccagcctcgaaatccgcgacggcgaaatcttcgggctgatgggctattccggcgcgggcaaatccactctgctgcgcctgattaacctgttggaacgtcccgacagcggcaaggtcaacgtttgcggacaagagctgaccgcgctcgatgccgccgcattgcgtcaggcgcggcagaatatcggcatggtgtttcagcagttcaaccttttgagcaaccgcaccgttgccggcaacgtcgccttcccattggaaatcgccggatggccgtctgaaaaaatcaaagaacgcgttgccgaatgcctcgaaatcgtcggcttgaccgaacgcgccggccactatcccgcccagctttcaggcgggcagaaacagcgtgtcggcatcgcccgcgcactcgcgcccaaaccccaagtcatcctcgccgacgaacccacttccgccctcgaccccgccaccacgcgcagcgtcttggaatgtttggaagacatcaacaaacgattcaacgtaaccatcgtcatcgtaacccacgaaatgagcgttatcagacgactgtgcgaccgcgccgccctgttggataagggaaaagtcgtcgaaatcgtcgaagtacgcggcaaccaaatccacgcccgatccgacatcgggcgcgaactcatcagagaggactga

SEQ ID NO: 51191 - DNA, 558 bp, Neisseria meningitidis
atgttttggctggttctgccttatgcggttacgattaaccgaccgatgccgtctgaaagggtttccgcttcagacggcatcgcgccggaacagggaggggatatgaaaaaaccgaaaatcctttttgtctgcctcggcaacatctgccgttcgccgatggcggaatacattttgcgccgccgcgccgccgaagcgggcattccccttgaagcggacagcgcggggacatcgggctggcacgacggcgaagatatgcaccgcgagacggcaaagatattgaaaaaacacggtatcgatgcttcaggctttaccagccgcaaaatccgccaaagcgatgcggtggcgtttgactgcatcatcgcgatggacggcaagaatttgtccgaattggaaagaaccttcggcaggcggtcggaaaaaatattcaagctgaccgacctgatacccgaaagcggttacgaccatgtccccgatccgtggtacacgggcgattttgaagaaaccttcaggcttgcggatgcgggctgtcgggcattgttggaaaagatttccaaataa

SEQ ID NO: 51192 - DNA, 4290 bp, Neisseria meningitidis
atgaatgagggtgaagttgttttaacaccagaacaaatccaaaccttacgtggttatgcttcccgtggcgatacctatggcggttggcgttatttggctaatttgggcgaccgttatgcggataatgctgctgcaattgtcggtaaggatacaaacttaaatggtttgaatttatggatgaaaaaaggggtggaaaacctatgggatgatacggtcggtaaaaagacccgtttagagaaatttgatcgggttgcattgcaacatttcagccaatatgtagatctaattaataaaaataatggtagattacctaacactagtgaaattgagagaagttactataaagccgttacctatcatggcgtttcttctagtgcagctattgatttagttattaatcgttcacttccggatatggcggatggttattgggcattaggtttggggatagaagccgaacgtatccacaatgagcaagcagtaaataatccgaacggtagcgaaagggataatagaaagcagttaatatctgctttagataaaggatttgatggatcttttaaagagaagcattttacttttttacaatctgtgatgatggatctaacaaagttaggtgttgaatatacaatagatggttggcaaaaaattggaggttggggtaatgggataatcaatgatttatataaaagtgttgtaaaaagagagtggactggaatatttgagatcgttaataataacatcaagcaaggaaatgaagcttttaaaaatgaaatcaatagcttggttcatgatatgaaagctgctggcaaggaatttggagatgacttaaatacacagtggaataatctcactcaggctgccgaaataatctataatgacatagtagacaatactagtcaaggaatagaaaaaggtgtcaaagccattaaagaattgtctgaaaaaatgaaaaatgctgcttccgatttggctgacggttcagcagagaaagctaaacaagtagtggaagatttggctcaagccgccaaagaagcatacgaaaatgccaaatccacagccgagaaggctgctcaagcagctcgagaattttttaagggcttgcccagttttaaagatctggccgaaaaatttagagatctgttcccaaatccggaaggctggatcgatgatggtcaccaatgtttcgctccttgggttaaagaaactaaaaaacgcaatggcaaatatcatgtctacgacccccttgccctagatttggacggcgacggcatagaaaccgttgccaccaaaggcttttcaggcagcctatttgaccacaaccgcgatggcatccgcaccgccaccggttgggtttctgccgatgacggtctgcttgtgcgcgatttgaacggcaacggcatcatcgacaacggtgcggaactcttcggcgacaacaccaaactggcagacggctcttttgccaaacacggctacgcggctttggccgaattggattcaaacggcgacaacatcatcaacgcggcagacgccgcattccaaaccctgcgtgtatggcaggatctcaaccaggacggcatttcccaagctaatgaattgcgtacccttgaagaattgggtattcaatctttggatctcgcctataaagatgtaaataaaaatctcggtaacggtaacactttggctcagcaaggtagctataccaaaacaaacggtacaaccgcaaaaatgggggatttacttttagcagccgacaacctgcacagccgttttaaagataaagtggaactcactgccgaacaggcaaaagccgccaatcttgcgggcattggtcgtctgcgcgatttgcgcgaagctgccgcattgtccggcgatttggccaatatgctgaaagcttattctgccgccgaaactaaagaagcacagttggcattgttagataatttgattcacaaatgggcggaaaccgattcgaactggggcaaaaaatcgccaatgcgactttcaaccgattggacgcaaacggctaatgaaggtattgcactgacaccatcccaagtagcacaactaaaaaagaacgctttagtttccctttctgataaagctaaagcagctattgacgccgcccgcgaccgcattgccgtgcttgatgcctacacggggcaggattccaacacactctattacatgagcgaggaagatgcgcttaatatcgtcaaagtaaccaacgatacatacgaccatctcgccaaaaacatctaccaaaacctgttgttccaaacccgtttgcagccatatttgaatcaaatcagtttcaaaatggaaaatgatacgttcactttggattttagtggtcttgttcaagcatttaaccatgtcaaagaaactaatccgcaaaaagcttttgtggatttggccgagatgcttgcatatggcgaacttcgttcttggtatgaaggccgaagactaatggccgattatgtggaggaggcaaaaaaagcaggtaaatttgaagattaccagaaagtgttgggtcaggagaccgttgcattattagctaaaacatcgggtacgcaagcagatgatatcctgcaaaatgtaggctttggtcataataaaaatgtttctttatatggtaatgacggcaacgacactctaatcggcggtgccggtaatgattacttggagggcggcagcggttcggatacttatgtcttcggcaaaggcttcggtcaggatacggtctataattacgactacgctaccggacgcaaagacatcatccgctttaccgacggtattacagccgatatgctgacttttacccgagagggcaaccatcttcttatcaaggcaaaagacggcagtggacaagtgactgttcagtcctatttccagaacgatggctcaggtgcttaccgtatcgatgagattcatttcgataacggcaaagtactggatgttgccactgtcaaagaactggtacagcaatccaccgacggttcggacagattgtatgcctaccaatccggaaataccttaaatggcggattgggcgatgactatctgtacggtgccgacggggatgacctgctgaatggtgatgcaggcaacgacagtatctacagtggcaatggcaatgatacgctcaatggaggagaaggcaacgacgccctgtacggctataatggtaacgatgtactgaatggtggcgaaggcaatgatcatttgaacggcgaagacggtaacgacactctaatcggcggtgcaggcaatgattacttggagggcggcagcggttcggatacttatgtcttcggcaaaggcttcggtcaggatgcggtctataattacgactacgctaccggacgcaaagacatcatccgctttaccgacggtattacagccgatatgctgacttttacccgagagggcaaccatcttcttatcaaggcaaaagacggcagtggacaagtgactgttcagtcctatttccagaacgatggctcaggtgcttaccgtatcgacgagattcatttcgataacggcaaagtactggatgttgccactgtcaaaaaactggtacagcaatccaccgacggttcggacagattgtatgcctaccaatccggaaataccttaaatggcggattgggcgatgactatctgtacggtgccgacggggatgacctgctgaatggtgatgcaggcaacgacagtatctacagtggcaatggcaatgatacgctcaatggaggagaaggcaacgacgccctgtacggctataatggtaacgatgcactgaatggtggcgaaggcaatgatcatttgaacggcgaagacggtaacgacactctgatcggcggtgccggtaatgattacttggagggcggcagcggttcggatacttatgtcttcggcaaaggcttcggtcaggatacggtctataattaccatgtggataaaaactctgacactatgcactttaaaggatttaaagcagcagatgttcattttatccgttccggaagtgatttggtgcttagcgcttctgaacaagacaacgtacgtatttccggattcttctatggtgaaaaccatcgtgtagatacatttgtctttgatgatgcagctatcagtaatccagattttgccaagtatattaatgctggcaataatttggtacagtctatgtctgtgttcggttctaatactgctgcgacaggaggaaatgtggatgccaatacacaatccgtacagcagccgttattggtaacgccatctgcataa

SEQ ID NO: 51193 - DNA, 342 bp, Neisseria meningitidis; identical to SEQ ID NO: 43005

SEQ ID NO: 51194 - DNA, 186 bp, Neisseria meningitidis; identical to SEQ ID NO: 37143

SEQ ID NO: 51195 - DNA, 924 bp, Neisseria meningitidis
atggaaaaccaaaggccgctcctaggcttcgcgttggcacttttggcggcgatgacgtggggaacgctgccgattgccgtgcggcaggtattgaagtttgtcgatgcgccgacgctggtgtgggtgcgttttaccgtggcggcggcggtattgtttgttttgctggcattgggcgggcggctgccgaagtggcgggatttttcttggtgctcattcaggctgctgctgctcggcgtggcgggcatttcggcaaactttgtgctgattgcccaagggctgcattatatttcgccgaccacgacgcaggttttgtggcagatttcgccgtttacgatgattgttgtcggtgtgttggtgtttaaagaccggatgactgccgctcagaaaatcggcttggttttgctgcttgccggtttgcttatgttttttaacgataaattcggcgagttgtcgggtttgggcgcgtatgcgaagggcgtgttgctgtgtgcggcaggcagtatggcatgggtgtgttatgccgtggcgcaaaagctgctgtcggcgcaattcggaccgcaacagattctgctgttgatttatgcggtaagtgccgccgtgttcctgccgtttgccgaaccggcacacatcggaagtttggacggtacgttggcgtgggtttgttttgcgtattgctgcttgaatacgttaatcggttacggctcgttcggcgaggcgttgaaacattgggaggcttccaaagtcagcgcggtaacaaccttgctccccgtgtttaccgtaatattttctttgctcgggcattatgtgatgcctgatacttttgccgcgccggatatgaacggtttgggttatgttggcgcactggtcgtggtcgggggtgcggttacggcggcggtgggggacaggctgttcaaacgccgctag

SEQ ID NO: 51196 - DNA, 1134 bp, Neisseria meningitidis; identical to SEQ ID NO: 47140

SEQ ID NO: 51197 - DNA, 1245 bp, Neisseria meningitidis
atgaccctattttgcgaacaagtcccctacccccgccttgccgaagcattcggcacaccgctttatgtgtacagccaatccgcgctgaccgaagcatttgaacactaccaaactgcctttgccgagctctccccgctcgtctgctatgcggttaaagccaatggcaacctgagcatcatcaaacactttgcttctttggggagcggttttgacattgtgtccggcggcgaattggcacgcgttttggcggcaggcggcgacgcggcaaaaaccatattttcaggcgtaggcaaaagcgaggcggaaatcgagttcgcgctgaatgcaggcgtgaaatgcttcaatatggaaagcatccccgaaatcgaccgtattcagaaagttgccgcgcgtttaggcaaaaccgcgcccgtctccctgcgcgtcaatcccgatgtcgatgcaaaaacccatccctacatctccacaggtctgaaagccaacaaattcggcatcgcctacgccgacgcgctcgaagcctaccgccacgccgcacaacagcccaatttgaaaatcatcggcatcgactgccacatcggctcccaactaaccgacttaagtccgcttgtcgaagcctgcgaacgcattttgattttggttgacgcgcttgccgccgaaggcattgttttggaacatttggacttaggcggcggcgtcggcattgtttaccaaaacgaaaaagtgcctgatttgggcgcgtatgcccaagcggttcaaaaactgatcggcacacgccgtctgaaactcattcttgagcccggccgcagcttggtcggcaacgcaggcgcgttgttgacgcgtgtcgaattcgtcaaatacggcgaagagaaaaactttgtgatggtcgatgcggcgatgaacgatttaatgcgccccgccctatatgatgcctatcatcacatcgaagcggtagaaccaaaaaacatcgcgccgctgactgccaacatcgtcggcccgatttgtgaaaccggcgacttcctcggcaaagaccgcaccatcgcctgcgaagaaggcgatttgctgcttatccgcagcgcgggcgcatacggagccagtatggcgagcaattacaacgcgcgcaaccgtgcggcggaagtgttggttaacggtggcggatacaaactcatccgccgacgcgaaaccttagaacagcaaatggcaaacgaactcgcctgcctgcaagccgaacatcaaaatgccgtctga

SEQ ID NO: 51198 - DNA, 1086 bp, Neisseria meningitidis
gtgcatgcgccggacgtaacgctccgcaacctgaccgttacccgttccggtatgagcctgcctgcaatggatgccggtatttatctcgaagaaaccgccccgcgcgccctgattgaacacaacaatattttggataattcggtcggcgtatatctgcatggttctgccgatgcgatggtgcgcgagaacaaaattgttggcgatgcgactttgcgcgtgaacgagcgaggcaacggcgttaccgtttggaacgcgcccggcgcgcaggtcgtcggcaacgatatttccaaaggccgcgacggcattttttccaataccagcacgcacaacacctataaaaacaaccgcttcagcgatttgcgtttcgccgtccactatatgtacaccaacgacagcgaaatcagcggcaatatttccgtgggcaacaatatgggctatgtgctgatgttttccgagcggctcaaagtgtttgacaatatcgccgtcggcagccgcgaccaaggcatcatgctcaactatgtcaactattccgatattcacgacaacattatcaacaaagcgggcaagtgcgtttttgcctacaatgccaactacgataaactgtccgccaatcattttgaaaactgccaaatcggcatacactttaccgccgccatcgaaggcacgtccctgcacgacaattcctttatcaacaacgaaagccaggtcaaatacgtcagcacgcgctttctcgactggagcgagggcggacacggcaactattggagcgacaacagtgcgttcgatttgaacggcgacggcttcggcgacagcgcgtaccggcccaacggcatcatcgaccaaatcatctggcgcgcgcccgtatcgcgtctcttgatgaacagtcccgcaatcagcatcgtcaaatgggcgcaggcgcagtttcccgccgttctgcctggcggcgtggtggacagcaaaccgctgatgaagccttatgcccccaaaattcaaacccgttatcaggcgatgaaggacgagctactcaaagaagtcgaaacgcggcagtcggaatggggcagggcggaaaacggttctttgaactag

SEQ ID NO: 51199 - DNA, 2112 bp, Neisseria meningitidis
atgaaaatatcatttcatttagctttattacccacgctgattattgcttccttccctgttgctgccgccgatacgcaggacaatggtgaacattacaccgccacgctacctaccgtttccgtggtcggacagtccgacaccagcgtactcaaaggctacatcaactacgacgaagccgccgttacccgcaacggacagctcatcaaagaaacgccgcaaaccatcgatacgctcaatatccagaaaaacaaaaattacggtacgaacgatttgagttccatcctcgaaggcaatgccggcatcgacgctgcctacgatatgcgcggtgaaagcattttcctgcgcggttttcaagccgacgcatccgatatttaccgcgacggcgtgcgcgaaagcggacaagtgcgccgcagtactgccaacatcgagcgcgtggaaatcctgaaaggcccgtcttccgtgctttacggccgcaccaacggcggcggcgtcatcaacatggtcagcaaatacgccaacttcaaacaaagccgcaacatcggagcggtttacggctcatgggcaaaccgcagcctgaatatggacattaacgaagtgctgaacaaaaacgtcgccatccgtctcaccggcgaagtcgggcgcgccaattcgttccgcagcggcatagacagcaaaaatgtcatggtttcgcccagcattaccgtcaaactcgacaacggcttgaagtggacggggcaatacacctacgacaatgtggagcgcacgcccgaccgcagtccgaccaagtccgtgtacgaccgcttcggactgccttaccgcatggggttcgcccaccggaacgattttgtcaaagacaagctgcaagtttggcgctccgaccttgaatacgccttcaacgacaaatggcgtgcccaatggcagctcgcccaccgcacggcggcgcaggattttgatcatttctatgcaggcagcgaaaatggcaacttaatcaaacgtaactacgcctggcagcagaccgacaacaaaaccctgtcgtccaatttcacgctaaacggcgactacaccatcggccgttttgaaaaccacttgaccgtaggcatggattacagccgcgaacaccgcaacccgaccttaggttacagccgcgcctttactgcttccatcgatccatacgaccgagcaagctggccggcttcgggcagattgcagcctatcctcacccaaaaccgccacaaagccgactcctacggcatctttgtgcaaaacatcttctccgccacgcccgatttgaaattcgtcctcggcggtcgttacgacaagtacacctttaattccgaaaacaaactcaccggcagcagccgccagtacagcggacactcgttcagccccaacatcggtgcagtgtggaacatcaatcccgtccacacactttacgcctcgtataacaaaggcttcgcgccttatggcggacgcggcggctatttgagcatcaacacgtcgtcttccgccgtgttcaacgccgaccccgagtacacccgccaatacgaaaccggtgtgaaaagcagttggctggacgaccgcctcagcactacgttgtctgcctaccaaatcgaacgcttcaatatccgctaccgccccgatccaaaaaacaacccttatatttatgcggttagcggcaaacaccgttcgcgcggcgtggaattgtccgccatcgggcaaatcatccctaaaaaactctatctgcgcggttcgttgggcgtgatgcaggcgaaagtcgttgaagacaaaaaaaatcccgaccgagtgggcatccatttgaataacaccagcaacgttaccggcaacctgtttttccgttataccccgaccgaaaacctctacggcgaaatcggcgtaaccggtacgggcaaacgctacggttacaactcaagaaataaagaagtgactacgcttccaggctttgcccgagttgatgccatacttggctggaaccataaaaatgtcaacgttacctttgccgcagccaatctgttcaatcaaaaatattggcgttcggactctatgccgggtaatccgcgcggctatactgcccgggtaaattaccgtttctga

SEQ ID NO: 51200 - DNA, 1074 bp, Neisseria meningitidis
atggcgaaaatcattacgccgctgtcggcaaatcaggttaaaaatgcgaagccgcgcgataagctgtataagttgtcagacgggggcgggctggctttgtgggtctacccgacgggcgggcggagttggaagctgtcgtttgtgcaggatggaaggcagcagacaatttcgctggggcggtatcctgatttttcgctggccgatgcgcgggaatggcgggaggaggtgcgccgaaaacgggcgcacggggaaaatgtcgtcaataagaaggtgcgggcggattttgcttttgagaaggtggcgcgtgattggtttgtgcgttggtcgaaggggcggtctgaaaagtatgccggacaggttatgcggaattttgagcggtgggtttttccggctatcggcaatcttgatattcgtcaaatcaggacggcggatgtggtcggctgtctgcgtgtgatggaggcgcgcggtatcgttgatacgttgcgcaaaacgaaaaacagtctgaagatggtgtttgcgtttgcggtcggttcgggaatgatggaaatcaaccctgtcgcgcaaatcggttcgggtgtgtttgaacgggcgaaaacggggaatatggcagcgttgagtccgtctgaattgccgcgcctgattgattttttggagcagcgcaatgaatttgcggtttatgcgggcagggtgcgtatccatcctgtaacgcggctttgtatctattggctgctgttgacaatgacgcggattcaggaggcggcgttgatggagtggtcggagttggacggggaggtttggcgtatccccgccgaacggaaaaaggagcggcgggggcatgatgtgccgctgtcgcgggcgatgcagtgggtgttggatcaggcgcgggcgttgaatgtgaacgggcggtttgtgtttgaaagtgtgaattttcaagggcatatcaataaggaaagtccgcgcgtggcgatgcagcgggcggggctggatacgacggcgcacggtttgcgctcgcttgcgcgtacttatttgcgcgaggttctgaaggtggatagtattatgcggaaacgcaaataa

SEQ ID NO: 51201 - DNA, 603 bp, Neisseria meningitidis
atgactgatgtgcttcagacggtattttatattatgttatttccgagaattatcgcagcatcagcgcaacgtaagttaagcgtttatttgaaaaaaggcggtttggtcgcttatccgaccgaatcttgttatggcttggggtgtcttccgacattagccaaagcactcggtaagttggcgcatttgaaaaaaagaccgcaacacaagggtatgattgtcatcgggaatcaatttgagcaattgcagcctttacttcaaatgccgtctgaaaatcttcaggatatgcttagaaaagaatggcccgcccctaaaacgttcctattatccgccaaatcctgtgtcttacccgagttacgcgggaaacagcgcagcaagttggcggtcagggttcccgcccatgtaggtgcgcgccgcttgtgtcaggctttgcaaacgcctttggtctcgacttcgtgcaaccgcgcaggcaaacgcgcgtgtcggacggagagggaagtcagaaggcaattcggacgcgatgtgtggattgttggtgggagaatcggcaggcagaaatcgccgagtcagattattgacggggaaacaggtaaacgtttgcgttag

SEQ ID NO: 51202 - DNA, 807 bp, Neisseria meningitidis
atgccgacagttttcatctttttgacggcggtttacgcaggattgggtgcatttgcatggcactgccaacagcaggggcgcggccgggattacccgtggaagacggaattgccggttttgggcgcggcattgaccgtccacggcgcggcactgcttatgccggtcattcaagacaaaatcatcattatgggcttcgggtattccggcagcctgattgtttggatgatgctgtttatttattttgccggcagcttcttttatccgctgcgcggagtgcagttgctgctgtatccttgcgccgcactgatgctgctgtcaggtttggtttttcctggaaaattctcgggatatgaaattaccgaccttccctttatgctgcatatcggaacttcgctgcttgcatacgggctgttcggcatcgcaacattattgtccgttttgaccctgctgctgaatcggagcctgcaccgcaggagcttctccaagctcgcaggattcctgccgtcgctgctcagtttggaaaaactcatgttccaggccatgtgggcaggtttcatcctgctgacctattccgtcgtcagcggcacattcttcgccgaagccgtattcggcaaacccatgacctttacccataaaaccgtattcggcatattgtcatggctgatttacggcggactgttgctcaagcacagcatgaccgcatggcgcggcaaaaaagccgccgtgtggaccatcatcggatttgtcagccttatgattgcctatatgggcagcaagttcgtattggaaatcattctgaaaagataa

SEQ ID NO: 51203 - DNA, 303 bp, Neisseria meningitidis
atgactggaaataaaaataattttttagaaataatcctatcagatattcatgaaaacataaaaatcaaaccattaactataaaagtaaaaggagagaatgttataaatatccttcctgaggaagttagtttttatgtaaaacaaggtgttgatttaatttatgaaaaatataaacggaaattctttatctccgaaatttctttttgccaatcagatagccggccttcaagtatctacgcttttcttacatttcacttgcttgaagatattattaaaaatgaatccccatccaactacacctga

SEQ ID NO: 51204 - DNA, 795 bp, Neisseria meningitidis
atgaaggcctatttggacttgatgcgccacgtcctcgacaacggtacggacaaatcagaccgcaccggtacgggtacgcgctccgtattcggttatcagatgcgttttgacttgggcaaaggttttccgctgctgacgaccaaaaagctgcatttgcgctcgattatccacgagctgctttggtttctcaaaggcgataccaatatcaaatacctaaaggacaacaatgtttccatttgggacgagtgggcggacgaaaacggcgatttgggcccggtgtacggctaccaatggcgcagctggcccgcacccgacggcaggcatatcgatcaaatcgccaatgtggtggaacaaatcaagaaaaatcccgattcgcgccgcctgattgtgtcggcgtggaatccggctttggtcgatgaaatggcattgccgccttgccacgcgctgtttcagttttacgttgccgacggcaaactgtcctgccagctttaccaacgcagcgccgatattttccttggcgtaccgttcaacatcgccagctacgcattgttgaccatgatgatggcgcaagtatgcggattggaagccggtgagtttatccatacgtttggcgatgcgcatttgtacagtaaccatttcgagcaggccgcattgcagttggaacgcgaaccgtgcgccttgccagtgatgaaaatcaatcctgaagtcaaagatttgtttgccttcaaatttgaagatttcgagttggaaggttacgaccctcatccgcatatcaaggcggcagtgtcggtttag

SEQ ID NO: 51205 - DNA, 1020 bp, Neisseria meningitidis; identical to SEQ ID NO: 50672

SEQ ID NO: 51206 - DNA, 519 bp, Neisseria meningitidis
atggcaaaacatgaaattgaagaacgcggtgacggtctgattgaaaagatggtcgctgttaatcgcgtaactaaagtagttaaaggtggccgtatcatggctttctcagcactgactgttgttggtgatggtgatggtcgcattggtatgggcaaaggtaaatcaaaagaagtaccagttgctgttcaaaaagcaatggatcaagctcgacgctctatgattaaagtacctttgaaaaacggtactattcatcatgaggttattggccgtcatggtgctactaaagtatttatgcagcctgctaaagagggtagtggcgtaaaagccggtggacctatgcgtttggtttttgatgctatgggcattcataatatctccgccaaagtgcacggatctactaacccatataatatcgtacgtgcaacattagatggtttgtctaagttgcatactcctgctgatatcgcagccaaacgtggcttgacagtggaagacattttgggagttaaccatggctga

SEQ ID NO: 51207 - DNA, 747 bp, Neisseria meningitidis; identical to SEQ ID NO: 47877

SEQ ID NO: 51208 - DNA, 468 bp, Neisseria meningitidis
atgactgaactgcaacaccccgtcctcgtcgtcgatgacgaaaccgacattctcgacctgatggaaatgaccctgatgaaaatgggcttgcgcgtccataccgcgtcaggcgttgccgaagccaaaaacaagctcgacagccaacgctattcgctcgtcctgaccgatatgcgtatgccggacggctcggggctcgaagtcgtccaacacatcaacagccgcctgctcgatacgccggttgccgtcatcaccgccttcggcaatgccgatcaggcacaggaagccctgcgttgcggcgcgttcgaccccgataccatgcagatacaggactatctcgaccaaatcgaacgcgacatcatcgaacaaaccctcaaacaaaccgaaggcaaccgcacgcaggccgccaaacgcttgggcatcagcttccgttccatgcgctaccgtatggaacgcctcaacatcggctga

SEQ ID NO: 51209 - DNA, 1674 bp, Neisseria meningitidis
atgcttctaacactttctttgcgtgattttgtcattgttgaaaatctgaatctggattttcaaagcggctttaccgtattgaccggagaaactggcgcgggcaagtccattactttggatgcgattggtctgctgttgggcgataaagccgattacagccaagtccgcagcggcgcaaaagaagcgcagttgtcggcattgttcgatatttcccatttgcctactttaaaagcagaattgtatgaacaggggcttttaaacgacggagaagaagaactcagtatccgccgcattatcgatgccaaaggcaaaagccgcagctttatcaacaatcaggccgctaccttggcgcaactcaaatccgtcggcagccagcttatcgacatccacgggcaaaacgcccatcattcgcttaatcaggaagccgcccagcgcgaattgttggacgcatttgcgggcagcagggcgcaggcggaaaccgtcaggcagctttatcaaaactgggcaaactcaaaaaaagcattgcaggaagcgcaggaacaggcagaaaacattgcactcgaacaagagcgtctggaatggcagtttaacgaattgaatcagttggacattaaacaaggcgaatgggaagctctcagccaaagccacgacagccttgcccattctgccgagctgttgcaggctgccgaagaagtcggaagcaagattgacggcgacaacggcatccaacgccatatctatcaatgtcaaaaactattggccaatctgcaaaacatcgagccgcgctttgccgagagcctgaatatgttggcaagcatcgaagccgaattgggcgaaatcagtgccaatatgcgcgatgtggcaggacgcagcgacatcaaccccaatgaattggcggcacaggaacagcgtatgggcgaactgatggggatggcgcggaaataccggatcgagcctgaagagttgcctgccaagttggcagaaatcgaagaacgcctgcaaagcctgcaagctgccgccgatttggacgcgctcgagcataatgttgcccacaattttgccgaatatcaggaagctgcccacatcctttctgccatgcgccatcaggcggcagagcgtttgagcggcgaaacgaccgagcatatgcaacaccttgccatgaaaggtgcacgtttcgacatcgtcctgttgccctcgtcgccgacggcacacggtttggagcaggttcaatttcaagttgccgccaacaaaggcaatccgccccgtccgctgaataaagttgcctccggcggcgaattggcgcgtatcagccttgccttacaggttgttgccagccaatatacccaagttcccaccctgatttttgatgaggtcgataccggtattggagggggagtggctgaaatggtcggcaaggcattacgttcgttgggcagaaaacatcaggtgcttgccgttacccatcttccgcaagtcgcatcctgcggcgaaaaccactggcgggtgcgcaagcacagcgagggagagcaaaccgtcagcgaaatcagtatattggataaaatccaacgggtcgaagaggttgcccgtatgttgggcggagaagtcattaccgatacgacgcggcaacatgcggcagaattgctgcaacttgcgtcgaaaaatagtttattttaa

SEQ ID NO: 51210 - DNA, 117 bp, Neisseria meningitidis
ttggaattgaaatactgcaatcgggaggctaaggcttccgttgtaacgtttaccatatatttcattattttaatttcatcaaaaaaagaaattcaagattatacatactgccaatag

SEQ ID NO: 51211 - DNA, 282 bp, Neisseria meningitidis
  misc_feature 263, 264, 265, 266, 267: 'n' is a, c, g or t
atgaaacaaaatatcgaaaaactcgaaagcagcgtttatacgttggtacaaaaattcgaaaccctcgtcagcgaaaaccgccgcctcaaagaaaccgtcgccgaactcaaacgggcgcacgagcggcaaaaactcgaacacgaaaccgccgtcgacgaactcagcgaagccctgctcgtccaagtcggcaaactcaaagaagacctgcaaaacaaaattgacagcctgacagaagaaaatacacgataccgcagcctgctcgnnnnncacacacttaattaa

SEQ ID NO: 51212 - DNA, 291 bp, Neisseria meningitidis; identical to SEQ ID NO: 42924

SEQ ID NO: 51213 - DNA, 2838 bp, Neisseria meningitidis
atgttagacaaatactcccccgccgaaatcgaatccaaacattatcaaaactgggaagagcagggctatttccaacctgatatggatttgaccaaaccgtctttttccatccaactgccgccgcccaatgtaaccggcacgctgcacatgggtcatgccttcaaccaaaccattatggacggcctgacccgctactaccgtatgaaaggctgcaacaccgcctggattcccggcaccgaccacgcgggcatcgccacgcaaatcgtggtcgagcgtcagcttgccgcgcaaaacgtgtcccgtcatgacttgggtcgtgaaaaattcttggaaaaagtgtgggaatggaaagaagtttccggcggcacgattacgcagcagatgcgccgtgtgggctgttctgccgactggacgcgcgagtatttcacaatggacgatgtacgcgccgaaaccgtaaccgaagtgttcgtacgcctgtatgaacagggcttgatttatcgcggcaaacgcttggtgaactgggatccggtattgggtaccgcagtgtctgatttggaagtggaaagcgtggaagaacaaggctctatgtggcacatccgctatccgctggcggacaatcctgccgaagccgtcatcgtcgccaccacccgtcccgaaacgctgttgggcgacgttgccgttgccgtcaatcccgaagacgaacgttatacccacttaatcggcaaagaattaatcctgccgctgaccggccgcaccattcccgtgattgccgacgaatacgttgaaaaagacttcggcaccggctgcgtgaaaatcacgcctgcgcacgacttcaacgactacgaagtcggcaaacgccacgatacgcgcttggttaatgtgttcgacttggaagccaaagtattggcaaacgccgaagtgttcaacttcaaaggcgaagcgcaaccaagctttgccctgcctgaaaaatacgcaggcttggaccgctttgccgcgcgcaaacaaatggttgccgatttgcaggaacaaggtttcttggtcgaaatcaaagcgcacacgctgatgacgccgaaaggcgaccgtaccggttcggtgattgagccgatgctgaccagccaatggtttgtcgccatgtccgccacaccgaacggcggcgagcctgacagcgaattcaaaggcttgagcctcgccgacaaagccaaaaaagccgtcgacagcggcacggtacgctttatccccgaaaactgggtcaacacttacaaccaatggatgaacaacatccaagactggtgtatctcgcgccaactgtggtggggccatcaaattcctgcgtggtatgacgaagcaggcaatgtttacgtcgcccgcaatcaggcggaagccgaaaaacaagccggcaaaaccggtttgacccgcgaagaagacgtattagacacatggttctcctccgcgctcgtgccgttctccacgctcggctggccgtctgaaaccgacgaactcaaagccttcctgccgtccaacgtcttggtaacaggctacgaaatcatcttcttctgggtggcgcgtatgattatgatgaccacccacttcaccggcaaagtaccgtttaaagacgtgtacatccacggcatcgtgcgcgaccacgaaggcaaaaaaatgtccaaatccgaaggcaacgtcatcgaccccgtcgatttgattgacggtatcgacttggacaaactgctggtgaaacgtaccaccggcctgcgcaaacccgaaactgcgccgaaagtggaagaagccacgaaaaaactcttccccgaaggcattccgagtatgggcgcggacgctttgcgcttcactatggcgagctacgccagcttggggcgttcggtcaacttcgacttcaaacgcgccgaaggctaccgcaacttctgcaacaaaatctggaacgccaccaacttcgtcttgatgaacaccgaaaaccaagactgcggttacggcgcaaccgctgccgaaccgcgcggctactccttccccgatatgtggattgtaggccgtctgaatcagaccatcgaacaggttacgcaagcctacgaaacctaccgctttgatttggcggcggaaaccctgtacagcttcgtatggaacgactattgcgactggtatttggaactcgccaaagtgcagcttcaaaccggctgcgccagccgccaacgcgccacacgccataccttattgcgcgtactcgaagccgccctgcgcctgctgcacccgattatcccgttcatcaccgaagaactgtggcaaaccgtcgctcctatgtgcgacgcgaaaaccgccgacagcatcatgctcgcccgcttccccgaagccgacagcggcgagattgttcagacggcattcgagcaaatgaccgtgttgcaggatttgattggcgcagtccgcaacctgcgcggcgaaatgggcatccagcccaacgtaaaagccccgctgtttgtcgaaagcacggacgacttggcggactacctcaaatacctgccgatgatgacccgcctgaccgaagcacagcaagtcgccgccctacccgaaagcgaagacgcgcccgtcgccgtctgcaacggcgcgcgcctgatgttgaaagtcgaaatcgacaaagctgcggaaaccgcccgtttgagcaaagaagccgagaagctgcaaaaagccttggacaaactcaacgccaaactctccaaacccggctacaccgaaaaagcccctgcgcatctggtggaaaaagacaaagccgatttggcggaattggaagacaaaatggcaaaagttcaaaatcagttggcgaagttgaaagactga

SEQ ID NO: 51214 - DNA, 363 bp, Neisseria meningitidis
atggcttcaagcaacgtaaacaacgaaatcaaagacaaaaaactctccctgtgggccaagcgtcaagacggttcggtaaaatggttctgcggacagccggttacgcgcaacgacaccgccaaagacgacaccgtcgccgccgacaccgacaccgccaagaagatcgacaccaagcacctgccgtcaacctgccgcgatgattcatctaccggttgcatagaaacaccacgcgccgacttcaaacacttccaaaaaatcagccgttaccgagtattgcccgaatcacggcacatggccgaaaaacttcgtcattcccgcgcaggcgggaatctaggtctgtcggcacggaaacttatcgggtaa

SEQ ID NO: 51215 - DNA, 1296 bp, Neisseria meningitidis
gtgattgccatgatttacatcgtactgttcctcgccgccgtcctcgccgttgtcgcctacaatatgtatcaggaaaaccaataccgcaaaaaagtgcgcgaccagttcggacactccgacaaagatgccctgctcaacagcaaaaccagccatgtccgcgacggccaaccgtccggcgggccagtcatgatgccgaaaccccaaccggcggtcaaaaaaacggcaaaaccccaagaccccgccatgcgcaacctgcaagaacaggatgccgtctacatcgccaagcagaaacaggcaaaagcctccccgttcaaaaccgaaatcgaaaccgccttggaagaaagcggcattatcggcaactccgcccacaccgtttccgaaccccaaaccggacattccgcaccgaaacctgccgacgcgccggcaaaacctgcacccgttccgcaaacacctgcaaaaccgctgattacgctcaaagaactgtcaaaagtcgaattaccctggtttgacgtgcgcttcgacttcatctcctatatcgcgctgaccgaagccaaagaactgcacgcactgccgcgcctttccaaccgctgccgctaccagattgtcggctgcaccatggacgaccatttccagattgccgaacccatcccgggcatccgctatcaggcatttatcgtgggtattcaggcagtcagccgcaacggacttgcctcgcaggaagaactctccgcattcaaccgccaggtggacgcattcgcacaaagcatgggcggtcagacgctgcacaccgaccttgccgcctttatcgaagtggcttccgcactggacgcattctgcgcgcgcgtcgaccagaccatcgccatccatttggtttccccgaccagcatcagcggcgtagaactgcgttccgccgtaacgggcgtgggtttcgttttggaagacgacggcgcgttccactataccgacacgtcgggctcaaccatgttctccatctgctcgctcaacaacgagccgtttaccaatgcccttttggacaaccagtcctacaaaggcttcagtatgctgctcgacatcccgcactctccggcaggcgaaaaaaccttcgacgatttgtttatggatttggcggtacgcctgtccggccagttgaacctgaatctggtcaacgacaaaatggaagaagtttcgacccaatggctcaaagacgtacgcacttatgtattggctcgtcagtccgagatgctcaaagtcggtatcgaaccgggcggcaaaaccgcattgcgcctgttctcctaa

SEQ ID NO: 51216 - DNA, 696 bp, Neisseria meningitidis
atgagtgagttgattttgaaatgcgaaggcgtgggcaaacgctatcgggacggcggtttggacgttcgggtgctgcacggcttggatttggaaatccacgcaggggaaagcaccggcatcatcggttcttcgggcagcggcaaatcgacgctgctgcatattttgggcgggctggatatgccgtctgaaggcagggtgctgctgatgggcgaggatttgcgtacattaagccagcgacaactgggcatcctgcgcaaccgccatctcggtttcgtgtaccagttccaccatcttctgcctgaattttcggcactggaaaacgtgatgatgccgcttctgatcggcaagaaaaaacgggaagaggcggcagaaacggcaatggcgatgctggaaaaggtcggattgaagcaccgttcggcgcaccgcgcgggcgaactgtccggcggtgagcggcagcgtgccgccattgcacgcgccttggttacgcaacccaaatgcctgcttgccgacgaaccgaccggcaatctcgatcgtgcgaacgccaggaatgttttggatatgatgctggaactgaaaacagaattgggaacggggctggtggtcgtaacgcacgacgacgaactcgccggccgcttcgagcgcgtgatggtcatgaaagacggcagcctgcaccccaaacagggcgcaaacgcctaa

SEQ ID NO: 51217 - DNA, 867 bp, Neisseria meningitidis
gtgccatccgaaccgggtaaaaatatgattcaacacgcaggcttgggctaccgccgcgacttggcggaagactttctctcgctttccgaaaacagcccgatatgctttatcgaagccgcaccggaaaactggctgaaaatgggcggctgggcgcgcaaacagtttgaccgtgtggcggaacggctgccgctggcgttgcacggattatctatgtcgctgggcgggcaagcaccgctggatactgatttgatagacggcatcaaagaaatgatgcgccgttacgattgcacgtttttctccgaccatttgagctactgccacgacggcggtcatctttacgatttgttgccgctgccctttaccgaggaaatggtgcatcatacggcgcggcgtatccgcgaagtgcaagaccgtttgggctgccgcatcgccgtggaaaacacgtcctactatctgcattccccgcttgccgagatgaacgaggtcgagttcctcaacgcggttgcacgtgaggccgattgcggcattcatctggacgtgaacaatatctacgtcaacgccgtcaatcacggcctgttgtcgccggaggcttttttgaaaaacgttgacgcagatcgcgtgtgctatatccatattgccggacatgacgtggaaacgccggaattgttgattgatacacatggcgcggcagttttgccgactgtttgggacttgctcgaacttgcctatgccaaactgccgacgattccgcccaccctgttggaacgcgattttaatttcccgccttttgccgaactcgaagccgaagtcgccaaaatcgccgattatcaaacgcgtgccggaaaggaatgccgccgtgcagcctga

SEQ ID NO: 51218 - DNA, 1371 bp, Neisseria meningitidis
atgatcaaccccatcgcctcgctttcccctttagacggccgttatgcccaatccgttgaagcattgcgcccgattttttcagagtacggcctgatgaaggcgcgcgtcaaagtcgaattaaactggctcaaagccctcgccgccgagccgaagattgccgaagtgccgcccttcagtgccggaacgcttgccgaaatcgacacggtgatcgaaaacttctcacttgaagatgccgccgccgtcaaagctattgaggcgaccaccaatcacgacgtcaaagccatcgaatattggcttaaagaacgcttctccggcgtgcctgaagtggctgctgccagcgagttcatccacttcgcctgcaccagcgaagacatcaacaacctgtcccacgctttaatgctgcaagaagcgcgtgaggctgttttgctgccgaagctggccgaaatcattgagaagctgaccggcatggcgcatgagttggctgccgttcctatgatgagccgcacgcatggccagcctgctacaccaagcacactgggtaaagaaatctccaatgttgtgtaccgcctgcaacgtcagtttaaaaacctgcaagcgcaagaattcctcggcaaaatcaacggcgcggtcggcaactacaacgcccatatggtcgcttatcccgatgtagattgggaaacccactgccgtaacttcgtcgaaatcggcctcggtctgaccttcaacccctacaccatccaaatcgagccgcacgactacatggcggaattcttccaaaccctcagccgcatcaacacgattctcatcgactttaaccgcgacgtttggggttatatttcattgggttacttcaaacaaaaagtcaaagcgggcgaagtcggctcttccaccatgccgcacaaagtcaaccccatcgattttgaaaactccgaaggcaacctcggtatggcaaacgccgtattgggctttttgtccgaaaaactgccgatttcccgctggcagcgcgacctgaccgacagcaccgtcttacgcaatatgggcgtgggcgtgggctatgccgtgttgggtttcgccgcccacctgcgcggtctgaacaagctcgaacccaaccctgccgcgcttgccgccgatttggatgccacttgggaactgctcgccgagccgattcaaaccgtgatgcgccgttacggtgtcgccaatccttacgaaaaactgaaagacctgacgcgcggcaaaggcggcattacgcccgaagtgctgaaaggctttatcggatcgctggaaatccccgtcgaagccaaagcaaaattgcttgagctgacccccgcactgtatgtgggcaaggctgaagcgttggcgaaacggatttga

SEQ ID NO: 51219 - DNA, 663 bp, Neisseria meningitidis; identical to SEQ ID NO: 38761

SEQ ID NO: 51220 - DNA, 2115 bp, Neisseria meningitidis
atgttcctcttttcagacggcctacaatccattaataacaataatcgacgaaaacgcattgtgaaaaacgcctacatcccctctcgtggcatccgcaaaatcccccatctcttcaccctattgcctgagtttcatatctgcaaggatgggaaaggagcagaggctgttatcggctggggtttgcgcccgacgacacacaaagcgcgtgcttttgccgctgaacaccagcttccctttattgctttggaagacggctttttacgctcgcttggcctgggcgttgccggctatcctccctattccatcgtctatgacgacatcggcatctactacgacactacccgcccttctcgtttggaacaactgattcttgccgccgataccatgccgtctgaaaccttggctcaggcgcaacagacgatggatttcatcctgcaacaccacctgtccaaatacaaccacgcgcccgaactttcagacgatcatcctttacgctccccatccaagcctgaaactgtcctcattatcgaccaaaccttcggcgatatggccatccaatatggcggcgcagatgcctctacgtttgaactgatgtttcagacggccttgaatgaaaacccgcaagccgatatctgggtaaaaacccatcccgatgttttgtgcggcaaaaaacaaggctatctgacccaactggcgcagcaacaccgcgtccatcttctggcagaagacatcaacccgatttctttgttgcaaaacgtcgataaagtttattgcgttacctcgcaaatgggttttgaggcgcttttgtgcggcaagccgctgaccaccttcggcctgccgtggtatgccggatggggtgtaagcgacgaccgccatcctgaaatcaaccgccttgttcaaacccaacgccgcgccacccgcaacttgctgcagctcttcgccgcagcctatctgcaatacagccgctacctcaaccccaataccggcgaagcaggcagcctctttgatgtcatcgactatttggcgacggtcaaacgtaaaaacgacaaattgcgtggcgagttatattgcgtcggtatgtctttgtggaaacgcgcggttgccaaaccgttctttaacgtaccctcttgccgtctgaaatttatctcttccacccaaaaactggcaagggtcaaactgtccgacgatgcacgcatcctggcttggggcaacggcaaagaggccatcgtccgctttgccgaacaacaccacatccccctgctgcgcatggaagacggctttatccgctcggtcggactcggctccaacttagtgccgccgctgtcgctcgttaccgacgatatgagcatttatttcaatgccgaaaccccgtcccgtcttgaatacatcctacaaaaccaaaacttcgacgatcaagactttcagacggccttgaagctgcaaaaaatgctgactgaaaaccacatcagcaaatacaacgtcggcaactcagacttcagcgccccatcaaccgacaaaaccgtgatcctcgttcccggccaggttgaagatgatgcgtctatccgctacggttcgccccaaatctaccgcaatctggatttgctccgtaccgtacgcgaacgaaaccccaatgcctatatcatctacaaaccgcatcccgatgtagtcagcggtaaccgcatcggccatatttcccctgaagatgctgcacgatatgccgaccaaaccgccgagcaaaccgacatcctgacctgtctccaatatgcagacgaagtacataccatgacttcgctgaccggttttgaagccttgttgcgcggcaaaaaagtcagctgctacggcctgcctttttacgcaggctggggacttacccaagatctgctccccattccgcgccgtagccgcagacttgagctttggcagctgattgccggcacgctcatacactatcccgactatatccatcccgaaacccatcaggccatcaatgcggaaaccgctgcccaaatcctgatacgacaaaaaaatatgcaaaaaaacaacaacggattacatcgcgggtactttgccaaaaaattaggtaaaatcaaacaactatatcgatctttcaaataa

SEQ ID NO: 51221 - DNA, 966 bp, Neisseria meningitidis
atgaaccttaataaactgaaaaacaaactgttccgccgtccggggcagcgtgcggtgattgccgtaccgtatatttggcttttggtgctgtttctgattccgttcgccatcgtgctgaaaatcagctttgccgaacaagaaatcgccatcccgccgtttactcctttaacgacgatagatgaggatttgggtcgtctgaatattgctgtcagctaccaaaattatgcagacatcttccaaaatttttggagtacgctcaatccgttcggcgacggtgaaaacagcaatatctatctgatgacttattggtcttcaattaagactgcgctgactacgacggtaatttgtctgttggtcggttatccgaccgcctatgcgatttctcgtgccaatccttctgtccgcaatggtttgctgcttgccattatgctgcccttttggacatcgttcctgttgcgcgtctatgcgtggatgggtctgctcgggcataacggcattgtaaacaacctgttgattaaaatgggtattatcagcgagcctttggatttgttctacaatgccttttcgctcaatttggtgatggtttacgcctatctgccgtttatgattctgccgctatacacgcaactggtgaaactcgacaaccgcctgcttgaagcggcttccgatttgggcgcggggccggtcaaatcgttcttgacgattaccctgcctttgtcgaaaaccggcattattgcaggctccatgctggttttcgtccctgctgtcggtgagttcgtcattcccgagctggtcggcggttcggaaaacctgatgattggtaaagtcttgtggcaggcgttcttcgatcaaaacaactggccgctggcttccgccgtcgccgtcgtgatggtcgcgctgctggtcgtgccgattgccctgtttcagcattatgaaaaccgcgaattggaagaaggagccaaataa

SEQ ID NO: 51222 - DNA, 2115 bp, Neisseria meningitidis
atgtcagttttccgcatcaatatgaccgccgccacggttttggcagcactctcgtcttcggtttttgccgcacaaacggaaggtttggaaaccgtccatattaagggtcagcgttcttacaacgcgattgccaccgagaaaaacggcgattacagctcgtttgccgccaccgtcggtacaaaaatccccgcttctttgcgcgaaattccgcaatccgtcagcatcattaccaaccagcaggtcaaagaccgcaatgttgatacgtttgaccagttggcacgcaaaacgcccggcctgcgcgtgttgagcaacgacgacggacgctcttcggtttacgcgcgcggttacgaatacagcgaatacaacatcgacggcctgcccgcgcagatgcagagtatcaacggcacgctgcccaacctgttcgccttcgaccgcgtggaagtgatgcgcgggccgagcggactgttcgacagcagcggcgagatgggcggcatcgtgaatctggtgcgcaaacgcccgaccaaagcgttccaaggtcatgcggcggcagggttcggtacgcacaaacaatataaagccgaggcggacgtatcgggcagcctcaattcagacggcagcgtgcgcggccgcgtgatggcgcagaccgtcggcgcgtctccgcgtcccgccgagaaaaacaaccggcgcgaaaccttctacgcggcggcggattgggacatcaaccccgatacggttttgggcgcgggctatctttaccagcaacgccgcctcgcgccgtacaacggcctgcctgccgatgccaataacaaattaccgtccctgccgcaacacgtatttgtcggcgcggattggaacaaatttaaaatgcacagccacgacgtgttcgccgatttgaaacattacttcggcaacggcggctacggcaaagtcggtatgcgctattccgatcggaaagccgattccaattatacgtttgcgggcagcaaactcaacaataccggacaagccgacgtagcgggtttgggtacggacattaaacaaaaagcctttgcggttgacgcaagttacagccgtccgtttgccttgggcaacaccgccaacgaatttgtgattggtgcagactacaaccgcttgcgcagtactaatgaacaagggcgttcgactttgtcaaaaagcgtcgctttagatggtttccgcgctttgccttataacggcatacttcagaacgcccgcgccggaaacaaaggtttcaatcactccgttaccgaagaaaacctcgacgaaaccggtttgtatgccaagacggtgttccgtcctctggaaggtttgtcgttgattgcaggcggacgtgtaggacatcacaaaatcgagtcgggcgacggcaaaaccctgcataaagcttcgaaaaccaaatttacaagctacgccggcgcggtttacgatatagacggcagcaacagcctgtacgcttccgcctcccaactctacacaccgcaaaccagcatcggcaccgacggcaagctgctcaaaccgcgtgaaggcaaccagtttgaaatcggctacaaaggcagctacatggacgaccgcctcaatacccgggtttcgttctaccgcatgaaggataaaaacgccgccgcaccgctggactcaaacaacaaaaaaacccgttacgccgcattgggcaaacgcgtgatggaaggtgttgagaccgaaatcagcggtgcgatgacaccgaaatggcaaatccatgcaggttacagctacctgcacagccaaatcaaaaccgcctccaattcgcgcgacgaaggcatcttcctgctgatgcccaaacacagcgcaaacctgtggacgacttaccaagttacgtccgggctgaccatcggcggcggcgtgaacgcgatgagcggcattacttcatctgcagggatacatgcaggcggttatgccacgttcgatgcgatggcggcataccgcttcacgcccaaactgaagctgcaaatcaacgccgacaacatcttcaaccgccattactacgcccgcgtcggcagcgagagcacctttaacattcccggttcggagcgcagcctgacggcaaacctgcgttacagtttttaa

SEQ ID NO: 51223 - DNA, 999 bp, Neisseria meningitidis; identical to SEQ ID NO: 41806

SEQ ID NO: 51224 - DNA, 1257 bp, Neisseria meningitidis
atgaaagtgcttgttttaggtgcgggtgttgccggcgtgtcttccgcgtggtatctggcagaggcaggacatgaagtaacggtcatcgaccgcgccgagggtgtggcgatggaaaccagttttgccaacgcaggccagctttcttacggctataccacgccttgggctgcacccggtatcccgaccaaagcgctgaaatggctgtttaaaagccatccgcctttgctgtttcgccccgacggcagcctgtatcaaatcgaatggctgtggcaaatgctgcaaaactgcacggcagcgcactatcaaaccaataaagagcgcatggtcaggatgtccgaatacagccgtgaaatgttccgccgttttgaagcgcaaaccggcatgaattttgagggacgcaaaaaagggacgttgcaggttttccgccaaaccaaagaagtcgaagcggcaaaacaagacattgccgttttggaacgctacggcgtgccgtaccgccgtctgaaacccgaagaatgtgcagaatttgagcctgcgctggcacgcgttaccgccaaaattgccggcggcctgcacctgcctgcagatgcgaccggcgactgccacctcttcactgaaaacctatacaaattgtgtcaggaaaagggcgtacagtttcatttcaaccaaaccatcagccgcatcgaccataacgggctgcgcatcaaagccgttgaaaccgaaacagggcggtttgaagcagatgccgttgtctgtgcgctcggctgcttcagtaggactgtgttggcgcagttagacctcgatctgccgatttatcccgtcaaaggctattccttgaccctgccggtcaccaattcagacggcgcgccggtgtccaccgttttggatgaaagctacaaagtcgctatcacgcgctttgacaacagaatccgcgtcggcggcatggcagaattgtcgggctacgaaatcaaactgcccgaaaaacgccgcgaaaccttggctttggtcgtcaacgatttgttcccggaaggcggcgatttgagccaagcattgttctggagcggcctcagaccgatgacgcccgacagcacgccgttaatcggccgcacccgctttgaaaacttattcttgaatacaggccacggcactttgggctggaccatgtcgctgggttcggcaaaattaaccgccgatatcgtgagcggcaaagacaccgaaatccgaagcgacgatttgagcctgtcgcactatcaggcttaa

SEQ ID NO: 51225 - DNA, 2016 bp, Neisseria meningitidis
atgaaatcctaccccgacccctaccgccattttgaaaacctcgattccgccgaaacgcaaaacttcgctgctgaagcgaatgccgaaacgcgcgcgcgttttttagaaaacgacaaggcgcgcgcgctttcagacggcattttggcgcagttgcaggacacgcggcagattccgttttgtcaggaacaccgcgcgcggatgtaccatttccatcaggacgcagaatatccgaagggcgtgtaccgcgtgtgcacggcggcgacgtaccgttcgggctatcccgagtggaaaatcctgttttcggtggcggatttcgacgaattgctcggtgacgatgtatatctaggcggcgtgtcgcacctggtggaacagcccaaccgcgcgttgttaacactgagcaaatcgggcggcgataccgcgtacacgctggaagtggatttggaagcaggggagttggtagaaggcggttttcactttccggcaggcaaaaaccatgtgtcgtggcgcgatgaaaacagcgtgtgggtgtgtccggcctgggacgagcggcagttgaccgaatcgggctatccgcgcgaggtgtggctggtggaacgcggcaaaagtttcgaggaaagcctgccggtgtaccaaatcggcgaagacgggatgatggtgaacgcgtggcgttacctcgatccgcagggttcgccgattgatttgattgaagcgtctgacggtttttacaccaaaacctatttgcaggtgtcggccgaaggcgaggcgaaaccgttaaacctgcctgctgattgcgatgtggtcggctatctggcggggcatcttttgctgacgctgcgcaaggactggcaccgcgcgaaccaaagctatccgagcggcgcgctggtagcggtgaaactgaatcgcggcgaaatcggggcggcgcagcttttgtttgcgcctgatgaaacgcaggcattggaaagcgtggaaacgaccaagcgttttgtcgtggcgagtctgctggaaaacgtacaaggccgtctgaaagcgtggcgttttaccgacggcaaatggcaggaagccgaactgccgcgcctgccctcgggcgcgttggaaatgaccgaccaaccgtggggtggcgacgtggtttaccttgccgccagcgatttcaccacgccgctgacgctgtttgcgctggatttgaacgtgatggaactgaccgtcatgcgccgtcagccgcagcagttcgattcagacggcatcaacgtgcagcagttttggacgacttcagctgacggcgaacgcatcccttatttccacgtcggcaaaaacgccgcgcccgacacgccgacgctggtttatgcctacggcggtttcggcgtacccgagctgccgcattatctgggcagcatcggcaaatactggctggaagagggcaacgccttcgtgttggcgaacatacgcggcggcggcgagttcggcccgcgctggcatcaggcggcgcagggaatcagcaaacacaaaagcgtcgatgatttgcttgccgtcgtgcgcgatttgtccgagcgcggcatcagttcgccccaacacatcggtttgcagggcggcagcaacggcggcctgattaccgccgccgccttcgtgcgcgaaccgcaaagcataggcgcactggtgtgcgaagtgccgctgaccgacatgatccgttatccgctgctctccgccggttcaagctggacagacgaatacggcaatccgcaaaaatacgaagtctgcaaacgccggttgggcgaattgtcgccgtatcacaatctttcagacggcatcgattatccgcccgcgctcatcaccaccagcctcagcgacgaccgcgtccatcccgcccacgcgctcaagttttacgccaaactgcgcgaaacctcgccgcaatcttggctctactcgcctgacggcggcggccataccggcaacggcacgcagcgcgaagccgccgacgaactcgcctgcgtgttgctgtttttgaaagagtttttgggctaa

SEQ ID NO: 51226 - DNA, 1083 bp, Neisseria meningitidis
atgccgtctgaagccgcttcagacggcattttgccgctttaccctacccgcactatttttcagaaaccgatcatgcttccattctttccagaaccctccctttcctatacgcaacaaaaccgtaccgccgttttgctgttgaacctcggcacgcccgacgcgccgaccgcgcaggcggtacgaccttatctgaagtcctttctgaccgaccggcgcgtcgtcgaactgcccaaatggctgtggtatcccattctgcatggtctggtactgacgctccgccccaaaaaaagcgcgcacgcctatgaaaaaatctggtttaaggaaggttcgcccttagaagtttacacagcacgccaagctgccgcgcttgccaaacgtatgcccgacctcatcgtccgccacgccatgacctacggcaatccttcggtggcagacgtattgtcggaactgaaggcgcaaggcgcgggcagactgctggtcatcccgatgtacccgcaatatgccgcttccagcagcggagcggcagtagataaggtgtgcgaacaattactgctgcaacggaaccaaatgagcgtccgcaccgtttcgcgcttttatgacgataccggctacattgatgcgatgaaaaaccacatcctccgatattgggcggaacacgggcgcgggaaaaaactgatgttgagttttcacggcgtaccgcagaagcactacgacctcggcgacccctatcccgacgagtgccgccacaccgccaaactgcttgccgaagcactggaactgaccgaagaccaatatgtcgtatcgttccaaagccaattcggcagggcaaaatgggttacaccgagcacgcaggatttgttcggcaaactgcccaaacagggggtaaccgagctggacgtattctgcccgggctttttggcagactgtttggaaaccatggaagaaatcgccctgatggggcgggaacagttttatgaagcaggcggcaaaagctaccgctacatcccctgcctcaacgacaatcccgactggatagacgcactcgtcgcacttgccgaagaaaaccttggcggctggcgttga

SEQ ID NO: 51227 - DNA, 372 bp, Neisseria meningitidis
atgaaactcctcttcatcctcctagtcctcttcgtcgccgtcgaacatttctacatcgcctggcttgaaatgacacagattcccagcgaaaaagcggcggaaacgttcaagctgccttatgaatttatggaacaaaatcgcgtgcagaccctgttcggcaaccaagggctgtataacggctttctcggcatcgggctggtgtggtcgcggtttgccgcgccggataacgcggtgtacggcgcaatggtactgtttctcggcttcgtcctgattgccgccgcgtggggcgcgttctcttccggcaacaaaggcatactcgtcaaacaaggtttgcccgcatttttggcagcggcggcggtgttggcggtatga

SEQ ID NO: 51228 - DNA, 1158 bp, Neisseria meningitidis
gtgccgtttgacggtaaagggtttccgaattttgaaaaagacgtaaaatacgatacgagaattaataccgctgtaccacaagtgaatcctatagatgaacccgtctttaatcctaaaggttctgtcggatcggctcattcttggtctataactgccagaattcaatacgcaaaattaccaaggcaaggtagaatcagatatatcccacctaaaaattactctccttcagcaccgctaccaaaaggacctaataatggatatagtgccgggaatttaagcaaaaaagtcctgactttagtttacataaacggcaaactcaaattcgggccaagcagtctgccgtcttcggcattgaaagcacctgttcccattgtcggcaaggctgaggctccgcccggaaaagctgtgcctgtcggcgaagcccgcattccttcaaatccaaaagcggtaaaaggaacaaccgttaccctgtcgcaggaacaacgcctagccaacggagagctgataccgaaaggctctgtggtaacgtggtcggacaatgcggtgaaggttgtgcggcctgatgggaaaaagcggagatttaatagtcgggattgggaacagaaggcattgccgaaaccgcaactaccgaaagattacagagatgacatcaacataggtggaaataatcctagatttaatcagcaacggcatgaaaaaatcgaatcccacaacccaaacagaatagaggagatacgccaacgtaatgccgtttcttctgcagaaaggcaggctgatgcattaaaaaggatgcaaacgtctggccgcacccgcctgcctgggcagccacaaaaaggaaaacccggcgctgctagagaaatgtcctcttcagacaatccgaatcaaacagccgaggcttttgcacgtcgatatttaggcaggaaacttacactaatggaacgagtcgaaggtgaaaaattatacggaggtaaatgtgtgggctgttggaaagcgcaaatgccggacggaacctttgtggtgtataggccagcaggtaatgcttctatgaccaagggaactactgcgtctgttgatattaataacccaacattaaataacttaaatattaatttaaaaggcaagccaacagagttaaaatttaaattccctgctagataa

SEQ ID NO: 51229 - DNA, 2016 bp, Neisseria meningitidis
gtggggagttttcacggattctgtctttcagacagcattggttttcaaatgccgtctgaaaacgcaaaacgctcctgtttctttattctaaacgagaaaacaggagcattttttatgactacgccaaaaaaaaccgccaaaacttccggcaacgaagcgcgcgaacttgccgacttgagcgaagacatcggcatccgcttcaaatatccgaactcggaacgcgtgtatctgcaaggcagccgtggcgacatccgcgtgcctttgcgcgaaatccgccaggacgacacttacacggcgcaaggtacggaagccaatccgccgattcccgtctatgacaccagcggcgtgtacggcgatccggcggcacacatcaatttaaaacaaggtctgccgcacatccgcacggcgtggctggacgaacgcggcgataccgaaatcctgcccaagctctccagcgaatacggcatcgaacgcgcacacgatccgaaaaccgcccatctgcgcttcaaccaaatcacccgcccgcgccgcgccaaagccggccgcaacgtaacccagcttcactacgcgcgccaaggcattatcacgcccgaaatggagtttgtcgccatacgcgaacgtttaaaattagacgaattgtcccaaaaaccggaatacgccaagctcttgaaacaacacgcagggcaaagtttcggcgcgaatatcccgacccatcccgaccaaatcacgcctgaattcgtgcgccgagaaatcgccgccggacgcgcgattattcccgccaacatcaaccaccccgaactcgaaccgatgattatcggccgcaacttccgcgtcaaaatcaacggcaacttgggcaattccgccgtcacttccagcctgaccgaagaagtcgaaaaaatggtgtggtcgctgcgttggggtgcggacacgattatggatttgtccacaggcgcgcatatccacgaaacgcgcgaatggattatccgcaacgcgcccgtccccatcggcaccgtgccgatttaccaagcgttggaaaaaaccggcggcatcgccgaagatttgacttgggatttgttccgcgacaccctcatcgagcaggcggaacaaggcgtggactatttcaccatacacgcaggcgtgttgctgcgttatgtaccgatgaccgccaaccgcctcaccggcatcgtctcgcgcggcggttcgattatggcgaaatggtgtttggcacatcatcgggaaaatttcctctacacgcatttcgacgaaatctgcgaaattatgaaagcgtatgacgtatcgttcagcctcggcgacggtttgcgtcccggctgcattgccgatgccaacgacgaatcccaattcgccgagctgcacaccttgggcgaattgacctccaaagcgtggaaacacgacgtacaggtgatgatcgaaggtcccggccatgtaccgctgcaacgcgtcaaagaaaatatgaccgaagagttgcaacactgttttgaagcaccgttttacaccctcggcccgctcgttaccgacatcgcccccggctacgaccacatcacctcgggcataggcgctgccaatatcggctggtacggcacggcgatgctctgttacgttacccccaaagaacatttgggactgcccgacaaagaagacgtgcgtaccggcatcatcacctacaaactcgccgcccacgccgccgacctcgccaaaggctggccgggcgcacagttgcgcgacaacgccctgagcaaggcgcgtttcgagttccgctggcgcgaccagttccgcctaagcctcgaccccgaacgcgccgaaagcttccacgacgaaaccctgcccgccgaaggcgcgaaaatcgcccacttctgttcgatgtgcggccccaaattctgctcgatgaaaatcacgcaggaagtgcgcgactacgccgacaagcaaaaagcccaacggcagggcatggaggaaaaagcggtcgagttcgtcaaaaaaggagcgaagatttacagctaa

SEQ ID NO: 51230 - DNA, 465 bp, Neisseria meningitidis
atgattgagatgagtaaagattaccgaaacgatttgtacgatgtatatgtttcttacccgccccaagtggatcgcgggcttatccgggagtgccttaaggagaatctcggcgaggaaaaggcggaaggattgatcgaatcgctcgattccaaacctcaagtgctggttgaggaaaaatgcacttgggcgaaacgggaagagttgcatgattatttcagctatttgggtttggatattattacccggagatatatggagttggaaacggtcgtgccgccggaggaaggtgagggcgaaggagagggcgcggatggggaaatgcccgaatatcttgaacttcatggcgggcgggaagatgatatttccgcaccttcgcaacccgaaccgccgacccgcaatatcaaaccgctggttttcgggctgctgattgcctttttgggctatctgctcggtaagattttttga

SEQ ID NO: 51231 - DNA, 1776 bp, Neisseria meningitidis
atgagtatcgtgctgcacggcgtggcggcgggcaaaggcattgccgtcggttgcgcccacctgattgcgcgcggtacggaggaagtgccgcagtatgatgttgcggaggcggacaccgatgccgaagccgaacgtttcgatgccgccgtcaaagccacgcgcaaagagttggaacagctccgcagcgcgattcccgaaaacgccccgaccgagttgggcgcgttcatctcgctgcacctgatgctcttgaccgatgttaccttgtcgcgcgaacccgtcgatattttaagggaacaaaaaatcaacgccgagtgggcattgaagcagcagagcgacaaactcgccgcccaattcgacaatatggacgatgcctatttgcgcgaacgcaagcaggatatgctgcaagtcgtccgccgcatccacaacaacctgatcgggcagggcaacgagttggaagttgccgacaacctgtttgacgaaaccgttctgattgcaaacgacctttcgcccgccgacacggttttgtttaaagagcagcgcattgccgctttcgttaccgatgccggcggccccaccgggcatacggcgattttgggcaggagcttggacatcccgtccgtcgtcgggctgcacaacgcgcgcaaactgattaccgaaggcgaaacggtcattgtggacggtatcaacggcgtgttgattatcgcgccggatgagtcggtgttgaacgaataccgccgccgtgcccgcgaataccgcagccacaaacgcgatttgaacaagctcaaaaaaaccgccgccgccaccgccgacggggtctgcatcgagcttgtgggcaatatagaatccgccgaagacgtgaaaccgctgcacaacctcggcgcagacggcatcgggctgttccgcagcgagtttctttacctgaaccgcgatacgatgccgtctgaagacgagcagtacgaagtgtacagcgcgattgtcaaaaaaatgaaaggcaaaagcgtaacgatacggacagtcgatttgggtgtggacaaaaacccgcgctggttcgggaaaaacagcacgcccaacggcagcctcaaccccgcgctgggcatgaccggcatccgcctgtgccttgccgaaccggtcatgttccgcacccagatgcgcgccatcctccgtgcggcggtacacggtcccgtccgcatgatgtggccgatgattacctccgtatccgaagtgcgccagtgcctcatccacctcgacaccgcgcaacgccagcttgccgaacgcggcgatgccttcggtaaagtcggcatcggctgtatgattgaaattccgtctgccgcgctgaccgtcggcagtattttgaaactggtcgatttcatctccgtcggtaccaacgacctgattcaatacatcttgtccgtcgatcgcggcgacgacagcgtcagccatctctaccagcccggccatcccgccgtgctgaaaatgctgcaacacgtcatccgtaccgccaaccgcatggacaaagacgtatccgtatgcggcgagatggcgggcgataccgcgtttacccgcgttttattgggtatggggctgcgccgtttttccatgaaccccaacaacatcctgcccgtcaaaaacatcattctgcacagcaatgtcggacagctcgaaagcgatattgcgaaagtcatccgctgcgaagacgaagagaagtcggaaaagctgatcaaacagatgaacagcgtgtctgtcgaggaagaagccgacttcaaggggcggaaataa

SEQ ID NO: 51232 - DNA, 549 bp, Neisseria meningitidis; identical to SEQ ID NO: 39944

SEQ ID NO: 51233 - DNA, 324 bp, Neisseria meningitidis
atgataattgacgaaaaatctacttcagatgtactgaaacaatatcaagaactagggtttgatttgacaaaatcgatgataatagagttttttatagagggttctcaaaagaatctgcaatcaatagaaagtcaaatcatttcttatcggcaagattttcaaatcagtattgaacaagatgaattcggagaaatgtggacttgctattgttccgtcaatatcgtcccttctcttgaaaacattttagctattgaaactacgttatttgatattgcacaaaaaaatgattgtaattatgaaggttttggttcgtatgggaactaa

SEQ ID NO: 51234 - DNA, 1059 bp, Neisseria meningitidis; identical to SEQ ID NO: 42377

SEQ ID NO: 51235 - DNA, 852 bp, Neisseria meningitidis
atgattatccatccccaattcgatcccgtcctcatcagtatcggcccgcttgccgtccgctggtatgccctaagctacatcctcggatttattctttttacctttctcggcagaaggcgcatcgcgcaaggcttgtccgtttttaccaaagaatcgctcgacgacttcctgacatggggcattttgggcgtaattttgggcgggcgtttgggttacgtcctgttttacaagttttccgactacctcgcccatccgcttgatattttcaaggtatgggaaggcggaatgtcgttccacggcggctttttgggtgtagttattgccatatggttgttcggccgcaaacacggcatcggcttcctcaaactgatggacacggtcgcaccgctcgttccgctgggtctcgcttcgggacgtatcggcaacttcatcaacggcgaactttggggacgcgttaccgacatcaacgcattttgggcaatgggcttcccgcaggcgcgttacgaagatgccgaagccgccgcgcacaatccgctttgggcagaatggctgcaacaatacggtatgctgccgcgtcatccctcgcagctttatcagtttgcacttgaaggcatctgcctgttcgccgtcgtttggctgttctctaaaaaacagcggccgaccggacaagtcgcctcgctcttcctcggcggctacggcatattccgcttcattgccgaattcgcacgccaacccgacgactatctcgggctgctgaccttggggctgtcgatggggcaatggttgagcgtcccgatgattgttttgggtatcgtcggctttgtccggttcggcatgaaaaaacagcactga

SEQ ID NO: 51236 - DNA, 786 bp, Neisseria meningitidis
atgagcagaatccggcaggcttttgccgctttggatggcggaaaggcattgattccctatattacggtgggcgaccccgatattcggacaactttggcattgatgcacggcatggttgcaaacggtgcggatattttggagttgggtgtgccgttttccgatccgatggcggatgggccggttattcagcgtgcggcggagcgggcgttggcaaacgggatttcgctgcgcgatgtcttggatgtcgtcagaaaattccgtgaaaccgacacgcaaacgccggttgttttgatgggatatttgaaccctgtacataagatgggttatcgggagtttgctcaggaagccgcaaaggcgggtgtggacggcgtgttgacggtggattcccctgtcgaaaccatcgatccgctctatcgcgagctgaaggataacggggtcgactgtattttcctgattgcgccgacgacgacggaagaccgtattaaaaccattgccgagctggcaggcggatttgtctattatgtttcgctcaagggcgtaacgggcgcggcaagtttggatacggatgaggtttcgcgtaaaatagagtatttgcatcagtatatcgatattcccatcggtgtcggtttcggcatcagcaatgcggaaagcgcgcgcaaaatcggccgggttgccgaagcggtcattgtcggcagccggattgtgaaagagattgaaaacaatgcgggcaacgaggctgcggtcgtcggtgctttggtcaaagagttgaaggatgccgtgcgctga

SEQ ID NO: 51237 - DNA, 987 bp, Neisseria meningitidis; identical to SEQ ID NO: 45829

SEQ ID NO: 51238 - DNA, 1278 bp, Neisseria meningitidis
atgcgtagcagcgatattttaattgtagacgacgaaatcggcatccgcgacctgctgtcggaaatcctgcaggacgaaggttattcggtcgcattggcggaaaacgccgaagaggcgcgcaagctgcgccatcaggcgcgccccgcgatggtgctgctggatatttggatgcccgattgcgacggcatcacccttttgaaggagtgggcgaaaaacgggcagctcaatatgccggtggtgatgatgagcgggcatgccagcatcgataccgccgtggaagccaccaaaatcggcgcgatcgattttttggaaaaaccgatttccctgcaaaagctgctgtctgccgtcgaaaacgcgttgaagtacggtgcggcgcaaaccgaaacggggcctgtattcgacaagctgggcaacagtgcggcgattcaggaaatgaaccgtgaggtaggggctgcggtgaaatgtgcctctcccgtacttttgacgggcgaggcgggttcgccgtttgaaacggtggcacgctatttccataaaaacggtacgccgtgggtcagcccggcaagggtcgaatatctgatcgatatgccgatggaactgttgcagaaggcggagggcggcgttttgtatgtcggcgacatcgcccagtacagccgcaacatccaagccggtattgcctttattgtcggaaaggcggaacaccgccgcgtcagggtggtcgcatcgggcagcagggcggcaggttcagacggcattgcctgcgaggaaaagctggcggaactgctgtcggaatcggtcgtccgtattccgccgctgcgtatgcagcatgaagacattcccttcctgatacaggggattgcctgcaatgtggcggaaagccaaaagattgcgcctgcctcattcagtgaagaggcacttgccgcattgacccgttacgactggccgggaaatttcgaccaactgcaaagcgtcgttgcaacgctgttgttggaggcggacggacaggaaatcggcgcggcggcggtttcttcccttttggggcagaatgtgcctgccgagggagcggaagatatggtgggcgggtttaatttcaacctgcccctgcgcgaattgagggaggaggtggagcggcgttatttcgagtaccacatcgcccaagaaggtcagaatatgagcaaagtggcgcagaaggtcggtttggaacgcacgcacctttaccgcaaactcaaacagctcggcatcggcgtttcgcgccgggcgggggaaaaaaccgaagaatag

SEQ ID NO: 51239 - DNA, 273 bp, Neisseria meningitidis; identical to SEQ ID NO: 41867

SEQ ID NO: 51240 - DNA, 213 bp, Neisseria meningitidis
gtgtgcttcagcccgctgcatcaaaaatttttggagaaccggcgggagtcggcggttttggtttcggcggggacggtggaaatgggtaacattgacggaatcgacggaagcggtgggctgaagcccacccttgtatattggaatcactgtatcatagcaacaaaccgcccgaccgccacccgcgcccacccaaggcacacaaccgttgcgtag

SEQ ID NO: 51241 - DNA, 1548 bp, Neisseria meningitidis
atgcagcttaatcctgctgaaattagcgatttgattaaagccaagatcgaaaatctgtctgtaaatgccgaagtgcgtacccgtggtacggtgatttcggtaactgacggtatcgttcgcatccatggtttgtcagatgcaatgcaaggtgagatgctcgaattcccgggtaacactttcggcttggcgatgaacctggagcgcgactccgtcggcgccgtagtgttgggcgagtacgaacatattaaagaaggcgacacggttacttgtaccggtcgtatcttggaagtgccggtcggacgcgaactggtcggacgcgtcgttgatgcattgggtcgtccgattgacggcaaaggcccgattaatacaactttgaccgcccctatcgaaaaaatcgcaccgggcgtgattgcgcgcaaatcggttgaccagccgatgcaaaccggtctgaaggcgattgactctatggttcctgtcggtcgcggtcagcgtgagttgattattggcgaccgtcaaaccggtaaaacggccgtagcattggatgccatcgtcaaccaaaaaggtacgggcgttatctgtatttatgtcgctatcggtcaaaaagcatcttctattgccaacgtggtccgcaaattggaagagcatggcgcgatggaacacacgattgtggttgctgcaactgcatctgaagcggcggcattgcaatatatcgcaccttactccggttgtacgatgggtgaattcttccgcgaccgcggcgaagatgccttgattgtttatgacgatttgtccaaacaggctgtggcttaccgtcaaatttccctgcttttgcgccgtccgcccggccgcgaagcctatcccggcgatgtgttctacctgcactcccgtctgttggaacgtgcagcacgtgtcaatgaacacgaagtggagaaattgaccaacggcgaagtaaaaggcaaaaccggttctctgactgctttgccgattatcgaaacccaagcgggcgacgtatctgctttcgttccgactaacgtcatttcgattaccgacggtcagattttcttggaaaccgacctcttcaacgccggtatccgtcctgcaatcaatgccggtatttccgtatcccgcgtaggcggtgctgcacaaaccaaagtgattaaaaagctgggtggcggtatccgtttggcgttggcgcaatatcgtgaattggcggcgttctcgcaatttgcatccgatttggatgaagctacgcgcaaacaattggagcatggcgaagtcgtaaccgaactgatgaaacagaaacagttcagtacgttgaatacggctgaaatggctttgaccctttgggcaatcaacaacggttcgtattctgatgttccggttgccaaagctctggcttttgaatctgaatttttgagctttgtccgtacccaacatccggaagttttggaagccgtcaatgcttcaggtgcaatgtccgacgagagcgagaaaacgcttgaagcagccatgaaatccttcaaatcttcttacgcctatcaggcataa

SEQ ID NO: 51242 - DNA, 435 bp, Neisseria meningitidis; identical to SEQ ID NO: 45690

SEQ ID NO: 51243 - DNA, 1389 bp, Neisseria meningitidis
atgaatgcagtcgtagttgccgtaatcgttatgctggtgctgtcgctgtcgcgcgtgcacgtggtattgagcctgacggtcggcgcgtttgtcggcggcgcggtggcgggtatgccgctgcaaaacattgccgatgcggcgggacaggtcagtcaggcggggattatccccgtgttcaacaaaggtttggaaggcggtgcgaagattgcgctttcttatgcgatgctcggcgcgtttgcaatggcgattacccattccggcctgccgcagcagcttgccggcgcggtcgtccgcaagctgaaccggggcggtatgcccgacagcgtgcgttcgggcgagggcggggtcaaatggctgctgctttccatcatccttgtgatgggcattatgagtcagaacatcatacctatccacatcgcctttatcccgatgattgttccgccgctgcttttggtgttcaaccgcctgaaaatcgaccgccgtctgattgcgtgcgtcattactttcgggctggttacgacctatatgttcctgccttacggcttcggcgcgatttttttgaacgaaatcctgttgggcaacatccattccgccgcgccgcagcttgatgtgaaaaacatcaacgtaatggcggcaatggcgattcccgcgttgggaatgctgaccggactcctgctggcgtttgtccattaccgcaaaccgcgcctgtaccaaagcaacaatgccgatacggcgggcaacgccgatgcggcaaaccgtccgcagccgtccgcctaccgcagcctggccgccgccgccgccattgccgtatgttttgccatccagttgatgtatgaagactcgctggtgttgggcgcgatgctcggtttcgccgtatttatgatgttgggggtcatcaaccgcgacaaggcaaacgacgtattcggcgaaggtatcaagatgatggcgatggtcggcttcattatgattgccgcgcagggttttgccgccgtgatgaatgcgaccgggcatatccagccgctggtggaaagcagtatggcgatattcggcaacagcaaaggtatggcggcattggcgatgctggtggtggggcttttggtaacgatgggcatcggttcgtccttttccactttgccgattattgccgcgatttatgtgcctttgtgtgtcggtttgggtttttcgccgcttgccaccgtcgccattgtcggcacggcgggggcgttgggcgatgccggttcgcctgcgtccgattccacgctgggcccgacgatggggctgaacgccgacgggcagcacgaccacatccgcgattccgttatcccgaccttcatccactacaatatcccgctgctgattgccggctggattgccgcgatggtgctgtaa

SEQ ID NO: 51244 - DNA, 234 bp, Neisseria meningitidis
atgaaattgaccttgatgtttcgtgaatattgcagcttgtgccacaaaatgcgcgatgcactcaaaccttttcaaaatgaatacggtttcgggctggatgtgcttgatgtggatgatgatcccgtcttggaagagaaatataatgagctggtacctgttttgttggcaggtgataaagagatttgccattggtatttggatgaaaaaaagttgaggcaggttctcgaatcgtaa

SEQ ID NO: 51245 - DNA, 1338 bp, Neisseria meningitidis
atgagtaaccatacttcttggtcgtccaaaatcggtttcgtacttgctgcggcaggttcggccatcggtttgggcgcgatttggaaatttccttatacggcaggcaccaacggcggcgcggtgtttttcctgctgtttttgatatttaccgtcttggtcgccctgcccgtccagcttgccgaattttatatcgggcgcacgggcggtaaaaatgccgtcgattccttcagggttctgcgtccgggcacgcaatggctttgggtcgggcgtatgggcgttgccgcctgctttattttgctgtcgttttacagcgtggtcggcggatgggtattaaattatgtcgtccacagttttacgggggcggttcataccggcgcggactttgaagccttgttcggcgcgacgatttccaatccggcaggttcgctgtcctatcaggctctgtttatgctgattacggtttgggtggtcaaaggcggcatttcagacggcattgaaaaggcaaaccgttatctgatgccggggctgtttatcctctttattgcgctggcaatccgttcgctgacgctgccgggtgcaatggagggcgtgtctttcctgctcaaaccgaattggtcgtactttaaagccgatacgatgattacggctttaggccaggcgttttttgccttgagcatcggcgtttccgctatgattacctatgcttcgtatttgggaaaagatcaggatatgttccgctcggggcatacgattatgtggatgaacctcttggtttcgctgttggcaggtttggtgatttttccggcggtgttcgccttcggttttgaaccgagccaggggccgggattgatttttatcgtattgcccgcagtgtttatgaagatgccgttcggtacggttttgtttgcggtatttatgctgctggtcgttttcgccacgctgacttcggcattttcgatgttggaaacggtcattgcctcaaccatccgccaagacgagcgcaaacgcaaaaaacacacttggcttatcggcacggccattttcattatcggcatcccgtccgcgctgtctttcggcgtatggggcgagtttaaggttttcggcaaaaccatttttgatttgtgggactatgttatttccgccgtcattatgccgattggtgctttgagtgtttccatctttaccgcctggattcaggacaagcagtctgtgttaaaagatgccggcgcgggcagcaccgtaccacgggcagtgctgctgctgtggctgaataccttgcgctacctcgccccgattgccattattatcgttttcgtcaattctttgggcatcctttaa

SEQ ID NO: 51246 - DNA, 666 bp, Neisseria meningitidis
atggattcatggtttgaagatacggcgatggggcggtatgttgcaaaattggaacaggatttcttcgggcggtatctggattcataccgtttttcgggaatgtgtgcggttcaggtgggcggtccgtggctgagcctgtctgaagatgttgtctgtgtgccgcgagatatgtcgatgtcggcggaaaatatggctttggcggatgtttctgcggatatgctgctttttccgcatacgcttgaaggcggtgttccttcgcaaatcctgtccgaggcgcaccggatattgaaaccgtccggacgtttgatgctgacgggtttcaatccgtattcgctctggggattcagccgttggtttgacggcgaacgcctgccggaaaaacgcttctgtctgccgctgcccgagttgaaaaggcggcttgcggatgtcggtttcgatattgaatttgggaaatttatggtgtatctgccgcccgtttcgtcgctcgggcaaatacgcttttggcggtttatggaaaaggcgggcgaccgttggtggccgcagtgtgccgcagtgtacggtttggttttggtcaaaagggcggcgggcgtaacgcccctgcccgcgtgggacgggtatttgggcggcaaagcccttgcggcgggtgcggcaagggttgcggattag

SEQ ID NO: 51247 - DNA, 375 bp, Neisseria meningitidis
atgcagtatctgattgtcaaatacagccatcaaatcttcgttaccatcaccattttggtattcaacatccgtgttttcctactttggaaaaatccagaaaagcccttggtcggcttttggaaggcactgccccaccttaacgacaccatgctgctgtttacgggattgtggctgatgaagattacccatttctccccgttcaacgcgccttggctcggtacaaaaatcctgcttctgctcgcctatatcgcattgggtatgatgatgatgcgcgcccgtccgcgttcgaccaagttctacaccgtttacctgctcgccatgtgttgcgtcgcctgcatcgtttaccttgccaaaaccaaagtcctgcctttctga

SEQ ID NO: 51248 - DNA, 678 bp, Neisseria meningitidis
atgagcatcaagcaatggccggaaggcgaaagacccagggaaaagctgttggaacgcggggcggcggctttgagtgatgccgaacttttggcaatcctgctgcgcgtcggcacgcgcggaatgagtgcggtcgatttggcgcgttatttgctgcaggagttcggcagtttggggaggctgatgagcgcggaggtcggcaaactgtcggcatacaaagggatggggacggcaagtttcacacagtttgccgtagtcagggaaatcgggcggcggatattggcggaagaattgcaggagagcatcgtcctgtccgatccggataccgttgccgattatttacgctttcatttggggcaggaaaaagtcgaagtcagcgtcgcgctgctgctgaaccgccaaaaccaactgattgcggtcagagagctgtcgcgcggtacggttgcggaaaacacgatttacatccgcgaaatcgtcaaactggcattggacgaatatgccgacagcctgattattgcgcacaaccatccgggcggctcgcccgaaccttcgcaggaagacatcatgttcacaaggcggctggcacaggccatgtcgctggtcgatgtgtcgctgctcgaccattttatcgtaacggcgcaaaccgtccgttcgttcaggcagctcgggctgatgccctga

SEQ ID NO: 51249 - DNA, 861 bp, Neisseria meningitidis; identical to SEQ ID NO: 36326

SEQ ID NO: 51250 - DNA, 441 bp, Neisseria meningitidis; identical to SEQ ID NO: 42705

SEQ ID NO: 51251 - DNA, 306 bp, Neisseria meningitidis; identical to SEQ ID NO: 38577

SEQ ID NO: 51252 - DNA, 282 bp, Neisseria meningitidis
atgccgtctgaagcccgatacggcaaactccggcaaaaacagaaacctgaatctcatcattcccacagtcgggaatccggttttttgggtttccgttgtttttccgtttcaatgaacttccaagccgccgttcccgataaatacccgcaatctaaaatcccgtcattcccacgcagatgggaatctaggtctgtccgcacgggaacttatgcgccgtcattcccgcgaaagcggaaatccagaccgttcggcttcagttttttggtttcgggcaacttctga

SEQ ID NO: 51253 - DNA, 1446 bp, Neisseria meningitidis
atgagtacacaaacaaattttgatttggtgttgttcggtgcgaccggcgatttggcgatgcgcaagctgttgccctgtctgtaccaggcgcatgttgccggtctgcttcatcccgaagggcgtattttgggggtcagccgcagcgagttggataccgaaggttttctggcgaaggtggaaaccagttccaaaatccatgtgaaagaaaatttttccgatgaggcttgggcatcgtttgtcgaacgtttcgcatatctcaaagtcgatgttacgcagccggacgattttgccgctttgggcgatttggtcaaagcgcgcaaagaaaccgacaatgtcgtcatctatctttccaccgcgccgaaattcttcgcgcaaacatgtgaaaaccttgccaaaatcggtttgaacgccgacaacgtgcgtgtggttttggaaaaaccgttgggtacggatttggcttcttcccagcaaatcaataccgatgttgcgcgttatttcaaagaagggcaaatttaccgcatcgaccactaccttggcaaagaaagcctgcaaaacctgcttgcgctgcgttttgccaatgtaatgttcgagccgctgtggaacaataaatacatcgaaagcgtgcagttgaccatcgccgagcagttgggcgtggaagagcgcggcgagttttatgacattaccggcgcgttgcgcgatatggtgcaaaaccatttgatgcagatgctgtgcatgactgcgatggaagcccccgccagcttggatgccgacgcggtgcgcgatgaaaaagtcaaagtcatcaagtcattgaagccgctgaccgtcgagtctgtcaatgaaaacgtcgtgcgcggacaatataccgccgccagaggcatgaacggctatcttgaagaaatcaacgttccgcaagacagctttaccgaaacctacgtcgccattaaagccgaaatcgaaaacgaacgctggaagggcgttcccttctacctgcgtaccggcaaacgcatggcgggcaaagtggcggaaatcgttttgaacttcaaagatttgaacagccatatttttgaaggcagccgcaccgcgcccaaccggctcgttatcgagttgcaaccatatgaatccgtgcgcctctatacgcagatgaaaaccccgggggcaggaaataaggtcgaaaccgtgccgctggcaaccgatttgggcaaagcattggaaagccgccgcgcggaagcttacgagcgcctgctgctggatgtgattaacggcaaactcgctttgtttaaccgccgcgacgaactcgaagccgcgtgggaatatgtgatgccgattttggaaaactggacaaataacaccacgccgccgcacggctacggcgcacactcgtgggggcctgaagccgcgcgcgaactattggcgcgcgacggacacaagtggcacgaagagcagtaa

SEQ ID NO: 51254 - DNA, 450 bp, Neisseria meningitidis; identical to SEQ ID NO: 36806

SEQ ID NO: 51255 - DNA, 1311 bp, Neisseria meningitidis
atgaccgatttgtttgcccgagaacccgacgcgccgcttgccgaacgattgcgtccgcatacgcttgacgacgtggtggggcaggaacacctcatcggcgaaggtaaacctttgcgcgtggcggtagaaggcggcaagccgcattctatgttgctgtgggggccgccgggcgtgggcaagacgacgttggcgcggattttggcgcagagtttcaacgcccagtttttgcctgtttccgccgtattttccggcgtgaaggacatccgcgaggcaatcgataaagccgaaatcgctttgcagcagggacgcgcgacgattttgtttgtcgatgaagtccaccgcttcaacaaggcgcagcaggacgcgtttttgccgcatgtcgaaagcggtttgctaacctttattggtgcgacgacggaaaatccgtcgtttgaagtcaatcccgcgctgttgagccgcgcgcaggtgtatgttttgcaacccttgtcttcagacgacctgaaaaagctgattgccaaggtattggctttgcctgaataccaagagtttacgattgaaacggatgcgcaaaaattactcgtgaataccgccgacggtgatgcgcgcagattgttgaatttgttggaacaacttttacgcgccgccgatacacgtcgtctgaaaaacttaaccgccgaatttctcgccgacagtctcggggcgcaaatccgccgtttcgacaaaggcggcgagagtttctacaaccaaatctccgccctgcacaaatccgtgcgcggttcgcatccgaacgccgcgctgtattggttctgccgtatgctcgacggcggcaccgacccgcgctacctcgcccgccgcatcgtgcgtatcgcttgggaagacatcgggcttgccgacccgcgcgccttccaaatcgccaacgatgccgccgccaccttcgaacgcttaggctcgcccgaaggcgaactggctttggctcaagccgtgctgtaccttgctgccgccgccaaatccaacgcgggctacaaggcatacaaccaaatgcgccacttcgtcaaagaaaacgccagcgacgaagtgcccgtccacctgcgcaacgccccgaccaagctgatgaaggaattgggctacggacgcgaataccgctacgcccacgacgaaccgaacgcctacgccgccggcgaaagctatatgcccgacggcttggacgaaccggacttctaccaacccgtcccgcgcgggttggaaatcaaaatcggcgaaaagctggaatggttgaaatcgctggacgaagaagtattaaaggcaaaatga

SEQ ID NO: 51256 - DNA, 360 bp, Neisseria meningitidis
atggcatcatatgtttccataaaaggatggattgaatgctctgacgatgatataaaaatcatccaagaaaatatcaataatttttggaataattgtcccttcaatatcgaagagaaagaatctgcaaaaatatataaaagcgggtggattttcccgacaaatagttttaattggagcagctatattttttttggtgcatgcgtaaaatcttatttcattatttattttgaaaaatgtattaaaacaataatggaattggatattgaaatatcaggtttttttgaattagattattatgaagatagttataaagtaaattggaaaataaataatggcaatttaatacaaacgactaattaa

SEQ ID NO: 51257 - DNA, 621 bp, Neisseria meningitidis
atgaaaccgcaattcatcactttggacggcatagacggtgccggcaaatccaccaaccttgccgtcatcaaggcatggtttgaacggagggggctgcccgtgctgttcacgcgcgaaccgggcggaacgccggtcggtgaggccttgcgcgaaatcctgctcaaccctgaaaccaaagccggtttgcgtgcggaaacactgatgatgttcgccgccagaatgcagcatattgaagacgtgatattgcctgcactttcagacggcatccatgtcgtgtccgaccgttttaccgatgcgaccttcgcctatcagggcggcgggcggggaatgccgtctgaagacattgaaattttggaacattgggtgcagggcggtttgcgccccgatttgaccctgctgttggatgtgccgctggaagtgtcgatggcgcgtatcgggcagacgcgcgagaaagaccggttcgagcaggaacaggcagatttcttcatgcgtgtgcgcagcgtttatctcgaccgagccgccgcctgtccggaacgttacgccgttatcgacagtaacctcggcttggatgaagtcagaaacagcatagaaaaagtgttggacagacatttcggctgttga

SEQ ID NO: 51258 - DNA, 606 bp, Neisseria meningitidis
atgattttgctgcatttggattttttgtctgccttactgtatgcggcggtttttctgtttctgatattccgcgcaggaatgttgcaatggttttgggcgagtattgcgctgtggctcggcatatcggttttgggggcaaagctgatgcccggcatatggggaatgacccgcgccgcgcccttgttcatcccccatttttacctgactttgggcagcatattttttttcatcgggcattggaaccggaaaacggatggaaacggatggcaggcagaccccgaacatcctctgctcgggctgtttgccgtcagtaatgtatcgatgacgcttgcttttgtcggaatatgtgcgttggtgcattattgcttttcgggaacggttcaagtgtttgtgtttgcggcactgctcaaactttatgcgctgaagccggtttattggttcgtgttgcagtttgtgctgatggcggttgcctatgtccaccgctgcggtatagaccggcagccgccgtcaacgttcggcggctcgcagctgcgactcggcgggttgacagcagcgttgatgcaggtctcggtactggtgctgctgctttcagaaattggaagataa

SEQ ID NO: 51259 - DNA, 1788 bp, Neisseria meningitidis; identical to SEQ ID NO: 42681

SEQ ID NO: 51260 - DNA, 660 bp, Neisseria meningitidis
ttgtgtgcgtcctgtttgaatgttaacaaaatcgttataatcgcaacattctaccgcaatcctgaaaggccgtctgaaatgaggaatgaggaaaaacgcgccctgcgccgcgaattgcgcgggcggcgttcgcaaatggggcgggacgtgcgggcggcggcaacggtaaaaatcaaccgcctgctcaaacgttatattaaaaaagggcggaaaatcggcgtgtattggccgatgggcaaggaattgcgtttggacggctttgtccgtgtcgcacaaaaacgcggcgcaaaactttatctgccttatatcgaaccgcgttcgcggcggatgtggtttacgccgtatcctgaaagcggaatggaacgggagcgcatacggggcagggcgaagttgaacgtgccgcagtttgcagggcggaaaaggcgtgtgcatgatttgaacctcttgcttgtgccagtggtcggtatggacaggctgggctaccgtttgggacaggcaggcggctattacgatgcgacgcttgcggcgatgaaataccgtttgcaggcaaaaaccgtgggcgtgggctttgcctgccagttggtggacagactgtcggtcgaggcgcacgacctgccgctggacggttttgtgtcggaggcggggatattgtgtttttag

SEQ ID NO: 51261 - DNA, 996 bp, Neisseria meningitidis
atgttgagaaaattgttgaaatggtctgccgtttttttgaccgtatcggcagccgttttcgccgcgctgcttttcgtccctaaagacaacggcagggcatacaggattaaaattgccaaaaaccagggtatttcgtcggtcggcaggaaacttgccgaagaccgcatcgtgttcagcaggcatgttttgacggcggcggcctacgttttgggtgtgcacaacaggctgcatacggggacgtacagactgccttcggaagtgtctgcttgggatatcttgcagaaaatgcgcggcggcaggccggattccgttaccgtgcagattatcgaaggttcgcgtttttcgcatatgaggaaagtcatcgacgcaacgcccgacatcgaacacgacaccaaaggctggagcaatgaaaaactgatggcggaagttgcccctgatgccttcagcggcaatcctgaagggcagtttttccccgacagctacgaaatcgatgcgggcggcagcgatttacggatttaccaaatcgcctacaaggcgatgcaacgccgactgaatgaggcatgggaaagcaggcaggacgggctgccttataaaaacccttatgaaatgctgattatggcgagcctgatcgaaaaggaaacagggcatgaagccgaccgcgaccatgtcgcttccgtcttcgtcaaccgcctgaaaatcggtatgcgtctgcaaaccgacccgtccgtgatttacggcatgggtgcggcatacaagggcaaaatccgtaaagccgacctgcgccgcgacacgccgtacaacacctacacgcgcggcggtctgccgccaaccccgatcgcgctgcccggcaaggcggcactcgatgccgccgcccatccgtccggtgaaaaatacctgtatttcgtgtccaaaatggacggtacgggcttgagccagttcagccatgatttgaccgaacacaacgccgccgttcgcaaatatattttgaaaaaataa

SEQ ID NO: 51262 - DNA, 834 bp, Neisseria meningitidis; identical to SEQ ID NO: 43709

SEQ ID NO: 51263 - DNA, 1065 bp, Neisseria meningitidis
atggaaaaagaattcaggatattaaatatcgtatcggccaagatttggggtgggggcgaacaatatgtctatgatgtttcaaaagcattggggcttcggggctgcacaatgtttaccgccgtcaataaaaataatgagttgatgcacagacgcttttccgaagtttcttccgttttcacgacacgccttcacacgctcaacgggctgttttcgctctgcgcgcttacccgctttatccgggaaaaccgcatttcccacctgatgatacacaccggcaaaattgccgccttatccatacttttgaaaaaactgaccggggtgcgcctgatatttgtcaaacataatgtcgtcgccaacaaaaccgatttttaccaccgcctgatacagaaaaacacagaccgctttatttgcgtttcccgtctggtttacgatgtgcaaaccgccgacaatccctttaaagaaaaataccggattgttcataacggtatcgataccggccgtttccctccctctcaagaaaaacccgacagccgtttttttaccgtcgcctacgccggcaggatcagtccggaaaaaggattggaaaacctgattgaagcctgtgtgatactgcatcggaaatatcctcaaatcaggctcaaattggcaggggacggacatccggattatatgtgccgcctgaagcgggacgtatctgcttcaggagcagaaccatttgtttcttttgaagggtttaccgaaaaacttgcttcgttttaccgccaaagcgatgtcgtggttttgcccagcctcgtcccggaggcattcggtttgtcattatgcgaggcgatgtactgccgaacggcggtgatttccaatactttgggggcgcaaaaggaaattgtcgaacatcatcaatcggggattctgctggataggcttacgcctgaatctttggcggacgaaatcgaacgcctcgtcttaaaccccgaagcaaaaaacgcactggcaacggcagctcatcaatgcgtcgccgcccgttttaccatcaaccataccgccgacaaattattggatgcaatataa

SEQ ID NO: 51264 - DNA, 237 bp, Neisseria meningitidis; identical to SEQ ID NO: 42409

SEQ ID NO: 51265 - DNA, 1722 bp, Neisseria meningitidis
atgccgtctgaagccatctgttcaaagaaaactatgctcaataaagaccaatttgcggacaaccattttatccgcaccatcatcgaagacgacctcaaaagcggcaaacacgaagccgtccaaacccgttttccgccggagcccaacggctacctgcacatcggacacgccaaatccatctgcctgaacttcggtttggcgtatatttacgacggcttgtgcaacctgcgttttgacgataccaaccccgaaaaagaaaacgacgaatacgtcaacgccatcaaagaagatgtcgagtggctcggtttccattgggcgggcgagccgcgtttcgcttccaactatttcgaccagctttatgactacgccgtcggtttgattaaagacggcaaagcgtatgtcgatgatttgacgcccgaagaaatgcgcgaataccgcggtacgctgaccgaagcaggcaaaaacagcccttatcgcgaccgcagtatcgaagaaaacctcgacctgttcacgcgcatgaaaaacggtgagttccccgacggcagcaaaaccctgcgcctgaaaatcgacatggcatccggcaacatcaatatgcgcgatccggtcatctaccgcatccgccgcgcccatcaccacaacaccggcgacaaatggtgtatctacccgatgtacgactacacgcattgcatttccgatgccatcgaaggcatcacgcattccttgtgtacgcttgagtttgaagcccaccgcccgctttatgactgggtgttggacaacatccctgcgccgcacgccacacgtccgcgccaatacgagttttcccgtttggagcttttgtacaccattacctccaaacggaaattgaatcagttggttgtggaaaaacacgtttccggctgggacgatccgcgtatgccgaccatttccggtatgcgccgtcgcggttacacgcccgaaggcctgcgcctgtttgtcaaacgcgctggtatttccaaatctgaaaacatcgtcgatatgagcgtgttggaaggcgcgattcgcgaagagttggaaaattccgccccacgcctgatggcggttttgaacccgctcaaagtgaccctgaccaactttgaagccggcagaacccaaaaccgccgtgccgcgttccatccgaaccacgaagaaatgggcgatcgcgaagtacctgtttcacaaaccatttacatcgaagccgacgactttgccgaaaatccgcccaaaggcttcaaacgcctgactccgggcggcgaagtacgcctgcgccacggctatgtcatcaagtgcgatgaagtcgtcaaagacgaggcaggcaatgtggtcgaactcaaatgcagcatcgaccacgataccttgggcaaaaatcccgaaggccgtaaagttaaaggcgtgattcattgggtgtctgccgaacacgcagccgaaatcaaagtccgtctgtacgaccgcctctttaccgtcgagcgtcccgatgccgtgcgcggcgaagacggcgaatacctgccgttcaccgatttcctcaatccggaatccgtcaaggaaatcaccgcctacgccgaacctgccgcgaaagatttgccggcagaaagccgttggcagttcgagcgtatcggctacttcgtaaccgaccgtaaagaccacggcaaagacacgccggtgtttaaccgcacggtcacgctgaaagattcttggcagcctaagtaa

SEQ ID NO: 51266 - DNA, 174 bp, Neisseria meningitidis; identical to SEQ ID NO: 42248

SEQ ID NO: 51267 - DNA, 1287 bp, Neisseria meningitidis
atgacggcacaacaccaggccccgctccgcttcattaccgccggcagcgtcgatgacggcaaaagcaccctaatcggacgactgctctacgacagcaaagccctgctgtccgaccaaatcaaaaccttggaatccggcaaaagcaaaggtttgaaagaaaccatagacttctccgtcctgaccgacggactggaagccgaacgcgaacagggcattacgatcgatgtggcataccgctatttttccacggcgaaacggaaattcatcatcgccgacacgccggggcacgaacaatacacgcgcaatatggttacgggcgcaagcaccgcttcggcggcagtcgtgctggttgacgcatcccaactggatttcggcgcgcagcccttgcagcttctgccgcagaccaaacgccattccgccatcctccgccaactcaactgcccgcatattgtggtggcggtcaacaaaatggacctgctggattacagcgaagacaaattcaacgccattgtggaggcataccgccgacttgccgaacagctcggtttgaaagacgcgcatttcgtaccggtgtccgcactcttgggcgacaacattgtttaccccggcggcaatatgccttggtataaaggcgaacccttattgtccattttggaaaccctgccgggggcggacgaagtcagccgcaccgccgacgatttttatttccccgtgcaactggtcgtccgccaagatgccgacaaggccgatgatttccgaggctatcaggggcgcatcgaacgcggttcggtcgccgtcgggcaaaccgtccgcatcgaaccgaacgggctgaccgccgaagtgtccgaaatcatcacgccgaaaggggaagtggcgcaggcttttgccggcgaggcggcaaccctccggctggatcgcgacatcgatgtttcgcgcggcgacctttttgtcgataaaaattccccgctcgccccgcaaaaacatctggaagccacgctttgctggtttgacgaacgtccgctcaacaccgcgcgcaaatacctgctcaagcacggcacgcaaaccgtgccggcaaaagtcggggaaattgaaagcgttttggatgtccgcacgctggaacaagaggccggcgcggaatccttgaagatgaacgacatcgccaaagtccgcatcaaccttcaaaaacccgttacggcaacgccttatgcggaaaacaccgccgccggttcgtttatcctgatagacgaagcgacatacggcactgttgcggcaggtatgattttatga

SEQ ID NO: 51268 - DNA, 975 bp, Neisseria meningitidis
atgccgtctgaaaaaaatatcggttttatggcaggaagcagccgtccgttgtgggttgcctttgcgctgttgctggtttcctgcatcctgtttatgacgctcaacgtcaaaggcgattgggactttgtactgcacctgcgtctgaccaaacttgccgcgctgctgatggtcgcctatgcggtcggcgtgtccacgcaactcttccaaacgctgaccaacaatccgattctgaccccttcgattttgggtttcgattcgctgtatgtgtttttgcagaccttgctggtgtttacgctcggcggcgtgggctatgcttccctgccgttgacgggcaaattcggctttgaactggtcgttatgatgggcggctcgctgctgttgttctacacgctcatccgtcagggcgggcgcgatttgccgcgtatgattttaatcggcgtgattttcgggattttgttccgcagcctgtcgtcgctgctttcgcgcatgatcgatcccgaagaatttaccgccgcgcaggcgaatatgtttgccagtttcaataccgtccacaacgaactgttggggataggcgcgctgattctgctcatcagcgcggcggcggtttggcgcgaacgctaccgcttggacgtacaccttttggggcgcgaccaagccgtcaatttgggcatcagctacacgcgcaacaccttatggatactgctttggattgccgcgctggtggcgacggcgaccgccgtggtcggcccggtgagctttttcgggcttctcaccgcctcgcttgccaaccacttttccccgtccgtgcgccattccgtccgcctgccgatgacggtttgtgtcggcggtatcctcctggtcggcggacaaaccgtattcgaacacttcttgggcatgaaggcggtattaagcgtggtggtcgaatttgcgggcggactcgttttcctctatctcgttttaaaacacaaaaaatga

SEQ ID NO: 51269 - DNA, 381 bp, Neisseria meningitidis
atgaaacagacagtcaaatggcttgccgccgccctgattgccttgggcttgaaccaagcggtgtgggcggatgacgtatcggattttcgggaaaacttgcaggcggcagcacagggaaatgcagcagcccaatacaatttgggcgcaatgtattacaaagggcacggcgtgcgccgggatgatgctgaagcggtcagatggtatcggcaggcggcggaacaggggttagcccaagcccaaaacaatttgggcgtgatgtatgccgaaagacgcggcgtgcgccaagaccgcgcccttgcacaagaatggcttggcaaggcttgtcaaaacggaaaccaagacggctgcgacaatgaccaacgcctgaaggcgggttattaa

SEQ ID NO: 51270 - DNA, 252 bp, Neisseria meningitidis
atgaagacattagaaaaacggatgaaagctctagacaaacggatgatgaagttcggaaaatcccttgaaggcaggcttgatgcccgtctgattgaatccgcattggattatattcattattcggaacgttttttggcttttgaaatcctgtgtacttatatcgaagatttcgatgtccggctgacggaacaagaatcccgggaaatttcttttatcaacaaggaatttgagatagaaagcacgtccgattaa

SEQ ID NO: 51271 - DNA, 666 bp, Neisseria meningitidis
atgacgtttaccgcagtcctcttcgatctcgacggtgtcatcaccgacaccgccgaataccactaccgcgcgtggaaaaaactcgccgaagaactgggcatcggcatcgaccgcaagtttaacgagcagctcaaaggcgtgtcgcgcgacgattcgctcaaacgcatcctcgcgcacggcggtaaaaccgtcggcgaagccgagttcgccgaactgacccgccgtaaaaacgacaactacgtcgagatgattcaggcagtcaaacccgaagacgtgtatcccggcattttgcccctgctggaaacattgaaagcaaacggcaaaaaaatcgccctcgcgtccgccagtaaaaacggcccgttcctgctcgaacgcatggggctgacccacttcttcgacaccgtcgccgaccctgccgccgtcgcgcattccaaacccgcccccgacatcttcctcgccgccgccgagggcgtgggcgcggacatccgccgctgcatcggcattgaagacgctgccgcaggtgtcgccgccatcaaagcctccggcgccttacccatcggtgtgggcaaagccgaagacttgggtagcgacatcccgctggtgcccggcaccgccgagctgacctacgcctacctgcaaaacgtgtgggcacagtcgggcaggtaa

SEQ ID NO: 51272 - DNA, 1260 bp, Neisseria meningitidis
atgcacgtctccgaattacaaaccctgcacatttccaaactcttagaattggcggaagaacacggcatcgaaaacgccaaccgattccgcaaacaagacctcgtatttgccatcgtccgccagatgatgaaaaaaggcgagggttttacctgctccggcacgcttgaaatcctgcccgacggcttcggcttcctccgcagcgcggacacgtcctatcttgccggccccgacgacatctatgtctcgcccacccaaatccgccgcttcaacctgcatacgggcgacaccatcgaaggaagcgtgcgcgtcccaaaagacaacgaacgctattttgccctggtcaggcttgataccatcaacggcgaccacccggaagtatgccgccataaaatcctgtttgaaaacctgaccccgctgtttccgaccgaacagttgaagctggaacgcgacttaaagtccgaagaaaacctgaccggacgtgccatcgacctgatttcccctatcggcaaaggtcagcgcgccctcttggttgccccgcccaaaagcggtaaaaccgtgatgctgcaaaacattgcccacgccgttacctcaaactatcccgaagtcgaactcatcgtcctcttgattgacgagcgtcccgaagaagtaaccgaaatgagccgttccgtccgcggcgaagtggtttcctccacctttgacgaaccggcgcaacgccacgtccaagttgccgaaatggtgcttgaaaaagccaagcgtatggtagaacacaaaaaagacgtggtcatcctgctggattcgattacccgccttgcccgcgcctacaataccgtcgtgcctacctcgggcaaaatcctaaccggcggtgtcgatgccaacgcactgcaccgccccaaacgtttcttcggcgcggcgcgcaacgtggaagaaggcggttcgctgaccatcatcgccaccgcattggttgaaaccggcagccgtatggacgatgtgatttacgaagaattcaaaggcaccggcaatatggaattgcaccttgaccgccgtatggcggaaaaacgcctcttccccgccatcaacatcaacaaatccggcacgcgccgcgaagagctgcttgtgccgaacgaccagttgcaacgtatgtggctcttacgcaagttcctgcacccgatggacgaaatcgaggcagccgaatttttaatcgggaaaatcaaagcctctaaaaacaatgatgatttctttgaactgatgcgcggcaaataa

SEQ ID NO: 51273 - DNA, 291 bp, Neisseria meningitidis; identical to SEQ ID NO: 42317

SEQ ID NO: 51274 - DNA, 441 bp, Neisseria meningitidis
gtgaacatccgccgcgccgtttatgccgattgcgcggcactcgccgcactcgatgccgtctgcaacccgtccgcgtggacgcaacaccaatttgagtccgcattggtttcgccgtccgaacaggttttccttgcggaaaaagacggcaggttggccgcctttatcgtttggcagaacctgcccgacgaatccgaactgcacctgattgccaccgcgcccgaatgccgccgccaaggaattgcgtccgccctgctcgaatattggtacgcacacctgcccgaaggcacgcaacgcctgctgctcgaagtccgcgcaggcaacaccgccgcacaggcactgtacgcggcgcacggctttaccgatgcgggcaggcggaaaaactattaccgtacagccgacggtaaaaccgaagatgctgtcttgatggagaaaatatgttaa

SEQ ID NO: 51275 - DNA, 2514 bp, Neisseria meningitidis
ttgaaaaacaacagacaaatcaaactgattgccgcctccgtcgcagttgccgcatcctttcaggcacatgctggactgggcggactgaatatccagtccaaccttgacgaacccttttccggcagcattaccgtaaccggcgaagaagccaaagccctgctaggcggcggcagcgttaccgtttccgaaaaaggcctgaccgccaaagtccacaagttgggcgacaaagccgtcattgccgtttcttccgaacaggcagtccgcgatcccgtcctggtgttccgcatcggcgcaggcgcacaggtacgcgaatacaccgccatcctcgatcctgtcggctactcgcccaaaaccaaatctgcactttcagacggcaagacacaccgcaaaaccgctccgacagcagagtcccaagaaaatcaaaacgccaaagccctccgcaaaaccgataaaaaagacagcgcgaacgcagccgtcaaaccggcatacaacggcaaaacccataccgtccgcaaaggcgaaacggtcaaacagattgccgccgccatccgcccgaaacacctgacgctcgaacaggttgccgatgcgctgctgaaggcaaacccaaatgtttccgcacacggcagactgcgtgcgggcagcgtgcttcacattccgaatctgaacaggatcaaagcggaacaacccaaaccgcaaacggcgaaacccaaagccgaaaccgcatccatgccgtccgaaccgtccaaacaggcaacggtagagaaaccggttgaaaaacctgaagcaaaagttgccgcgcccgaagcaaaagcggaaaaaccggccgttcgacccgaacctgtacccgctgcaaatactgccgcatcggaaaccgctgccgaatccgccccccaagaagccgccgcttctgccatcgacacgccgaccgacgaaaccggtaacgccgtttccgaacctgtcgaacaggtttctgccgaagaagaaaccgaaagcggactgttcggcggttcgtacaccttgctgcttgccggcggaggcgcggcattgatcgccctgctgctgcttttgcgccttgcccaatccaaacgcgcgcgccgtaccgaagaatccgtccctgaggaagagcctggccttgacgacgcggcagacgacggcatagaaatcacctttgccgaagtcgaaactccggcaacgcccgaacccgctccgaaaaacgatgtaaacgacacacttgccttagatggggaatctgaagaagagttatcggcaaaacaaacgttcgatgtcgaaaccgatacgccttccaaccgcatcgacttggatttcgacagcctggcagccgcgcaaaacggcattttatccggcgcacttacgcaggatgaagaaacccaaaaacgcgcggatgccgattggaacgccatcgaatccacagacagcgtgtacgagcccgagaccttcaacccgtacaaccctgtcgaaatcgtcatcgacacgcccgaaccggaatctgtcgcccaaactgccgaaaacaaaccggaaaccgtcgataccgatttctccgacaacctgccctcaaacaaccatatcggcacagaagaaacagcttccgcaaaacctgcctcaccctccggactggcaggcttcctgaaggcttcctcgcccgaaaccatcttggaaaaaacagttgccgaagtccaaacaccggaagagttgcacgatttcctgaaagtgtacgaaaccgatgccgtcgcggaaactgcgcctgaaacgcccgatttcaacgccgccgcagacgatttgtccgcattgcttcaacctgccgaagcaccgtccgttgaggaaaatataacggaaaccgttgccgaaacacccgacttcaacgccaccgcagacgatttgtccgcattacttcaaccttctgaagtacctgccgttgaggaaaatgcagcggaaaccgttgccgatgatttgtccgcactgttgcaacctgctgaagcaccggccgttgaggaaaatgtaacggaaaccgttgccgaaacacccgatttcaacgccaccgcagacgatttgtccgcattacttcaaccttctgaagcacctgccgttgaggaaaatgcagcggaaaccgttgccgatgatttgtccgcactgttgcaacctgctgaagcaccggccgttgaggaaaatgcagcggaaatcactttggaaacgcctgattccaacacctctgaggcagacgctttgcccgacttcctgaaagacggcgaggaggaaacggtagattggagcatctacctctcggaagaaaatatcccaaataatgcagataccagtttcccttcggaatctgtaggttctgacgcgccttccgaagcgaaatacgaccttgccgaaatgtatctcgaaatcggcgaccgcgatgccgctgccgagacagtgcagaaattgctggaagaagcggaaggcgacgtactcaaacgtgcccaagcattggcgcaggaattgggtatttga

SEQ ID NO: 51276 - DNA, 1257 bp, Neisseria meningitidis
gtggccaataaattaagaaactacaccatcaacttcggcccgcaacaccctgcggcgcacggcgtattgcgtatgattttggagttggagggcgaaaccatcgtccgtgccgatccgcatatcggcctcctgcaccgcggtactgaaaaactggctgaaaccaaaacctatctgcaagccctgccctatatggaccgcttggactacgtttccatgatggtcaatgagcaggcgtattgtttggcagtagaaaaacttgccggtatcgatgtacctatccgcgcccagtatatccgtgtgatgtttgccgaagtaacgcgcatcctcaatcacttgatgggcatcggttcgcatgccttcgacatcggcgcgatgaccgccatcctctacgccttccgcgaccgcgaagagctgatggacttgtacgaagccgtttccggcgcgcgtatgcacgcagcctacttccgtcccggcggcgtttaccgcgacctgcccgacttcatgcctaaatacgagagcagcaaattccgcaatgccaaagtattgaagcagctcaacgaatcccgcgaaggcaccatgctcgactttatcgatgccttctgcgaacgcttccccaaaaatatcgacacactcgaaaccctcctgaccgacaaccgcatctggaaacagcgtaccgtcggcatcggcgtcgtctcccccgagcgtgccatgcaaaaaggctttaccggcgtgatgttgcgcggttcgggcgtggaatgggacgtgcgtaagacacagccttacgaagtgtacgacaaaatggatttcgacatccctgtcggcgtgaacggcgactgctacgaccgctacctctgccgtatggaagaaatgcgtcaatccgtacgcatcatcaaacaatgttccgagtggttgcgtgtcaatccgggtccggtcattaccacaaaccacaaattcgctccgcccaaacgtaccgaaatgaaaacaggtatggaagacctgattcaccatttcaaactctttaccgagggtatgcacgttcccgagggtgagacctacaccgctgtcgaacatccgaaaggcgagttcggcgtttacatcatttcagacggcgcaaataaaccctaccgcctgaaaatccgcgcacccggcttcgcccacctgcaaggcatggacgaaatggcaaaaggccacatgctggccgacgtcgttgccatcatcggtacgcaggacatcgtattcggggaggttgaccgataa

SEQ ID NO: 51277 - DNA, 936 bp, Neisseria meningitidis
atgagtgtattgattattgtcgaacacgacaacaaacagttgaatcctaccactttgcatgctgttaccgctgccgccaaactgggcaaagtcgatttattggttgccggaaacggcgcatctgctgtagtggaattcgcgaagcaagtagcgggggtgaaaaaagttttggttgcagatgctgctcattatgccgaaggtttggctgaagagttggctccgctggttgttaaattggcggccgattaccgctatgttgcagcaacggcaaccacattcggtaaaaaccttttgccccgcgtagcagccttattagacgtaccgcaaatttctgatttgaccgaaattgtggataacacgacttttgtgcgccccatttatgcgggtaatgcatttgaaaccgtgcaagttgattcggaaaaattggtgctgaccttccgtgcgacggcttttgatgcagctcctgtacaaggtggtcatgccgaggcagttaatgttgaagcaacccctgcccaaaacctgagtcgttttgttaaccgtcagctttcccattccgatcgtcccgaactgactcaggcaaaagtgattgtttccggtggtcgtgcgttgggtagtgcggaaaaatttaatgaagtgctgacaccgttggcggatgttttgggtgcggcaatcggtgcatcccgtgcagcagttgatgccgaatatgcgccaaacgatgctcaagtcggacaaaccggtaaagtggttgcgccgcaactctattttgcaatcggtatttcaggtgcgattcaacacgttgccggtatgcaagacagtaaggtaattgttgcaatcaataaagatgctgatgcgccgattttcaatgtagccgattacggattggttggcgatttatttgaaatcgttccacaattaacagaagcattgaaaaattga

SEQ ID NO: 51278 - DNA, 1428 bp, Neisseria meningitidis
atgatacacaccgaaccgagcgcgcagccgtcaaccatggacacggctgcttttttaaagcacatcgaatccgcattccgccgcattttttcggacggcatcaacctcatgcaatacctgcccgaagacaaatggcttgccttgaagcaggcgggtttgctgttgcccttcctcgacaaaaaatacggcgggcgcaagggcagccagtttgaaattcaggaagtcttgcggattgcggggcattacggcgtgcccgttacgctgcgtaccggcatcgaaggcgcgctggtgttgcagccactgcaagagttcggcgatgaagcgcaaatcgcacagggtttggacatggttttcaaaggcgagggcggcggtttaggcgttaccgaacccgaaacctccggcgcggcgattgcccgagaaatgcagtcttactacgaatataccgacggacaaaccatttacgtcaacgccgcgaaatactggcagggcaactcgcaaagcgacttcctcctcgttgccgccaaagagcgcaaaaacggcaaactcgccaaagtcatcgacctgctgctcgtccccaaaacatacatccgctgcgaaaccctcgcatccgaaggcttgcgcgccgtccgttacgccgtcaaccgcatcgatgccgaaatgcctgcaaccgccgtgatgaaactctcccagagcgacgctgccggtttgcgcgcgttccaaaacatctttatccgcagccgcctgcaactgatcggcatgacgcacggcattatggaatacacccttgaaaacctggaacgatacgtccgcaacgacatcagattcgtcgattacgaacgccgcgaaatccggcgccgccatcaggtttccgagattctttaccgctacgtctgccattccgtttcgcccgttgcacccgtcgcccatcaactgatggaggcgaacatcgtcaaaaccctcgccacggaatacacttacgccgccgcgcaaatgttgcaaaaactcttgggcgcgaagggttttgaacgcggacacaccgccggcaatatcgctatcgacatccgccccttcacgatttttgaaggcccgaacgatatgctttatgccgaaatttacgaccagtttgtccgcgccaccgccgaagaaaaagaagcaggcatgaagttggacaaaaaccaaaccctgctcgaccgcctgcaaaccgatgcccgctttgccgccgtcgcccgcgactacactttgcccgaagacatccgcagcttcctgcaggaacacaccctgaccgatgcctgcgccctgcaaaaagtctttatcggcaaaatcatcgcccgactctttgtcttcgtacaggcggaacacgaagacaccgcagccttcctgctgaacgacatccgcaaagacatattggactgccgatattgcggatag

SEQ ID NO: 51279 - DNA, 453 bp, Neisseria meningitidis; identical to SEQ ID NO: 42252

SEQ ID NO: 51280 - DNA, 1743 bp, Neisseria meningitidis
ttggcgttcaaaaaggttgttacaggcatctttcaaagccttatacgccgtattacggttggtatggaaattattaacgatgcagaacttatccgttccatgcagcgtcagcagcacatagatgctgaattgttaactgatgcaaatgtccgtttcgagcaaccattggagaagaacaattatgtcctgagtgaagatgaaacaccgtgtactcgggtaaattacattagtttagatgataagacggcgcgcaaattttcttttcttccttctgtgctcatgaaagaaacagcttttaaaactgggatgtgtttaggttccaataatttgagcaggctacaaaaagccgcgcaacagatactgattgtgcgtggctacctcacttcccaagctattatccaaccacagaatatggattcgggaattctgaaattacgggtatcagcaggcgaaataggggatatccgctatgaagaaaaacgggatgggaagtctgccgaaggcagtattagtgcattcaataacaaatttcccttatataggaacaaaattctcaatcttcgcgatgtagagcagggcttggaaaacctgcgtcgtttgtcgagtgttaaaacagatattcagattataccgtccgaagaagaaggcaaaagcgatttacagatcaaatggcagcagaataaacccatacggttcagtatcggtatagatgatgcgggcggcaaaacgaccggcaaatatcaaggaaatgtcgctttatcgttcgataaccctttgggcttaagcgatttgttttatgtttcatatggacgcggtttggtgcacaaaacggacttgactgatgccaccggtacggaaactgaaagcggatccagaagttacagcgtgcattattcggtgcccgtaaaaaaatggctgttttcttttaatcacaatggacatcgttaccacgaagcaaccgaaggctattccgtcaattacgattacaacggcaaacaatatcagagcagcctggccgccgagcgcatgctttggcgtaacagacttcataaaacttcagtcggaatgaaattatggacacgccaaacctataaatacatcgacgatgccgaaatcgaagtgcaacgccgccgctctgcaggctgggaagccgaattgcgccaccgtgcttacctcaaccgttggcagcttgacggcaagttgtcttacaaacgcgggaccggcatgcgccaaagtatgcctgcaccggaagaaaacggcggcgatattcttccaggtacatctcgtatgaaaatcattactgccggtttggacgcagccgccccatttattttaggcaaacagcagtttttctacgcaaccgccattcaagctcaatggaacaaaacgccgttggttgcccaagataaattgtcaatcggcagccgctacaccgttcgcggatttgatggggagcagagtcttttcggagagcgaggtttctactggcagaatactttaacttggtattttcatccgaaccatcagttctatctcggtgcggactatggccgcgtatctggcgaaagtgcacaatatgtatcgggcaagcagctgatgggtgcagtggtcggcttcagaggagggcataaagtaggcggtatgtttgcttatgatctgtttgccggcaagccgcttcataaacccaaaggctttcagacgaccaacaccgtttacggcttcaacttgaattacagtttctaa

SEQ ID NO: 51281 - DNA, 348 bp, Neisseria meningitidis
atggacaaagagctaaaccccggcaccggcgactataccggccgcaccgtcgatacgctgcaaaatgccgtgtatatccgtttgatgacaccgttgggcagctggtgggcggataaaacgctcggctcgctgctgcatttgttgcagcgcgaaaaagacctgcaacgggtcagcctgttggccgagcaatatgccgatgaggcactgcaaccgattgttaagagcgggcgtgccgacaagattaccgtgcgcgcagagcagccgcacgacggccgcctgatcctgcatatccgggtggatacggcggcgggcgggtttgattaccgccacgaagtgcccgtgatttaa

SEQ ID NO: 51282 - DNA, 1818 bp, Neisseria meningitidis
gtgaaaccgctgcgcagactgacaaacctccttgccgcctgcgccgtagcggccgctgctttcggacagcccgccctcgcggcggacttggcgcaagatccgttcattaccgataacgcccaacggcagcactacgaacccggcggcaaataccacctcttcggcgacccgcgcggcagcgtttccgaccgcaccggcaaaatcaacgtcatccaagactatacccaccagatgggcaacctgctcatccaacaggcggcaatccaaggcaatcttggttacaccgtccgcttttccggacacggacacgaagaacacgcccccttcgacaaccacgccgccgacagcgcaagcaaagaacaaggcaacgttgacgaaggctttaccgtgtaccggctcaactgggaaggacacgagcaccatcccgccgatgcctacgacggcccgaagggcggcaattaccccaaacctacgggcgcacgcgacgaatacacctatcacgtcaacggcacagcccgcagtatcaaactcaatccgaccgacacccgcgacgtcagacaacgcatatccgacaattacagcaacctcggcagcaatttctccgaccgcgccgatgaagccaacagaaaaatgttcgagcacaatgccaagctcgaccgctggggcaacagcatggagtttatcaacggcgtcgccgccggcgcgctcaacccctttatcagcgcgggcgaagccttgggcataggcgacatactgtacggaacgcgctatgccatagacaaagccgcaatgcgcaacatcgcccccttacccgccgagggcaaattcgccgccatcggcggcttgggcagcgtggcgggctttgaaaagaatacgcgcgaagccgttgaccggtggatacaggaaaaccccaatgccgccgaaaccgtcgaagccctggtcaacgtcctgccgtttgccaaagtcaaaaacctgacaaaggcggcaaaaccggggaaggctgcggttagtggggatttttctaaatcctacacctgctccttccacggcaacaccttggttaaaacggcagacggctacaaagctattgcccgtatccgggtcggcgaccgcgtcttctccaaggacgaggcaagcggagaaactggatacaaacccgttaccgcccaatacggtaatccataccaagaaaccgtttacattgaagtttcagacggcatcggcaacagccaaaccctgatttccaaccgcatccacccgttttattcggacggcaaatggattaaagcggaagatttgaaagcgggaagcaggctgtttgccgaaaacggtgcggagcagaccgttcaaagcgttaccgtcaaaccggaaccgctgcaagcctacaatctgaccgttgccgactggcatacttacttcgtcaagggtgataaggcggaaacggaaggggtttgggttcataatgattgtccaaccaaactaaaaccgacagaacgttataatcgtcaaacgcattatggaggttctcaaacagatggagcaagggctcaggcagcaagacaggcaggagaaggtaaaccttgtccaacttgtggtagaattcagatatttggtacgaaaaccgcaccaagtccgcaacatgaacccccattagtaaaacattactatgaacatggtggtcactctatgagcaatgctgatcgagcgaaacatgccagggaaagcataaaaggaactcaatgtttaacatgtcaaaggaaagagggtgcgatgatgtcaagatattcgagagaacaggctaaaaagcatggactataa

SEQ ID NO: 51283 - DNA, 786 bp, Neisseria meningitidis
atgggttttctgcaaggcaaaaaaattctgattaccggcatgatttccgagcgttccatcgcttacggcatcgccaaagcctgccgcgaacaaggcgcggatttggcgtttacctacgttgtggacaaactggaagagcgcgtccgcaaaatggcggcggaattggattccgaactcgtattccgctgcgatgtcgccagtgacgacgaaatcaaccaagtgttcgccgacttgggcaaacattgggacggcttggacggtttggtgcattccatcggcttcgcaccgaaagaagccttgagcggcgatttcctcgacagcatcagccgcgaagcgttcaacaccgcacacgaaatttccgcatacagcctgcccgcattggcaaaagccgcccgtccgatgatgcgcggcagaaactccgccatcgttgccctgagctacttgggcgcggtgcgcgcgattccgaactacaacgtgatgggtatggcaaaagccagccttgaggcgggcattcgctttaccgccgcctgtttgggcaaagaaggcatccgctgcaacggcatttccgccggtccgatcaaaacactcgccgcctccggcatcgccgatttcggcaaactcttgggacacgtcgccgcccacaatccgctgcgccgcaacgttaccatcgaagaagtcggcaataccgccgccttcctgctgtccgacctgtcgtccggcattaccggcgaaatcacttacgttgacggcggttacagcatcaatgccttgagcaccgagggataa

SEQ ID NO: 51284 - DNA, 744 bp, Neisseria meningitidis
atgctcatcatccgcaacctgatttactggctgatactctgttccaccctgattttcctctttccctttatgctgctcgcctcgcctttccgagacggggcacacaagatggcgcgggtctgggtcaaaatcctcaacctctcgctcaaacacatcgtcgggctcaaataccgcatcatcggcgcggaacacatccccgaccgccccgccgtcatctgcgccaaacaccaaagcggctgggaaacgcttgcccttcaggacatttttccgccgcaggtttacgttgccaaacgcgagttgttcaaaatcccctttttcggctggggcttgaaactggtcaaaaccataggcatagaccgcaacaaccgccgcgaagccaacgagcagctcataaaacaggggttggcgcgcaaaaacgaaggctattggattaccattttccccgaaggcacgcgccttgcgcccggaaaacgcggcaaatacaaactcggcggcgcgcgcatggcgaaaatgtttgagatggacatcgtccccgtcgccctcaacagcggcgaattttggccgaaaaactcctttctgaaatatccgggggaaatcaccgtcgtcatctgtccgaccatcccgcacgcaagcggcagcgaagccgaattgatgggaaaatgcgaacacctcatcgaaacgcagcagccgctcatttccggcgcaggcccgtttgccgccaaaatgccgtctgaaaccgcatga

SEQ ID NO: 51285 - DNA, 333 bp, Neisseria meningitidis
atggctgataaggaacaagtagaaaagatgatttattctgaaaataaacagagtgttattgacggtatgctcggtatgaccttcagttcagaggaggatgaaatcccttggatttctgagaaattgacggagttgtcgaagcataaagacttgaatattgccagattgtcattaacctgtttcggacatctcgctaggatgcatgaaaatatcggcgattgcgataaagtgattgctttattgcgctcaaaacaaggcaatccggattttcaaggttttgccgaagatgcgttagacgatatttccttctttatatttaaaaagcatccgtaa

SEQ ID NO: 51286 - DNA, 870 bp, Neisseria meningitidis; identical to SEQ ID NO: 36835

SEQ ID NO: 51287 - DNA, 366 bp, Neisseria meningitidis
atgaacctgattcaacagctcgagcaagaagaaattgcccgcctgaacaaagaaatccccgaattcgcaccgggcgacaccgtagtcgtatccgtacgcgtcgtggaaggtacccgcagccgtctgcaagcctacgaaggcgtggttattgcccgtcgcaaccgtggtctgaacagcaacttcatcgtccgcaaaatctccagcggcgaaggtgttgaacgtactttccaactgtactctccgaccgtcgaaaaaatcgaagtcaaacgccgtggcgacgtacgccgtgccaaactgtactacctgcgcggcctgaccggtaaagctgcacgcatcaaagaaaaactgcctgcacgcaaaggttga

SEQ ID NO: 51288 - DNA, 717 bp, Neisseria meningitidis
atgaactttgaaaacgacgacattatccatgcgccgaccacgtcttccctgattctcgaagagcggcacgattcggagctgttccgtgtttacgccctgattttggacggcattaccgatcaggtgctgctgcccggcaaaaagctgaccgaatccgaactttgccgtcagatggtgtgttcgcgcaacaccgtccgcggcgcgctgtcgcttttggcgcacgacaagattgtcgatttgcaacccaacaggggcgcgttcgtccacgttcccgatttgaaagaaatgcaggatgtgttcaatgcgcgcatcgaaatggagacgatgattttgaatatcctcgcagatttgccggatttggaaacgcgcctcaagccgctttatgcgatgatacggcgcgaagaagaggcctccggcaggggcgaccgcgttggctggaaccgcctgtccaatgccttccacgtcgaactggcgcgcctggtgggcaacgatgtgctgttcgacattatgaacacgctgtgcgcgcggtcttccctgattgtcgccgtggcgggcgtgcatcgcgaggaaaaacacgccatcaatacgcatacgcattcagaacaccgcgaaatcctcgacctgctgctggcgggcaggcgcaaccgcgtggtcaaaatcctgcgccgccatttgggcaactgtatggagcgtttggaaaagactttggaagattga

SEQ ID NO: 51289 - DNA, 1176 bp, Neisseria meningitidis; identical to SEQ ID NO: 46694

SEQ ID NO: 51290 - DNA, 2304 bp, Neisseria meningitidis
atgaatacgcaagcgcacgccccacataccgattccaatacgctgatgctcggccgatacgccgaacgcgcctatctcgaatacgccatgagcgtggtcaaaggccgcgcgctgcctgaagtttcagacggccagaagcccgtgcagcggcgcattttgtttgccatgcgcgatatgggtttgacggcgggggcgaagccggtgaaatcggcgcgcgtggtcggcgagattttgggtaaataccacccgcacggcgacagttccgcctatgaggcgatggtgcggatggcgcaggattttaccttgcgctatcccttaatcgacggcatcggcaacttcggctcgcgcgacggcgacggggcggcggcgatgcgttacaccgaagcgcggctgacgccgattgcggaattgctgttgtccgaaatcaatcaggggacggtggattttgtgccgaactacgacggcgcgtttgacgaaccgctgcacctgcccgcccgcctgcctatggtgttgctcaacggcgcgtcaggcattgcggtgggcatggcgaccgagattccgccgcacaatttgaacgaagtgacgcaggcggcgattgcgttgttgaaaaagccgacgctggaaaccgccgacctgatgcaatatattcctgcccccgattttgccggcggcggtcaaatcatcacgccggcggacgaattgcgccggatttatgaaaccggcaagggcagcgtgcgcgtgcgtgcgcgttatgaaatcgaaaaattggcgcgcggacagtggcgcgtcatcgtaaccgagctgccgccgaacgccaattccgccaaaatccttgccgaaatcgaagagcaaaccaacccgaaaccgaaagcgggtaagaaacagctcaaccaagaccagctcaataccaaaaagctgatgctggatttaatcgaccgcgtgcgcgacgagtccgacggcgaacatcccgtgcgactggtgttcgaaccgaaatccagccgcatcgataccgataccttcatcaacacgctgatggcgcaaacttcgctggaaggcaatgtgtccatgaacttggtgatgatggggctggacaaccgccccgcgcagaaaaacctgaaaacgattttgcaggaatggctggatttccgcaccgtaaccgtaacacgccgtctgaaattccgtttgaaccaagtggaaaaacggctgcacatcctcgaaggccgtctgaaagtctttctgcacatcgacgaagtgattaaagtcatccgcgaatcagatgacccgaaagccgatttgatggcggcgttcgggctgaccgaaatccaagccgaagacattttggaaatccgcctgcgccagttggcacgtttggaaggtttcaaactcgaaaaagaattgaacgaattgcgcgaagaacaaggccgtctgaacatccttttgggcgatgaaaacgaaaagcgcaagctgattatcaaagagatgcaggcggatatgaaacaatacggcgatgcacgccgcacgctggtggaagaggccggacgcgccgtgctgacacaaaccaccgccgacgaacccatcacactgattctgtcggaaaaaggctggatacgcagccgtgccggacacaatctcgatttgagccaaaccgcgttcaaagaaggcgaccgcctcaaacaaacccttgaaggcagaacggttttacccgtcgtcatcctcgattcattgggcagaacctatacactcgatgccgccgaaattcccggcggacgcggcgacggcgtgccggtttcatccttgatcgagttgcaaaacggcgcgaaacccgttgcgatgttgacaggattgccggaacaacattatttattatcaagcagcggcggctacggcttcatcgccaagttggctgatatggtcggacgcgtaaaagcgggcaaagtggtgatgaccacagacagtggcgaaaccgtcctgccgccgattgccgtctatgcctcctcgttcatcaaccccgactgcaaaatcattgccgccaccagtcaaaaccgcgccctcgccttccccatcggcgaattgaaaattatggcgaaaggcaaagggctgcaaatcatcggattaaacgccggcgaatcgctgacgcataccgccgtttcttccgagccggaaatcctgattgaaagcgaaggcaggcgcggcgcggcgcacaaagaccgcatccccgtctccctgcttgaggcaaaacgcggcaaaaaaggcaaactattacccatatcgggcagcctgaaacagctttcttcccccaaataa

SEQ ID NO: 51291 - DNA, 1377 bp, Neisseria meningitidis; identical to SEQ ID NO: 36747

SEQ ID NO: 51292 - DNA, 993 bp, Neisseria meningitidis
atgaaaaaagaaagccgccccgcgtttgacgcggcagccgtatttgacgcggcagccgtaccggtatccgacagcgggtttgccgccaatgcaaatgtccgccgttttgtggacgatgaagtcgggaaaggggatttttcccgggcggaatggcaggatttttttgacaaagcggcttacaaggcggacatcgtcaagattatgcacagcccctccacatcgcgtccgtggtatgtgttccgcacgggaaattcgggcaaggcgaaatttcgcggcgcgcgccggttttatgcggaaaaccgcgcgcttatcgatgatgtggcgcaaaaatacggcgtgcctgccgaacttatcgtggcggttatcgggattgaaacgaattacggcaaaaatacgggcagtttccgtgtggcggacgcattggcgaccttaggctttgattacccccgccgcgccgggtttttccaaaaagaattggtcgagcttttaaagctggcaaaagaagaaggcggcgatgttttcgcctttaaaggcagctatgcgggcgcaatggggatgccgcaatttatgccttcgagctaccggaaatgggcggtggattatgacggggacggacatcgggacatatggggcaatgttggcgatgtcgcggcatcgattgccaattatatgaagcagcacggttggcgcacgggcgggaaaatactggtgtctgcaacattggcgccgggtgcggatgttcaggcaatcattggcgaaaaaaccgccctgacgcggacggtggcggatttgaaggcgtacggcatcatccccggcgaagagcttgccgatgatgaaaaggcggttttgttcaaactggaaaccgcacccggcgtgtttgaatattatttgggcttgaacaatttttatacggtatggcagtacaatcacagtcggatgtatgtaacggcggtcagggacattgccaattcgcttggcggcccgggattgtaa

SEQ ID NO: 51293 - DNA, 684 bp, Neisseria meningitidis
atgtttgcccttttggaagccttttttgtcgaatacggctatgcggccgtgtttttcgttttggtcatctgcggtttcggcgtgccgatccccgaggatttgaccttggtaacaggcggcgtgatttcgggtatgggttataccaatccgcatattatgtttgcagtcggtatgctcggcgtattggtcggggacggcatcatgttcgccgccggacgaatttgggggcagaaaatcctcaagttcaaaccgattgcgcgcatcatgacgccgaaacgttacgcacaggttcaggaaaaattcgacaaatacggcaactgggttctgtttgtcgcccgcttcctgccgggtttgcggactgccgttttcgttaccgccggcatcagccgcaaagtatcgtatctgcgctttctgattatggacgggcttgccgcgctgatttccgtccctatttggatttatctgggcgaatacggtgcgcacaacatcgattggctgatggcgaaaatgcacagcctgcaatcgggtatttttgttatcttgggtataggtgcgaccgttgtcgcttggatttggtggaaaaaacgccaacgtatccagttttaccgcagcaaattgaaagaaaagcgggcgcaacgcaaagccgccaaggcagccaaaaaagccgcgcaaagcaaacaataa

SEQ ID NO: 51294 - DNA, 2190 bp, Neisseria meningitidis
atgatctaccaccgtatcgccgtaaacgtgccgctttcagacggtcttttaacttattcccattccgagccgctgccgcagggaatgcgggtgcttgtgccttttcgcaataaaaccgtggtcgggatggtgtgggaaacggatattgcgccggatatggatacggcgcggattttgagtattcagacgacctttttagacgagccgccgttgcctgaaagctggcgtgatttgctctcgtttacgtcgcgttattaccactatccgacggggcaggcggtgtttgccgcgctgccgcagggtttgaaggaaacgcgcgcggtggaaatgccgcagccgccgttgttttatgctttgaacgaagcgggcagggcgcaaacgccgccgccggcgcggtttaacaaaaaagcggctttgtgggacgcgctgctttcgggcggaatgacgatggcggcgttgaagcaggtaaacgcgcaggcggcgaaattgattgaagattgggcggaacagggttggattgaaacgacggaggcggcgaaaccggtattgaggtcgtaccacgggcaggcttcgcactctgaatttgtattaaacgccgaccagcagaaggcttccgatgaaattcagacggcattgggacgcttccggccgtttctgctgtacggcatcaccggcagcggcaagaccgaagtgtatttcgatgcgatggcgaaagtgttggcgcaggggcggcaggtgttgtttctgttgcccgaaatcaacctcacgccgcagcttttaaagcgggtggaaaaccgttttgctgacgtgccgaccgccgtgttgcacagccagatggcggcaggcaggcgcacgcaggattatttgcgcgcgatgttggggcaggcgaaattggtcatcggcacgcggctggcggtgttcacgccgatggatgatgtcgggctgattgtggtcgatgaggaacacgacggctcgttcaaacaggacaacgaattacgctaccacgcccgcgatttggcggtgtggcgggcgaagcagagcggctgccccgttgtgttgggcagtgctacgcccagtttggagagttggcacaaggcgcaaagcggcgcgtaccgcctgctgcaactgaccgaacgcgcccataccgccgcgcaactgccgcaagtggacatcctcaacgtaggtcgtctgaaactcgacaacggcttctcgccgcaagccttgcagcttttgaaacagaactttgaagcaggcggtatgtcgctggtgtacctcaaccggcgcggtttcgcgcccgcgctgttttgcggcgactgcggccataccttcggctgcccgaactgctccgccaaaatggtgttgcaccaacgcgcccgccaattgcgctgccaccactgcgaccaccgcgaacccattccgttcaaatgccccgactgcggcaaccaagacctgaccgccgtcggccacggcacgcagcgcgtcgaagaaaccctgcgcgccttcctgcccaaggcagccgtcgtccgcgtcgacagggacagcaccgcgcacaaaaacgactgggcggatttgtaccgccgcattgccgacaacgaaatcgacattttggtcggcacgcagatgctcgctaaagggcatgatttcgcgcggctcaacctcgttatcgtgttgaacgccgacggcagcctgtacagcgcggactttcgtgcgccggaaaggctgtttgccgagctgatgcaagtgtcaggcagggctgggcgcgccgacaaacccggcaaggtgctgatacagacccagctgcccgaacatcccgttttcgccgccgtcaaagcgcaaaattacgccgtgttcgccgaaaacgaattgaacgagcggcaaatgttcgcgatgccgcccttcggttttcagaccgccgtccgcgccgatgcgccgcgcgttgccgatgcgatggaatttctcaatgccgccaaagaaaccctcgccccgctgttgcccgaaagcgtttcccagttcggcgcggccccgatgctgatggtgcgcctcgccgaacgcgaacgcgcgcaaatcttcctcgaatcggtatcccgacaggatttgcaccgtgccgtgagtttgtgggtgcaggtgttgcagcaaaaccgcgacggcaaaatcagatggtcggtggatgtcgatccgcaggaggcttga

SEQ ID NO: 51295 - DNA, 588 bp, Neisseria meningitidis
atggaacataagctgccgcaactgccttatgaaccggacgcattgtccccgcatctgagcaaagagactttggaattccactacggcaaacaccatcaaacctacatcaccaacctgaacaatcaaatcaaaggtaccgaatttgaaaacctacctttggaagagattgtgaaaaaatcttcgggcggcgtgttcaacaacgcggcacaaacttggaaccacaccttctactggctgggtttcacgcccaaaggtcaaggcaaaccttccggcgaactggccgccgccatcgacgcgaaatggggcagcttcgagaaattccaagaagcgttcaatgcctgcgctgccggtactttcggctccggttgggcatggctggtgaaaacccctgccggcggattggatttggtttccacttccaacgccgctacgccgctgaccactgaaaacacgccgctgctgacctgcgacgtgtgggaacacgcctattacatcgactaccgcaacagccgtcccaactacctgaaaggtttctgggaaatcgtcaactgggacgaagtcgccaaacgttttgccgccttgtcctga

SEQ ID NO: 51296 - DNA, 1422 bp, Neisseria meningitidis
atgaaaatcattcagatacagaacaatcacaatgtaaacgatgaccgccccgagtttgaccgcgcgctgattgccagcctgcccgccagcggtccgcgctacacttcctaccctaccgccgaccgtttccacgacggtttccgcgaaggcgaatatatcaaagctttacatttgcgcggtatgggcgcgttaaacaaaccgctttccctttacattcacattccgttctgcaacaccatctgctactactgcggctgcaacaaaatcatcaccaaagacaaaagccgcgccgatgcctacatcgaatatcttgaaaaagaaatggaactgctcgctccacatctgaacggacggcaccagcttgcccaactgcacttcggcggcggcacgccgacctttttgagcgacgaacagatcgaacgtgtcttccgcatgatacgcaaacatttcgagttaatccccaccggcgaatactccatcgaaatcgacccgcgcaaagtcagccgcgacaccgtcctcatgctcggcaggctcggcttcaaccgcatgagcatcggcattcaggatttcgaccccaaagtgcaggcggcggtcaaccgcatccaaagttacgaagaaaccaaagaagtcatcgatgcggcgcgcgaagcggggttcaaatccgtcagcgtcgatttgatttacggcctgccgcaccagacttcggaaagcatcaaaaccaccatcgataccgttttgtcgctcgatcccgaccgcctcgccctttatcactacgcccacctgccgcacgtgttcaaaccgcaacgccgcatcgataccgccgccgttcccgacagcgaagagaagctcgatatgctgcaatactgcgtccaaaccctaaccgaacgcggctacgtcttcatcggcatggatcatttcgccaaacctgacgacgaactctccatcgccctcaaagaaggcttcctccagcgcaacttccaaggctattcgacctacgcggattgcgatttggtcgccatcggcgtgtcgtccatcggcaaaatcggcagcacctattcccaaaacgaacgcgacatcgatgcctactatgccgccatcgacgaaggcagactgcccatcatgcgcggctaccagctcaatcaggacgacatcctgcgccgcaacatcattcaggatttgatgtgccgtttcgcgctcgactatcggatttacgaaagtatgttcggcatcccgttcgaccgctacttcaaagacgaactggcggatttggaaaaactcgccggtttgggattggtgcgcctgaacagccacgggctgaccgttaccccgaaaggacgcttcctcatccgcaacatcgccatggtcttcgattaccacctgcgccataaagaaaccaaggcgaaatattcgcaaacggtgtga

SEQ ID NO: 51297 - DNA, 408 bp, Neisseria meningitidis
ttggccgaaggtcaaaaatcagccgttaccgagtattacctgaatcacggcacatggccgaaaaacaacacttctgccggcgtggcatcttcttcaacaatcaaaggcaaatatgttaaggaagttacagtcgcaaacggcgtcattaccgccacaatgctttcaagcggcgtaaacaaagaaatccaaggcaaaaaactctccctgtgggccaagcgtcaagacggttcggtaaaatggttctgcggactgccggttacgcgcaacgccgccaaagacgacaccgtcgccgccgccgccaagaccgccgacaacatcaacaccaagcacctgccgtcaacctgccgcgacgcttcatctgtcgtttgcatagaaacaccacctacggctttctataaaaatacctaa

SEQ ID NO: 51298 - DNA, 330 bp, Neisseria meningitidis; identical to SEQ ID NO: 42940

SEQ ID NO: 51299 - DNA, 450 bp, Neisseria meningitidis
atgagccttatcggcgaaattttgcctttgtcccatattgttttggatatggaggtgggcagtaaaaaaaggctgtttgaggaagcgggcctgcttttggaacgcgaatcctcattgttccatgctgatgttttcgaatgtctttttgcccgtgaaaaactcggttcgaccggtttggggcagggcgttgccatcccgcacggccgtcatgccggcgtgaagcaggcgacgggcgcgttcatccgcacgcgcgaacccgtcggatttgacgcaccggacggcaaaccggtttccctggtttttatcttgctggttccggaaaatgcgacgggcgagcatttggaagtattgtccaaactggccggcaagttttcccaaaaaagcatcagagaatcgctgatgacggtttcttctgcggaagaagcccgcgccatcctgactgaagaataa

SEQ ID NO: 51300 - DNA, 1155 bp, Neisseria meningitidis
atggctgataaaaaaagccctttgattgccgtcagtgtcggcgaagcgtcgggcgacctattgggggcgcacctgatacgcgccatccgcaagcgttgtccgcaggcgcgttttgtcggtatcggcggcgaactgatgaaggcggaaggtttcgagagcctttatgatcaggagcggctggcggtgcgcggctttgtcgaagtggtcaggcggctgccggaaattttacggatacgcagggggctggtacgggatttgctgtcgttgaaacctgatgtctttgtcggtatcgatgcgcccgattttaatctgggtgtggcggagcggctcaaacggtcggggattccgaccgtgcattatgtcagtccgtcggtttgggcgtggcggcgggaacgcgtgggcaaaatcgtgcatcaggtcaaccgcgtgctgtgcctgttcccgatggagccgcagctttatcttgatgcgggcggacgtgcggagtttgtcggtcatccgatggcgcagcttatgcccttggaagacgaccgtgaaacggcgcggaaaactttgggcgtggatgccggcatccccgtattcgccctgctgcccggcagccgcgtcagcgaaattgactatatggcgccggtgttttttcagacggcattattgttgttggaacgctatcctgccgcacgcttcctgctgcctgccgcaacggaggcgacgaagcggcgtttggcggaaattttgcagcgttcggagtttgccggattaccgctgacggtaaccgacagacagtctgaaacggtgtgtagggcggcggatgcggtgctggtaacgagcggtacggcaactttggaggtggcgttgtgtaagcgtccgatggtcatcagctacaagatttcgccgctgacttatgcttatgtgaaacgcaaaatcaaagtgccgcatgttggcctgccgaatatcctgttgggtaaggaggctgtgccggagctgcttcaacatgatgccgtaccggaaaaactggcggcggcgttggcggactggtacgaacaccccgataaggttgccgcgctgcaacaggatttcagggtgttgcacctgctgttgaaaaaagatacggcggatttggccgcgcgcgcggttttggaagaggcgggatgttga

SEQ ID NO: 51301 - DNA, 687 bp, Neisseria meningitidis
atgacggtgttgcaagaacgttatcgggaggtgtccgaccgtattggaaaattggttctgcaggcgggaaggaagccgcattccgtcagcctgattgccgtcggtaagactttcccttcagacggcatccgcgaagtttacgccgccggacagcgtgatttcggcgagaactatattcaggagtggtacggcaaaacggaagagttggcggatttgaccgacatcgtgtggcacgtcatcggcgatgtgcagtccaacaaaaccaagtttgtcgccgaacgcgcgcattgggtgcataccgtatgccgtctaaagaccgctgtccggctgagcgggcaacgtccttcctcaatgccgcctttgcaggtgtgtattgaggtgaacattgcgggcgaggcggtgaagcacggtgtcgcgcccgaagaagcagtcgcgcttgctgtggaagtggcgaagctgccgaatatcgtcgtacgcggactgatgtgtgttgccaaagccaacagcagtgaaacggagttgaaggtgcaatttcaaacgatgcggaaactgcttgccgacctcaatgcggctggcgttaaggcagacgtgctgtctatggggatgtcggacgatatgcctgccgccattgagtgcggtgcgacacacgtccgtatcggcagcgcgattttcgggaaaaggggctga

SEQ ID NO: 51302 - DNA, 1914 bp, Neisseria meningitidis
atgttgaacattaccttgccggacggctcagtccgccaatacgaatcccccgttaccgtggctcaaattgctgcgtctatcggtgtcggtttggcgagggcggcggtggcaggcagggtaaacggcaaattggtcgatgcgtgcgacccgattgttgaagattctgctgttcaaatcattactccgaaagatcaggaaggcatcgaaatcatctgccattcctgcgcccatcttgtcgggcatgccgtcaagcaactctatcctaatgcaaaaatggttatcggccccgtcattgaagagggcttttattacgacattgccacggaaaaaccgtttacaccggaagatgttgccgccattgaagcgcgtatgaaagaattgattgcccaagactatgatgtggtcaaaatcatgactccgcgtgcggaggcgattaaaatttttcaagagcgcggcgaagaatacaaactgcgcctgattgacgatatgcccgaagtggaagcgatggggatgtatcatcatcaggaatatgtcgatatgtgccgcggcccgcacgttccgaatacccgtttcctgaaaaacttcaaactgaccaagttggcgggcgcatactggcgcggcgacagcaataatgaaatgctgcaacgcatatacggtacggcttgggcgacaaaagacgaattaaaagcctatattcaacgtatcgaagaagccgaaaagcgcgaccaccgcaaacttggcaagcaattggatctgttccatctgcaagacgaagcgccgggcatggtgttttggcatcctaaaggctgggctttgtggcaagtgattgaacagcatatgcgtaaagagctgaacgccgccggttataaagaggtcaaaacgcctcaaattatggataaaaccttttgggaaaaatccggccattgggacaactacaaagacaatatgttcgtgaccagttcagaaaaacgcgaatacgcggtgaaaccgatgaactgtccgggtcatgtgcaaatttttaataacggtttgcgctcatatcgcgatttgccgatgcgtttggccgagttcggttcttgccaccgcaatgaaccaagcggtgcattgcatggtctgatgcgggtccgtggatttgtgcaggatgatgcgcatattttctgtaccgaagaccaaatcgtcagcgaggcccgtgcgttcaatgaattgttggttcgcatctacaaacagttcggtttccatgatgtatccgtcaagctttctcttcgccctgaaaaacgcgcaggttcagatgacgtgtgggataaggcagagcagggtttgcgcgaggcattgactgcctgcggcgtggaatggggcgaattgccgggcgagggtgcgttttacgggcctaaaatcgaatatcatgtcagagatgccttgggtcgttcttggcaatgcggtacattacaactggatttcgtattgccggagcgtttgaatgccgaatatgtaactgaaaacaacgaccgtgcgcgtcctgttatgttgcatcgcgccattttgggttctttggagcggtttatcggcattctgattgagaaccatgcaggctcattcccgttatggttggcgccggttcaaatggtgattatgaatatcaccgaaaatcaagcggattactgccgtgaagtggctgccaaattgcaggcggcaggattccgcgccgagttggatttgcgtaacgaaaaaatcggttacaaaatccgcgacaacagccaataccgtttcccttatcaaatcgttgtcggcgataaggagaagcaggaaaacaaagtggcggtacgccgcaaagcagaagatttgggttctttggatttggatgatttcattgcgcaattgcagcaagaaatcactgatgccctcgtcaatcattaa

SEQ ID NO: 51303 - DNA, 339 bp, Neisseria meningitidis; identical to SEQ ID NO: 46582

SEQ ID NO: 51304 - DNA, 492 bp, Neisseria meningitidis
atgcgtgcggtcatacagaaaacggtaggtgcaaaggtggatgtcgtgtccgaagccggcacggaaacctgtggcaaaatcgacggcgggtttgtcgtgttactcggcgtaacgcatagcgacacagaaaaagatgcacgctatatcgccgacaaaatcgcccatttgcgcgtgtttgaagacgaagcgggcaagctgaacctgtctttgaaagatgtcggcggcgcggtgctgctggtgtcgcagtttacgctttatgccgacgcgacaagcgggcggcggccttcgttttcgcaagccgcacctgcagaacaggcgcagcagctttacctgcgaacggcggaactgttgcgcggacacggaattcatgtcgaaacagggcgtttccgcacgcatatgcaggtgtcgctctgcaacgacgggccggtaaccatactgctggactctttcatgacgcggatttccccaaaaatgaaggttgttccggattga

SEQ ID NO: 51305 - DNA, 966 bp, Neisseria meningitidis
atgagctacacgcaactgacccagggcgaacgataccacatccaatacctgtcccgccactgcaccgtcaccgaaatcgccaaacagctgaaccgccacaaaagcaccatcagccgcgaaatcagacggcaccgcacccaagggcagcaatacagcgccgaaaaagcccagcggcaaagccggactatcaaacagcgtaagcgacaaccctataagctcgattcgcagctgattcagcacatcgacccctttatccgccgcaaactcagtcccgaacaagtatgcgcctacctgtgcaaacaccaccagatcacgctccaccacagcaccatttaccgctaccttcgccaagacaaaagcaacggcagcacgttgtggcaacatctcagaatatgcagcaaaccctaccgcaaacgctacggcagcacatggaccagaggcaaagtacccaaccgtgtcggcatagaaaaccgacccgctatcgtcgaccagaaatcccgtatcggcgattgggaagccgacaccattgtcggcaaaggacagaaaagcgcattattgaccttggtcgaacgcgttacccgctacaccatcatctgcaaattggatagcctcaaagccgaagacactgcccgggcagctgttagggcattaaaggcacataaagacagggtgcacaccatcaccatggataacggcaaagagttctaccaacacaccaaaataaccaaagcattgaaagcggagacttatttttgtcgcccttaccattcttgggagaaagggctgaatgagaacaccaacggactcatccggcaatacttccccaaacaaaccgatttccgtaacatcagtgatcgggagatacgcagggttcaagatgagttgaaccaccgaccaagaaaaacacttggctacgaaacgccaagtgttttattcttgaatctgttccaaccactaatacactag

SEQ ID NO: 51306 - DNA, 648 bp, Neisseria meningitidis; identical to SEQ ID NO: 42354

SEQ ID NO: 51307 - DNA, 330 bp, Neisseria meningitidis
atgtcattacccccatgcccgcaatgcgcctccgaatacacttatgaagacggcggacaatacatctgccccgaatgcgcccacgaatggaatgaaaccgaatccgccgccgaccttgcggctcaagtgctcgatgccaacggcgcagtgctgcaaaacggcgataccgtcatcctcatcaaagacctcaaggtaaaaggcagctcgatggtgatcaaacaaggcacaaaagtcaaaggcatacgcctgcaagaaggcgatcacaacatcggctgcaaaatcgacggcagcgcgatgaatttaaaatccgaattcgtcaaaaaagcctga

SEQ ID NO: 51308 - DNA, 1185 bp, Neisseria meningitidis; identical to SEQ ID NO: 42183

SEQ ID NO: 51309 - DNA, 684 bp, Neisseria meningitidis
atgcaacacgacgtttacgactacaccgcgcatacggtttctaaaaacaccgtcctgcagaaaacctaccgcctgctcggattttcattcattccggctgccgcaggcgcggcacttgccgccaatgccggtttcaatttttacgccgccttcggttcgcgctggatagggtttgccgtcgtgttggcgtttttctacggtatgatccacttcatcgagaaaaaccgttacagcaataccggcgttaccctgctgatggtattcacattcggtatgggcgtattgatcggccccgtgctgcaatacgcgctccatattgccgacggtgcgaaaatcgtcggcattgccgccgcgatgaccgccgccgtctttttaacgatgtccgccttggcgcgccgaacccggctcgatatgaacgcgctcggacgcttcctgaccgtaggtgcggtcattctgatggtcgccgtggttgccaatctgtttttgggtattcccgcactcgccctgaccatttccgccggttttgtcttgttcagttccttaatgattatgtggcaggtacgcaccgtcatcgacggcggcgaagacagccatatcagcgcggcactgacactgtttatctcgctttacaacatcttcagcagcctgctgaacatcctgttgtctttaaacggcgaggattga

SEQ ID NO: 51310 - DNA, 627 bp, Neisseria meningitidis
atgaggaaaatccgcaccaaaatctgcggcatcaccacaccggaagacgcatcggccgccgtagcggcaggtgcagatgccgtcgggctggtctttttccaaggcagcagccgggccgtcgatattgcccgcgccaaaaaaatcaccgccgcactgccgccgtttgtcagcgttgtcgcccttttcgtcaacgaaagcgcgcaaaacatccgccgcatccttgccgaagtgccgatacacatcatccaattccacggcgacgaagacgacacattctgccgtcagttccaccgcccctatatcaaggccattcgtgttcagacgacatcagacatccgaaacgccgccgaccgcttccccgacgctcaggcactgcttttcgatgcctaccatccttcggaatacggcggcaccggacaccgcttcgactggacgctgctggcggaatattcgggcaaaccgtgggtacttgccggcgggctgacccctgaaaacgtcggcgaagccgtccgcatcaccggagcggaagcggtcgatgtatccggcggcgtggaagcatcgaaaggaaaaaaagatgccgccaaagttgccgcctttatcgcaaccgccaaccgcctattccgttaa

SEQ ID NO: 51311 - DNA, 126 bp, Neisseria meningitidis; identical to SEQ ID NO: 42720

SEQ ID NO: 51312 - DNA, 387 bp, Neisseria meningitidis
  misc_feature 364, 365, 366, 367, 368: 'n' is a, c, g or t
ttggcagccgatcgaaccatacctgaaccgtcaaaaacccgttacctcagagattaccgcggccgtcccgcctatcccctgttgtccatgttcaaagccgtcctgctcggacaatggaacagtctctccgatcccgaactcgaacacagcctcattacccgcatcgatttcaacctgttttgccgtttcgacgaactgagcatccccgattacagcaccttatgccgctaccgcaaccggctggcgcaagacaataccctgtctgaactgttggaactgattaaccgccaactgaccgaaaaaggtttaaaaatagagaaagcatccgctgccgtcgttgacgccaccattattcagaccgccnnnnncacacacttaattaattaa

SEQ ID NO: 51313 - DNA, 582 bp, Neisseria meningitidis
atggaagaaaaaaacgactacaccgacgcggcatccgacaaccgcaacgggcaggaaattgaagtcggaattgccggcgcaggcgaccggatacttgccgcgctgctgaaccaattgtttacctttttggttttgttggtgccgtttgccggactgattgctttcgccatcaagaatgaaggcaggattggcggcagtgaggaaatattcgggctgcttttgggcatgacttccttttgggtaggactggcgggcattttggtttataccgtcgttcaaatctactatatgagtcgggacgggcagtcattgggtaagaaaatcatgagaatcagggtgttgaaaaccgacggccgcaatcccggttttgtcggcacggttttggtacgcgaaatcgcatggtcggttttggttgccattattgccgccgttatcggtcttgcagtaggtgacaacggagaaaacgccatcaacctgctggcattccttgccaactttgtcctgctctttatggtcaaacgcgaccgccgcacgctttacgacatactggcggatacggttgtcgtcaagctgcccaaataa

SEQ ID NO: 51314 - DNA, 936 bp, Neisseria meningitidis
atggggcacaatatgatgaccacccaaaaatggtatgagcatattactaatgtaatcataggcaatactgctaatttcaatagcggttgccttgactctatagattatgtagatgaaagaaaaggcgttccgcttgcagctatggaacatattttcatggacgttagagctgcagcttcccatgcctatctatttgaacatgatcttaataaattcaagcaatatgcttatgttgcaggaaagctgggggttttgctgagtgtaaatgccgaagaccccgaacccttcttctttccctgtgacatgctcaacattcaaaatccgatgtttctgatgctgatgagcgacagcccgcagctgcgcgagtttctggtgcgcaatatcgacaacatcgccaacgatacagaagccttcgtaaaccgatacgacctcaaccgtcatatgatttacaatactctgctgatggtggagggtaagcagcttgatcggttgaaacaacgtagcgagaaagtcttggcgcatcccacccctagcaaatggctgcaaaagcggttgtacgattaccgcttcttcctcgctttcgccgaacaggatgccgaggcgatgaaggccgccttagagccgcttttcgataaaaaaaccgcgcgtatggctgccaaagaaacattgtcctatttcgatttctacctgcagccgcaaatcgttacctatgccaaaatcgcatccatgcacggtttcgatttgggcatagaccacgaaatcgcaccgagggatttgattgtttacgatccgctgccagcagacgaatatcaagacatcttcgattttatgaaacagtatgacttgtcttacccgtatgaatatctgcaggattggatagattactatacgttcaaaaccgataagctggtatttggtaacgcgaagcgagagtga

SEQ ID NO: 51315 - DNA, 282 bp, Neisseria meningitidis; identical to SEQ ID NO: 39486

SEQ ID NO: 51316 - DNA, 357 bp, Neisseria meningitidis; identical to SEQ ID NO: 36858

SEQ ID NO: 51317 - DNA, 540 bp, Neisseria meningitidis
atgaagataacacactgcaaattaaagaaaaaagtacagaaagaactgctccgtttttttgcgctggaaattaccgcccgttctgccgccgatattttgggtatccatcccaattcggcagcactgttctaccgtaaaatccgcacggttatcaaccatcatttggccttggctgccgatgaggtttttgagggccctgtcgagccggacgaaagcgatttcggcggacggcgtaaaggtagacgtggtcgcggtgcagcaggaaaagtggttgtcttcggcattctgaaacgcaacggacgggtctataccgttgtcgtaaacaatgccaagtctgaaacgttactccctgtcatcaaaaagaaaatcatgccggacagtattgtttataccgatagtctgagcagctgcgacaagttggacgtaagcggttttatccattaccgcatcaaccattccaaggaatttgctgaccgtcagaaccacataaacggcattgagaacttttggaatcaggcaaaacgcgtcttgcgcaaatag

SEQ ID NO: 51318 - DNA, 609 bp, Neisseria meningitidis
ttgtgccaaaaagaacatgtcaatccatttgccttgtcaaagcaatatctattggttgtaacattcgtcaaatccagcagtaaaaattttcaggcagcattactttgggcaagaagtgccaaattatttgagaatcttgagattggaaaagaaaccatctattgctgcgctttcgataaaacagcagaacaggctgggatggccggggtatttttgaattatattgaaaattggaatggcaaacagatttacatcaatggccgaatccatagtggcagtatttatgatttgttaggggttttagactgctatcaaaaatcacagtcctgtcccaaccctaaaagccactgttgctttgtttcagacgacatttttctatggcatggatcaagaccaacgtttgaaatcagtcttgatctaactggaaagaaaaaagaaacatcctctgcaaagaaatttgtgatgccttgtattaatttccgtcaccataggattgaaaaagaaacctacttaggaaattggaatgaacaaattgccgcattggcagtaaaacaaaatatagattggtgtccaagttttgatattgagaattttagacagtatgaataa

SEQ ID NO: 51319 - DNA, 429 bp, Neisseria meningitidis
atgatgttttcttggttcaagctgtttcacttgttttttgtcatttcgtggtttgcagggctgttttacctgccgaggattttcgtcaatatggcgatgattgatgcgccgcgcggcaatcccgagtatgtgcgcctgtcggatatggcggtgcggctgtaccgttttatgtcccctttaggtttcggtgcggtcgtgttcggcgcggcgataccgtttgccgccggctggtggggcagcggctgggtacacgtcaaactgtgtttgggcttgatgcttttggcttaccagttgtattgcggcgtgctgctgcgtcgttttcagaattacagcaatactttctcacaccgctggtaccgcgtgttcaacgaaatccccgtgctgctgatggttgccgcgctgtatctggtcgtgttcaaaccgttttga

SEQ ID NO: 51320 - DNA, 810 bp, Neisseria meningitidis
atgacaccgctcaaaatcgccatcgccggcgcaaacggccgtatgggacgcgtattggttgaagccgtcaacaaccatcccgacaccgtcctttccggcgcgctcgaacactcgggctcagaagccctcgggctggacgcaggctacgccgtcggactcaaaaccggcatcgccatttcagacgacgttgacgccgttctcgcacaaagcgacgtactcatcgacttcacccgccccgagcccaccctcaaacacctgcaaaaatgcgttgaaaaacaagtcaacatcatcatcggcacaacaggcttcgacgatgcgggcaaagccgctatccacactgccgccgaacaaacaggcatcgttttcgccgccaacttcagcgtcggcgtcaacctcaccttccacatcctcgacaccgtcgcacgcgtattaaacgaaggctacgacatcgaaatcattgaaggccaccaccgccacaaagtcgatgcccccagcggcaccgcgttacgcatgggcgaagtcatcgccggcgcgctcggccgcgacctcaaacaatgcgccgtttacggccgcgaaggccacaccggtccgcgcgatccgtcgaccatcggctttgccaccgtccgcgcaggcgacatcgtcggcgaccacaccgccctcttcgccaccgacggcgagcgcgtggaaatcacccacaaggccagcagccgcatgacctttgccgccggtgccgtccgcgccgcagtttgggtcaacggcaaaacgggtttgtacgatatgcaggacgtactcgggctgaacaaccgttaa

SEQ ID NO: 51321 - DNA, 660 bp, Neisseria meningitidis
  misc_feature 645, 646, 647, 648, 649: 'n' is a, c, g or t
ttgcagtttttggaagattcattgaggccgaggataacgcgggtagatttggcacttgatttttttgatggggagtacacgccggaacaggcacttttggatcacgataacggttttttcgataacagtaacatgaggccgaaatctgaaatggttggaacggcttggcggagagaggacgggagcggcaagacattttatgtaggtcgcaagaaaaattctcgttttgtgcgtgtttatgagaaaggcaggcagctaggcgataaagaaagcaagtgggtaaggttcgaaattcagtttaatcatggagatatggaaatacctttggatattctgataaatcaaggttcttacttttcaggcgctttcccgatttgtcagaaatttaaaaatatgccgaatccggaaaggttcgattaccgtaaaaaagtggctaatttaacttttcagcataaattgagatacgcaaaaaacgcggtcggcaaactgattaatttcatgtttgatatgggttttgatagtgatgaaattgtcagatatctgaaggcagatttggggtatcccaaagggctagaacctgaaaaatattcgttggccggattgaaagaatctttgaaattcggctttatccacgaacaaccggannnnncacacacttaa

SEQ ID NO: 51322 - DNA, 621 bp, Neisseria meningitidis
atggaattgaaagtaattgacgctaaaggacaagtttcaggcagtctgtctgtttctgatgctttgttcgcccgcgaatacaatgaagcgttggttcatcagctggtaaatgcctacttggcaaacgcccgctccggtaaccgcgctcaaaaaacccgtgccgaagtaaaacactcaaccaaaaaaccatggcgtcaaaaaggtaccggccgtgcccgttccggtatgacttcttctccgctgtggcgtaaaggtggtcgcgcgttcccgaacaagcccgacgaaaacttcactcaaaaagtaaaccgcaaaatgtaccgtgccggtatggcgactattctgtcccaattgactcgtgacgagcgtttgtttgcgattgaggcgttgactgccgaaactcctaaaaccaaagtttttgccgaacaagtgaaaaatctgggtctggagcaagtgttgtttgtaaccaaacagctcgacgagaatgtttacttggcttcacgcaacttgccaaacgtgttggttttggaagctcaacaagttgatccttacagcttgctgcgttacaaaaaagtaatcatcactaaagatgcagttgcacaattagaggagcaatgggtatga

SEQ ID NO: 51323 - DNA, 633 bp, Neisseria meningitidis
atgacggtatgggtcggactgaccggcggaatcggcagcggcaaatcggcagccgcgcaatgttttgccgatttgggcgtaccgcgtatcgatgcggatgcggcggcgcactcgctgacggcttcagacggcatcgccctgccggaaatcaggcggctgttcggcgacaccgttttcgacacacagggtttgttgcgacgcgacatattgcgtaaagaagtctttgcctccccatcgcgaaaagccttgctcgaatccgtgatgttgccgctgattttctcagaaatcaaaaaacagcaagaaacctttaccgatgcggcttacggcattgtcgaaattccgctgctgacggaaaagcgtcaatttatcagcctgatacggcgtgtcctgaccataagcgcacctttggaaaaacgtatcggcagggtgatggcccgcagcgggctgacgcgcggcgaggtggcggacatcatcagccatcaggcatccgaatccgaacgcctgctgcttgcagacgatgtgctgctcaatgacggcagcctcaaaagcctgcgtgagaaaacaatgcgcctgcacgcgttttattcagggattttcgcctcaaaaccaacacaaggaaaacacaatgactga

SEQ ID NO: 51324 - DNA, 1968 bp, Neisseria meningitidis
gtggggaacacctttaaatcaatccttgtctgggtcgccttgggtatcggcctgatggctgcgttcaacgctttagacggtaaaaaagaagacaacgggcaaatcgaatattctcagttcatccaacaggtcaacaacggcgaagtatccggcgtcaacatcgaaggatccgtcgtcagcggctacctgattaagggcgagcgcaccgacaaaagcaccttcttcaccaacgcgcctttggacgacaacctgattaaaacactgctcgacaaaaacgtccgtgtaaaagtaacgccggaagaaaaaccgagcgcgctggctgccctgttttacagcctgctgcccgtcctgctgctgattggcgcgtggttctactttatgcgtatgcagacgggcggcggcggaaaaggcggcgcattctcattcggcaaaagccgcgcccgcctactggacaaagatgccaacaaagttacctttgccgatgtcgccggctgcgacgaagccaaagaagaagtgcaggaaatcgtcgattacctcaaagcgccgaaccgctatcaaagcctgggcgggcgcgtgccgcgcggcatcctgctggcgggcagcccgggtacgggtaagacgcttttggcgaaagcgattgcaggcgaagccggcgtgccgttcttcagcatttcaggttccgactttgtcgaaatgttcgtcggtgtcggtgcaagccgcgtccgcgatatgttcgagcaggcgaagaaaaacgccccctgcatcatctttatcgacgagattgacgcagtcggccgccaacgcggcgcaggtttgggcggcggcaatgatgagcgcgagcaaacattaaaccaattgttggttgaaatggacggttttgagagcaatcagactgtaattgtgattgcggcaaccaaccgccccgacgtactcgatcctgcgctgcaacgccccggccgtttcgaccgccaagtggttgtccccctgccggacatccgggggcgcgaacagattttgaacgtccactctaaaaaagtgcctttggacaaatctgtggatttattgtccctcgcgcgcggcacgccgggtttttccggcgcggatttggcgaacttggtcaacgaagccgccctgtttgccggccgccgcaataaagtcaaagtcgatcagagcgattttgaagacgccaaagacaaaatctatatgggtccggaacgccgcagtatggtgatgcacgaagacgaaaaacgtgcgacggcgtatcacgaatccggacacgcgattgttgccgaaagcctgccctttaccgaccccgtccacaaagtaaccattatgccgcgcggacgtgcgctgggtctgacttggcagcttccggagcgcgaccgcatcagtatgtataaagatcagatgttgagccagctctccatcctgttcggcggacggattgccgaagacatcttcgtcggacgcatctccaccggcgcatcaaacgactttgaacgcgcaacccaaatggcgcgcgaaatggtaacgcgctacggcatgagcgacaaaatgggcgtgatggtttatgcggaaaacgaaggcgaagtcttcttgggacgcagcgtaacccgttcgcaaaacatttccgagaaaacccagcaggacatcgatgcggaaatccgccggattttggacgagcagtatcaggttgcctacaaaatcctcgatgaaaaccgcgacaagatggaaacgatgtgcaaagccctgatggaatgggaaaccatcgaccgcgatcaggtactggaaatcatggcgggcaaacaacccagcccgcccaaagattacagccacaacctgcgcgagaatgcggacgcggcggaagataacgcgccgcacgctccgactcgggaagaaaccgaagcacctgccccggcagacaccgcttcgacagagtccgagcagcagcctgaaaacaaggcttaa

SEQ ID NO: 51325 - DNA, 840 bp, Neisseria meningitidis
atgctggtcgcttttttaattatgttgcgcgagggtatcgaagccgcgctcatcgtcggcatcgttgccggttttctgaaacagtccggacattccaaactgatgcctaaggtctggttcggggttgtccttgcttctttgatgtgtttggggctggggtacggaatccattcggcaacaggcgagattccccaaaagcagcaggagttcgtcgtcggcattatcggtttggttgctgtcgcgatgctgacttatatgattttatggatgaaaaaagccgcccgttcgatgaagcggcagcttcaggattctgtgcaggcggctttgaaccgtggcagcggtcaaggatgggccttggtcggtatggcgtttcttgccgtggcgcgcgaaggtttggagagcgtttttttcctgcttgccgtattcaaacagagcccgacgtggcagatgccggccggtgcggtagcgggggttttggctgccgccgtgattggcgcgttgatttatcagggtgggatgcgcctgaatctggcgaagtttttccgttggacaggggcgtttctgattatcgttgccgctggtctgcttgccggttcgctgcgtgcgctgcacgaagcaggcatttggaacgcgcttcaggacattgtgttcgactcatcaaaatatttgcacgaagacagcccgttgggcgtgctgctcggcggatttttcggctataccgaccatccgacgcagggcgaggccttggtttggctgctgtaccttattcccgtcataacttggtttttgtgcggcagcaggccgtctgaaactttaacccgtaaagaggagctgaaatga

SEQ ID NO: 51326 - DNA, 1470 bp, Neisseria meningitidis
ttgaaagcggttattccgcataccggaggacacgaaatgaacgaatattaccaattaatcaagcatcccgatatttccctttccccgatttcagacggcatcggggtcggcaatccggcaacgggcgaaattttggcgtatgtccgcaatacgggttcggacaaactgaaaaacctgattcaaaaggcggcggcagcgcaaaaattatgggcggcgaaaactgctttggaacgcgccgacatattgtggcgttggtattttttagttaaagaaaacaaggaagcactggcgcgcctgatgacgatggagcagggcaaaagcctgaccgagtcgcgcggcgaaattgattatgcggcttcgtttgtgcgctggtttgccgaagaagcgcggcggattgacggcgatgtgctgacaagcgtgaaagcgtcgcaaaaactggtcgtgttgaaacagcccgtcggcgttaccgctgcgattacgccgtggaactttccgtccgcgatgattgcgcgcaaggctgcgccagctttggcagtgggttgcgcgatgatagtcaaaccagcatcgctcacgcctttgagtgcgtatgcgttggctgtactggcttacgaagcgggcgtaccgcaggatttgttgcctgttgtcagtggtagtgcttcggaaatcagccatgaatttgttacgaacccgactgtgcgcaaaatcagctttaccggctcaaccgaagtcggcgcgaaaatttttgccgacagcgcggcagacattaaaaaactcagcttggaactgggcggcaacgcgccgtttatcgtgtttgacgatgccgatttggacaaagccgtcgaaggcgcgctcgccagtaagttccgcaacagcggtcagacctgcgtctgcaccaaccgtgtttacgctcaatcgggcattcacgatgaattttgccgcaaattgagtgaaaaagtagccgagctcaaattgggcaacggcttggaggatggcgtaaaccaagggccgctgattgaggaaaaagcagtggaaaaagtcgagcagcacatcgccgacgcgctctccaaaggtgcaagttgtctgaccggcggcaaacgcagcgcgttgggtggaacgttttttgagccgactgttttaagcggcgttacgacgcaaatggcggtggctcgcgaagaaaccttcgggcctttgtgtccggtgttccgttttgaaaccgaagccgaagtcatcgcggctgcgaacaatacggaatacggtttggcggcctaccttttcaccgccgacaccgcccgccaatggcgcgtcggcgaagccttggaatacggcatggtcggcatcaatacgggcttaatcagtaatgaagcggcaccgttcggcggcgtgaaacgcagcggtttgggacgtgaaggcagcaaatacggtgcggacgaatatctggaattgaaatatctgtgtatggatgtcgggtga

SEQ ID NO: 51327 - DNA, 1128 bp, Neisseria meningitidis
atgtacactttccgcccgtttcccaaactgcacacagaaacacacattatgaacatacaaaacatccgcaccctcctcgacaccgtcgccgttccgaatacggcacgcacgctcggcggcgaaaaggccgtccgttcggtcgaacagcgttcagacggcatccatatcgccctgcatttcggcttccctgtcgcgcacatcgccgccgccatcgccgattccgtacaagaaaccctgatgcccgaaacaggcgacacacacatccatctgtccatggacacggaaatcggcacacataaagtccaacctggcgttaccaccatcaaaggtgtgaaaaacatcattgccgtcgcctccggcaaaggcggcgtgggcaaatcaacaaccaccgccaaccttgccgccgcaatggcgcgcatgggcgcgcgcgtcggcgtactcgatgccgacctttacggcccgagccaaccgaccatgttgggtgtggacgaccgcaaacccgatcagaaaaaccaaaaactcattcccgtcgaatcttcagacggcatacaggtcatgtctatcggctttctcgtcgataccggccaagccgtcgtctggcgcggcccgatggtcagtcaggcattgcagcagctgatgttccaaagcgagtgggacgaagtggactatcttttcatcgacctgccccccggtaccggcgacatccagctcacgctgtcccagcgcatccccgtaaccggttccgtcatcgtaaccacgccgcaggacatcgccctgatagacgcgcgcaaagccgtggatatgttccgcaaagtcaacattcccattttgggcgtattggaaaatatgtccgtccacatctgctccaactgcggacacagcgaagcactgttcggcacggacggcggcaaagatttggcggcacgcctcaacgtccccctgctcggacagcttcccctaagcctgcccgtgcgcgaagccatggacggcggcacaccggcgcaactgttcgacgaacaccccgccatcgccaaaatctacaccgatgccgcattccaaatcgccctgagcattgccgacaaaggcaaagacttcagcagccgcttccctaaaattgtcgtcgaataa

SEQ ID NO: 51328 - DNA, 1488 bp, Neisseria meningitidis; identical to SEQ ID NO: 39015

SEQ ID NO: 51329 - DNA, 1188 bp, Neisseria meningitidis; identical to SEQ ID NO: 49497

SEQ ID NO: 51330 - DNA, 417 bp, Neisseria meningitidis; identical to SEQ ID NO: 37115

SEQ ID NO: 51331 - DNA, 369 bp, Neisseria meningitidis
atgaatccgaaaaccttgagccgtttgtcgctgtgtgcggcggtcttggctctgaccgcctgcggcggcaacgggcaaaaatccctgtattattacggcggctatcccgataccgtctatgaaggtttgaaaaacgacgacacttcgttgggcaagcagaccgaaaagatggaaaaatactttgtggaagccggcaacaaaaaaatgaatgccgccccgggtgcgcacgcccatttgggactgctgctttcccgttcgggagacaaagagggcgcgttccgccagtttgaagaagagaaaaggctgtttcccgaatcgggcgtatttatggacttcctgatgaaaaccggtaaaggaggcaagcgatga

SEQ ID NO: 51332 - DNA, 1185 bp, Neisseria meningitidis
atgaccgaaccgacctcccgccgccgttttctgaaaacctgcaccgccgctgccggcgcggggctgcttcaggcttgcggcacatccgccacatccgttccgccccttccctcttcccattccgttgtgaaagcccgaaccgtgcctctccaaacgccacgccgtcaaagttcggacggcaaccttctgcgcgttgtcgcttcgtcaggatttgccgaagacaccaaccgcgtcaacacagccttaacccgcctttacaatgccggttttaccgtaaccaaccaacaggcgggcagccgccgtttccaacggtttgccggtacggacacacaacgtgccgccgatttccaagaggtcgcttcgagccgcgtcgccacgcctaaagttctgatgggtttgcgcggcggttacggtgcggcgcggattctgccgcatatcgattttgcttcgctcggcgcaaggatgctcgaacacggcacgctgtttttcggattcagcgatgtgtgcgccgtccaactggcattgttggcaaaaggcaatatgatgagttttgccggcccgatggcttatagcgattttggcaaacctgcccccggtgcgtttacgatggatgcctttatcaaaggggcaacccaaaaccgcctgaccgttgatgttccttatatccaacgcgccgatgtcgaaaccgaaggcacgttgtggggcggcaacttaagcgtcctcgcctcgctcgccggtacgccttatatgcccgacatcgacggcggcattttgttcctcgaagatatcggcgaacagccctaccgcatcgaacgtatgctcaatacgctgtatctttcgggtattttgaagaaacagcgcgccatcgtgttcggcaatttccgtatggaaaaaattcgagatgtctatgattcgtcttatgatttttccgccgttgccaaccatgtttcgcgcacggcgaaaatccccgtgctgacgggcttcccgttcggacacattgccgacaaaatcactttccctctgggcgcgcacgcccgaatccgtatgaacggaaacggcggttattcggtcgcgtttgaaggctaccccacactcaatgcgtccgccttgactttggataccctgctcccaccgccggattttcccttcttccccgaaagcggtgttgccgatatctcggaataa

SEQ ID NO: 51333 - DNA, 1335 bp, Neisseria meningitidis
gtgggcgaacctgaaaacaaatcatccgaacccgtacgcgagatacaggcatcaaaagaaatgccgtctgaaacctcttccccacgcaaagaaaacgaaacagaagtacacattcctgccgctccttttatcgtcaaacagtccggcagcaacgctttggcagtctgcgccctggtattggcggcattgggtttgggtacaagtggttttttgtttgtccaaggacagaatgtcttgaaaaaccaagagctggcattcaaccaaaaaatcgacaaagccgccttgggcgagtcggaaaacgccgccctgttgaaagacaacctcaaccggcaagccgccatacaatcagagctcgaccgtttggacggaaacgtcaaagcaaacggcgaacaaatcttggaaatgcaaaaatcctatcgcgagttgaccaaaggacgcgccgattggctggtggacgaaaccgagaccatactcaatctggcggcgcaacagctggtgttgactggcaatatccaaacggcagtcggcgtattggagcatatcgacagccgcctgtcccgtttcaatcaggcagagcttctgccgatcaagcaggcggtcagcagcgacttggcggaactgaaaaaccgtccctatgtcgatatttccggcacggcattgcgcctcgacaggctggaaaccgccgtatccggactgccgctgatgctcgacggcgtattgaaaccgggcgtacaggtgaagaacgaagccgcttctgcttcatggtggcagaacgtatgggaaaaatccctcggcacattgaaggggctggtcgaaatccgccgtttggaaaacaacgatgccatgctgctttcaccggaacaggcatattttgtgcgtgaaaacctgcgcctccgccttttggatgcgcgcattgcattaatgcagcgcaacggcgaagtctatcagggcgatttgaacaatgccgaagccgccgtcagacagtatttcgatgccaagtctcccgccacgcagtcgtggctgaaagaactggcggaattgaaggcgttggatgtgcgcatgacggcggatgacggtttgaaaaacagcctaaatgccgtccgcgcctatcgcgacggtacgcgcatgacggcggcggaaaatcaagaagcggaacaggcggcttccgaaccggcaaacgaaaacacagcttccgaaccggctgccgcatcggatgtgaagaccatagaagcaccgtccctgccttcggaacgcaaaccggaacagcctgcaaaaaaacagcccgtaccggaaaaggcagggcgttcgccgtccgctaaaggagaacgcgcatga

SEQ ID NO: 51334 - DNA, 276 bp, Neisseria meningitidis
ttgcttgttacagcggttcagaccgtattttcggcaaatgtttacgcgtgccgccataatggtaaaaccagttacagccaaactccgggaaaacattgtaccaacgcgggtttggggcgggaccgggtgtacagttcggttagaccggcagtaaaagacagggcggaagacgcaggggtcggcgattattcggacacggtgagggacgaacacgtccaaaatccgaaaggaaatgcacagaaagacggttcggctgccggcatcaagccgcactga

SEQ ID NO: 51335 - DNA, 180 bp, Neisseria meningitidis; identical to SEQ ID NO: 39090

SEQ ID NO: 51336 - DNA, 231 bp, Neisseria meningitidis; identical to SEQ ID NO: 43676

SEQ ID NO: 51337 - DNA, 630 bp, Neisseria meningitidis
atgaacctttttcaaaacgccaaattcttcacgacggtaaaccatctcaaagacctgccggacacaccgctcgaaattgcctttgtcggcaggagcaatgccggaaaatccagtgccatcaataccctgaccaaccatgtccgtcttgcctacgtttcaaaaacacccggacggacgcagcatatcaacttcttcgagctgcagaacggcaattttatggtcgatttgcccggctacggttatgcccaagtccccgaagcagtacgcgcacattgggtcaatctgctcggcgactatctgcaacagcgcaaacagcttatcgggctggttttgattatggatgcccgccatcctttaaaagaactcgacatccgtatgctggactttttccacacgaccggcagaccggttcacatcctgctgtcaaaagccgacaaattatccaaaaacgaacagataaaaaccctgtcccaagtcaaaaaactgctcaaaccttattccgacaggcaaaacatcagcgtacagctgttttccagcctgaaaaaacaaggtattgacgaggccaaccgaactgtcggaagctggtttgacgcagcagatgccgccgcttcctctccagaggaaaactga

SEQ ID NO: 51338 - DNA, 576 bp, Neisseria meningitidis; identical to SEQ ID NO: 37908

SEQ ID NO: 51339 - DNA, 651 bp, Neisseria meningitidis
gtgatcactgatattgagcaagcgataacagaccgtctgaaacggggcttgggtcgcatggtgcgcacggttaaaagctacaacggcgaggccgacgatttggcggggcaaatccatacgctgcctgcggtttgggtaacgtatggcggcagcaaagttgagcctgccagcaccggcggcgtatgcggacgttatcaggataccgccgaatttgtggtgatggtggcggcccgcaatctgcgcaacgagcaggcgcagcggcaaggcggcatcgacagccgcgaaatcggcagcaacgatttaatccgcgctgttcgccgcctgcttgacggccagcggctcggttttgccgatagccgcggcttggtgcccaaagcggtgcgcgcgattgccaatcatgtgctggtgcaaaacgccgcagtaagcatatatgcggttgagtatgccatccgctttaacacctgcgggttggaaaatgaccgctaccccgaacacaccgacaatcccgacgaccccaaccatatctttaccaagtatcagggtacattgagcgagccgtggcctgatttcgaggggttggacggcaaaatttacgacccgcaatccgccgatgaaatacctgtaaacctaacccttaaggataagcaatga

SEQ ID NO: 51340 - DNA, 276 bp, Neisseria meningitidis
ttgaacgatgccgttcattatcgtaatatgaaattatcagaagaagaatcttattcatattggaaatactgtataacagaatatattgacaaccatgaagaaaaagacaatatttggtatttatccaataagcataatgaaaaattgctatatttaaataataatattattaaggaatccgtgtttaaaaaaggatatataaaaaatattatggaaaaaataattatgaaatataattatattttaaatggtaatgataaaatttatctcacataa

SEQ ID NO: 51341 - DNA, 603 bp, Neisseria meningitidis
ttgcgcgtactgtccgcgccgccggctttgcctttcgcatatgcttctgtatcatgtgggtttttctgtcttttatggtttttgtcggaggctttgatggttgacgcttggtctgtccctgattttgaatcgaaaatctgtccgcccgaggcgttggcggcgcgtttggcgttgttgccgcgcccgctggtgtttaccaacggctgtttcgacatcctccacagggggcatgttacttatctggcgcaggcgcgttcgatggggggcgcgttggtgctggcgttgaataccgatgcttcggtgcggcgtttgggcaagggcggcgaccgcccgattaatcctttggagaaccgtgccgccgttgccgccgcgttggaaagtgtggatttggtaacgtggtttgacggggatacgccggcggcgttgattgaggcggtcaaacctgaaattttggtcaagggcggcgattgggctgcggataagattgtcggtgcggcagaaacgttggcgcgcggcggtcaggtgttttcaattccgtttctgcaccagacttcgacaacgaagactttggcaaaaatccgtgcggcagagggcggaaaatga

SEQ ID NO: 51342 - DNA, 522 bp, Neisseria meningitidis; identical to SEQ ID NO: 43029

SEQ ID NO: 51343 - DNA, 1173 bp, Neisseria meningitidis
atgaaacaaatcaatcatacattgcaacaaaaactggctgaatttaaagccaaatcaggcatgaaccaaactcaactggcacgcggtatcggtacttcgccggcatccatcagtatgtatctgaacggcacttatgcggaaaaaggcggtaattatgaaaccatcgagccgaaaatcgaggcgtttttggagatgcaggacagtaaagcgcaacgcgaagagctggtgttgggttttgtatcgactaagacgacccgccgtattgcggaagtgatgcgcgatgcgcacgaaggcggcgaaacagtggtgatctacggtcaggcgggtttgggcaagactcaggcggtcaaaaactactgtgataaaaaccctgcggccatcttgattgaggctaatccgagctttacggctttggtcctgatgcgcaagttggcgacggcggcgaaggtatcggcgatgggcagcctgaatgatttgtttgagtctgtatctgaccgcctgcgcgattcgggccgtctgattgtggtcgatgaagcggaaaacctgccgttacgcgcccttgaaattgtacgccgtctgcacgatgagactggctgcggcttggtgttgagcggtatgccccgactggtggccaacctgcgcggtaagcatggcgagctggtgcaactttatagccgcgtgtctgttgcgctgaatttgggcgaatctttgccggatgacgaactctttgagattgcgaaagcggctttgcctgatgcggtcaagcatctgctccctgatagtgtacaagcgttgattacggtcatcgggtttaatgaaacgctggagctggtgcgcctgatgggcggtacgacttatcctttgcggcagggttatacgaaaaacagtcaatcccgtgttgcatacttggaagagattatcggcagtgaggcggccggtcggctggtggaggcaatggctccgtgcaatctgtttataccccgttgcgagacggccttgtatgagttgcgaaaccgtaaaatccgcagtcagtttgaccggcagacggcaggcggtacccctgcttatgaggccgttaacgatttggccttggcacaccgcctaagcgaccgccatgtgtggcgaattttaaagcaggcggataaggaagcggagcaggagaatttgttttag

SEQ ID NO: 51344 - DNA, 426 bp, Neisseria meningitidis
atgacacaagaaaccgctttgggcgcggcactgaaatccgccgtccaaactatgagcaaaaagaaacagaccgaaatgatcgccgaccatatctacggcaaatacgatgtattcaaacgcttcaaaccgttggcgctcggcatcgatcaggatttgattgccgctttgccgcaatacgatgccgcactgattgcacgcgtcctcgccaaccactgccgacgtccgcgctatctgaaagccttggcgcgcggcggcaaacgtttcgatttgaacaaccgtttcaaaggcgaagttacccccgaagaacaggcgatcgcgcaaaaccatcctttcgtgcagcaggctttgcaacagcagtccgcccaagctgcctccgaaacgccgtctgttgaagccgaagcagccggatcttccgcagcagaataa

SEQ ID NO: 51345 - DNA, 933 bp, Neisseria meningitidis
atgtatgagataaaacagccttttcatagcggatacttgcaggtgtctgaaattcatcaaatttattgggaagagtcgggcaatcccgacggtgtgccggtcatttttttacatggcgggccgggcgcggaggcttcgcctgaatgtcggggttttttcaatcccgatgtgttccgtatcgtcatcatcgaccagcgcggttgcggacgttcgcgcccgtatgcttgtgcggaagacaatacgacttgggatttggtggcggatattgaaaaagtccgtgaaatgctgggtatcaggaaatggctggtgttcggcggttcgtggggcagcactttgtcgctggcttatgcccaaacccatcctgaacgggtaaagggattggtattgcgcgggatatttttgtgcaggccgtctgaaacggcgtggctgaacgaggcgggcggtgtgagccggatttatccggaacaatggcaaaaatttgtcgcgccgattgctgaaaatcggcggaaccggctgattgaggcgtatcacgggttgctgtttcatcaagatgaagaagtgtgcctgtctgccgcgaaggcttgggcggattgggaaagctatctgatccgtttcgagccggaggatgtggatgaagatgcttatgcctcactggcgattgcgcgtttggaaaaccattattttgtcaacggcggctggttgcagggcgatagggcgattttgaacaatatcggcaaaatacggcatatcccgaccattatcgtgcaggggcggtatgatttgtgtacgccgatgcagagtgcgtgggcgctgtcgaaagcctttcccgaagcggaattgagggtggttcaggcagggcatcgtgcgttcgatccgcctttggtggatgcgttggttcaggcagttgaggatattttgccccatttgttgtaa

SEQ ID NO: 51346 - DNA, 1047 bp, Neisseria meningitidis
atgattccggccacctacaccctgtcccaaatcaccgcgcggctcggcggcgaatggcgcggcgaggacatttccgttaccgccgtgcgcccgctcgcagacgcgcaggcggaacacatcagcttccttgccaatccgaaatacaaagccgaagtccacgacagcagcgcgggcgcggtcatcgtttccgccaaagcggcagacggatttgaagggcgcaacctgattgtcgccgacgacccctatctctatttcgccaaagtcgcccgcctgttttcacccgtcgtcaaagcgcgcggcggcatccatccgaccgccgtcgtcgaaccgggcgcgaccgttcccaccagctgcgaaatcggcgcgaacgtctacatcggcgcaaacaccgtgctcggcgaaggctgccgcatcttggcaaacgccgtcgtccaacacgattgcaaactgggcgacgaagtcgtcctgcatcccaacgccgtcgtttattacggctgcacactgggcagacgcgtcgaaatccacagcggcgcggtcatcggcgcggacggtttcggactcgcttttgccggcgattcatggtttaaaatcccgcaaaccggcgcggtaacgctgggcgacgacgtggaaatcggctcgaacaccaacatcgaccgcggcgcgatgagcgacaccaccgtcggcaacggcaccaaaatcgacaaccaagtccaaatcggacacaactgcaaaatcggttcgcacaccgtcatcgccgccaaaaccggcatctcaggcagcgtaaccataggcagctactgcatcatcggcggcggcgtcggtacggtcggacacatcgaaatcgccgacaaaaccaccatcggcggcggcacgtccgtcacccacagcattaccgaaagcggcaaacacctcgccggcatcttcccgatgtccacccataaagaatgggcgcgcaacgctgtttacatccaccgcttaagcgaaatgaacaaacggctcaaaacactagagcagcagctttcagataccggtcaagacagcaaataa

SEQ ID NO: 51347 - DNA, 513 bp, Neisseria meningitidis; identical to SEQ ID NO: 44991

SEQ ID NO: 51348 - DNA, 3216 bp, Neisseria meningitidis
atgcccaaacgtaccgacctaaaatccatccttatcatcggcgccggccctatcgttatcggtcaggcctgcgaatttgactattcgggcgcacaggcctgcaaagccttgcgtgaagaaggctataaagtcattttggtgaattccaaccccgccacgattatgaccgaccccgaaatggcggatgttacctacatcgagccgattatgtggcagacggtggaaaaaattattgccaaagagcgtcctgacgcgattctgcctaccatgggtggtcagactgcgctgaactgtgcgctggatttggcgcgcaacggcgtgctggcgaaatacaatgtcgagctgatcggcgcgacggaagacgcgattgacaaggcggaagaccgcggtcgttttaaagaagcgatggaaaaaatcggcctctcctgcccgaaatcttttgtctgccacacgatgaacgaagctttggcagcgcaagaacaggtcggcttccctaccctgattcgtccgtctttcacgatgggcggttcgggcggcggcattgcctacaataaagatgagtttttggcgatttgcgaacgcggtttcgatgcgtcgcctacgcacgagctgctgattgagcagtctgttctcggctggaaagagtacgagatggaagtggtgcgcgacaagaacgacaactgcatcattatctgctcgattgaaaacttcgacccgatgggcgtgcatacgggcgactcgattacggttgcgcctgcgcaaacgctgacggacaaagaataccaaatcatgcgtaatgcttcgttggcagtattgcgcgaaatcggcgtggataccggcggctcgaacgtgcagtttgcggtgaaccctgaaaacggcgagatgattgtgattgagatgaacccgcgcgtgagccgttcgtccgcgctggcttccaaagcgacgggcttcccgattgcgaaggtggcggcgaaactggcggtcggctttaagctggacgagttgcgcaacgacatcaccggcggcaaaacccccgcgtcattcgagccgtccatcgactatgtggtaaccaaaatcccgcgttttgcgtttgaaaaattccctgccgcagacgaccgcctgaccacgcagatgaaatccgtgggcgaagtgatggcgatgggccgcacgattcaggaaagcttccaaaaagccctgcgcggcttggaaacaggcttgtgcggcttcaatccgagaagctccgacaaagcggaaatccgccgcgaactggcaaaccccggccccgaacgtatgctgtttgtggcagacgcgttccgcgcgggcttcacgctggaagaaatccacgaaatctgcgccatcgacccttggttcctggcgcaaatcgaagacttgatgaaggaagaaaaagcggtttcagacggcattttgagtgatttggatttcgccgccctacgccgtctgaaacgcaaaggcttctccgacaaacgtttggcacaattgttgaacgtaagcgaaaaagaagttcgcgaacaccgctacgcgctgaagctgcatccggtttacaaacgcgtcgacacctgcgctgccgagttcgccaccgaaaccgcctacctctattccacttacgaagaagaatgcgaagcgcgtccttccgaccgtaaaaaagtgatgattctcggtggcggcccgaaccgcatcggtcagggcatcgagtttgactactgctgcgttcacgccgcgctcgccctgcgcgaatcaggctttgaaacgattatggtcaactgcaaccccgaaaccgtgtccaccgacttcgacaccagcgatcgcctgtatttcgagccgctgacgctggaagacgtgttagaaatcgtccgcaccgaaaacccgtggggcgtgattgtgcattacggcggtcaaaccccgctcaaactcgccaacgcgctggttgaaaacggcgtaaacatcatcggcacatccgccgacagcatcgacgccgccgaagaccgcgaacgcttccaaaaagtgttgaacgacttaggtctgcgccaaccgcccaaccgcatcgcccacaacgaagaagaagcactcgtcaaagccgaagaaatcggctatccgctggtcgtgcgcccgtcttatgttttgggcggccgcgccatgcagattgttcactctgccgagcagttgcaaaaatatatgcgcgaagccgtgcaggtttccgaagacagccccgtgttgctcgatttcttcctcaacaacgcgattgaagtcgatgtggactgcgtttcagacggcaaagacgtggttatcggcggcattatgcagcacgtcgaacaggcgggcatccactccggcgactccggctgctcgctgccgccctactccttaagcgaagaaatccaagacgaaatccgccgccaaaccaaagcgatggcgtacgcgctgggcgtggtcggactgatgaacgtgcagtttgccgtacaagacggcgtggtgttcgtattggaagtgaacccgcgcgccagccgcaccgtgcccttcgtctccaaagccaccggcgtgccgctcgccaaagtcggcgcgcgctgcatggcaggcatttccctgaaagaacaaggcgtggaaaaagaagtcgtccccgatttctatgccgttaaagaggccgtgttccccttcatcaaattcccgggcgtggatacgattttgggaccggaaatgcgctccaccggcgaagtgatgggcgtgggcgcaagctttggcgaagcctactacaaagcccaactcggcgcgggcgaacgcctcaacccgaccggcaaaatcttcctctccgtgcgcgaagaagacaaagaacgcgtcatcaaaaccgctaaaaacttccaagccttaggctacggcatctgcgccacgcgcggcacggcgcaatacctgaccgaacacgggctgattgtgcagaccatcaacaaagtccccgaaggccgcccgcacatcggcgacgcgctgaaaaacggcgaaatcgcactggtcgtgaacaccgtttccagcgatccgcaatccgtgtccgacagccacatcatccgccaaagcgcattgcagcaacgtgtgccgcaatacaccaccactgccggcggcgaagcgatgagcgaaggtgcgaaaagccgagaccatctgggcgtgtacagcgttcaagagttgcacgggcgtttgaaaaaccgcaactga

SEQ ID NO: 51349 - DNA, 387 bp, Neisseria meningitidis; identical to SEQ ID NO: 45699

SEQ ID NO: 51350 - DNA, 2604 bp, Neisseria meningitidis
atgagcaaaaccgtccgttatctgaaagattaccaaacgcctgcctaccgcattctcgaaaccgacctgcatttcgatattgccgaaccgcaaaccgtcgtgaagtcgcgtttgacggttgagccgcagagggtaggggagccgctggtgttggacggttcggcgaaactcttgtccgtcaaaatcaacggcgtggcggcggattatgtgttggaaggcgagactctgacgattgcagacgtgccgtccgaacgcttcaccgtcgaagtggaaaccgagatcctgccggcggaaaacaaatcgctgatggggctgtatgcttccggtggcaatctgtttacccaatgcgagccggagggcttccgcaaaatcacgttctacatcgaccgtccggatgtgatgtccaaattcacgaccaccatcgttgcggacaaaaaacgctatcccgttttgctctccaacggcaacaaaatcgacggcggcgagtgttcagacggccgccattgggtgaaatgggaagacccgtttgccaaaccgagctatctgtttgctttggtcgcgggcgatttggcggtcacggaagactgtttcaccacgatgggcggcagaaacgtcaaaatcgagttttacactgccgaggcggacaagcctaaggtcggctttgccgtggaatccttgaaaaacgcgatgaagtgggacgaaacgcgcttcggtttggaatacgacttggatattttcatggtcgtcgccgtgggcgatttcaatatgggtgcgatggaaaacaaggggctgaacatttttaataccaagttcgtccttgccgacagccgtaccgccaccgataccgattttgaaggcatcgaatccgtggtcggacacgagtatttccacaactggacaggcaaccgcgttacctgccgcgattggttccagctttcgctgaaagaagggttgaccgtgttccgcgaccaagaattttccggcgaccgcgccagccgcgccgtgcgccgcatcgagaacatccgcctgctgcgccagcaccagttccccgaagacgcaggcccgaccgcccatccggtgcgccccgccagctatgaggagatgaacaatttctacaccatgaccgtttatgaaaaaggcgcggaagtggtgcggatgtatcacaccttgctcggcgaagagggcttccaaaaaggcatgaagctctatttccaacgacacgacgggcaggccgtgacctgcgacgatttccgcgcggcgatggcggacgcgaacggcatcaatctcgaccagttcgccttgtggtacagccaggcgggtacgcccgtcttggaagcggaaggtcgtctgaaaaacaatagtttcgagttaaccatcaaacaaaccgtgccgcccacgcccgatatggcggacaagcagccgatgatgattcccgtcaaagtcgggctgctgaaccgcaacggcgaagcggtggcattcgattatcagggcaaacgcgcgaccgaagccgtattgctgctgaccgaagccgaacagatcttcctgctcgaaggcgtaaccgaagccgtcgttccctcgctgctgcgcgggttcagcgcgccggtgcatctgaactatccgtacagcgacgacgacctgctgcttctgctcgcccatgacagcgacgccttcacgcgctgggaagccgcacaaacgctctaccgccgtgccgtcgccgccaaccttgccgcactttcagacggtattgaactgccgaaacacgaaaaactgcttgccgccgtcgaaaaagtcatttcagacgacctcttagacaacgccttcaaagccctgcttttgggcgtgccgtctgaagccgagctgtgggacggcgcggaaaacatcgacccgctgcgctaccatcaggcgcgcgaagccttgttggacacgcttgccgtccgcttcctgccgaaatggcacgaattgaaccgtcaggcggcgaagcaggaaaaccaaagctacgagtacagccccgaagctgccggctggcgcacgctgcgcaacgtctgccgcgccttcgtcctgcgcgccgaccccgcgcacatcgaaaccgttgccgaaaaatacggcgaaatggcgcaaaacatgacccacgaatggggcatcctgtccgccgtcaacggcaacgaaagcgatacgcgcaaccgcctgctggcgcagtttgccgacaagttttcagacgacgcgctggtgatggacaaatatttcgccctcgtcggctcaagccgtcgcagcgacaccctgcaacaggttcaaaccgccttgcagcatccgaaattcagcctcgaaaaccccaacaaagcccgttcgctcatcggcagcttcagccgcaacgtcccgcatttccacgcagaagacggcagcggctaccgcttcatcgccgacaaagtcatcgaaatcgaccgcttcaacccgcaggtcgccgcccgtttggtgcaggcgttcaacctctgcaacaagctcgagccgcaccgcaaaaacttggtgaaacaagcattgcagcgcattcgggcgcaggaaggattgtcgaaagacgtgggcgaaatcgtcggcaaaattttggattga

SEQ ID NO: 51351 - DNA, 381 bp, Neisseria meningitidis; identical to SEQ ID NO: 42684

SEQ ID NO: 51352 - DNA, 864 bp, Neisseria meningitidis
gtggaaaatgttgaaacacatagccaaaaccaccgcaagcgattgattggcacattttttctggtcggactggaaaaccttttgatgctggtgtatccggtgtttggcggctgggcgattaatgccgtgattgcggggcaggcgtggcaggcgttgctgtacgctttggttgtgcttttgatgtggctggtcggtgcggcgcggcggattgccgatacgcgcacgtttacgcggatttataccgaaatcgccgtgccggttgtgttggaacagcggcagcggcaagtcccgcattcggcggtaactgcgcgggttgccctgtcgcgtgagtttgtcagcttttttgaagaacacctgccgattgccgcgacatccgtcgtatccatattcggcgcgtgcatcatgctgctggtgctggaattttgggtcggcgtgtcggcggtgggcatacttgcgttgtttttatggcttttgccacgttttgccgccatcagcgaaaacctgtatttccgcctgaagaacagcttggaacgcgacaaccactttatccgaaaaggcgaccggcggcagctggaccgccattacggactgcttgcgcgcctgcgtgtgctgatttccaaccgcgaagccttcggctatctctgcgtcggcacggcgatgggtattttgttcggctttgcttttgtgatgatgacgctcaaaggctacagcagcgcggggcatgtctattcggtcggcacttatctgtggatgtttgccatgagtttggacgacgtgccgcgattggtcgaacaatattccaatttgaaagacatcggacaacggatagagtggtcgaaacggaacatcaaagccggaacttga

SEQ ID NO: 51353 - DNA, 678 bp, Neisseria meningitidis
atgaaactaaaaaataagtatcaaaagttcagcaaaatttcagagcaaaagtttagagaaataatccgctgtttcgctcttgatttgaccgcttccgatactgctaaaatgaccggcattagtgtacgcggtatcaatcctattttcctgaaaatcagacacaggattgctgctctgtgcgaacaaagctcaccactgtccggtgtggtcgaattagatgaatcttactttggtgcgcgacgtatcaggggtaagcgcggtcgcggagcgtcaggtaaaaccatcgtatttggcatactgaaacgcaatggcgtggtctatacggaaatcgttcccgacgcttcgaaagcctcactaatcaaggtcatacgtggtcacatatctgctgacagtgaaatcaatactgacggctggaaagcatatgacggtcttgtcgatatgggctatgagaagcattaccgtgtccatcatggttccaatgagtttgctcgaggaaagcaacatatcaatggtattgaatctttttggagttatactaaggggcgtttggctaaatttcatggtatttccaaagagatgttttatctgcatctcaaagaaacggagtttaggtttaaccaccggcatgaagatttaggtaaaatattaatgaagatgcttcgaaataacccaatttaa

SEQ ID NO: 51354 - DNA, 129 bp, Neisseria meningitidis; identical to SEQ ID NO: 42950

SEQ ID NO: 51355 - DNA, 492 bp, Neisseria meningitidis; identical to SEQ ID NO: 45366

SEQ ID NO: 51356 - DNA, 966 bp, Neisseria meningitidis
atgagctacacgcaactgacccaaggcgaacgataccacatccaatacctgtcccgccactgcaccgtcaccgaaatcgccaaacagctgaaccgccacaaaagcaccatcagccgcgaaatcagacggcaccgcacccaagggcagcaatacagcgccgaaaaagcccagcggcaaagccagactatcaaacagcgtaagcgacaaccctataagctcgattcgcagctgattcagcacatcgacacccttatccgccgcaaactcagtcccgaacaagtatgcgcctacctgtgcaaacaccaccagatcacgctccaccacagcaccatttaccgctaccttcgccaagacaaaagcaacggcagcacgttgtggcaacatctcagaatatgcagcaaaccctaccgcaaacgctacggcagcacatggaccagaggcaaagtccccaaccgtgtcggcatagaaaaccgacccgctatcgtcgaccagaaatcccgtatcggcgattgggaagccgacaccattgtcggcaaaggacagaaaagcgcattattgaccttggtcgaacgcgttacccgctacaccatcatctgcaaattggatagcctcaaagccgaagacactgcccgggcagctgttaggacattaaaggcacataaagacagggtgcacaccatcaccatggataacggcaaagagttctaccaacacaccaaaataaccaaagcattgaaagcggagacttatttttgtcgcccttaccattcttgggagaaagggctgaatgagaacaccaacggactcatccggcaatacttccccaaacaaaccgatttccgtaacatcagtgatcgggagatacgcagggttcaagatgagttgaaccaccgaccaagaaaaacacttggctacgaaacgccaagtgttttattcttgaatctgttccaaccactaatacactag

SEQ ID NO: 51357 - DNA, 516 bp, Neisseria meningitidis
ttggtaacgcgggaggtttgcgaaccgcgaagttggacagtaaagacgcggattatacaggcaaacgcgttcagacggcatctgaacgccatgccgtctgaacacgcggcttatgccgacttgacggcgagttccgccaagcgtttgctttgtgcgaaggcgatattgttttcttcggcggtcaggacgggagccgctgtcgggaatatcttttttgacggcttcgcagacggcggagactttggggacggtgcgcaatacggcttcgcaaccttcaacgctgtcgatgccgcgagcgattcggagtgcgggattgcgggtgctgccgttttggaaatagtagaggacgaggattttgagggggatttgggttcatgggcggattccgttaaaatggttcggtcttcagacggcataacagttgttccgatgccgtctgaaacagccgcagttcaggcatttgttcctgacggcaaaattggctataacatcgggcatcaatgcccaacttactga

SEQ ID NO: 51358 - DNA, 1251 bp, Neisseria meningitidis
atgttttcaaaaagcgttaccctcgcacaatatgaccccgatttggcagcagccattgcccaagaagaccaacgccagcaagaccacgtcgagctgattgcctctgaaaactacgtcagctgcgccgtaatggaagcgcaaggttcccagctgaccaacaaatacgccgaaggctaccccggcaaacgctactacggcggctgcgaatacgtcgatattgtcgaacaattggcaatcgaccgcgtcaaaaaactgttcggcgcgcaatacgccaacgttcaaccgcactccggctcgcaagccaaccaagccgtgtacgcttccgttttaaaaccgggcgacaccattttgggtatgtctttggcgcacggcggccacctgacccacggcgcgagcgttaatatttccggcaaactctacaatgccgttacttatggtttggatgaaaacgaagtgctcgattatgccgaagtggaacgcttggctctcgaacacaaacccaaaatgattgtggcgggtgcgtctgcctacgcgttgcaaatcgactgggcaaaattccgcgaaatcgccgataaagtcggcgcatacctctttgtcgatatggcgcactatgccggtctggttgccggcggcgaatatcccaaccccgtgccattctgcgacttcgtgaccaccaccacccacaaaaccctacgcggtcctcgcggcggcgtaattttgtgccgcgacaatacccacgaaaaagcactgaactcttccatcttcccaagcctgcaaggcggtccgctgatgcacgtcatcgccgccaaagccgtagcgtttaaagaagcgttgcaacccgagttcaaacaatacgcaaaacaagtgaaaatcaatgctgccgccatggcggaagaactggtcaaacgcggtttgcgcatcgtttccggccgcaccgaaagccacgttttcctcgtcgacctgcaaccgatgaaaattaccggcaaagccgccgaagccgctttgggcaaagcgcacatcaccgtcaacaaaaacgccattccgaacgatccggaaaaacccttcgttacctccggcatccgcatcggctccgctgccatgaccacacgcggttttaacgaagccgacgcacgcgtattggcgaacttggttgccgacgtattgtctaaccccgaagacgaagccaacctcgccaaagtccgcaaacaagtaactgctttgtgcaataaataccccgtttacggcgcgtaa

SEQ ID NO: 51359 - DNA, 1164 bp, Neisseria meningitidis; identical to SEQ ID NO: 38788

SEQ ID NO: 51360 - DNA, 6822 bp, Neisseria meningitidis
atgaacaagcgatgctacaaggttatcttcaacaagaaacgcagttgtatgatggctgtagcagagaatgttcatcgtgacggcaagagtatgcaggatagtgaggcggcttcggttcgagtgaccggtgccgcttctgtttcttctgcccgggcagccttcggtttccgtatggctgccttttctgtcatgttggctttgggtgttgctgcgttttcccctgcccctgcttccggcatcattgccgacaaatccgcccctaaaaaccaacaagccgttattcttcagacagcaaacggtttgccgcaagtcaatattcaaactccgtcatcccaaggcgtttctgttaaccgattcaagcagttcgatgttgatgaaaaaggcgtaatactaaacaacagccgcagcaatacgcaaacgcaactcggtggatggattcaaggcaatccccatctggcacgcggcgaagcgcgggtaattgtgaaccagattgacagcagtaatccttcgttgttgaacggttatatcgaagtcggcggcaaacgcgccgaagtagtcgttgccaatccgtcgggcatccgtgtgaatggcggcggattgattaatgccgcttcggttacgctgacttcgggcgttcctgttttgaataacggcaatctgacgggctttgatgtttcttcgggtaaagtcgtgattgggggcaaaggtttggatacctctgatgccgattacacccgtatccttagtcgtgctgctgaaatcaatgcgggcgtttggggtaaagatgtcaaggtggtttcgggtaagaacaaattggattttgacggctctcttgccaaaacagcttctgcgccatcttcttcggattctgttactcctaccgttgccatcgacaccgccacactgggtgggatgtacgcagacaaaatcactttaatcagcaccgacaacggcgccgtaatccgcaacaagggtcggatttttgccgcaacaggcggcgttacgttaagcgcagacggcaaattgagcaacagcggttcgattgatgctgccgaaatcaccatttccgctcaaaccgttgataaccgccaaggctttatccgcagcggcaaaggcagtgtattgaaggtttcagacggcataaataatcaagcaggcttaatcggctcggccggtttgctggatattcgcgatacaggcaaaagcagcctgcatatcaataacacagacggcacgattattgcgggcaaagatgtttccttacaggcaaaatcactggacaacgacggcatattaaccgccgcacgcgatgtttccgtttctcttcatgatgattttgccggcaaacgcgatattgaagccggacgcacactcacgttctccacccaaggccgtctgaaaaacacccgcatcatacaggcaggcgataccgtatccctgaccgccgcccaaatcgacaacactgtctccggtaaaatccaatccggaaaccgcaccgggttaaacggcaaaaacggcatcaccaacaggggtttaatcaacagcaacggtataacgctgctgcaaaccgaagccaagtcggacaatgccggcacgggcagaatttacggcagccgtgtggcagttgaggcagataccttgttgaaccgggaagaaacggtcaacggcgaaaccaaagcggcggtaattgcagcgcgggagcggttggatattggagcgcgggaaattgagaaccgagaggcggcattattgtccagctccggcgatcttcatatcggttctgcattgaatggaagccgacaggtgcaaggagcaaatacatcactgcacaaccgcagtgcggcaatcgaatcatcaggcaatatccgtatcgctacaaaagatttgcagaataccaatgagcatctgcgtttccatacggaagaaacccatcgcgaacaccgtatcgaatatcaggcggaaggcagaacagaacgctatccggaaggttctcaaaaagagttgggctgggaaatatttgaagatgagtctttacatatgcggactccggacggcagcccccactctgtctggtacaaatacgattacgaacgaatcaccgccgagagcaaaattaccgaatccaagcccggtcaaatcatcagtggcggcaatttggttttagatgccgccaagctgaaaaatcataacagccggattattgccggcggcagattgatcgtcggtacgcccgaatccgcattggacaatgatgaaactttgggaacaaaaaccataaccgataaaggggacttgcaccgttaccaccgtcatcacaagaaagggcgggattctacgggatacagtcggtctccctacgaaccggcccccgaagtcagctccatccgtatgggtatttcagcctataaaggctatgcgccccaacaggcatctgatatacccggcactgttgtacccgttgttgctgaaaacggcatccatcctacatttactctgccgaacagcagcttgtttgccattgcgccaaacaacaaaggctatttgattgaaaccgaccctgcctttaccgactaccgcaaatggctgggcagcggctatatgcttgccgcactgcaacaagacccgaaccatatccacaagcgtttgggcgacggctattacgagcagaaactggtaaacgaacaaatcgccaagctgacaggctaccgccgcttggacggttataccaatgacgaagagcaattcaaggctttgatggataacggcattaccatagccaaagaattgcagcttactccgggtattgccctgtctgccgaacaggttgcccgtctgacttccgacattgtttggctggaaaacgagaccgttaccctgcccgacgggacaactcaaaccgtattgaaacccaaagtctatgtccgcgcacgccccaaagatatgaacggacaaggggcgttgctgtccggcagcgttgttgatatcggcagcggcgccattgaaaaccggggcggcttaattgccgggcgcgaagcactaattttaaacgcacagaatattaaaaatctgcaaggtgatttgcagggcaaaaacatcttcgccgcagcaggcagcgacattacgaataccggcagcatcggcgcagaaaacgccctgctgctcaaagcgagtaacaatatagaaagccgcagcgagacccgcagcaatcagaatgagcaaggctcggtacgcaatatcggccgggtggcaggcatttatctgaccggcaggcagaatggaagcgtcttgctggatgcaggcaacaatatcgtcctgacggcttccgaattgaccaatcaatctgaagacggtcaaaccgtactgaatgccggcggcgacatccgctcggatacgacgggcatttcccgcaatcagaacactatctttgattccgacaactatgtgattcgcaaagaacaaaacgaagtcggcagcaccatccgcacccggggcaatctcagtctgaatgcaaaaggagacatccgtatccgtgcagcagaggtcggcagcgaacaaggccgtctgaaactggcagccggacgggatatcaaagtcgaagccggcaaagcccataccgaaaccgaagatgccctgaaatacaccggtagaagcgggggcggcatcaaacagaagatgacccgccatctcaagaaccaaaacggacaagccgtatccggcacgctggacggcaaagaaatcattctggtttcaggacgcgatattaccgttactggcagcaatatcattgcagacaaccataccattctctcggcaaaaaacaatatcgtccttaaagcagccgaaacacgcagccgcagtgccgaaatgaacaaaaaagaaaaatccggactgatgggcagcggcggcatcggctttacggcgggcagcaaaaaagacacgcaaaccaaccgatccgagaccgtcagccacacagaaagcgtcgtcggcagcctgaacggcaataccctgatttcggcaggaaaacattacacccaaaccggttcgaccatatcctcgccccaaggcgatgtcggcatttcctccggaaaaatcagcatcgatgccgcacaaaaccgttacagccaagagagtaagcaggtttacgaacaaaaaggcgtaaccgtcgccattagcgttccggttgtgaataccgtaatgggcgcggttgacgccgtaaaagcagtccaaaccgtcggcaaaagcaaaaacagccgggtcaatgccatggctgctgccaacgccttgaataaaggagtagattccggcgtggcactctataatgccgcccgaaatcccaaaaaagcagccggtcagggcatcagcgtctccgttacctacggcgaacagaagaacacctccgaaagccgcatcaaaggcacgcaggtgcaagagggcaaaatcaccggcggcggcaaagtttccctgactgcttcaggcgcaggcaaagactcccgcatcacgattaccggctccgatgtgtacggcggcaaaggaacacgcctcaaagcagaaaatgccgttcagattgaagccgcccgccaaacgcatcaggaacgcagcgaaaacaaatccgcaggctttaatgccggagtcgccatcgccatcaacaaaggcatcagtttcggcttcacagccggagcaaactacggcaaaggttacggcaacggcgacgaaaccgcctaccgcaacagccatatcggcagcaaagacagccaaaccgctattgaaagcggtggcgataccgtcatcaaaggcgggcagcttaaaggcaaaggcgttggcgtaacggcagagagtctgcatatcgaaagtttgcaggataccgccgtgtttaaaggcaaacaggaaaatgtttccgcccaagttacggtaggctacggctttagtgtcggtggcagctataaccgctcgaaaagcagctcggattatgcatccgtcaacgagcaaagcggtatctttgcaggaggagacggctatcggattcgcgtaaacggcaaaaccggattggtcggcgccgctgttgtttcagatgccgacaaatcaaaaaacctgctgaaaacaagcgaaatctggcataaagatattcaaaaccatgcttcggcggctgcttccgccttgggcttgagcggcggtttttcatacagcccgaagcctaccagcggacagtattccaccaaaaaagaagcagaaatcggtaaaatcggcggcaaaccggtcagcctgatgcgttttgaccaggtttcggcgaaagacgacgagttgaacgaaaaatatcgaagtgagcgtattgaaaaaggggaaacctttaaagaggcaaatttaaatcaaaacaacgccggcggcttgaaattcggtttgaagcaaaacgatatacacagcaacgacaaatacgccttggcaaaaatgggtttgggcaatctgttgggcaatgccaaagaatcagaaagccgccaatccattacccgctccgtcatcagtgagggagattggcaaattgcttccgcgcagggcaggaaaaatattgccggtattgaaaaaggcacttcatccgcacataaggcattggcaaaagcagaccgcgaaggcttgctgaaagaagtcgaactcaatagggatgttgccaaagagtttatcaatgagacgctgatcggcggcattgcagacgaagcctaccgcagccagtttattgcagaacaccgcctgatgacctttaaaatggatgaaaacggcgagccgattgaagataagcagcttgaagaggatataaataaacagtttgacaactcagtaaagttgaaaaaagaatttgcctcatttaaagattattgggaagcctataaagccattgggggaaatatctacgaattgcgcgaagtatccgaccaggaacggaaaaatctgaaaactgcccgttacaccgacccggagaccggcaaaaccgttgaaaaaatcgttgtcggcgtcaacggcattttcaataatatacaagcagccgccaaatttgccgcccaacaatatgtggggcgtttcaatcccgagaaaaaccgatatgaacgcacctatgaaaatgtttatttcctgcacaatccggaaaccaatgggcggggcttttcaaaattgcccgaaatcgccgttgcggcctttcataaaatgctcgaaggggcaaaaataggcaataagaccgttatcggcttgagcaattcaggcttggctttaggcaatatcatggaagactacgggaaggataaaaacggcctgtttgtcggctcgcacagccgtggaaccctggtggtcgacaatgtactcaataccttgaatacccaagccaatcgggataagaaaattttatccaataccgaactgaaaatggtcggccctgccgccaacgttgtccgggcagataaaaggctgtttcaactgcagcagggggtaacgacacccagaacggcagatttcgcccgtcagtccatccaaatagaaaaccacgaattagaccttatcggcatgctgattggcagaaatccggcaacagtcggaaccaatacccggcaaaaaagccaatggcaggctataagggatattataggggattacacctcgccgcataattgctacggtatggctaataaacaatgtgtaacagatggtcatcgagaccctgaaaataaacaaacccaaagtccgacaggtgtatttgaaagaggagtgtccaacgaaatcgaaattatgtaccgtcctgtacgcatttatgatctgcaacatccgaaaggaaaaacaaaatga

SEQ ID NO: 51361 - DNA, 486 bp, Neisseria meningitidis; identical to SEQ ID NO: 42873

SEQ ID NO: 51362 - DNA, 642 bp, Neisseria meningitidis; identical to SEQ ID NO: 38129

SEQ ID NO: 51363 - DNA, 630 bp, Neisseria meningitidis
ttgccgggcgttttcgtacttgccgcgcttgccgcctgcaaacctcaagacaacagtgcggcgcaagccgcttcttcaagtgcatccgcgtcggctgcggaaaatgcggcaaagccgcaaacgcgcggtacggatatgcgtaaggaagacatcggcggcgatttcacgctgaccgacggcgaaggcaagcctttcagcctgagcgatttgaaaggcaaggtcgtgattctgtctttcggctttacgcactgtcccgatgtctgcccgacagagcttttgacgtacagcgacacgttgaagcagttgggcgggcaggctaaggacgtgaaagtggtgttcgtcagcatcgatccggaacgcgacacgcctgaaatcatcggcaagtatgccaaacagttcaatccggactttatcggtctgacggcaacgggcggccaaaacctgccggtcatcaagcagcaataccgcgtggtttctgccaaagtcaatcaaaaagacgacagcgaaaactatttggtcgaccactcttccggtgcgtatctcatcgacaaaaacggtgaggttgccattttctcgccttacggaagcgagccggaaacgattgctgccgatgtaaggaccctgctctga

SEQ ID NO: 51364 - DNA, 822 bp, Neisseria meningitidis
atgtctttgcaaaacatcatcgaaaccgcctttgaaaaccgcgcggacatcaccccgaccaccgttactcccgaagtcaaagaagccgtgttggaaaccatccgccagctcgattccggcaaattgcgcgtcgccgaacgcttgggcgtgggcgagtggaaagtcaacgaatgggcgaaaaaagccgtgttgctgtccttccgcatccaagacaacgaagtcctcaacgacggcgtgaacaaatacttcgacaaagtgccgaccaagtttgccgattggtctgaagacgagttcaaaaacgcaggcttccgcgccgttccgggtgcggttgcccgacgcggcagctttgttgccaaaaatgtcgtgctgatgccgtcttatgtcaacatcggcgcatacgttgacgaaggcgcgatggttgatacttgggcgaccgtcggctcttgcgcgcaaatcggtaaaaacgtccacttgagcggcggtgtcggcatcggtggcgtactcgaacccctgcaagccagcccgaccattattgaagacaactgcttcatcggtgcgcgttctgaaatcgttgagggcgtgattgtcgaagaaggcagcgtgatttcgatgggcgtgttcatcggtcaatccaccaaaatcttcgaccgcaccaccggcgaaatctaccaaggccgcgtaccggcaggttcggtcgtcgtgtccggcagtatgccttccaaagacggcagccacagcctttactgcgccgtcatcgtcaaacgcgtggacgcgcaaacccgtgcgaaaaccagcgtgaacgaattgttgcgcggcatctga

SEQ ID NO: 51365 - DNA, 135 bp, Neisseria meningitidis
atgtccgatactaaaaatggttggttagcaaaagacggttgggttaagcgtgttcaaaacgtaaacaaaattgaaatacattacattgaaaactcaagaaccggtgagaaaacagattttaagtttaaggattag

SEQ ID NO: 51366 - DNA, 1542 bp, Neisseria meningitidis
atggttttcgataataattatcattacaatgcaatgccggttcgtttgcttgtgaacattcaagatgccgactctgacggcattcagacagcatctgaaaacaataacggcacaaggatggggtacaatcgccctatggaaaaaaacaccctatccgcccgcgcaccatccccttggctgccgcttctgctggcaattgccatttttatgcagatgttggatgcgaccattttaaataccgcactgcctgaaattgccgccgacctgaatgagtcgccattgaacatgcagctggcggttatttcctacacgctgacggttgccctgctgattcctttgagcggttatttggcggacaggttcggaacgaaaaaagtctttttcggttcgattgccgtttttatgctcggatcggcattgtgcgccgcatcgggttcgctgtttgaattgacgctttcccgtgtcgttcagggcatcggcggttcgatgctggttccgataccgcgtctgaccatcttgcgtgtgtacgacaagtccaagctgctcaacgccatcaattatgcggttatgcccgcattaatcggaccggttttagggcctttggcgggcggttatctggtcgaatacgcttcgtggcactggattttcctgctcaacctgcccatcggtcttttgggtttcatattgggacgcaacatcatgcccgatattaaaggcagcaatatctctttagacttcaaaggttatctgattttttctgccgccgcgtgcctcttgttactttcggcagaaagcctgtcgcacgcgctgcctccgtattttgcactgttgccgctgtgcggcggactgctgtttgcacgccgttatttccgacatatgaaaaccgcgtccaaaccgatttattccgccgacctgtttctgatacgcactttccgtctaggactggcgggcaatctgttcagccgtctcggcatcagctcgattccttttctgatgcccctgatgtttcaagtcgctttcggcttcggcgcaagcctgtcgggttggctggtcgcccccgtcgccctgtcttcgctgctggtcaaaccgctgattgcaccgctcatgaaacgtttcggctaccgcacggtactgctttggaacaccaagctgcttgccgccttcatcatgctgctcgccctgcctgatggaaactcgccgctgtggatttggattttcctctcgctggcgatcggcgcgtgcaactccctacagttttctgccatgaacacactgaccctcgccgatttgcgcccgcaacagaccggcagcggcaacagcctgatggcggtcaaccaacagctttccatcagcatgggcattgttgccggcgcattaatccttaaaaactggacatttctgataccggcttcttcaggtctgcattccgccttccgtatgaccctgctcagtatcggcggcattacccttgcctcgtcgttggttttcaagcgtctgcacgtttcagacggtgcaaacctgacacggaacacaccgtcctaa

SEQ ID NO: 51367 - DNA, 369 bp, Neisseria meningitidis
atgacgtgttttaaaatcaggctttcaaaacaatcattgaaaggcagaaccatgaacaagccgtttatcactcaggcgcagttggcactttataaatatcagccgtctagcaagtattttgggcaatcgatggcattaattgctcagaaagaatttgaagaatttgttaataacgtaaaagagtacgatattttagagagtttctcttatttcttaaataagagagtcgcacataatatttggaagatttatttttctgatgaatctgttatttttataagaaaatcagaagagaacggaaaaactgttcatgaattcgtttatcaagagtacaccgatagttctgattttaattctatgttcgagtaa

SEQ ID NO: 51368 - DNA, 828 bp, Neisseria meningitidis; identical to SEQ ID NO: 38917

SEQ ID NO: 51369 - DNA, 486 bp, Neisseria meningitidis; identical to SEQ ID NO: 37367

SEQ ID NO: 51370 - DNA, 846 bp, Neisseria meningitidis; identical to SEQ ID NO: 44327

SEQ ID NO: 51371 - DNA, 606 bp, Neisseria meningitidis
atgaccatctatttcaaaaacggcttttacgacgacaccttgggcagcatccccgaaggcgcggttgccgtccgcgccgaagaatacgccgcccttttggcaggacaggcgcagggcgggcagattgccgcagattccgacggccgccccgttttaaccccgccgcgcccgtccgaataccacgaatgggacggcaagaaatgggaaatcggcgaagccgctgccgccgcccgtttcgccgaacaaaaaaccgccacggcattccgcctcgcggcaaaggcggacgaactcaaaaacagcctcttggcgggctatccccaagtggaaatcgacagcttttacaggcaggaaaaagaagccctcgcgcggcaggcggacaacaacgccccgaccccgatgctggcgcaaatcgccgccgcaaggggcgtggaattggacgttttgattgaaaaagttgtcgaaaaatccgcccgcctggccgttgccgccggcgcgattatcggaaagcggcagcagctcgaagacaaattgaacaccatcgaaaccgcgccaggattggacgcgctggaaaaggaaatcgaagaatggacgctaaacatcggctga

SEQ ID NO: 51372 - DNA, 423 bp, Neisseria meningitidis
atgcaggttacatcaaaatggatagacgggatgtgttttgtcggcacgacggaaggcgggcacagcgtcgttatggaggggtcggcggcagaaggtgcggccaagcgcgggcccagccctttggaaatgctgctgttgggcgtggcgggctgttcgagcatcgatgtggtgatgattgccgaaaaacagcgtcagaaagtgactgactgccgtgcgacggttacggcgaaacgggcggacgatgcgccgcgcgtgtttaccgaaatccacatccatttcaaagtattcgggcatgatttgaaagaatcggccattgagcgcgccgttcagatgtctgccgaaaaatactgttcggcttcgattatgttgggcaaagcggcaaagattacccacagttttgaaattgccggggcagataaatag

SEQ ID NO: 51373 - DNA, 1059 bp, Neisseria meningitidis
atgtcaggctatacaggcggcctcgttgtttcaggtggcatatcattaattgacagacttgatattatggaaaatgtaaaccgcatcgttgcagaaggcattgccgcagtagaagctgcgcaagacttcaacgctctagaacaaatcaaagcccgttatcttggcaaaaccggcgagttgaccggacttctgaaaactttggggcaaatgtcgcctgaagagcgcaaaaccataggtgcgcatatcaatgaatgcaaaaaccggtttcagacggcttttaatgccaaacgcgatgccctcaacgaagccaagctgcaagcccgacttgccgccgaagccctcgacattaccctgcccggacgcgctcaggaaggcggcagcctgcatcccgtaaccctgaccttgcaacgtgtggtcgaactctttcacggaatgggtttcgaagtggcggacgggcctgaaatcgaagacgattttcacaatttccaagccctgaacatccctgcaaaccatcctgcccgtgcgatgcaggatacgttttacgttgaaaacggcgatgttttgcgtacgcacacttccccgattcaaatccgctatatgctcgataaaaaagagccgcccatccgcattatcgcccccggccgcgtttaccgtgtggacagcgatgccacgcactcgcctatgttccatcaggcggaaggtttgtgggtagaagagggcgtaacttttgccgatttgaaagcagtgttcacggattttatccgtcgcttctttgaacgcgatgatttgcaagtacgtttccgcccgtctttcttcccgttcaccgaaccgtctgccgaaatcgacattatgggcgaaaacggcaaatggctggaagtcggcggctgcggcatggtgcatcccaacgtgttgaaaaatgtgaatatcgattctgaaaaatacaccggtttcgctttcggtatcggtctcgaccgcttcgctatgctgcgttacaacgtgaacgacttgcgcctgttcttcgataatgatttgaactttttgaagcagtttgcgaaatga

SEQ ID NO: 51374 - DNA, 597 bp, Neisseria meningitidis; identical to SEQ ID NO: 48674

SEQ ID NO: 51375 - DNA, 471 bp, Neisseria meningitidis
ttggctgaaggtcaaaaatcagccgtcaccgagtattacctgaatcacggcgaatggcccgccaacaacagttctgccggcgtggcaacctccgcctccgacatcaaaggcaaatatgttcaaagcgttgaagtcaaaaacggcgtcattaccgccacaatgctttcaaccggcgtaaacaaagaaatccaaggcaaaaaactctccctgtgggccaagcgtcaagccggttcggtaaaatggttctgcggacagccggttcagcgcgccggcaccgccaccgacgacgccatcaccgccgccaacggcaccgacaagaaaatcgacaccaaactagagaaacctttttacccgaaagtttccgtaccgacagacctagattcccgcctgcgcgggaatgacggcggagcggtttctgttttttctgataaattcctaaaacttaaaatttcatcattcccacaaggatag

SEQ ID NO: 51376 - DNA, 1173 bp, Neisseria meningitidis
atggcaacacatgcagatgaaacgacaattcaaaacagacaagaagccaatagcgcaaaagtcaaacgcaaacgccgcctgacggcattgacgctgctgttcgcgcttgccgccgcagccgccgggtcggcgttttttttatggtggcagcacgaagaggaaacggaagacgcttatgttgccggacgcgtggttcaggttacgccgcaaaagggcggtacggtgcggaaggttttgcacgacgatacggatgccgtgaaaaaaggcgacgtgctggcggtattggacgacgataatgatgtgctggcttacgagcgggcaaaaaacgagctggttcaggcggtgcggcaaaaccgccggcaaaatgccgccacttcgcaggcgggggcgcaggttgccttgcgccgggcggatttggcacgcgcacaggatgatttgcgccgccggtctgctttggcggaatcgggcgcggtgtccgccgaagagctggcacacgcccgtgcggcagtgtctcaggcgcaggcggcggtcaaagcggctttggcggaagaatcttcggcacgcgcggctttgggcggagatgtttctttgcgcgaacagccggcggttcagacggcaatcggcaggttgaaagatgcgtggttgaaccttcagcggacgcaaatccgcgcgccggcggacggtcaggtggcgaagcgttcggtgcaggttgggcagcaggtggcggcaggcgcgccgctgatggcggtggtgccgctgtcggatgtgtgggtggatgctaattttaaagagacgcagttgcggcatatgaaaatcggacagcctgccgagctggtgtccgatttgtacggcaaacaaattgtttatcgcggcagggtggcaggtttttcggcaggtacgggcagcgcgttttcgctgattccggcgcaaaacgcaacgggcaactggattaaagtggtgcagcgcgtccccgtccgtatcgtgctgaaccgcgaagatgtggacaggcatccgttgcgtatcggtttgtcgatgacggttaaagtggatacttccgccgcaggcgcgcctgtttcaaaaacgccgggtgcggcattgccggaaatggaaagtaccgactggtcggaagtcgatcggacggtcgatgaaatcctcgggcaatccgcgccctga

SEQ ID NO: 51377 - DNA, 1911 bp, Neisseria meningitidis
atgactctggaaaccctgcttgccctaccgcgcaacatcaagaaaatctgtttcctcatacacgattttctgatgattttcattgccttttggtttacccaaagcctgaaggccgactactcgaacgaatggttcgaccctgccaactggcagtctttcctattgaccgcgccgttgaccatcggcctgttcgtcagaatggggctctaccgtgccgttacacgcttcatcagcttccgcatcctctccaccgcgctggcaggcagcctcgcctccgccgtattgttcttcctcaacacattgatttttgaagaaaggctgcgcctcgccctgccgattgtctatttcttactgctgtttgtttccgtgaccggctcgcgtatggttttgcgcggactgttgtccgaacacccccaaaaacagatgatccctgtcatcatttacggcgcgggacggtcgggcagacaactgcttgaggccgtcaaacaaatgcgcgaatattccgccgccgcctttgtggacgacgaccccaaactgtggcacaccgtcatctacgaccttgccgtttaccagcccgatgccatcgccttcctcatcgaacgctacggcgtggaaaaaatcctgctcgccatccccggcgcgacccaggaacaacgccgccgaatcatcagcaaactggaagcctatccgtgcgaagtgttgaccattcccggaatgaaagacctgatggacggaaaaatcagcatcggcacgctcaaaaaaatctctgtgtccgacctgctcgggcgtgattccgtcgcaccagacgaccgcctcatgaatgccgacatcgaaggcaaaaccgtcatggtaaccggcgcgggcggctccatcggttcggaactctgccgccagattatccgccgccgccccgaaaagctgctgctgttcgagttatccgaattcgccctgtacgccatcgaaaaagaattgcgcgaaacctgcatccaaaaacgcctcgataccgaaatcctgccctttctcggttcggtgcaaaaccgcacgctgctcgaacacgtcatgaccgccttttccgttgcgaccgtctatcacgccgccgcctacaaacacgtccccatggtcgagttcaacaccgtcgaaggcatacgcaacaacatcttcggcacactcgagtgcgcgcttgccgccacggcatcgggcgtaagaactttcgtcctcatctccaccgacaaagccgtccgccccaccaacaccatgggtgccggcaaacgcatggcggaactctgccttcaagcgctcgccgccgaacccggacaaaaaacccgcttcagcatggtgcgtttcggcaatgttttaggttcgtccggctccgttgtcccgctgtttgaaaaacagattgccgaaggcggcccgcttaccctgacccaccctgaaatcacacgatatttcatgaccatacccgaagccgcccaactcgtcatacaggcaggtgcgatgggtacgggcggcgacgtattcgtcctcgacatgggcgaatccgtcaaaatcatcgaccttgcccgccaaatgattaccttaagcggcctcaaacccaaaacacccgaacaacccgacggcgacatcgaaatcctcattaccggactgcgtcccggagaaaaactctacgaagagctgctcatcggcgacaacgtccgcaaaaccggccatccgcgcattatgacggctgacgaggcgatgctgccgtggcacgagctctctgtcctgctcgaccgcatccgtgcggcctgcgaccgttacgaccagcaggcaatccgcaccctgctcataaacgccccgaccggctttaccccaagcgacggtatctgcgacctgctttgggtacgagaaacacacagaaaaaatgccgtctga

SEQ ID NO: 51378 - DNA, 624 bp, Neisseria meningitidis; identical to SEQ ID NO: 37513

SEQ ID NO: 51379 - DNA, 324 bp, Neisseria meningitidis
atgtttttagatgatgtaaatgtttttttagatgatttaaatactaatccaatcactgacgaatggtatatgtccaattttgccgataaacatattaaaattttggaaagttacgaaacctttgatattctaaaacaatttgttgattacatgattgaagaatatgatgaaaaatcagaatatgaaatcatggaaatattgagacaattaaaatatcaagcagataccaacgaaaaattttatacaaatacacagaaacagaaaattgtagaattatataaacaagaaattagtcaggatattttaaatgaaatctttagataa

SEQ ID NO: 51380 - DNA, 708 bp, Neisseria meningitidis
atggaaaaaatgagttttgaaatttaccgttacaacccggatgttgatgccaagccttatatgcagcgttacgagttggaattggaaccgaccgacgtgaaacttttggacgctttagtgcgcctgaaagcacaagacgataccttgtctttccgccgctcctgccgcgaagggatttgcggttctgacggtatgaacatcaacggcaaaaacggcttggcgtgtttgaccgatctgcgtggcttgaaacagccggttaaaattcgtcctctgccaggtctgcctgttatccgcgacctgattgtggatatgacccagttcttcaaacaataccattccgtcaaaccttatgttgtcaacgataatccgattgatgcggacaaagagcgtctgcaaactcaggaagagcgtaaagagttggacggtttgtacgagtgtattttgtgcgcctgctgttcgactgcctgcccgtcattttggtggaaccctgataaattcgtcggtccgtccggtttgctgaatgcttaccgtttcattgcggacagccgtgataccatcactaatgagcgtttggataatctgaacgacccataccgtttgttccgttgccacaccattatgaactgcgtagacgtatgtcctaaacacttgaatccgacccgagccatcggtaagattaaagagattatgttgaaacgggccgtttaa

SEQ ID NO: 51381 - DNA, 300 bp, Neisseria meningitidis; identical to SEQ ID NO: 37909

SEQ ID NO: 51382 - DNA, 165 bp, Neisseria meningitidis; identical to SEQ ID NO: 42784

SEQ ID NO: 51383 - DNA, 519 bp, Neisseria meningitidis; identical to SEQ ID NO: 39562

SEQ ID NO: 51384 - DNA, 432 bp, Neisseria meningitidis; identical to SEQ ID NO: 43184

SEQ ID NO: 51385 - DNA, 459 bp, Neisseria meningitidis; identical to SEQ ID NO: 43454

SEQ ID NO: 51386 - DNA, 234 bp, Neisseria meningitidis
atgtctatggaaataaaattcaatactttgggggttatcctgaatggggtcaatcctgaagaaaaattcataaaaattattgatgaccaggaaaataccggtggatttctgatactgttatcttcaaatgacaaattttcatcgtttgacagttacgatgactgggtcgaaaacttagaaatattaaaagaatacctgcaagaatctcattggataataaagtgggtcggatag

SEQ ID NO: 51387 - DNA, 459 bp, Neisseria meningitidis; identical to SEQ ID NO: 41438

SEQ ID NO: 51388 - DNA, 489 bp, Neisseria meningitidis
atgaccccgttatttagaaaagccgtttggctgctgtttgccgtttcggtctgtgcatttgccggttctttggcggcacagtatgttttgggtatggagccttgcgttttgtgtatcagtcagcggttatgcgttttggcaaccgcattgtgtacggcaattgtcctgatgtgcagaccaagaagaagggcaggcggtttgttcggtgctgtctttatcagcattccggccgttacgggtatttctgttgcggcatatcagttgtggttgcagtcgctgccgccgggaaccgctccttcgtgcggcgcgccgtggacgttccgcttgaaaggctggcctttgtttgattggttcgagcctgtcgtgcgcgggttcggaaattgtgctgaaccggattatctgctgggaattgctttgcctgtttggagcgtggcgtattttctggcggttgtcctgacggtttggtgggcgtgggcaagggctaaataa

SEQ ID NO: 51389 - DNA, 1923 bp, Neisseria meningitidis; identical to SEQ ID NO: 45754

SEQ ID NO: 51390 - DNA, 687 bp, Neisseria meningitidis; identical to SEQ ID NO: 36558

SEQ ID NO: 51391 - DNA, 2385 bp, Neisseria meningitidis
atggccgacaactacgtaatttggtttgaaaacctgcgtatgacagatgttgaacgcgtgggcggtaaaaacgcctcgctgggcgaaatgatcagtcagctgaccgaaaaaggcgttcgcgtccccggcggctttgccaccacagccgatgcctaccgcgcattcctcgcacacaacggtctgagcgaacgcatttccgccgcactggcaaaattagatgtcgaagacgttgccgaactggcacgcgtcggcaaagaaatccgccaatggattttggacacgcccttccccgaacagctcgatgccgaaatcgaagcggcatggaacaaaatggttgccgatgccggcggcgcggacatttccgttgccgtacgctcttccgcaaccgccgaagacctgccggacgcatcgtttgccggccaacaggaaaccttcttgaatatcaacggcttggaaaacgttaaagaagcgatgcaccatgtattcgcctccctgtacaacgaccgcgccatttcctaccgcgtccataaaggcttcgaacacgacatcgtcgccctttccgccggcgttcaacgcatggtgcgttccgacagcggcgcatcaggtgtgatgttcaccctcgacaccgaatccggctacgatcaagtcgtctttgttacctcctcttacggtctgggcgaaaacgtcgtacaaggtgcggtcaacccggacgaattttatgtgttcaaacccacgctcaaagcgggcaagcccgccatcctgcgcaagaccatgggttcgaaacacatcaaaatgatttttaccgacaaagcagaagccggtaaatccgtaaccaacgtcgatgtccccgaggaagaccgcaaccgcttctccattaccgacgaagaaatcactgagttggcgcattacgcactgaccatcgaaaaacactacggccgcccgatggacatcgaatggggacgcgacggcttggacggcaaactctacatcctgcaagcccgtcccgaaaccgtcaaatcccaggaagaaggcagccgcaacctgcgccgcttcgccatcaacggcgaaaaaaccgtattatgcgaaggccgtgccatcggtcagaaagtcggacagggcaaagtacgcctgattaaagatgcttccgagatggattccgtcgaagccggcgacgtactggttaccgacatgaccgatccggattgggaacccgtgatgaaacgggcttccgccatcgttaccaaccgtggcggacgcacctgccacgcggcgattatcgcgcgcgaactgggcattcctgccgttgtcggctgcggcaatgcaaccgaattgctgaaaaacggtcaagaagttaccgtatcctgtgctgaaggcgataccggcttcatctatgccggtctgttggacgtacaaattaccgatgtcgccttggacaatatgcccaaagcacccgtcaaagtcatgatgaacgtcggcaaccccgaactcgcattcagcttcgccaacctgcccagcgaaggcatcggcttggcgcgtatggaatttatcatcaaccgccaaatcggtatccacccgaaagccttgttggaatttgacaaacaagatgacgaattaaaagcggaaattacccgccgtatcgccggttacgcgtcccctgtcgacttctacgtcgataaaatcgccgaaggcgtggcgacattggccgcatcggtttatccgcgtaaaaccatcgtccgtatgtccgacttcaaatccaacgaatacgccaacctggtcggcggcagcgtatacgaaccgcatgaagaaaacccgatgttgggcttccgtggtgcggcgcgttatgtcgccgacaacttcaaagactgtttcgccttggaatgcaaagccttgaaacgcgtccgcgatgaaatggggttgaccaacgttgaaatcatgattccgttcgtccgcactttgggcgaagccgaagccgttgtcaaagccctgaaagaaaacggcttggaacgcggcaaaaacggcctgcgcctgattatgatgtgcgagctgccgagcaacgcggtattggcggaacaattcctgcaatacttcgacggcttctccatcggctcgaacgacatgacccaactgaccctcggtctcgaccgcgacagcggcttggtatccgaatcgtttgacgaacgcaaccctgccgtcaaagtgatgctgcaccttgccatctccgcctgccgcaagcagaacaaatatgtcggcatctgcggtcaaggcccgtccgaccatccggacttcgccaaatggctggttgaggaaggcattgaaagcgtttccctgaacccggataccgtcatcgaaacttggctatatttggcgaatgaattgaacaaataa

SEQ ID NO: 51392 - DNA, 810 bp, Neisseria meningitidis
atgattcaagacacccgaccccttatccgcgtcgttgccggcatcctgctcgattcagacggcaactacctgctcagctcgcgccccgaaggcaaaccctatgccggatattgggaatttgccggcggcaaggtcgaagcgggcgaaaccgacttccaagccttgcaacgcgagtttgaagaagaactcggcatccgcatcctcgccgccacgccttggctgaccaaaatccattcctacgaacacgcccgcgtctgcctgaaattcctatgggtaaaccccggccaatggacgggcgaaccgcaatcgcgcgaaggacaggcatggtcgtggcagaaagcgggtgattttaccgttgcccccatgctgcccgccaacggcgcgcttttgcgttcgctgtccgtcccgcgccgtttgtacggcagcctgaaaacgggtttgcacggagaaaacagtatgggcgcgtaccgcgtcctgcctttgggttcggcagagggaagcggtgcgaacgttttgatggaggcggcgcaatggcaggacagacccgaacacgccgacagcgtgtggatgatggtgcagacccgcgaacaatggcggcaggcgcaggaaaagggcgcggatgttgtcgtgtggcgcgtgtgcaatgatgttcaggcacaagaggcggcagaagccctgcggcagggcgtatccgtgccgctcgtacttgcagcaaacggacagacggttgcacgttatggaaaactatggctcggattgggggcgcacgtggtggtaagggatgaaacaatagggaagaatcatgaataa

SEQ ID NO: 51393 - DNA, 1866 bp, Neisseria meningitidis
atgatagaaaaactgactttcggactgtttaaaaaagaagacgcgcgcagctttatgcgcctgatggcatacgtccgcccctacaaaatccgcatcattgccgccctgattgccattttcggcgttgccgccaccgaaagctaccttgccgccttcatcgcccccctgattaaccacggcttttccgcacccgccgcgccgcccgagctgtctgccgccgccggcatcatttccaccctgcaaaactggcgcgaacagtttacctatatggtttgggggacggaaaacaaaatctggaccgtccccctcttcctcatcatcctcgtcgtcatccgtggcatctgccgctttaccagcacctatctgatgacttgggtctccgtgatgaccatcagcaaaatccgcaaagatatgtttgccaaaatgctgaccctttcctcccgctaccatcaggaaacgccgtccggcaccgtactgatgaatatgctcaacctgaccgaacagtcggtcagtaacgccagcgacatcttcaccgtcctcacgcgcgacacgatgatcgttaccggcctgaccatcgtcctgctttacctcaactggcagctcagcctcatcgttgtcctgatgttccccctgctctccctgctctcgcgctactaccgcgaccgtctgaagcacgtcatttccgactcgcaaaaaagcataggcacgatgaacaacgtgattgccgaaacccatcagggacaccgcgtcgtcaagctgttcaacgggcaggcgcaggcggcaaaccggtttgacgcggtcaaccgcaccatcgtccgcctcagcaaaaaaatcacgcaggcaacggcggcacattccccgttcagcgaactaatcgcctcgatcgccctcgccgtcgtcatcttcatcgccctgtggcaaagccaaaacggctacaccaccatcggcgaatttatggcattcatcgtcgcgatgctgcaaatgtacgcccccatcaaaagccttgccaacattagcatccctatgcagacgatgttcctcgccgccgacggcgtatgtgcatttctcgacaccccgcccgaacaggacaaaggcacgctcgcaccgcagcgtgtcgaagggcgcatcagcttccgcaacgtcgatgtcgaataccgttcggacggcatcaaagccctcgacggcttcaacctcgacatcagacaaggcgaacgcgtcgccctggtcggacgttccggcagcggcaaatccaccgtcgtcaacctgctgccccgctttgtcgaaccgtctgccggcaacatctgcatagacggtatcgacatcgccgacatcaaactcgactgcctgcgcgcccaatttgccctcgtctcccaagacgtattcctgtttgacgacaccctgtttgaaaacgtccgatatagccgtcccgacgcgggcgaagccgaagtcctatccgccctccaagccgctaacctgcaaagcctgatcgacgcatcaccgctcggactgcaccagcccatcggatcgaacggcagcaacttatccggcggacagcggcaacgcgtcgccattgcccgcgccattttgaaagacgcgccgatattattattggacgaagccaccagcgcattagacaacgaatccgaacgcctcgtccaacaagcgctcgaacgcctgatggaaaaccgcaccggcatcatcgtcgcccaccgcctgaccaccatcgaaggggccgaccgcatcatcgtgatggacgacggcaaaatcatcgaacaaggcacacacgaacaactgatgtcccaaaacggctactacacaatgttacgcaatatctcaaacaaagatgccgccgtccggacggcataa

SEQ ID NO: 51394 - DNA, 381 bp, Neisseria meningitidis
atgaatatcagatttttcgcgctgaccgtaccggttttgtctttggcggcctgtgccgtgccggaagcggatgatggcggcggacgcgggcatatgccgcccgttcaaaaccaagccggcacggcagattttcgggcgttttcatgcgagaacgggttgtctgtgcgcgtccgccatttggacagcggcaaagtcgcgttgcggctggacggcaggcgtgccgtcctctcttccgacgttgccgcatccggagaacgctataccgccgaacacggtttgttcggaaacgcaaccgagtggcaccagaaaggcggcgaagcctttttcggctttaccgatgcctacggcaattcggtcgaaacttcctgccgcgcccgttaa

SEQ ID NO: 51395 - DNA, 1848 bp, Neisseria meningitidis
atgcacgacacccgtaccatgatgatcaaaccgaccgccctgctcctgccggctttatttttctttccgcacgcatacgcgcctgccgccgacctttccgaaaacaaggcggcgggtttcgcattgttcaaaaacaaaagccccgacaccgaatcagttaaattaaaacccaaattccccgtccgcatcgacacgcaggatagtgaaattaaagatatggtcgaagaacacctgccgctcatcacgcagcagcaggaagaagtattggacaaggaacagacgggcttcctcgccgaagaagcaccggacaacgttaaaaccatgctccgcagcaaaggctatttcagcagcaaagtcagcctgacggaaaaagacggagcttatacggtacacatcacaccgggcccgcgcaccaaaatcgccaacgtcggtgtcgccatcctcggcgacatcctttcagacggcaacctcgccgaatactaccgcaacgcgctggaaaactggcagcagccggtaggcagtgatttcgatcaggacagttgggaaaacagcaaaacttccgtcctcggcgcggtaacgcgcaaaggctacccgcttgccaagctcggcaacacccgggcggccgtcaaccccgataccgccaccgtcgatttgaacgtcgtcgtggacagcggccgccccatcgccttcggcgactttgaaatcaccggcacacagcgttaccccgaacaaatcgtctccggcctggcgcgcttccaaccgggcacgccctacgacctcgacctgctgctcgacttccaacaggcactcgaacaaaacgggcattattccggcgcgtccgtacaagccgacttcgaccgtctccaaggcgaccgcgtccccgtcaaagtcagcgtaaccgaggtcaaacgccacaagctcgaaaccggcatccgcctcgattcggaatacggtttgggcggcaaaatcgcctacgactattacaacctcttcaacaaaggctatatcggctcggtcgtctgggatatggacaaatacgaaaccacgcttgccgccggcatcagccagccgcgcaactatcggggcaactactggacaagcaacgtttcctacaaccgttcgaccacccaaaacctcgaaaaacgcgccttctccggcggcatctggtatgtgcgcgaccgcgcgggcatcgatgccaggctgggggcagagtttctcgcagaaggccggaaaatccccggctcggctgtcgatttgggcaacagccacgccacgatgctgaccgcctcttggaaacgccagctgctcaacaacgtgctgcatcccgaaaacggccattacctcgacggcaaaatcggtacgactttgggcacattcctgtcctccaccgcgctgatccgcacctctgcccgcgcaggttatttcttcacgcccgaaaacaaaaaactcggcacgttcatcatacgcggacaagcgggttacaccgttgcccgcgataatgccgatgtcccctcggggctgatgttccgcagcggtggcgcgtcttccgtgcgcggttacgaactcgacagcatcggacttgccggcccgaacggatcggtcctgcccgaacgcgccctcttgacgggcagcctggaataccaactgccgtttacgcgcaccctttccggcgcggtgttccacgatatgggcgatgccgccgccaatttcaaacgtatgaagctgaaacacggttcgggactgggcgtacgctggttcagcccgctcgcgccgttttccttcgacatcgcctacgggcacagcgataagaaaatccgctggcacatcagcctgggaacgcgcttctaa

SEQ ID NO: 51396 - DNA, 1812 bp, Neisseria meningitidis
atgaaacaaatccgcaacatcgccatcatcgcccacgtcgaccacggcaaaaccacattggtcgaccaactgctgcgccaatccggcacattccgcgccaaccagcaggttgacgagcgcgtgatggacagcaacgacctcgaaaaagaacgcggcatcaccatcctcgccaaaaacaccgccatcgattacgaaggctaccacatcaatatcgtcgatacgccgggacacgccgacttcggcggcgaagtagagcgcgttttggggatggtggactgcgtcgtcttgttggtggacgcgcaggaaggcccgatgccgcaaacccgtttcgtgaccaaaaaagccttggctttggggctgaaaccgattgtcgtcatcaacaaaatcgacaagccgtccgctcgtccgagctgggttatcgaccaaactttcgagctgttcgacaacttgggcgcgaccgacgagcagttggatttcccgattgtttacgcttcagggttgagcggtttcgccaaattggaagaaaccgacgagagcaacgacatgcgtccgctgttcgatactatcttaaaatatacgcctgcaccgagcggcagcgcggacgaaacgctgcaactgcaaatttcccaactcgactacgacaactacaccggccgcctcggtatcggtcgtatcttgaacggacgcatcaaacccggccaaaccgttgccgtcatgaaccacgatcagcaaatcgcccaaggccgcatcaaccagcttttgggtttcaaaggtttggaacgcgtgccgcttgaagaagccgaagccggcgacatcgtgattatttccggtatcgaagacatcggcatcggcgtaaccatcaccgacaaagacaaccccaaaggcctgccgatgttgagcgtggacgaaccgacgctgaccatggactttatggttaacaccagcccgttggcgggtacggaaggcaaattcgtaaccagccgccaaatccgcgaccgcctgcaaaaagaattgctgaccaacgtcgccctgcgcgtggaagacaccgccgatgccgacgtgttccgcgtatccggacgcggcgaattgcacctgaccattttgttggaaaatatgcgccgcgaaggctacgaactcgccgtcggcaaaccgcgcgtcgtgtaccgcgacatcgacggtcaaaaatgcgaaccttatgaaaacctgactgtggacgtacctgacgacaaccaaggcgcggtaatggaagaactcggccgccgccgtggcgaactgactaatatggaaagcgacggcaacggacgcacccgcctcgaataccatattccagcgcgcggcttgatcggtttccaaggcgaattcatgaccttgacgcgcggtgtcggactgatgagccacgtgttcgacgattacgcgcccgtcaaacccgatatgcccggccgccacaacggcgtgctggtgtcccaagagcagggcgaggcggtcgcttacgccttgtggaatctggaagaccgcggccgtatgttcgtatcgcccaacgacaaaatctacgaaggtatgattatcggcatccacagtcgcgacaacgatttggtggtcaacccgctcaaaggcaaaaaacttaccaacatccgtgccagcggtaccgacgaagccgttcgcctgaccacgccgatcaagctgacgctggaaggtgcggttgagtttatcgacgatgacgaactcgttgaaatcacgccgcaatccatccgtctgcgcaagcgttacttgagcgaattggaacgccgccgccactttaaaaagctggattga

SEQ ID NO: 51397 - DNA, 369 bp, Neisseria meningitidis; identical to SEQ ID NO: 36261

SEQ ID NO: 51398 - DNA, 771 bp, Neisseria meningitidis
gtgtccgaaacacaaaacgaacaacccgtccaaccgcttgtcgagcatctcatcgagctgcgccgccgcctgatgtggacggttgtcggcatcttagtctgctttttcggcatgatgccgtttgcccaacaactctatacttttatcgccgacccgctgatggcaaacctgcccaaagacaccagcatgattgccaccgatgtcatcgcaccatttttcgtgccggtcaaagttaccctgatggcggcatttttaatttcgctgccgcatacgctctaccaaatctgggcatttgtcgcgcccgcactctaccaaaacgaaaaacgcctgattacgccgctcgtcctctccagcgtcagcctgtttttcatcggcatggcatttgcctactttttggttttccccgtcattttcaaattccttgccagcgttacccctgtcggtgtcaatatggcgacagacatcgacaaatacctctccttcatcttggggatgtttgtcgcattcggtacaacgtttgaagtccccattgtcgttatcctgttaaccaaaattggtgtggtaacaaccggacagcttaaacatgcccgtccctatgttattgtcggtgcttttgtcattgccgcagtcatcacaccgcccgacgttatttcacaaaccctgcttgccattccactgattctcttatacgaagcaggtatttggttcggacgcttcttcactccacgttcagaacaggatggcgacatacggccgcctgcaaaaacctga

SEQ ID NO: 51399 - DNA, 126 bp, Neisseria meningitidis; identical to SEQ ID NO: 42488

SEQ ID NO: 51400 - DNA, 378 bp, Neisseria meningitidis
gtgaacaaaaccctcatcctcgccctttccgccctcctcggccttgccgcgtgcagcgtcgaacgcgtttcactgttcccctcgtacaaactcaaaatcatacagggcaacgaactcgaacctcgcgccgtcgcctccctccgccccggtatgaccaaagaccaagtcctgctcctgctcggcagccccatactgcgcgacgcattccataccgaccgctgggactataccttcaacacctcccgcaacggcatcatcaaagaacgcagcaatctgaccgtctattttgaaaacggcgtactcgtccgcaccgaaggcgacgtcctgcaaaacgctgccgaagccctcaaagaccgccaaaacacagacaaaccataa

SEQ ID NO: 51401 - DNA, 933 bp, Neisseria meningitidis
atgctctcacaactggagtatggcattgcgaaggaaaatagaccgaaccggcaggcagaccgctttgccggttcggttttaccgcttgccgccagtctgacccacaagccgaacatcatgaaacccataccgaccgacacattccaacctgccatactgccccaagcctttgaaaccgaaatcaaatccacctgcacggggcgaatctatcggattcagacggcaacactcggcgaaataccgtctgaaggctatcccgtcctctttgtcctcgacggcgaagcctttttccccgcacttttcaacatcatgcagtcgctgatgaacaaccccgttacccgaagcaacgccccctgcctgattgtcggtatcggctacacgacaggcagtgtgcgcgatttggcacaacgtgccgccgactacacgccgccgcttggagacaacgccacagcagacgaacggcagcagttcggacaggcagaccgcttcgccgcctttatcgacagcgagctgaccgcctttttagaaagccgctacaccctcaaccgcaatgaaaccgccgtattcggacactcgttcggcgcactgttcggactgtattccctgctttcccaccgccgtttcagacggcattggctcgtatccccctcgatttggtggcacaacaggcggatactcgattttatgccgtctgaaaaccggctggacggcatcgatgtctgcctcaacatcggcgcgctagaacggggcagcggttgcaaacgcagggaagaacgcgatatggcaggactgtccgaacgcatggcggcagagttggacaggcacggggccgccgtctttttccgggaatatccgaatgccgaccacggcaatgtctcgttctactcgctgaccgattgcgtcgaatatttgaggaaggcttggcagaggtag

SEQ ID NO: 51402 - DNA, 798 bp, Neisseria meningitidis
atggataccgcacaaaaacaacgctgggcaataaccctatcctatgatggcagccgcttttacggctggcagaaacaggctgacggcgtaccgaccgttcaggcggcattggaaaccgcgctcgcccaaatagcaggggaagcggtttccaccaccgttgccggcaggaccgacaccggcgtgcacgccaccgcccaagtcgtccactttgacacaactgccgcccgtccccaacaggcatgggtgcgcggcgtaaatgcccacctgcccgaaggcattgccgttttgcacgcccgacaggtcgcccccgaatttcacgcccgcttcgacgcatacggacggcattaccgctacctgctcgaatccgtccccgtccgttcccccctgctcaaaaacagggcaggctggacacacctcaaactcgacatcgggccgatgcgccgggctgccgccttattgatcggcgaacaagacttctccagcttccgcgccgccgaatgccaggcaaaatcccccgtcaaaaccatctaccgcgccgaccttacccaaagctcaggactcgtccgcctcgatttgcacggcaacgcctttttgcaccatatggtacgcaacatcatgggtgcgctcgtctatgtcggcagcggcagactcagcgtcgaaggcttcgccgcactgattcaagaacgcagccgcctcaaagccccgccgaccttcatgcccgacggactttacctgaccggcgtcgactatcccgaggcatacggcatcatccgcccccaaatccccgaatggctttaa

SEQ ID NO: 51403 - DNA, 759 bp, Neisseria meningitidis
atgaaaatcacacccgtcaaagccttgaccgacaactacatctggatgatacaggaaggcaaccatgccgtctgcgtcgacccctccgaccccacacccgtattggaattcctcgtccgcaaccgactcatgcttgcccaaacatgggtaactcacccccaccccgaccacgaaggcggtgcggcggcactctggcgcggctacatggaatcgcccgtttacggcgaatccgacatcgaagcggcaacccacaccgtaaccgcaggcacccaatttaccttcggcgaagggttaatcaccgtttgggcaaccccgggccataccgaccgccacatcagctaccttatggaaacttcagacggcatacacgtcttttgcggcgacacccttttttccgccggctgcggacgcgtgtttaccggcacaatcgaacagctttacgacagcttccaacgcttcaaccgcctgcctgaaaacaccctgttctatccggcgcacgaatacaccgccgccaacctggattttgccgcccatatcgagccggacaacgccgacattcagacggcactgaaagcggcggcgcatacgcctaccctgcccgttaccctcgcgcacgaacgccgtgtcaatccgtttttgcgcgtcgacctgccgcacgtcagagaccgcgccgaggcattgagcgggaaaacgttaaacagcagcctcgatacctttgtcgcgctgcgtgaacttaaaaaccaataccggacgaaataa

SEQ ID NO: 51404 - DNA, 876 bp, Neisseria meningitidis; identical to SEQ ID NO: 38422

SEQ ID NO: 51405 - DNA, 207 bp, Neisseria meningitidis
atgaaagcagtcagggatatagccttatggctggcagtaacggtttggatcaactttttccccgacaattaccgctatgataccgttccacagggacggtacggatactggcatgcagaccatccgtggtatccctatgcgcgctttctgctgcctttatttttagcctgtatccttttctaccgtcattttcggaaacggaaatag

SEQ ID NO: 51406 - DNA, 294 bp, Neisseria meningitidis; identical to SEQ ID NO: 37395

SEQ ID NO: 51407 - DNA, 933 bp, Neisseria meningitidis
atgaagcagaaccgcacctttaccttccccgattttcgcaccgtttacagctatgcgcctttatatcggctgcaacatttaaaatacacattgcgaaaatttttcggaaaaaaagaaatttacgccttcgagcagtttgtcaacgcctcccctatccgtcaggggctgttcctccactgcccgcaggatgcctatccgcttctgcgcgaatttgttgacaggcgttttaactgcaaacgccgtttagatgcgatgacggcagattttcttatggcggaaaaactgttcggcacagacattctgcaccaaatggaagactaccgcttccatttggtcttggcgcacctttcagacggcatcagcttgtggctcaaccgcaacgacaactgcgtcgaagaaggcgcgtggtctttatctttgcgcgacgaagcaggcaaccggctgtatatggcgaccttcgcctttgtcggcacacacctgctgacagcctccgtacaagggccggcgggtgaagaagccaaagacaccgtccgccgcataaccaaacaacttcacggcttgcgtccccaacaactgatggtaaccgccctgcaatatttcgccgccgtactcggcttggacggcgcaatgggcattgcacaaaaacatcaggtcaaactgcgctggaaacttaaaaagcgtgtcaaaatgaattacgacgcattctggcaggaatacggcgcaagtttggaacgggacggctactggcatctcccccaaacccccgcccgcaaagaccttaccgacatcgaaagcaaaaaacgctcgatgtaccgcaagcgttatgaaatgctggacaacatggttgcagagatgaaggacggtctgaaaacagaagcacgcggcatttcagacggcatccaaacggaaaaaccgctccgccagacagcctga

SEQ ID NO: 51408 - DNA, 309 bp, Neisseria meningitidis
atggatgtttttcccgaattgaatatccattgtttttatgatgataaaaatcagcttgaagcgatagagatatttgaaccaaataagttttttttagaagatatttcttttaattggcttggaaaaattaatgatgaaataataagctatctttataagagtggaattaatgattttgaaattgatgatttgggtattaggcttcttaatattcctgtttcaactataatcaattcaataggtaaagtagaatgttgttatttagatttttcaaatagagacacaaaattttatgtaaaacaagtgtag

SEQ ID NO: 51409 - DNA, 813 bp, Neisseria meningitidis
gtgccgtctgaaaccgtttcagacggcacggacaaaccacctccactcaatcctgccgtgttagcgtgtataattcggcattctatccgaaattcacagcaggtcagcaatatgtctttgaaaacagtagccgttatcggcgcaatggaacaagaaatcgagcttttgcgcgagatgatggaaaatgtcaaagccgtctctttcggcaagtttgccgcctatgaaggcgaattagcgggaaaacgcatggtgcttgcattgagcggcatcggcaaggtcaacgcggcggttgcaacggcttggattatccgtgaattcgcaccggactgcgttatcaacaccggcagcgcgggcggcttgggcaagggtttgaaagtcggcgatgtcgtggtcggcacagaaatcgcgcaccacgatgtcgatgtaaccgcattcggctatgtttggggacaagtgccgcaactgcccgccgtatttgtttcagacggcctcttggtcggcaaagcaaaacaggcggcggaagtgtttgaaggcgcggcggtagaacaaggcctgattgtcagcggcgaccgcttcgtccacagcagcgaaggcgtggcggaaatccgcaagcacttccccaaagtcaaagcagtggaaatggaagcggcggcgattgcccaaacctgtcatcagttggaaacgcctttcgtcatcatccgcgcggtttccgattcggcggacgaaaaggcagacatcagctttgacgaatttttgaaaacggcggcggcaagttctgcaaaaatggtggcagaaatcgtcaaatctttataa

SEQ ID NO: 51410 - DNA, 2145 bp, Neisseria meningitidis
atgaacgccccgtttttccgcctcagcctgctctcgcttaccctagcggcaggttttgcccatgcggcagaaaataatgccaatgtcgcattggataccgttaccgtaaaaggcgaccgccaaggcagcaaaatccgtaccaacatcgttacgcttcaacaaaaagacgaaagcaccgcaaccgatatgcgcgaactcttaaaagaagagccctccatcgatttcggcggcggcaacggcacgtcccaattcctgacgctgcgcggcatgggtcagaactctgtcgacatcaaggtggacaacgcctattccgacagccaaatcctttaccaccaaggcagatttattgtcgatcccgctttggttaaagtcgtttccgtacaaaaaggcgcgggtttcgcctctgccggtatcggcgcgaccaacggcgcgattatcgccaaaaccgtcgatgcccaagacctgctcaaaggcttggataaaaactggggcgtgcgcctcaacagcggctttgccagcaacgaaggcgtaagctacggcgcaagcgtattcggaaaagagggcaacttcgacggtttgttctcttacaaccgcaacgatgaaaaagattacgaagccggcaaaggtttccgcaatgacaacggcggcaaaaccgtaccgtacagcgcgctggacaaacgcagctacctcgccaaaatcggaacaagcttcggcgacgacgaccaccgcatcgtattgagccacatgaaagaccaacaccgaggcatccgcactgtgcgtgaagagtttgccgtcagcgaaaaaaattcacggataactattaaacgccaagcccctgcttaccgcgaaaccactcaatccaacaccaacttggcgtacaccggcaaagatttgggctttgtcgaaaaactggatgccaacgcctatgtgttggaaaagaaacgctattccgccgatgacaaagataacggctacgcaggcaatgtaaaaggccctaaccatacccgaatcaccactcgaggtatgaatttcaacttcgacagccgccttgccgaacaaaccctgttgaaatacggtatcaactaccgccatcaggaaatcaaaccgcaagcgtttttgaattcacaatttaaaattgaagataaaaaagatgcaactgatgaagagaaaaagaagaaccgtgacaatgaaaacattgccaaagcctaccgtctgaccaacccgaccaaaaccgataccggcgcgtatatcgaagccattcacgagattgacggctttaccctgaccggcgggctgcgttacgaccgcttcaaggtgaaaacccacgacggcaaaaccgtttcaagcagcaaccttaacccgagtttcggcgtgatttggcagccgcacgaacactggagcttcagcgcgagccacaactacgccagccgcagcccgcgcctgtatgacgcgctgcaaacccacggcaagcgcggcatcatttcgattgccgacggcacgaaagccgaacgcgcgcgcaataccgaaatcggcttcaactacaacaacggcacatttgccgccaacggcagctacttctggcaaaccatcaaagacgcgcttgccaatccgcaaaaccgccacgaatctaccaccgccgtccgtgaagccgtcaatgccggttacatcaaaaaccacggttacgaattgggcgcgtcttaccgcaccggcggcctgactgccaaagtcggcgtaagccacagcaaaccgcgcttttacgatacgcacaaagacaagctgttgagcgcgaatcctgaatttggcgcacaagtcggccgcacttggacggcctcccttgcctaccgcttccaaaatccgaatctggaaatcggctggcgcggccgttatgttcaaaaagccgtgggttcgatattggtggcaggtcaaaaagaccgcaacggcaaattggaaaacgttgtacgcaaaggtttcggtgtgaacgatgtcttcgccaactggaaaccgctgggcaaagacacgctcaatgttaatctttcggttaacaacgtgttcaacacgttctactatccgcacagccaacgctggaccaataccctgccgggcgtgggacgtgatgtacgcttgggcgtgaactacaagttctaa

SEQ ID NO: 51411 - DNA, 2484 bp, Neisseria meningitidis
gtgagcattagcgcgccgtatgccaatgaaaacagccgcatcctgctgagcaccacggatatcagttcggaaaacggcaaaatcaaactgcaatcctacggcgaccagttctactacgccggacagggtgagctctacaccttcgataaacgcagctataaaaccggtaagtggtacaaactaaaacatgttactgaaatcaaagagcataaaaacgccaaagccgacccggtgagcctcagtgcgtcacaaggtattgaaatcaaatccggcggcaatatcggtgcccacgccaccttgtttgatgcaccccgcggctccgttaaaatcgaagccggacgtgggctggttctctatgccgtggaagatctcaactacgacaaacttgacacccgtaccaagcgcaaatttatcggcattacctacgacaaggtgcacgacaccaccacccacaccatgaaaaccgccctgccctcaagggtagttgcagaatcggccaacctgcaatcaggctgggacgccaaactgcaaggcacccagtttgaaaccacgctgggcggcgcagccatccgtgcaggtgtaggcgatcaggcacgagcagatgccaagattattcttgaaggcatcaaaagtagtgtgcgcactgaaacagtaagcagtagcaaatctgccctctggcagaaacaggccggacgcggcagcaatatcgaaaccttgcaactgccaagtttcacaggctccgttgcgcccgtactctctgcccccggcggctatatcgttgatattccgaaaggcaatctgaaaaccgaaatcgaaaagctggccaaacagcccgaatacgcctacctgaaacagcttcagacggccaagaacgtcgattggaaacaggtgcagcttgtctacgacaagtgggactataaagccgaaggcctgaccggagccggagccgccattatcgcactggccgttaccgtggtcacctcaggcgcaggaaccggagccgtattgggattaaacggtgcggccgccgccgcaaccgatgcagcattcgcctctttggccagccaggcttccgtatcgttcatcaacaacaaaggcaatatcggtaacaccctgaaagagctgggcagaagcagcacggtgaaaaatctgatggttgccgtcgctaccgcaggcgtagccgacaaaatcggtgcttcggcactgaacaatgtcagcgataagcagtggatcaacaacctgaccgtcaacctggccaatgcgggcagtgccgcactgattaataccgctgtcaacggcggcagcctgaaagacaatctggaagcgaatatccttgcggctttggtcaataccgcgcatggagaagcagccagtaaaatcaaacagttggatcagcactacatagtccacaagattgcccatgccatagcgggctgtgcggcagcggcggcgaataagggcaagtgtcaagatggcgcgataggcgctgcagtcggtgagattgttggtgaggctttggttaagaatactgatttcagtcgtatgagtgcgaccgaaatcgaaaaatctaaagcgaagattactgcctattcaaaactggttgccggcactgcgactgccgttgcaggcggggatgtgaatgctgcggcaaatgcagcacagatagcggtggagaataatactttgtatcctaaatgcattggtgcaaagtgtgatgaatttcaaaaggaacaacaaaaatggatacgtgaaaatcctgaagaatatcgggaagttttgcttcttcagacgggatttattccaattatcggtgatatacagaattttgtacaagcacagaccgctgctgattacctgtttgctttggtgggtgtggttccgggtatcggtgaatcgatacaggcctataaagtagcgaaagcggcaaaaaatttacaaggcatgaaaaaagccttggacaaggcagcaaccgttgccactgcacagggctatgtcagcaaaaccaaaatcaaaatcggtcaaactgaattaagggttactgcagcaactgacaaacaattgctgaaaaccattagcgaaggaagggacacgacaggtaaaatgaccgagcagttatttgactctttagctaaacaaaatggcttcagagtgctttcgggcggcaaatacggcggaaataacggttttgatcatgtatggcaggctgccgatggtagtgtcgttttgattgtagaaagtaagcagattaggaacggtacggtacagctgaatccgaatggtgcgggtggatatacgcaaatgagtgaggattggattaaacaagttgcaaatagcttacctgatggtagtcctgctaaagctgctgtcttcaaagcggagcgggaaggcaaattaaaaacggcaatagcaggcgttgatcgtcaaacaggtaaggccgttattctttctgtcaaagttccttctaaaaccaatataaggagataa

SEQ ID NO: 51412 - DNA, 504 bp, Neisseria meningitidis; identical to SEQ ID NO: 36801

SEQ ID NO: 51413 - DNA, 1806 bp, Neisseria meningitidis
atgcgctacaaaccccttctgcttgccctgatgctcgttttttccacgcccgccgttgccgcccacgacgcggcacacaaccgttccgccgaagtgaaaaaacagacgaagaacaaaaaagaacagcccgaagcggcggaaggcaaaaaagaaaaaggcaaaaatggcgcagtgaaagataaaaaaacaggcggcaaagaggcggcaaaagagggcaaagagtccaaaaaaaccgccaaaaaccgcaaagaagcagagaaggaggcgacatccaggcagtctgcgcgcaaaggacgcgaaggggataagaaatcgaaggcggaacacaaaaaggcacatggcaagcccgtgtccggatccaaagaaaaaaacgcaaaaacacagcctgaaaacaagcaaggcaaaaaagaggcaaaaggacagggcaatccgcgcaagggcggcaaggcggaaaaagacactgtttctgcaaataaaaaagtccgttccgacaagaacggcaaagcagtgaaacaggataaaaaatacagggaagagaaaaatgccaaaaccgattccgacgaattgaaagccgccgttgccgctgccaccaatgatgtcgaaaacaaaaaagccttgctcaaacaaagcgaaggaatgctgcttcatgtcagcaattccctcaagcagcttcaggaagagcgtatccgccaagaacgtatccgccaagagcgtatccgtcaggcgcgcggcaaccttgcttccgtcaaccgcaaacagcgcgaggcttgggacaagttccaaaaactcaataccgagctgaaccgtttgaaaacggaagtcgccgctacgaaagcgcagatttcccgtttcgtatcggggaactataaaaacagccagccgaatgcggttgccctgttcctgaaaaacgccgaaccgggtcagaaaaaccgctttttgcgttatacgcgttatgtaaacgcctccaatcgggaagttgtcaaggatttggaaaaacagcagaaggctttggcggtacaagagcagaaaatcaacaatgagcttgcccgtttgaagaaaattcaggcaaacgtgcaatccctgctgaaaaaacagggtgtaaccgatgcggcggaacagacggaaagccgcagacagaatgccaaaatcgccaaagatgcccgaaaactgctggaacagaaagggaacgagcagcagctgaacaagctcttgagcaatttggagaagaaaaaggccgaacaccgcattcaggatgcggaagcaaaaagaaaattggctgaagccagactggcggcagccgaaaaagccagaaaagaagcggcgcagcagaaggctgaagcacgacgtgcggaaatgtccaacctgaccgccgaagacaggaacatccaagcgccttcggttatgggtatcggcagtgccgacggtttcagccgcatgcaaggacgtttgaaaaaaccggttgacggtgtgccgaccggacttttcgggcagaaccggagcggcggcgatgtttggaaaggcgtgttctattccactgcaccggcaacggttgaaagcattgcgccgggaacggtaagctatgcggacgagttggacggctacggcaaagtggtcgtggtcgatcacggcgagaactacatcagcatctatgccggtttgagcgaaatttccgtcggcaagggttatatggtcgcggcaggaagcaaaatcggctcgagcgggtcgctgccggacggggaagaggggctttacctgcaaatacgttatcaaggtcaggtattgaacccttcgagctggatacgttga

SEQ ID NO: 51414 - DNA, 537 bp, Neisseria meningitidis; identical to SEQ ID NO: 40264

SEQ ID NO: 51415 - DNA, 2631 bp, Neisseria meningitidis
atgcaagaacaatatcaacccgccgccatcgagcctgcggcgcagaaaaaatgggacgacgcccgtattttcaacgtctccgaagacgcttccaaacccaaatattattgcctctccatgttcccctatcccagcggcaagctgcatatggggcatgtgcgcaactacaccatcggcgatgtattgagccgcttcaaacttttaaacggcttcaacgtcatgcagcctatgggttgggacgcgttcggcatgccggcggaaaacgcggcgatgaaaaacaacgtcgcccctgccgcttggacgtacgataacatcgaatacatgaaaacccagctcaaaagcctgggttttgcgattgactgggcgcgcgaaaccgcaacctgcaaacccgaatactaccgctgggaacaatggctgtttaccaagctgtttgaaaaaggcatcgtttatcgcaaaaacggcacggtaaactgggacccggtcgaccaaaccgtccttgccaacgagcaagttatcgacggacgcggttggcgttcgggcgcgttgatcgaaaaacgcgaaatcccgatgtattacttcaaaatcaccgattacgccgaagagctgctcaacgacttggacaagctggaacactggcctgaacaagtcaaaaccatgcagcgcaactggatcggcaaatctcgcggcatgaccgtgcgctttgctgtttcagacgacagcaaacaaggcttggaaggcgattacgcgaacttcctgcaagtttataccacccgtcccgacacgctgatgggcgcgacttatgtcgccgttgccgccgagcatccgctggcaaccgccgcagccgccggtaaacccgaattgcaggcatttatcgccgaatgcaaagcaggttcggttgccgaagccgatatggcgacgatggagaaaaaaggcgtgccgaccggccgctacgtcgtcaacccgctcaacggcgacaagctggaagtgtggattgccaactatgtattgtggggctacggcgacggcgcggtgatggcggttccggcgcacgacgaacgcgattttgagttcgccaccaaatacaatctgccgaaaaaacaagtcattgccgtcggcgacaacgcatttgacgaaaaccaatggcaagaatggtacggcgacaaagaaaacggcgtattggtcaacagcggcgacttggacggcttggattttcagacggcattcgacgccgtcgccgccaagctgcaaagccaaggcgcgggcgaaccgaaaacccaataccgcctgcgcgactggggcatttcgcgccaacgctactggggctgcccgattcccatcgtccattgcgaacaatgcggcgacgtacccgtccctgccgaccaattgccggtcgttttgcctgaaaacgtcgtacccgacggcatgggttcgccgctggcaaaaatgcccgagttttacgaaactgcctgcccatgctgcggcggcgcggcgaaacgcgaaaccgacaccatggacaccttcatggaatcgagctggtatttcttccgctacatgtcgccaaaattttcagacggcatggtcgatcctgccgccgcgaaatactggggcgcggtcgaccaatacatcggcggcatcgaacacgcgattttgcacctcttgtacgcgcgtttcttcaccaaactgatgcgcgacgaaggtctagtcaatgttgacgaaccgtttgaacgcctgctgacgcaaggcatggtcgtttgcgaaacctactaccgcgaaaacgacaaaggcggcaaagattggatcaaccccgccgatgtcgagctgacgttcgacgacaaaggccgccccatttccgccgtcctcaaagccgacgggctgcccgtcgtcatcagcggcacggaaaaaatgtccaagtccaaaaacaacggcgtcgatccgcaagaactgattaacgcctacggcgcggacaccgcccgcctgtttatgatgttcgccgcaccgcccgaacagtccctcgaatggagcgacagcggcgtcgaaggcgcacaccgcttcctgcgccgcctgtggcgtaccgtttacgaatacttgaagcaaggcgaagcggtcaaagcgttcgcaggcagccaagacggtttgtctaaagaactcaaagacctgcgccacaaactgcacgcgaccactgccaaagtcagcgacgactacggccgccgccagcagttcaacaccgccatcgccgccgtgatggaattgctcaaccaatacgacaaaaccgacaccggcggcgaacaaggacgcgccgtcgcccaagaagtattggaaaccgccgtacgcctgttgtggcccatcgtgccgcacatctgcgaaaccctgtggagcgaattgaacggcgcgaaactgtgggaagcaggctggccgacagtcgacgaagccgccttggtcaaatccgaaatcgaagtgatggttcaagtcaacggcaaactgcgcggcaaaatcactgttgccgccgacgcatccaaagccgacctcgaagccgccgcactcgccaccgaaggcgcggtgaaattcatggaaggcaaaccggcgaagaaaatcatcgtcgtaccgggcagactggtgaacatcgtcgtctaa

SEQ ID NO: 51416 - DNA, 1311 bp, Neisseria meningitidis
atgtacgctaaaaaaggcggtttgggactggttaaaagccgccgtttcgcacctcttttcgctacgcagtttctcggcgcgttcaacgacaatgtgttcaaaaccgcgctgtttgtgatgattgggttttacggtttggggcaaaacggcttcctgcctgccggacagatgttgaacttgggcgcgttgctgtttattttgccgtatttcctgttttcctcgctgtcggggcagttgggtaacaaattcgacaaggccgttttggcgcgttgggtcaaggtgctggaaatgatcattatggcggtggcggcatacgggttttatatccggtctgccccgctgcttttggcgtgtctgttttgcatgggcgcgcaatcgacgctgttcgggccgctgaaatacgccatcctgcccgattatctcgacgacaaagagttgatgatgggcaacagcctgattgaatcgggtacgtttgtcgccatcctgttcggtcagattttgggaacggcggtggcaggtgtaccgccttatattgtcgggatactggttttgctggtcgccgtaggaggcacggtcggcagcctgtttatgccgtccgtacccgccaaggctgccgatacccaaattgagtggaatattgtccgtggcacaaaatccctgctgcgtgaaacggtgcggcacaagcccgtttttaccgccattatcggtatttcgtggttttggtttgtcggcgcggtttataccacgcaactgccgacctttacccaaatccatctgggcggcaacgacaatgttttcaacctgatgcttgccctgttttctatcggtattgccgccggttcggtactgtgtgccaagttcagcagggaacgcctgatgttggcttgggtaacggttggtgcgttgggtttgacggtttgcggcctggttttggtgtggctgacgcacggacaccgttttgaagggctgaacggcattttttggtttttatcgcaaggatgggcatatcccgtgatggcggtgatgacgctgatcggctttttcggcggatttttctccgttccgctctatacctggctgcaaaccgccagtagcgagactttccgcgcccgcgccgttgccgccaacaatatcgttaacggtatttttatggtttccgctgccgttttgagcgcggtgttgctgtttttgtttgacagcatttccttgttgtatctgattgtcgctttgggcaatattccgttgtcggtatttttgattaagcgcgaaaggcggtttttaggcgcggcggcaatcaggaaaaaaccttga

SEQ ID NO: 51417 - DNA, 390 bp, Neisseria meningitidis
atgcccaagccctatcctgcacgctatcgtgccaatcccaaccgaaaaggaaaaataatgagcagcgaattgattgtacacaccagcgatgccgcttttgaaaaagacgttttaaatgcagatatccccgtcctgctggacttttgggctccgtggtgcggcccctgcaaaatgattgccccgattttggacgacattgccgccgaatttgaaggccgtctgaaagtggtcaaaatcaacatcgacgacaacgaagccaccccgtcccgtttcggcgtgcgcggcattccgaccctgatggtgttcaaaaacggcgaagtcgtcgccaccaaagtcggcgcattggcaaaaggtcagctgaccgcctttgtcgaagcctctatcgcctga

SEQ ID NO: 51418 - DNA, 216 bp, Neisseria meningitidis; identical to SEQ ID NO: 39553

SEQ ID NO: 51419 - DNA, 1974 bp, Neisseria meningitidis
atgcaccccatcgaaacccccgataagaccttccacgacggcgacggcgtgtccgaattgggcaccatcctgcccgcgtggtggctcaaccaagtgcaatccgagctgctggccgtgctgactgcggccggtatccagccggataagtcgcagcctaatcaattactggcagcactaaataggctggctgtagttatcaccggcgaccaaaccgtcaacggccaaaaaacctttaccgcccaaacccaattccaaagcggcatccatttatccgccaaccagacgaactggaacggcggccacaaagcctacatcggcgcggatgccgacaacgcccacatcgtcttcggcgacaacaccctccgcctgcacggcgcaaacaaccgcatttcctacaacaaccacgacatcttccacaaagccaacaaaccgcgttttgccgaagacatcgaaggcaagccgaacacactgtccggatacggcatcggcaatttcaaagtcgaaaccttccggggcgatttgaacaccctcaaaacagacggcatctattccctgccgacagcgggcggcagctccaacctgcccgttgaaaacactgcctgccatatccaagtcatcgccggcacgcgacacggctggtgcaggcagttgggttatcccgcctacacgtccgacgtgtacgaacgccaccaaacgagcagcgcaaacgacaactggtccgcatggaaaaaactcaattcggacggcatccccgtcggcgcgatcgtatcctttcccaaagccgtacaaaaccccgcaggctatctcaaagccaacggcacgacctttgcacaaaacaccttccccgacctttaccgcgccttgggcaacagcaaccgcctgcccgatttaagccgtaccgacatcggcatcaccgcgtggtttccgtccgaccaaatcccgaccggctggctggcgtttgacgacatccgcacgcgcgtaaccgaaaccgcttatcccgagctgtaccgtctgctgaccggaaaatacggcagcatccaaaacgtcccgcaggcggaagaccgctttatccgcaacgcgggcaacagcttggcagtcggaacgaagcaggaagacgaaatcaaacggcacgtccacaaagtattttcacactggacaaaccacacagacgcggcagccctcggttacgaagaccgcaacgaaaggcagagaagcgcgctcgtatcgacttggacggacgaaaatttaaacgacaacggctttttaaccccgcgctcggacagcaaaatggcgacaggcggcgacgaaaaccgccccaaagccctggttttaaaactgtgcatcaaagccgccgacaccttgggcgaagccgtgttttggataaagtcccacggcgaaaccatcaacgcaggcgcgctggacgcgggcacgctggcgcaaggtttgcaagacaaagccgaccgagaccacacccacaccgccgcccaaatccaagggctggacgaaaaaatcagcaccgccgttgccgcgcaattcacacgccaaaccatcggcggcgtggatattgtcagattccccgacggcacaatgatacagaccggcagctacaggttcacacgaagcggcggccccatcgaaaacgaagtcgtcttccccgtcgcctttgccgacggcaacgtcaaatgcttcgtatccgaacgccattcggaacgcgttaccggcgatcgaaggcaacacaactggctgtttatccgcgcaaaaaaccacgccgccgccattatcaccaactggtacgaaggcagttgcgactggatggccatcggcaaagccgcctcgggaaacgccgccagctccccgataggccccgaaatacctgaaaccaacgaagaaccgcaaagagagagtggaagaacatcaaccggaccccgaaaccgccgccgccgagacggcttgctcgaggcactgcaagactag

SEQ ID NO: 51420 - DNA, 918 bp, Neisseria meningitidis
atgaatttgactaaaacacaacgccaactgcacaactttctgaccctcgcacaagaagcaggttcgctgtccaagctcgccaaactctgcggctaccgtacccccgtcgcactctacaaactcaaacaacgccttgaaaagcaggcagaagacccagatgcacgcggcatccgtcccagcctgatggcaaaactcgaaaaacacaccggcaaacccaaaggctggctcgacagaaaacaccgcgaacgcactgtccccgaaaccgccgcagaaagcaccggaactgccgaaacccaaattgccgaaaccgcatctgctgccggctgccgcagcgttaccgtcaaccgcaatacctgcgaaacccaaatcaccgtctccatcaacctcgacggcagcggcaaaagcaggctggataccggcgtacccttcctcgaacacatgatcgatcaaatcgcccgccacggcatgattgacatcgacattagctgcaaaggcgacctgcacatcgacgaccaccacaccgccgaagacatcggcatcacactcggacaagcaatccggcaggcactcggcgacaaaaaaggcatccgccgttacggacattcctacgtcccgctcgacgaagccctcagccgtgtcgtcatcgacctttccggccgccccggactcgtgtacaacatcgaatttacccgcgcactaatcggacgtttcgatgtcgatttgtttgaagaatttttccacggcatcgtcaaccacagtatgatgaccctgcacatcgacaacctcagcggcaaaaacgcccaccatcaggcggaaaccgtattcaaagccttcgggcgcgccctgcgtatggcagtcgaacacgacccgcgcatggcaggacagaccccctcgaccaaaggcacgctgaccgcataa

SEQ ID NO: 51421 - DNA, 843 bp, Neisseria meningitidis; identical to SEQ ID NO: 42158

SEQ ID NO: 51422 - DNA, 189 bp, Neisseria meningitidis; identical to SEQ ID NO: 42129

SEQ ID NO: 51423 - DNA, 762 bp, Neisseria meningitidis
atggatgcgaataaagagccgaattgggaaaaacgtttggaaaacctgcgtcagacgcgccgtatgaaggcagtgccgacttacgcgccgctgtcccgcccctctgaaaccggaacggacgcgcctgtgccgaaactggacgatgagagccgagcccgtgtgttgaaggcgtatctgaaaaaatggcaggaggaacacaatgccgccgttgccgattgcggcgaggaagtcgaaaccgacccgatgattgtccttcaggaaaactggctcaacgcgcaggcttccctgcaaatgtcggtttcggaaaaacacatcgaatcgcggcggagaatccggttcgatgccaaaaaagacagtgccgaatttgaaaccggacagattgaaggcagggaaaacgccgatgcggcagaatcgggtacggcggcagacggggttgcggaaaacggcgaaggcggtgcggaagaggcgttgatgcccgtccaaatcaatatcctgaacccgaaagccgtcaaccggcgcgaagtgttctgcctgtccgaacaggagctgaccgaacggctgatcaaacgcctgcgcccgcatctgaccgataccgtcaacggcatcatccgaacggcggtgcaaaagcagatggcggttttcacctatcagctccagcagatgctgcacgagcaggcgggggcggtagtcgaagacgtgttggaacacgatgtccgcaaaatcctcaacgacatcaagtacgagttaaaatacaaacgctga

SEQ ID NO: 51424 - DNA, 990 bp, Neisseria meningitidis
atgaaaattaccgttatcggcgcaggttcgtggggtacggcgctcgccctgcacttttcccaacacggcaaccgcgtatccctgtggacgcgcaacgcagaccaagtccgccaaatgcaggaagcgcgtgaaaacaaacgcggactgcccggcttttcctttcccgaaaccttggaagtgtgtgcggatttggcagacgcgctcaaagacagcggacttgtccttatcgtaacctccgttgccggattgagaagcagcgcagagctgctcaaacagtacggcgcgggacacctccccgtcctcgccgcctgcaaaggattcgagcaggatacagggctgctgacctttcaagtattgaaagaagtattgcccgacaataaaaaaatcggcgtactctccggcccgagttttgcacaggaactcgccaaacaactgccctgcgccgtcgtcctcgcctccgaaaaccaagagtggattgaagaactcgtaccgcagctcaacacgactgtcatgaggctttacggcagtaccgatgttatcggcgtggcggttggcggcgcggtaaaaaatgttatggcgattgccaccggattgtccgatggcctagagtacgggcttaacgcccgtgccgcactggttacgcgcggattagctgaaatcacccgccttgcctccgcaatgggcgcacagcccaaaaccatgatggggctggcaggcatcggcgacctcatcttgacctgcactggcgcactctcacgcaaccgccgcgtcggcttgggtttggcagaaggcaaggaactgcatcaggtgctggtcgaaatcggacacgtttccgaaggggtcagcacgatagaagaagtcttcaatactgcctgtaagtaccaaatcgatatgccgattacccaaaccctgctgcaactcatccgcaaagaaatgaccccgcaacaggttgtcgaaagactgatggaacgcagcgcgcgttttgaataa

SEQ ID NO: 51425 - DNA, 192 bp, Neisseria meningitidis; identical to SEQ ID NO: 37615

SEQ ID NO: 51426 - DNA, 837 bp, Neisseria meningitidis
atgatagacctgcactgccattccaccgtttccgacggtatgctctcccccgccgaagttgtgcgcctcgcgcatcaaaacggctgcacgctgctggcgttgaccgaccacgaccacaccggcggcatcgccgaagcgcgtgccgaagccgacaggctcggtttgcgcctgattaacggcgtggaaatctccgtaacgtggcgcgggcgtaccatacacgttgtcggcttagactttgacgaacaagacgaaaacctgcaaaacctgttggcgcaagtgcggcaaggccgtctgaaacgcctcgaagccatcgccgccaagctggaaaaacgcggcatttcgggcgcatacgacggcgcgctcgcgctggcggcaaacaaagaaatggtcagccgcacacacgtcgccgagttcctcattcgggtgggacacgtcaaaaacaagcagcaggcgttcaccaaatacttgggcgacggcaaatcctgcgccgtccgccacgaatgggcgacgctggaagactgcgtctccgccgtcaacggcgcgggcggcatggcagtcatcgcccaccccatgcgctacgatttgtccgccaccgccaagcgcaatctgtttgaagaatttaaaaacctcggcggcgcaggcatcgaagtccacagcggcaactgctgcaaaaacgaccgcctcaactacgcgcttttggcagaacgcttcggtatgctcgccagcgcgggcagcgacttccaccgtttaaacgacttcagcggcggcatcctcggtgcgtgtcccgagctgccggaaaactgcaggccggtgtgggcgcatttttcccgacattga

SEQ ID NO: 51427 - DNA, 279 bp, Neisseria meningitidis; identical to SEQ ID NO: 37183

SEQ ID NO: 51428 - DNA, 930 bp, Neisseria meningitidis
atgattcatgtttcggcagtgcaggcaccggcgcatattcaggataccggacgctacggacaccggcgttacggcatcggtcatgccggtgcgatggacacggttgctttggcggcgggtaatattttattgggcaacgacgaaggcacggccgcaatcgaaatcgctttgggcgggataatgctggtgtttgaacgggatacgccgttttgtctcaccggtgccgtgtatcaggcggaattggacggcgaaccggtctattcgtattggcgttataccgcccgcaaagggcagaccttgaaaatggtgcgtgccgtgcagggcatgtacggctatgtgtgcgtggcgggcggatttgatgtgccggaagtgatgggttcgagaagcaccgacctgaaagccggtttcggcggccatcagggcagaatgctgcaaaaaggtgattgtctccccatcggcaaaggtgcgcaggaattgtccaaagtcggcattgccccgataccgtttaccgataccgtccaccttgttccttcgtcggaatatgccgctttcagtgaaaaagggcgtctgaatctggaacgggaaacgtggacgctgcaaagcgatagcaaccgcatgggctaccgcttcgacggacagccgctgaccctgtcgcaacctttggaaatgctgtcccacgctgttcaggcaggaaccgtgcaggtgccgcccggcggcaaaccgattatcctgctggccgatgcgcaaaccaccggcggttatccgaaaatcgctaccgttgccgccgccgatttgggcaggctggcacaggtgcgcttcggcagcaaagtcaaattcaaaataatcggcttgaaagaagccaccgccctgcggcgcaaaaaccaagtctatctgaaccaaatacggagaatcacccatgaagcaggttga

SEQ ID NO: 51429 - DNA, 1167 bp, Neisseria meningitidis
atgaaatgggcggctgttgcggcggtcgcggcggcagcggtttggggcggatggtcttatctgaagcccgagccgcaggctgcttatattacggaagcggtcaggcgcggcgacatcagccggacggtttctgcaacaggggagatttcgccgtccaacctggtatcggtcggcgcgcaggcatcggggcagattaagaaactttatgtcaaactcgggcaacaggttaaaaagggcgatttgattgcggaaatcaattcgacctcgcagaccaatacgctcaatacggaaaaatccaagttggaaacgtatcaggcgaagctggtgtcggcacagattgcattgggcagcgcggagaagaaatataagcgtcaggcggcgttgtggaaggatgatgcgacctctaaagaagatttggaaagcgcgcaggatgcgcttgccgccgccaaagccaatgttgccgagctgaaggctctaatcagacagagcaaaatttccatcaataccgccgagtcggaattgggctacacgcgcattaccgcaacgatggacggcacggtggtagcgattctcgtggaagaggggcagactgtgaacgcggcgcagtctacgccgacgattgtccaattggcgaatctggatatgatgttgaacaaaatgcagattgccgagggcgatattaccaaggtgaaggcggggcaggatatttcgtttacgattttgtccgaaccggatacgccgattaaggcgaagctcgacagcgtcgaccccgggctgaccacgatgtcgtcgggcggctacaacagcagtacggatacggcttccaatgcggtctactattatgcccgttcgtttgtgccgaatccggacggcaaactcgccacggggatgacgacgcagaatacggttgaaatcgacggcgtgaaaaatgtgctgattattccgtcgctgaccgtgaaaaatcgcggcggcaaggcgtttgtgcgcgtgttgggtgcggacggcaaggcggcggaacgcgaaatccggaccggtatgagagacagtatgaataccgaagtaaaaagcgggttgaaagagggggacaaagtggtcatctccgaaataaccgccgccgagcagcaggaaagcggcgaacgcgccctaggcggcccgccgcgccgataa

SEQ ID NO: 51430 - DNA, 1131 bp, Neisseria meningitidis; identical to SEQ ID NO: 39043

SEQ ID NO: 51431 - DNA, 378 bp, Neisseria meningitidis; identical to SEQ ID NO: 36713

SEQ ID NO: 51432 - DNA, 684 bp, Neisseria meningitidis
atggaactggtatttatccgccacggacaaagcgaatggaacgcgaaaaacctgtttacaggctggcgcgacgtgaagctgagcgagcaggggcttgccgaggctgccgccgccggtaaaaaactgaaagaaaacggctatgagttcgacatcgccttcacatccgtcctgacccgcgcgattaagacctgcaacatcgttttggaagaatccgaccaactgttcgtaccgcaaatcaaaacatggcggctgaacgaacgccactacggccaactgcaaggtctggacaaaaaacaaaccgccgaacaatacggcgacgagcaagtccgcatctggcggcgcagctacgacaccctgccgccgcttttggacaaagacgatgagttttccgcacacaaagaccgccgctatgcccatctgcctgccgatgtcgtacccgacggcgaaaacctgaaagtaacgctggagcgcgtattaccgttttgggaagaccaaatcgcccccgcgattttgagcggcaaacgcgtcttggtggcggcgcacggcaactccctgcgcgcgctggcaaaacacatcgagggcatttccgacaaagacatcatgggcttggaaatcccgactggccagccgttggtgtacaaattggacgacaatttgaaagtcctcgaaaaattctacctgtaa

SEQ ID NO: 51433 - DNA, 798 bp, Neisseria meningitidis; identical to SEQ ID NO: 44377

SEQ ID NO: 51434 - DNA, 438 bp, Neisseria meningitidis; identical to SEQ ID NO: 50478

SEQ ID NO: 51435 - DNA, 813 bp, Neisseria meningitidis
atgtcggttgggcattatgaaaattttcccgtcggttcgctgattttgccgcgcaggttgaggaagccggttcatgcggtgtatgcgtttgcacggacggcggacgatatggcggacgagggcagtatgccgtctgaagccaggttggcggggttggagggtttgcggcgcgagttggacgtgttggcatcgggcggccggtcggcgcatcctttgattgcacgattggatgccgaggcggttgtgccgttcggtttggatttgcagccgttttatgatttgctttctgcattttctcaggatgtggttaaaacaaggtatggaaatttcggcgagctggccgattattgccgacgttctgccaatcctgtcggacgcattatgctggctttgtacgggaaaacggatgcggtgtgcgtggcgcaaagcgacggcatctgtacggctttgcaactggtgaatttttggcaggatgtggctgtggattggcaaaagggcagggtttatattccgcaggacgatttgttgaaattcggtgtttccgaaggacagattgcggagggtagggcggatgcggcgtttcagcggctgatggcgtatgagtgccggtgcgcatttcgtatgctgaaggcgggttcgcctttagcgcgcgaattgaaagggcgtatcggtttggaactccgtatgattgtgttgggggcgcagttgattttgcagaaactggacgcgtgccgatacgatgtgtttgcacaacgccccgttttggataagaaggattggttgattatgctgaaacgcgcgttgtggaaatga

SEQ ID NO: 51436 - DNA, 1017 bp, Neisseria meningitidis
atgtatcggaaactcattgcgctgccgtttgccctgctgcttgccgcttgcggcagggaagaaccgcccaaggcattggaatgcgccaaccccgccgtgttgcaaggcatacgcggcaatattcaggaaacgctcacgcaggaagcgcgttctttcgcgcgcgaagacggcaggcagtttgtcgatgccgacaaaattatcgccgccgcctacggtttggcgttttctttggaacacgcttcggaaacgcaggaaggcgggcgcacgttctgtatcgccgatttgaacattaccgtgccgtctgaaacgcttgccgatgccaaggcaaacagccccctgctgtacggggaaaccgctttgtcggatattgtgcggcagaagacgggcggcaatgtcgagtttaaagacggcgtattgacggcagccgtccgcttcctgcccgtcaaagacggtcagacggcatttgtcgacaacacggtcggtatggcggcgcaaacgctgtctgtcgcgttgctgccttacggcgtgaagagcatcgtgatgatagacggcaaggcggtaaaaaaagaagacgcggtcaggattttgagcggaaaagcccgtgaagaagaaccgtccaaacccacgcccgaagacattttggaacacaatgccgccggaggggatgcagacgtaccccaagccgcagaaggcgcgcccgaaccggaaatcctgcatcctgacgacggcgagcgtgccgataccgttaccgtatcacggggagaagtggaagaggcgcgcgtacaaaaccagcgtgcggaatccgaaattaccaaactttggggaggactcgataccgacgtgcaaaaagagttggtcggcgaacaacgcaagtgggcgcaggaaaaaatcagcaactgccgacaagccgccgcgcaggcagaccggcaggaatacgccgaatacctcaaattgcagtgcgacacgcggatgacgcgcgaacggatacagtatcttcgcggctattccatcgattag

SEQ ID NO: 51437 - DNA, 846 bp, Neisseria meningitidis
atgaaatttccttccttccttccttcctttaaacggatactctgcctgtcggcagtaatctcggtattgggggcttgtacggtcgttgctgatgtttacggtcaggattccgccacaatgaacgctgcggctgccaaagattatatgaaaacggttgagttgaacaagtctgccggcaatgtcgataccacatccagaacagcccgcagggtgcaggcagtatttcgacgtatgctgccttatgccgatgcggcaaataataccggccataggtttgactggaaaatgacggttttcaaaaacgatgagctgaacgcgtgggcgatgcccggtggaaaaatggcgttttatacggggatagtcgacaaactcaagctgaccgatgacgaaattgccgccattatggggcatgaaatgacgcacgccctgcatgaacacggtaaaaataaggtcgggcaacaaattttgaccaatacggcggcgcagataggcacgcagattatattagacaaaaaaccggacactaatccggaattggtcggattgggtatggatattttggggacgtacggtcttaccttgccttatagccgcagcttggaagaagaagccgatgaggggggaatgatgttgatggcgcaggcaggctatcatccggcggccgctgtcagggtttgggaaaaaatgaatcaggaaaacgaccaaaacggctttatttatgctattacctctactcatccgacaaacaatgcccgtatagaaaacctaaaacggttgttgccgaccgttatgcctgtttatgagcaaagtgtcagaaataaggggcgcgttaatatagtggattaa

SEQ ID NO: 51438 - DNA, 1137 bp, Neisseria meningitidis
atggaaatgaaacaaaccgattcaaccatcaaatctcgtgcggcggtggcattcgcccctaaccaacccttacaaattgtggaaatcgacgtagaaatgccgcgtaaaggcgaggtgttaatccgcaatacccacactggcgtgtgccatactgatgcgtttacgttatcaggaagcgatcctgaaggcgtattccctgtggtgcttggacacgaaggtgcgggtgtggtcgttgctgtgggcgaaggtgtgtcaagcgtaaaaccgggtgatcacgtgattccgctttacaccgccgaatgtggcgaatgtgagttttgttgttcaggtaaaaccaacttgtgcgtctcagtgcgtgatacacaaggtaaaggcttaatgccggacggcacgacgcgtttttcttatcaaggtcagccgatttatcactatatgggctgttcgactttcagtgaatactccgttgttgccgaagtttcactggcgaaaatcaaccctgaagccaaccatgaacaagtatgtttgctcggctgcggcgttaccacaggtattggtgcggtacataatacggcaaaagtgcaagaaggcgactctgttgccgtgtttggtttgggggcgattggtttggcggtggtgcaaggtgcgcgtcaagccaaagccggccgcattatcgccattgataccaatccatcaaaatttgagttggcaaaacagttcggtgcaacggattgtttgaacccgaacgattacgataaaccgattaaagatgtgttgttagacatcaataaatggggcattgatcacacctttgaatgtatcggcaacgtaaacgtaatgcgtcaggcattagaaagtgcgcaccgtggttggggacaatccattatcatcggcgtagcaggtgcaggacaagaaatttcaacgcgtccgttccagttggtaacaggtcgtgtttggaaaggttcagcatttggcggtgtgaaaggtcgctctgaactgccgaaaatggtggaagattcaatgaaaggcgacattgagttagaaccgtttgtaacccacacaatgacactcgatcaaatcaatgaagcctttgagttaatgcacgaaggtaaatcaatccgcgccgttattcactactaa

SEQ ID NO: 51439 - DNA, 708 bp, Neisseria meningitidis
ttggtcaaaacggcagacggctacaaagccattgcccgtatccgaaccggcgaccgcgtcttctccaaggacgaggcaagcggaaaaacgggatacaaacccgttaccgcccgatacggcaatccgtatcaagaaaccgtttacattaaagtttcagacggcatcagcaacagccaaaccctgatttccaaccgcatccatccgttttacagtcaaggaaaatggatacaggcaggtcgtctgaaaaaaggcgacaccctgctttccgaaagcggcgcaaaacagacggttcaaaacattaccctcaaacagcagccgctcaaagcctacaatctgaccgttgccgattggcatacttacttcgtcaagggcagtcaggcggaaacggaaggggtttgggttcataatgattgtccgtatgataaaggcaaccaacgatataaagacgcttcttatcatggcaaaaatgataattctgtgaaaagtagagcaccaacaaacggacaagcagctcttgataattccgttcaagttaaatcaacttctcctcgaagagttggggttgataaagccaataatgaaatcgttgtattaaacaaaactcaaacttttaataacggttctgcggaatatcacgggcatgtcagaagttggcaagatttgcataccgatcagaaaaatgctttaaaaaaagcaggattggattag

SEQ ID NO: 51440 - DNA, 384 bp, Neisseria meningitidis; identical to SEQ ID NO: 38324

SEQ ID NO: 51441 - DNA, 846 bp, Neisseria meningitidis
gtgagcgttcagacggcattccgaatttcaaatgccgtccgaacccccgccaaacaacaacaaacctacgcccgacaagcatccgccatgattaccatccgcaacgtcagctaccgcatcggcacacgccccatcctcgacaacgtcagcctcgacatccccgaaggcggcattaccgccctcgtcggccccaacggcgcgggcaaatccaccctgttttcctttatggcgcggctgcgcccgcttgaaagcggcagcatcgcctaccgcggcaaaaaccttgccgacacccccaccgccgaactcgcccgcacgctctccatcctcacccaagaaaacagcatcatgagccgcattaccgtgcgcgacctgctcatgttcggccgctatccctaccatcaaggcaggccgtctgaaacggataaaaccatcgtcgaagaagcgctcgccgagttccacctgcaagactttgccgaccgctacctgaccgagctctccggcggccaacgccaacgcgccatgattgcgatggtgttctgccaaagcaccgactacgtccttttggacgaaccgctgaacaacctcgatatgtatcacgcccgctcgctcatgcagattctgcaaaagctcacgcgcgaacacaaacgcaccaccgtcgccgtattgcacgacattaaccaggccgccgcttacgccgaccacgtcgtcgccatgaaaaacggcaaagtcgccctgaccggcacgcccgaagaagtgttcaccgtacacaacatcaaagaactgttcgacatggacgtggacgtactcgactacgaaggcaaaaaactcatcgtccaccatatctga

SEQ ID NO: 51442 - DNA, 948 bp, Neisseria meningitidis
atgaatatcctcagtaaaatcagcagctttatcggaaaaacattttccctctgggccgcgctctttgccgccgccgcttttttcgcgcccgacaccttcaaatgggcggggccttatattccttggctgttgggcattattatgttcggtatgggtttgacgctcaaaccttccgacttcgatattttgttcaaacatcccaaagccgtcatcatcggcgtaatcgcacaattcgccattatgccggcaaccgcctggctgctgtccaaactgttgaacctgcctgccgaaatcgcggtcggcgtgattttggtcggctgctgcccgggcggtacggcttccaatgtgatgacctatctggcgcgcggcaatgtggctttgtcggttgccgttacgtctgtttccaccctgatttccccattgctgactcccgccatcttcctgatgcttgccggtgaaatgctggaaatccaagcggccggtatgttgatgtccatcgtcaaaatggttttgctccccattgttttgggtttgattgtccataaggttttgggcagtaaaaccgaaaagctgaccgatgcgctgccgctggtttccgttgccgccatcgtgctgattatcggcgcggttgttggggcaagcaaaggcaagattatggaaagcggtctgctgatttttgcggttgtcgtactccacaacggcatcggctacctgctcggcttctttgccgccaaatggaccggcctgccttatgatgcacaaaaaacgctggccatcgaagtcggtatgcaaaactcgggtctggccgccgcgctggccgccgcacactttgccgctgcgccggtcgttgccgttccgggcgcattgttcagcgtgtggcacaatatctccggctcgctgctggcaacttattgggcggccaaagccggtaaacataaaaaaccctaa

SEQ ID NO: 51443 - DNA, 168 bp, Neisseria meningitidis; identical to SEQ ID NO: 37435

SEQ ID NO: 51444 - DNA, 156 bp, Neisseria meningitidis; identical to SEQ ID NO: 43525

SEQ ID NO: 51445 - DNA, 336 bp, Neisseria meningitidis; identical to SEQ ID NO: 38968

SEQ ID NO: 51446 - DNA, 564 bp, Neisseria meningitidis; identical to SEQ ID NO: 43706

SEQ ID NO: 51447 - DNA, 138 bp, Neisseria meningitidis; identical to SEQ ID NO: 39930

SEQ ID NO: 51448 - DNA, 477 bp, Neisseria meningitidis
atggaacacctatttgggaaatggctgcccgacttgcccgccgccgtttcagacggcatcgacctgccgatgagccggttattgaaagcccggtcgctgaccgccgcattgcgcgccttgccgcatacattttcggtggaactgctgaaactgggcgaattggagacggaatgcggagggaggctggtgcgcgaagttttgttgaagctggacggtatccctgttgttgaggcaaggagcgagtgccgtataggttcggcgttttggcaaaacattttggactgcggcacgcgccctttgggcgagcgtctgtttcaagccgatttggaaggggcgcgttcggcgtttgagtttgccgtttccggcgaaggatgcggacggtactttgccgcgcggcgttctcggttttcccgtcacggcgaggaaatgctgctgaccgagtattttctgcccgaactgaaacgctttatcggataa

SEQ ID NO: 51449 - DNA, 1215 bp, Neisseria meningitidis; identical to SEQ ID NO: 43295

SEQ ID NO: 51450 - DNA, 1002 bp, Neisseria meningitidis
atgaaacggaaaatttggctgctgccgctgctggcggtttcggcatacctgcaggcgcagacggaagtcaggctggcggtgcataagtcgttcagcctgcccaaagggttgattgcgcgcttcgagcgggcaaacgatgcgaaggtgtcgattattcaggcgggcggcgcgaacgaaatgctcaacaaactgattttgagccgcgccaacccgattgccgacgcggtgtatggtttggacaacgccaatatcggcaaggcgcgggaaatgggcattttggcggcggcgcaacccgaatccgcccccgtcgcggtcgggctgccttcggctttggcggtcgattacggctatgtgtccatcaattacgacaaaaaatggtttgaaggcaaaaagctgcccctgccgcaaaccctgcaggatttgacccgccccgaatataaaaacctattggtcgtgccgtcccccgccacgtcgtccccggggctgggcttcctgatggcgaacatcagcggtctgggcgaagaaggcgcgttcaaatggtgggcacagatgcggcagaacggcgtgaaggtcgccaaaggctggagcgaggcgtattacaccgacttttcgcacaacggcggcgcgtatccgctggtggtcggttatgccgccagcccggcggcggaagtgtatttttccaaaggcaaatacagcgagccgccgacgggcaacctgtttttaaaaggcggcgtattccgccaggtcgaaggcgcggcggtcttgaagggcgcgaaacagccgaagctggcggcaaaactggtgcaatggctgcaaagtcgggaagtgcagcaggcggttccgtccgaaatgtgggtttaccccgccgtcaaaaacacgcgcctgcccgacgtgttccgcttcgcccaagccccgacgcacaccaccgcccccgcgcagcgcgatattgatgcgaaccagcgcggatgggtttcccgttggattagaacggttttgaaataa

SEQ ID NO: 51451 - DNA, 1068 bp, Neisseria meningitidis
atgtttggcgggatttcggttaaaatggcggcatttccatctgaagcagaaagccctgtcatgtatccacttgcccgtcgcatcctgtttgcactcgatgccgaaaaagcccaccacttcacgctcgacgcgctctacacggtttataaattgggtttgattcctgtaaccgacaaccgtaccaaacctgtaaaattgatgggtatggatttgcccaaccctgtcggacttgccgccggactcgacaaaaacggcgaatacatcgacgcattgggcgcgctcggctttggtttcatcgaaatcggcacggtaacgcccaacccgcagcccggcaacccgcagccgcgcctctttcgcgttcccgaacaccaaggcatcatcaaccgcatgggtttcaacaaccacggtatcgacaccatgatacgcaacatcgaaaaaagtaaattcagtggcgtattgggcatcaacatcggtaaaaacgcggttacacccatcgaaaacgctgccgatgattatttaatctgccttgaaaaagcctacgcacacgcaagttacattaccgtcaatatttcctcgcccaacaccaaaaacctccgcgcgctgcaaggtggcgacgagttgagcgcattgcttgaggctttgaaaaacaaacaggcacagcttgcctctgtacacgggaaatacgtcccgctcgccgtcaaaatcgcccccgatttggatgaagcacaaatcgaagacatcgcccacgttgtcaaatccgtcgaaatggacggcatcatcgctaccaataccaccatcgacaaatcaagtctcggcagccatccgctcgcaggcgagcagggcggtttgagcgggctgcccgttcatgaaaaaagtaatcgggtgttgaagctgttggcagaccacatagacggcaagctgccgattatcggcgtaggcggcattatggaaggcgaggactcggcagataaaatccgcttgggcgcgaccgccgtccaagtgtacagcggattgatatacaaaggtccggcattggtcaaagaatgtttgaaggctttggcgcgatga

SEQ ID NO: 51452 - DNA, 681 bp, Neisseria meningitidis
gtgcaggcggatttagcttatgccgccgaacgtattacccacgattatccgaaagcaaccggtgcagacaaagacaaaataagcacagtaagcgattatttcagaaacatccgtgcgcattccatccaccctcgtgtgtcggtcggctacgacttcggcggctggagaatagcggcagattatgccagttacagaaaatggaacaacaataaatattccgtcaacacaaaaaaggtgcaagaaaaccaaggcaccagaaaagacctgaagacggaaaatcaggaaaacggcagcttccacgccgcttcttctctcggcttatccgccatttacgatttcaaactcaacgataaattcaaaccctatatcggtgcgcgcgtcgcctacggacacgtcagacacagcatcgattcgaccaaaaaaacaacagaggttgttacctccacccatggtggtgctgacacaaaacctacgatttataatggggaaagtacgcaaaacgcctatcacgaaagccacagcatccgccgcttgggtcttggtgtcgtcgccggtgtcggtttcgacatcacgcccaagctgactttagacaccggataccgctaccacaactggggacgcttggaaaacacccgcttcaaaacccacgaagtctcattgggcatgcgctaccgcttctga

SEQ ID NO: 51453 - DNA, 1800 bp, Neisseria meningitidis
ttggaggttggtgcaaaacctgcttttttcgcgttacaatctgcacccgatttacttttgaatttgcctgtttggaaaaatacttttatgaaagccagccaattctttatctctactttaaaagaagcccctgccgaagccgcgcttgccagccacaagctgatgattcgcgccggtctgattaaagccaacgcgtccggcctttatacttggatgccgatggggctgcgcgtgttacgcaaagtcgaaaacgtcgtgcgcgaggaaatggcgcgcgcgggcagcgtggagctgctgatgccggtggtgcagcctgccgagctgtggcaggaatccggccgctgggaattttacggtaaagaactgctgcgcctgaaagaccgccacgaccgcgatttctgcatgggaccgacctgcgaggaagtcatcgccgacatcgtgcgtaaagagatcaacagctacaaacaactgccgaaaaacttttaccacatccaaaccaaattccgtgacgaagtgcgcccgcgcttcggtgtgatgcgtgcgcgcgagtttgtcatgaaagatgcttattccttccatgccgactacgcctcgcttcagacgacctatgatgccatgtatgacgcttactgccgcatcttcacccgtctgggcttggcattccgccccgtcgccgcagataccggcagcatcggcggtaccggctctcacgagtttcaagtgttggcggaaagcggcgaagatgtgattgcatacagcgacacttccgattacgccgccaatgtcgagctggcaccgaccttgccgcttaaaggcgaacgcaccgctgctcaggcagaactcgtcaaagtacatacaccaaacgtcaaaaccattgagtctttggttgaattcctgaatattccggttgaacaaaccctcaaatccatcgtggttgaaggcgaaaatgaaggcgaaatcgttttattgctgttgcgcggcgaccatgagttcaacgacatcaaggcagaaaaactggcgggcgtgaaatcgccattgacgatggcaagttctgccgcgattgtcgaacagttcggcgcaaacggcggctcgctgggtccggtcggctttgcaggtaaagtttatgccgatttcgccactgaaaaaggcgcggactgggtcatcggtgcgaacgaagacggctaccactataccggcttcaacttcgggcgcgatgccgccgagcctgaattcgtcgatttgcgtaatgtggtcgaaggcgacgaaagccccgacgggcaaggccgtctgaaactggcgcgcggcatcgaagtcggacacgttttccaattgcgcgacaaatacacccaagccatgaacgtaagcttccttgacaacaacggcaaatcgcaagttatggaaatgggctgctacggcatcggcatcacccgcgtcgttgccgccgccatcgagcagaataacgacgaaaaaggcatcatctggaccaaagcaatggcgccgtttgaagtcgttatcgtgccgatgaactacaaaaaatcagacaccgtacgcgaagccgccgacaaaatctatgccgaattgctggcggcaggcgcagacgtcctcctcgacgaccgcgacgaacgcgcaggcgtgttgctgaacgattccgagctgttgggtattccgcaccgcatcgtcatcggcgaccgcgctttgaaagaaggcaatgtcgaatacgccgaacgccgcaacaacgaagcgcaggcagttgcaatcggagaaattgttgcgcgtgtaacagcttcattaaatgggtaa

SEQ ID NO: 51454 - DNA, 312 bp, Neisseria meningitidis; identical to SEQ ID NO: 42205

SEQ ID NO: 51455 - DNA, 225 bp, Neisseria meningitidis
atgaacagcgaaactttagacgtaaccggattgaaatgtcccctgccgattttgcgggcgaaaaaggctttggcgcaaatgcagcagggcgacgtgttgaccgttctggcaaccgacggcggcgcaccgggggattttgaggctttttgccgccaaaccggtcatgtgctgttggattcttccgaacaggacggcgtgttcacgctggtcgtccaacacaaataa

SEQ ID NO: 51456 - DNA, 342 bp, Neisseria meningitidis; identical to SEQ ID NO: 37173

SEQ ID NO: 51457 - DNA, 147 bp, Neisseria meningitidis; identical to SEQ ID NO: 42194

SEQ ID NO: 51458 - DNA, 1212 bp, Neisseria meningitidis
atgaaccaactgaaacttgccgtttccggcgcgcagattttatttgtggcattcggcgcaatggtgctggttcccctgctgaccggtctgaatccggctcttgcgcttttgggcgcaggcttgggaacgctgctgttccaaatcacaaccaaacgcaaagtgccgatttttcttggttcttcgtttgcctttatcgcaccgattatctactccgtcggcgaatgggggctgccttccaccatgttcggactgtttgccgccggctttatgtattttgtgtttgccgcgctgatccgttggcgcggactggcagcggtacacaaactgctgcctccggtcgtcatcggccccgtcatcatggtcatcggtctgtctgttgccgtggcggcaagcagcatggcaatgggtcaggcggacggcaaacaggtcatcgactataccgattcgctgattctttccggctttacctttgccgttaccgccatcgtatcggttttcggcagcaggatgatgaagctgattcccatcttgatcggtgtcgcttcgggttatgttttggcactgctgatgggactggtggacacggcaagcattgcacacgcgccctggttcgccgttccccattttgaaacgcctcaggtcaactggcaggctgcactgtttatgctgcccgttgccgtcgcccccgccatcgaacacatcggcggcatcatggcaatcggcaatgtgacggggaaagactatacgaaagacccgggcttggacaaaacccttgcaggcgacggtttgggcgtatgcgttgcgggtctgatcggcggcccgccggttacgacctacggcgaagtaacgggtgcggtgatgattaccaaaaacagcaaccccgtcatcatgacttgggcggcggtttttgccgtctgcatggcgtttttcggcaaattcaatgcgtttttggcttccattccgatgccagtaatgggcggcattatgctgctgctgttcggcacgattgcttctttgggcgtgaaaacgctgattgatgccaaagtcgatttgatgctgccgaaaaacctggtcatcgtcagctcggtactgaccacgggcatcggcggcatgacgctcaaattgggcagcttcagctttgccggcgtgggcttgtgcgccgtacttgccattatgttgaacagcctgctgcccgatccgaaagaatcctga

SEQ ID NO: 51459 - DNA, 561 bp, Neisseria meningitidis
atgaaaaacctcatcgccttcaacaaaccctatggcgttatctgccaattttcaccgcacgaaaaacacaaaagcctcaaagactttatcaatcttcccggcttctaccccgccggacggctcgacaccgacagcgaggggctgctgctgctgaccgacgacggcaggcttcaggcacaaattaccgaccccaaattcaaacaccccaaaacctactgggcacaactggagggcgtacccgacgaaagccgattggaaagcctaagaaaagggatagacttaggcggtttcgttacccgtccggcaagcatccgcatcttgaaacacggagaagcagattcgttatgggagcgcatcccgccgatacgcgtccgcaaaaccgttcccgatttttggattgaaattaccatttctgagggcaaaaaccgccaagtcaggcgaatgaccgccaaggcgggctatccctgcctgcgtctgatcagagtggcaagcggcaggctgaaactgtttgatttggatttaaaacccggggaatgggcatacgccccgtttaaaccataa

SEQ ID NO: 51460 - DNA, 423 bp, Neisseria meningitidis
atggcatacgcgacggttgaggatatggttgcgcgtttcggtgagctggaagtcttgcagctcaccgaccgcaacaacgaggggctgattgaccgcgaggtcgcacaaaccgcgctggtggacgccactgccgaaatcgacgcgtatctggggcggtttaaacgtccgtttaccgatgtgccgcccatcctcaagcgcttgtgttgcgatattgcccgctaccgccttaccgccgccaacggcgtgctgattaccgacgaaatccgcaaccgctacaaaatcgacgtgctcgacctgctgcgtgctatggccaaaggcgaagtgcagctgggcgtggatgatagcggcgaagaagtggccgcgggcgaagacggtattgtgtttctaaacggtaaaaataaggtgttcgggcgtgatcactga

SEQ ID NO: 51461 - DNA, 447 bp, Neisseria meningitidis; identical to SEQ ID NO: 45533

SEQ ID NO: 51462 - DNA, 798 bp, Neisseria meningitidis
atggcggctgttttttctgtgtgtgcctgttttatgtgttcctgccttgttgtcaaaaataccgttatcggaagcggacgcaccaaaatcgccgtgccgcttgtcgcccgcgatgccgccgtactttccgccgtacttgaccaaatcaaaaacctgcccttcgatatcgtcgagttccgcgccgactttttggaatgcgcgggcagcatcggcgaagtattgcgccacacgcagaccgtccgcgacgcgctgcccgacaaaccgctgctgtttacgttcagacggcatggcgaaggcggctcattcccgtgttcggacgattattattttgaactgctcgacgcgctgatcgaaagccgcctgcccgacattatcgatattgagctgttttccggcgaaaccgccgtccggtgcgccgtggcaaatgctcaaaaaaacggcatcgccgccctgctctgcaatcatgagtttcaccgcacgccgccgcaagaagaaatcgtatgccgtctgaaacagatggaggactgcggcgcggacatctgcaaaattgcggtgatgccgcaaagcgcggaagatgtgctgactttgctttccgccacgctcaaagcgaaagagcttgccgccaaaccgattgttacgatgtcgatggggcagacgggggcggtcagccggcttgccggacaggtgttcggctcaagcatcacgttcggttcgggaacgcaaaactccgcgccggggcaaatcggcgtatccgccctccgtgcgacactcgactgcctcgaaaacggcgcagactga

SEQ ID NO: 51463 - DNA, 1167 bp, Neisseria meningitidis
atgagaaaattcaatttgaccgcattgtccgtgatgcttgccttaggtttgaccgcgtgccagccgccggaggcggagaaagctgcgccggccgcgtccagtgaggcgcaaaccgccaacgagggcggttcggtcagtatcgccgtcaacgacaatgcctgcgaaccgatggaactgaccgtgccgagcggacaggttgtgttcaatattaaaaacaacagcggccgcaagctcgaatgggaaatcctgaaaggcgtgatggtggtggacgagcgcgaaaacatcgcccccggactttccgataaaatgaccgtcaccctgttgccgggcgaatacgaaatgacttgcggtcttttgaccaatccgcgcggcaagctggtggtaaccgacagcggctttaaagacaccaccaacgaagcggatttggaaaaactgtcccaaccgctcgccgactataaagcctacgttcaaggcgaggttaaagagctggtggcgaaaaccaaaacctttaccgaagccgtcaaagcaggcgacattgaaaaggcgaaatccctgtttgccgacacccgcgtccattacgaacgcatcgaaccgattgccgagcttttcagcgaactcgaccccgtcatcgatgcgcgtgaagacgacttcaaagacggcgcgaaagatgccggatttaccggctttcaccgtatcgaatacgccctttgggtggaaaaagacgtgtccggcgtgaaggaaattgcagcgaaactgatgaccgatgtcgaagccctgcaaaaagaaatcgacgcattggcgtttcctccgggcaaggtggtcggcggcgcgtccgaactgattgaagaagtggcgggcagtaaaatcagcggcgaagaagaccggtacagccacaccgatttgagcgacttccaagccaatgtggacggatcgaaaaaaatcgtcgatttgttccgtccgctgatcgaggccaaaaacaaagccttgttggaaaaaaccgataccaacttcaaacaggtcaacgaaattctggcgaaataccggactaaagacggttttgaaacctacgacaagctgggcgaagccgaccgcaaagcgttacaggcctctattaacgcgcttgccgaagaccttgcccaacttcgcggcatactcggcttgaaataa

SEQ ID NO: 51464 - DNA, 912 bp, Neisseria meningitidis; identical to SEQ ID NO: 37999

SEQ ID NO: 51465 - DNA, 168 bp, Neisseria meningitidis; identical to SEQ ID NO: 43416

SEQ ID NO: 51466 - DNA, 423 bp, Neisseria meningitidis; identical to SEQ ID NO: 37816

SEQ ID NO: 51467 - DNA, 672 bp, Neisseria meningitidis; identical to SEQ ID NO: 43608

SEQ ID NO: 51468 - DNA, 846 bp, Neisseria meningitidis; identical to SEQ ID NO: 39184

SEQ ID NO: 51469 - DNA, 1200 bp, Neisseria meningitidis; identical to SEQ ID NO: 43373

SEQ ID NO: 51470 - DNA, 960 bp, Neisseria meningitidis; identical to SEQ ID NO: 42610

SEQ ID NO: 51471 - DNA, 1005 bp, Neisseria meningitidis
atgtcgggcgcggctgccgcgctgcttgccggcatcatcctttatttcaaaagcgacaaaaagcggcaggaaaacggtgaatggagttccggtctggaatacgcctatatcctgacggcggtcggcgtgtttgccgctttgtccctgtttatgagctttgccgccgttttcctgattttcgttgtattgtgcggtacggcttggggggtatataaataccgcctgaagactcatcccgaaatctcggaaagcagccacttcggcgattatttcggcagtttcttccctaccgttttggtattgttcctcatccgatcgtttattgccgaaccgttccaaattccatccagctcgatgcgcccgggcctgatcaagggcgatttcattttggtcggcaaattttcctacggcctgcgcgtacccgttttaaacaatatatttattcctacaggcaaaatcgaacggggtgatgtcgttgtttttaattatcctctgcagccagagatgacctacatcaagcgtattgtcggcattccgggcgatgtggtcgaatatcgggataagattttgacggtaaatggcaaacccacttccgatattcctaacggcacataccgttatcccgacgataccgacccatccgaaatccacaacacggatatgttccgcagcggtttggacggcaaatccttcaatattctgaaaaaagaaggacagcctgccgtttccctgcccgtattgggcaaatatacctccgatattatgtctgaaaacggatattccatagagcaaagcggtttggaacactgccaatatgccgacgacggcagcggtttcgtgtgcaaagttcccgaaggacgctatttcgctatgggcgacaaccgcgacaacagtgccgattcgcgctactggggatttgtggatgacaagctggttgtcggcaaggcaatgttcattttgatgaacttcggcgatttcggcagggccggtacggcaatccgttag

SEQ ID NO: 51472 - DNA, 303 bp, Neisseria meningitidis
atgggctatcgtgtcggcataaattgttttgatacaagattgcaggcagacgactatttattgtcgtcccttcctcctactgttacccaggacggaaaaatcatcaggccggaaagggtgggcgaaaaatgggtcttgaacggaaagccggtaatgttgtcctatccgaaatgttccaattttgagcagatcaaacagggttcttatgtcggttcgacggttttaattctgttcgtagtcatttacggcttcaggcttttgattaattttttaaaagacataggcaaggttggtactgattga

SEQ ID NO: 51473 - DNA, 210 bp, Neisseria meningitidis; identical to SEQ ID NO: 43717

SEQ ID NO: 51474 - DNA, 657 bp, Neisseria meningitidis; identical to SEQ ID NO: 43231

SEQ ID NO: 51475 - DNA, 567 bp, Neisseria meningitidis; identical to SEQ ID NO: 42257

SEQ ID NO: 51476 - DNA, 870 bp, Neisseria meningitidis
atgaagcgcatctttttgcccgccttgcccgccatcctgcctttatccacttatgccgacctgcccttgacgattgaagacataatgaccgacaagggaaaatggaaactggaaacttcccttacctacctgaacagcgaaaacaaccgcgccgaacttgccgcaccggtttacattcaaaccggcgcaacctcgtttatccccattccgaccgaaattcaagaaaacggcagcaataccgatatgctcgccggcacgctcggtttgcgctacggactgaccggcaataccgacatttacggcagcggcagctatctgtggcacgaagaacgcaaactcgacggcaacggcaaaacccgcaacaaacggatgtccgacatatccgccggcatcagccacaccttcctcaaagacgacaaaaaccccgccctaatcggctttcttgaaagcacggtttacgaaaaatcgcgcaacaaagcctcgtcgggaaaatcgtggctcatcggtgccaccacctacaaagccatcgaccccgtcgtcctctcattgactgctgcctaccgtatcaacggcagcaaaaccctttcaagcaacaccaaatacaaagcaggcaattactggatgctgaatcccaatatatccttcgccgccaacgacagaatcagcctcacgggcggcatccaatggctgggcaagcagcccgaccgtctggacggcaaaaaagaatccgcaagaaacacatccacctatgcccatttcggcgcaggtttcggtttcaccaaaaccacggctttaaacgcatccgcacgtttcaacgtttcagggcaaagcagttccgaactgaaatttggcgtacagcatacattttaa

SEQ ID NO: 51477 - DNA, 261 bp, Neisseria meningitidis; identical to SEQ ID NO: 49896

SEQ ID NO: 51478 - DNA, 873 bp, Neisseria meningitidis
gtgggcatcaatgccaatcctaactgtgctgatgaagcaggaaaactgatatgggaaaacgaccccaataaaaattggtgggctaaccgtatggatgatgttcgcggcatcgtccaaggtgcggttaatccttttttaatgggttttcaaggagtagggattggggcaattacagacagtgcagtaagcccggtcacagatacagccgcgcagcagactctacaaggtattaatcatttaggaaatttaagtcccgaagcacaacttgcggctgcaaccgcattacaagacagtgcttttgcggtaaaagacggtatcaactctgccaaacaatgggctgatgcccatccgaatataactgcaacagcccaaactgcccttgccgtagcagaggccgcaactacggtttggggcggtaaaaaagtagaacttaacccgaccaaatgggattgggttaaaaataccggctataaaaaacctgctgcccgccatatgcagactgtagatggggagatggcaggggggaatagaccgcctaaatctataacgtccaacagcaaagcagatgcttccacacaaccgtctttacaagcgcaactaattggagaacaaattagtagtgggcatgcttataacaagcatgtcataagacaacaagaatttacggatttaaatatcaattcaccagcagattttgctcggcatattgaaaatattgttagccatccaacaaatatgaaagagttacctcgcggtagaactgcgtattgggatgataaaacagggacaatagttatccgagataaaaattctgacgatggaggtacagcatttagaccaacatcaggtaaaaaatattatgatgatttatag

SEQ ID NO: 51479 - DNA, 654 bp, Neisseria meningitidis
atgaagataacgcactgcaaattaaagaaaaaagtacagaaagaactgctccatttttttgtactggaagttaccgcccgttctgccaccgatattttgggtatccatcccaattcggcagtactgttctaccgtaaaatccgcacggttatcaactatcatttggccttggctgccgatgaggtttttgagggttctgtcgagctggacgaaagctatttcggcggacagcgtaaaggcagacgtggtcgcggtgcggtaggaaaagtggttgttttcggcattctgaaacgcaacggatgggtctataccgttgtggtggataatgccaagtctgaaacgttactccctgtcatcaaaaagaaaatcatgccggacagtattgtttataccgatagtctgagcagctgcgacaagttggacgtgagcggttttatccattaccgcatcaaccattccaaggagtttgcagaccgtcagaaccacattaacggcattgagaacttttggaatcaggcaaaacgcgtcttgcgaaaatacaatggaatcgatcgcaaatctttcccgctgttcttgaaagaatgcgaatttcgatttaacttcggcacaccgtcccggcagctaaaaatcctacaggattggtgtgggatttag

SEQ ID NO: 51480 - DNA, 1854 bp, Neisseria meningitidis
atgaaccgttatcctttatggaaatatctgctgattgtgttcacgattgcggttgccgcagtgtattcgctgcccaacctattcggcgaaacacccgccgtgcaggtatcgaccaaccgacaagccatcatcatcaacgaacagactcaattcaaagtggatgccgcgctgcaaaacgcgggtattcagaccgacgggatgtttgttgtggacaattcactgaaagtgcgtttcaaagacaccgaaacgcagcttaaagcgcgcgacgtcatcgaaaacactttgggcgaagggtatattaccgcgctcaacctgttggcggacagccccgaatggatggcgaaaatcaaagccaatccgatgtttttgggtttggacttgcgcggcggcgtgcatttcaccatgcaggtcgatatgaaagcggcgatgcagaaaacgtttgaacgttattcgggcgacatccgccgcgaactgcgccgcgaaaaaatccgcagcggcacggtgcgtcaggctggaaacagcctgaccgtccctttgcaggatgcaggtgatgtgcaaaaggctctgccgcagttgcgcaagctgtttcctgaagcaacgctgaattcagacggcagcaatatcgtcttgacgctttcggaagaggcggtcaataaagtgcgttccgatgcggtcaaacagaacatcactaccctgcacaaccgtgtgaacgagttgggcgtggccgaacccgtcatccagcagtccggtgccgaccgtatcgtcgtgcagcttccgggcgttcaggatactgccaaggcaaaagacatcatcggccgtaccgcgactttggaattgcgtatggtggaggacgatcctgccaagttgcgcgaggcattggaaggcaacgtgccgagcggttatgagctgctttcaagcggcggagatcgtcccgaaactctgctaatcagcaaacaggtcgagctgacgggcgacaacatcaacgatgcgcaaccgagtttcgaccaaatgggcgcacctgccgtcagtctgagcttggacagcgcgggtggcagcatttttggcgaactgactgccgcaaatgtcggcaaacgcatggcgatggttttgatcgaccaaggaaaatccgaggttgtaaccgcgccggttatccgtactgccattaccggcggacgcgtggaaatttccggaagcatgacgacagccgaagccaatgatacgtctttgctgttgcgtgccggttctcttgccgcgccgatgcagattgtcgaagaacgtaccatcggtccgtctttgggtaaggagaacatcgaaaaaggcttccattcgactttatggggttttgccatcgttgctgcattcatggtggtttactatcgtctgatgggtttcttttctaccattgcattgagtgccaacatactgttcctaatcggtattttgtctgccatgcaggcaacgttgacgttaccgggtatggccgcgctggcgttgactttgggtatggcaatcgactccaacgtcttgattaacgaacgtatccgcgaagaattgcgtgccggcgtgccgccgcagcaggcaatcaatctcggtttccaacacgcatgggcgaccattgtcgattccaacctgacttcgctgattgccggtatcgcgcttttggtattcggttccggcccggtacgcggttttgcggtcgtacactgtttgggtattctgacttcgatgtattcctccgtcgtcgtattccgtgcgttggtcaatctgtggtacggacgcagacgcaaattgcagaatatttccatcggtgcggtatggaaacctgaagccgaaactgcggcaggtaaggagtaa

SEQ ID NO: 51481 - DNA, 669 bp, Neisseria meningitidis
gtgaaccagcttattttcgactttgccgcacacgactatccgagtttcgacaaattcctcggcacggaaaacgcggaactggtctatgtcctccgacacaaacacggacagtttatctatgtttggggcgaagaaggcgcgggcaaaagccatcttttgcaggcgtgggtcgcacaggcgctcgaagccggcaaaaacgccgcctatatcgatgccgcctccatgccgctgaccgatgccgcgttcgaggcggaatacctcgccgtcgatcaagtcgaaaaactgggcaacgaagaacaagccctgcttttttccatcttcaaccgcttccgcaacagcggcaaaggctttttgctgctcggttcggaatacacgccccagcagcttgtcatccgcgaagatttgcggacgcgtatggcgtactgcctcgtttacgaagtcaaacccttaaccgaccaagaaaaaatcgacgcgctcgccagtatggcggcggcacgccaagtaaccgtcgattccgaaattttcgaatacctgctcaaacactggcggcgcgatatggacagcctgatgatgatgctcgacacgctggacaactacgccgtcacaatgggcaaacgcatcaccctgccgcttttgcgccagcttttgaaacaacaggaaacccaatga

SEQ ID NO: 51482 - DNA, 759 bp, Neisseria meningitidis; identical to SEQ ID NO: 42800

SEQ ID NO: 51483 - DNA, 5361 bp, Neisseria meningitidis
atgaaaaccaaacgttttaaaattaacgccatatccttatccatccttcttgcctatgcccttacgccatactcagaagcggcattggtcagagacgatgtcgattatcaaatattccgtgactttgcagaaaacaaaggcaaattttttgtcggcgcaaccgatttatcagtgaaaaacaaacaaggtcaaaacatcggcaacgcattatccaacgtaccgatgattgattttagcgttgcagatgtcaacagacgtacattaaccgtcatcgatccccagtatgccgtcagcgtcaaacatgtaaaaggagacgaaatctcttattacgggcatcacaatgggcacttagatgttagcaatgatgaaaacgaatatcgttcagttgcacaaaatgactacgaaccaaataaaaattggcatcacggtaatcaaggtcgtcttgaagactacaacatggcacgccttaataaattcgtaacagaagtcgcacctattgcaccaaccagtgcaggcggcggcgttgaaacctataaagataaaaaccgtttttctgagtttgtgcgagttggagcaggtacgcaatttgaatataacagccgctacaatatgacagagctttcacgagcttatcgttatgccattgcaggtacgccttatcaagacgtgaatgtcacatcgaatctaaatcaagaaggcttgattggcttcggtgataattcaaaacatcattccccagaaaaactcaaagaagttttatctcaaaacgcattgactaactatgctgtgttaggcgatagcggttcaccattatttgcttatgataaacaagaaaaacgctgggtctttttaggtgcttacgattattgggcaggctatcaaaaaaactcttggcaagaatggaatatctataaaaaagaatttgcagataaaatcaaacaacgcgataacgccggcaccatcaaaggtaatggagaacatcattggaacattacttttggcacaaacagcaagattggttctacagcggtaaggcttgccggcaatgaaaaggatgcaaacaacggacagaatgttacctttgaagacaacggcactttggtattggatcaaaacatcaaccaaggcgcgggcggtctgtttttcaaaggcgattacacagtcaaaggtgcaaataatgacatcacttggctaggtgcggggattgatgttgccgacggcaaaaaagtcgtttggcaagtcaaaaatccgaatggtgacagattggcaaaaatcggcaaaggcacattagaaataaacggcacaggcgttaaccaagggcaattaaaagtcggcgacggtacagttattctgaatcaaaaagccgattcaaaccaaaaagtccaggctttctcccaagtcggcattgtcagcggacgcggtacattggtattaaatagttcaaatcagattaatcccgataacctatatttcggtttccgtggcggtcgtttggatgccaatggcaatgacttgacttttgaacacatccgcaacgtggatgaaggcgcgcgcattgtcaaccacaacacaggtcacgcctccacaatcacattaaccggcaaatcattaattaccgctcctcaaaatctttctgtttatgaaatccgaaatgattacgatgatgacgattattatggctattacagctatagaaaacccattccgcaaggcaaagatctttattacaaaaactatcgttattacgccctaaaatccggcggcagcgtgaacgcaccgatgcccgaaaacggacaaacggaaaataacgactggattttaatgggcagcacacaagaagaagccaagaaaaacgcgatgaaccacaaaaacaatcagcgtattagcggttttagcggtttctttggcgaagaaaacggaaaaggacataacggcgcattaaaccttgatttcaacggcaaaagcgcgcaaaaccgtttcttgttaacaggcggcacgaatttaaacggaaaaataagcgtaactcaaggcaatgtcttgttatcaggtcgtccaacaccacacgcaagagattttgtgaacaaatcttcagcccaaaaagacgcacatttctccaaaaacaatgaagtcgtatttgaagacgactggataaaccgcacattcaaagccacagaaattgcggttaatcaatccgcatcattctcttccggcagaaatgtatccgacatcaccgccaacattaccgcaacagacaacgccaaagtaaatttgggttacaaaaacggcgatgaggtttgcgtgcgctcggactataccggttacgttacctgcaacacagacaacttatccgataaggctttaaacagctttggagcgacacagattaacggcaatgtgaatttgagtcagaatgcggcattggctttgggcaaggctgcattatgggggcaaattcaagggcaaggaaacagccgtgtcagcctaaaccaacatagcaaatggcatttgaccggcgacagccaagtgcacaatctgtcattggcggatagccatattcatttgaacaacgcttccgacgcgcaaagtgcaaataaataccacacgctcaaaatcaatcatttatccggtaacgggcattttcattatctgacgcacctggcgaaaaatcttggggataaagtgcttgtgaaggaatccgcatccggtcattatcagctccatgttcaagataaaacaggcgaacccaatcaggaagggctgaatctctttgatgcatcatccgtacaagaccgctcccgcctttctgtttccttggcgaataaccatgtagatttaggcgcattgcgttatacaatcaaaacagaaaacggtattacccgattgtacaatccttatgccgagaaccgccgccgagtcaaaccgaccccgtctcctgccacaaacacggcttctcaagcacaaaaggcaacacaaacggacggtgcacaaattgccaagcctcaaaatatcgtcgtcgcaccacctagcccgcaggcaaatcaagccgaagaagcaaaacgccaacaagcaaaagcggagcaagtgaagcgtcagcaagcagaagcagagcgtaaatcggcagagttagcaaaacaaaaagcagaagccgaacgcgaagcaagagagctggcgacccgccaaaaagcagaacaagaacgcagcagcgccgaacttgcacgtcgacatgaaaaagaacgcgaagcggcagagttgtcggcaaaacaaaaagtcgaagccgaacgtgaggctcaagcattggcggtacgccgaaaagcagaagccgaagaggcaaaacgccaagctgcagagcttgcacgccggcatgaaaaagaacgcgaagcggcagagttgtcggcaaaacaaagggtcggggaagaggaacgccgtcaaacagcccaatcccagccgcaacgccgcaaacgccgtgccgcaccgcaggattatatggcagcttcccaagaccgtcctaaacgccgcggacaccgttcggtacagcaaaacaatgtggaaattgcccaagcccaagcagaacttgcgcgccgacagcaggaagaacgcaaagcggcagagttgttggcaaaacaaagggcagaagccgaacgtgaggctcaagcattggctgcgcgccgaaaagcagaagccgaagaggcaaaacgccaagctgccgaacttgcacatcgccaggaagcagaacgcaaagcggcagaattgtcggcaaaccaaaaagccacagctgaagcccaagcattggcggcacgccaacaaaaagcccttgcgcgtcaacaggaagaagcacgaaaagctgcagagttagccgtcaaacaaaaagcggaaaccgaacgcaaaaccgccgaacttgccaagcaaagggcagcagccgaagcagcaaaacgccagcaagaagctcgccagaccgccgaacttgcacgtcgtcaagaagcggaacgccaagcagcagagttgtcggcaaaacaaaaagccgaaacagatcgagaagcggcagaatcggcgaaacgaaaagctgaggaagaagagcaccgtcaagcagcccaatcccagccgcaacgccgaaaacgccgtgccgcacctcaggattatatggcagcttcccaaaatcgtccgaaacgtcgcggacgcagatctactctgccggcaccgccctcgccatcatttgattcgtcagcttacgcagcacccagggccttgcataatccggactggtatgaaaatgactatgaagaaatccccttggatgcgttggaagatgaaaatgtatctgaatcagttgacacatcagacaaacagcctcaagacaatacggaacttcatgaaaaagttgagacagtgagtttgcaaccaagagccgcgcagccgcgagctcaagccgccgcgcagccgcaagcccaagccgccgcgcagccgcaagcccaagccgtcgcgcaagccgatgcagtcagcaccaataccaactcggctttatctgacgcaatggcaagcacgcaatctatcttgttggatacaggtgcttcattaacacggcacattgcacaaaaatcacgtgctgatgccgaaaaaaacagcgtttggatgtcgaacatcggttatggccgtgattatgcttccgcacaatatcgccggtttagttcgaaacgcacgcaaacacaaatcggcattgaccgcagcttgtccgaaaatatgcagataggcggcgtattgacttactctgacagtcagcatacttttgatcaggcgagcggcaaaaatacttttgtgcaagccaacctttatggtaagtattatttaaatgatgcttggtatgtggccggcgatattggtgcaggcagcttgagaagccggttacaaacacagcaaaaagcaaactttaaccgaacaagtatccaaaccggccttactttgggcaatacgctgaaaatcaatcaattcgagattgtccccagtgcgggaatccgttacagccgcctgtcatctgcagattacaagttgggtaacgacagtgttaaagtaagttctatgtcagtgaaaacactgacggccggactggattttgcttatcggtttaaagtcggcaaccttaccgtaaaacccttgttatctgcagcttactttgccaattatggcaaaggcggcgtgaatgtgggcggtaattccttcgcctataaagcagataatcaacagaaatattcagcaggtgccgcgttactgtaccgtaatgttacattaaacgtaaatggcagtattacaaaaggaaaacaattggaaaaacaaaaatccggacaaattaaaatacagattcgtttctaa

SEQ ID NO: 51484 - DNA, 1272 bp, Neisseria meningitidis
atgaaactgctggttatcggtaatggcggtcgcgaacacgcgctggcttggaaattggcgcagtcgcctaaagtggaaacagtatttgttgcgtctggtaatgccggtacagcgattgaacccaagctgcaaaacatcgacttgactgcgcatcaggatttgattgaattctgtcgtaaagaaaatattgtttttaccgtcgtcggccctgaagcgcctttggcggcaggtgttgtggatgatttccgtgctgcaggactaaaaatattcggtccgacacaatatgcggcgcagttggaaagttccaaagatttcgccaaagcatttatggcgaaatacaatattccgaccgcgcaatatcaaacctttgaaaacgccgatgccgcacatgattacgtcaatcagaaaggtgcgcctatcgttatcaaagccgatggtttggcggcaggtaaaggcgtgattgtggcgatgactttggatgaagcgcatgctgcgattgatgatatgctgctggacaacaaaatgggcaatgccggcgcgcgtattgtgattgaagatttcctgcaaggcgaagaagcgagttttatcgtcatggttgatggcaataatgtactgcctatggcaaccagccaagaccacaagcgtcttttagacggcgacaaaggtctgaatacgggcggtatgggtgcgtacagccctgcgcctgtggtaacgcctgttgtgtacgaacgcgcgatgaatgaaattattttgccgaccgtagcagggatgaaagcggaggggcatgagttcaccggtttcctgtacgcaggtttgatgattgatcaaagcggtgcaccccatacgattgagtttaactgccgtttcggcgatcctgaaacccagccgattatgagccgactgaacagcgacttatcggatttggttgaagcggcaatagacggcaaactcgatagcgtaaccgcggaatggagcccgcaaactgccgtgggcgtggtactggcggcgcaaaattaccccgaaacgcccaaaaaaggcgatgttatttccggtctggatgctgccaaccaagtaggcaaagttttccatgcaggtacaacggcaaacgagaaaggtgacgtattgaccaacggcggacgcgtattgtgtgttgtgggattgggcgataatgtggcgcaagcgaaagctaaggcatatggcgcgttggaaaaaatcagtttcgacgggatgcaataccgtaaagacattgccgataaagcgattaaccgttaa

SEQ ID NO: 51485 - DNA, 1152 bp, Neisseria meningitidis
atgcagacatggcagcttccggaacatatcgccgacgtactgcccacgaacgcgcggcagcttgaaagcgcgagggagcagttgttggcactgttccgcgtacacggttatgaactggtacagcctccgctgatggagtacgcacattccctgctgacgcatatcgatgcggggctttccctgaaaaccattttggtaacggacaggctcagcggcaggcagttgggcatacgcgccgacatcacgccgcaggtggcgcgtatcgatgcccatcttttatccgccaaccaagggattaatcggttgtgttatgccggtccggtgttgcacgcgcagtccgacggtctgctgaatatgcgcgaacccttgcaggcaggggcggaaatgtacggttttgccgacatccgtggcgacatcgagctgatagaccttatgctgaaaagcatgaaaattgccgatatgggcaaagtgctgctttcgctggggcatatcggcatatttcgcgccttgtccgatgcggcacatttggatgcggggcagtccgcaacgctgcttgccttgatgcaggataaagataccggggcggtcgaagcgcaggtcaaggcttggaagctggacggcatgtgggcaaaagcattctcgctgttgccgcgcctgtacggcgggcgtgaagtgttgtccgacgcgcgcggacggttgccggatttgtcggcggtcggcggcgcgttgggcgaattgcaggcggtgtgcgacgcattccccgattgtgaaatccatatcgacttgtccgagctgcgtgtcgacaattaccacacgggcttgctgtatgccgcctatgccgccgatttccacgacgcggtcgcgcgcggcgggcgttatgacggattgggcggatatttcggcagggcgcgcccggcaacgggattcagtttcgacttgcgcagctttatcgggcgtttgcccgccatcgaacggcagcccgccgtgttggtcgatgcggaagatgccgaagcggcgcgcgaagcggtcgaagccttgcgtgaacaagggcagtgtgtcgtggttgactacggtatcggacacaatgtttcggaagagcttgcaggccgtctgaaaaagacggacggcgtttggcaggtcgtgaaacgctaa

SEQ ID NO: 51486 - DNA, 966 bp, Neisseria meningitidis; identical to SEQ ID NO: 39688

SEQ ID NO: 51487 - DNA, 357 bp, Neisseria meningitidis
atgaatgaacacaacctgttaattttctgtttaaaagacaatgtttcaattagtgaatatactgaaatgattgattgggcttataaaaacattcaatctgaaacagttgtagaaattacggaaagtcaaattattgaatatcaaaatcgtggattatggagacttgtttctgaaattaccgataattggttatttggaccaagtgagggggattggctaatagataaggaaagtattttagctgtaaaagaaaaattacaaaattcagatttttctacagagcccttagtgaaaaatattattcatgtacttgaatatgctataaaaaatgaaaaaacagtaatttttcatttttga

SEQ ID NO: 51488 - DNA, 423 bp, Neisseria meningitidis
atgaaaatcaccaaaatcttcaccttcgactcctcgcatatgctcgacgggcatgacggcaaatgccaaaacctgcacgggcatacctacaaactcgaaatcaccgtttcagacgaccccgtcagaggcgggccgaaagacggtatggtgatggactttaccgacttgaaagccattgtcaaacaacacattaccgaccccttcgaccacgccttcatctaccacggcggcaacgggcgcgaatctcaaatcgccgcactcttggaaggctggaacatgaaaaccctgcgcctgccctgccgcaccactgccgaaaatatggcggtcgaaatgtacgaccgtctgaaaaacgcggggctgaacgtgtgccgcgtcaaattgtgggaaacgccgacatcgtgtgcggagtatgaaggggagtag

SEQ ID NO: 51489 - DNA, 1035 bp, Neisseria meningitidis; identical to SEQ ID NO: 42242

SEQ ID NO: 51490 - DNA, 1071 bp, Neisseria meningitidis
gtgtcagcttccgaaactgaaaaccgtatcggtctgaccgttccgctcgagcttgccggcgggcggttggatgcggtgttggcgaaacttctgcccgactactcgcgcagccgcctgacatcatggattaaagaaggcgcggttattgtaaacgataaaccttcgcaacccaaagacaaaatgataggcggcgagcaaatttgtgtaaccgtccgtccgagtgaggaaaatctggcgtttgttccagagcctatggctttggatattgtttacgaagacgataccgtcatcgtcgtcaacaaaccggccggactggtggtgcatccggcggcgggcaactggacggggacgctgctcaacggcctgttggcgcattgccccgagctgtcccaaattccgcgcgcgggcatcgtacaccgtttggacaaagaaaccagcgggctgatggtggttgccaaaaccctgtcggcgcaaaattccctcgtgaggcagcttcaagagcgcacggtcaaacgcatttaccgcgccgtcgccaacggcatcgttccctttgacggtaaaatcgaaacccaaatcggacgcgatccgcacaaccgcctgaaaatggcagtcgtcaaattcggcggcaaaccagccgttacccacgtcaaagtgttggaacgctatctggcgcacagctatatcgaatgctcgctcgaaacaggcaggacgcaccaaatccgcgtccatatgcgtgaggccaaccatccgcttgccgccgacccggtttacggcaacccgcgccatccgtgcggcgacacggtgaaagaagccgttaaaagtttgggtgcgcgtcaggcattgcacgcctaccgcttaagtttcactcatccgaaaaccggcgaaaccgtttcgtttgaagcaccgattccggacgacatatatcatttgttgtctgtcctccgtcttgaagccggtttggattcgtctttgagcaatgaagaggaatggcaggacaaattcggcgcggacgacgatgacgattggaacgaagacgactacgatgtcgaagtggtttatgtaagggagtag

SEQ ID NO: 51491 - DNA, 1350 bp, Neisseria meningitidis; identical to SEQ ID NO: 44843

SEQ ID NO: 51492 - DNA, 957 bp, Neisseria meningitidis
atgaatataatcgggctggacatctcaaaggacaccatagacgcaacattgcataaaataaacggaagtatccattacattaaatttaagaataatgatgatggattaaaacagtttagattgtggataaagggaaacagaatcagaaaagcctatatcggcatggaggcaacaggcatctattacgaaaaggcagcagatatgctttcttcctactatatcgtttacgttatcaatcccttaaaaatcaaggactacggaaaaagcaggtttaaccgtaccaaaaccgacaaagcagattcaaatctgatagcagattacataaaaaggcatcaagatacattgataccgtatcagatacccaaaaacaaagcactgcaaaaactgattaatcttaaaaaccaattacagcaacagcagaagcaaattaaaaatcgtctccatagcactgaagaagacttcataaggaacatacatcaagacttgatagataccatacaggacaagatggaacaggtaaaaatagccatatccgaacaaatcaaaaaacaaacggacaataaccattaccgcaatcttcaaaccatcccgagcataggcaaagacaccgcatcagttctttatgcgcaactgacagaaaaacattttaaaaccgcaaaccagtttgtatcctatgccggattaagtcccgccatcatacaatcagggacaagcgtaagaggtcggggcagattgagccgatacggaaacagacgattaaaaagtacgctgtatatgcccgccctttgtgcttaccgttttaacgcatttccgaaattaataaataatctgaaaaaagcgggtaagccaaagatggtaatcatcgttgccatcatgcgcaaactggcgaagctcgcctattacattgttaaaaccggccagccttacgatgcggaaagacaccgattgaatcaataa

SEQ ID NO: 51493 - DNA, 495 bp, Neisseria meningitidis; identical to SEQ ID NO: 43579

SEQ ID NO: 51494 - DNA, 2394 bp, Neisseria meningitidis
atgaaactgaaacagattgcttccgcactgatggtcttgggcatatcgcctttggcacttgccgacttcaccatccaagacatccgcgtcgaaggcttgcagcgtaccgagccgagtaccgtattcaactacctgcccgtcaaagtcggcgacacctacaacgacacacacggcagtgccatcatcaaaagcctgtacgccaccggtttctttgacgacgtacgcgtcgaaactgcggacgggcagctcctgctgaccgttatcgaacgccccaccatcggctcgctcaacatcaccggcgcaaaaatgctgcaaaacgacgccattaagaaaaacctcgaatcgttcgggctggcgcagtcgcaatactttaatcaggcgacactcaatcaggcagtcgccggcctgaaagaagaatacctcgggcgcggcaaactcaatatccaaatcacgcccaaagtaaccaaactcgcccgcaaccgcgtcgacatcgacatcacgattgacgagggcaaatccgccaaaatcaccgacatcgaatttgaaggcaaccaagtctattccgaccgcaaactgatgcggcagatgtcgctgaccgaaggcggcatttggacatggctgacacgaagcaaccaattcaacgagcagaaatttgcccaagacatggaaaaagtaaccgacttctaccagaacaacggctacttcgatttccgcatcctcgataccgacatccaaaccaacgaagacaaaaccaagcagaccatcaaaatcaccgtccacgaaggcggacgtttccgttggggcaaagtctccatcgaaggcgacaccaacgaagtccccaaagccgaactggaaaaactgctgaccatgaagcccggcaaatggtacgaacgccagcagatgaccgccgttttgggtgagattcagaaccgcatgggctcggcaggctacgcatacagcgaaatcagcgtacagccgctgccaaacgccgaaaccaaaaccgtcgatttcgtcctgcacatcgaaccgggccggaaaatctacgtcaacgaaatccacatcaccggcaacaacaaaacccgcgacgaagtcgtgcgccgcgaattgcgccaaatggaatccgcgccttacgacacctccaagctgcaacgctccaaagagcgcgtcgagcttttgggctacttcgacaacgtacagtttgatgccgtcccgcttgccggcacacccgacaaagtcgatttgaacatgagcctgaccgaacgttccaccggctcgctcgacttgagcgcgggctgggtacaggataccggcctggtcatgtccgcaggcgtttcccaagacaacctgttcggtacgggcaagtcggccgccctgcgcgcctcacgaagcaaaaccacgctcaacggctcgctgtcgtttaccgacccgtacttcacggcagacggggtcagcctgggctacgatgtttacggaaaagccttcgacccgcgcaaagcatcgaccagcatcaaacaatataaaaccaccacggcaggcgcaggcatccgcatgagcgtacctgttaccgaatacgaccgcgtgaatttcggtttggtggcagaacacctgaccgtcaacacctacaacaaagcgcccaaacactatgccgactttatcaaacaatacggcaaaaccgacggcacagacggcagcttcaaaggctggctgtacaaaggtaccgtcggctgggggcgcaacaaaaccgacagcgcgttatggccgacgcgcggctacctgacgggcgtgaacgccgaaatcgccctgcccggcagcaaactgcaatactactccgccacccacaaccaaacctggttcttccccctgagcaaaaccttcacactgatgcttggcggcgaaatcggctatgccaacggctacggcaaaaccaaagaaatccccttctttgaaaacttctacggcggcggcctgggttcggtacgaggttacgaaagcggcacactcggtccgaaagtctatgacgaatacggcgaaaaaatcagctacggcggcaacaaaaaagccaacgtctccgccgagctgctcttcccgatgcctggcgcgaaagacgcgcgcaccgtccgcctgagcctgtttgccgacgcaggcagcgtgtgggacggcaaaacctacgacgacaacagcagttccgcgaccggcggcagggttcaaaacatttacggcgccggcaatacccataaatccacctttaccaacgaattgcgctattccgccggcggcgcggttacctggctctcgcctttaggcccgatgaaattcagctacgcctacccgctgaagaaaaaaccggaagacgaaatccaacgcttccaattccaactcggcacgacgttctaa

SEQ ID NO: 51495 - DNA, 2115 bp, Neisseria meningitidis
atggatttattatcggttttccacaaataccgtctgaaatatgcggtggccgtgctgacgatactgcttttggcggcagtcgggctgcacgcttccgtatatcgcaccttcacgcctgaaaacatccgcagccgcctacaacaaagcattgcacacacacaccggaaaatctcgtttgatgcggacattcagcgcaggctcctgccccggccgaccgtcatcctgaaaaacctgaccattaccgaacccggcggcgaccagactgccgtttccgtccaagaaaccaaaatcggattgagctggaaaaacctgtggtcggatcagatacagattgaaaaatgggtggtttcgagtgcggaacttgccctgacgcgcgacgggaaaggtgtttggaacatccaagacctgatcgacagccaaaaacgccaagcctcagtcaaccgcattatcgtcgaaaacagcaccgtccgcctcaatttcctgcaggaacagcttatcctgaaggaaatcaacctcaacctgcaatcccccgattcgtcggggcagccgtttgaaagttcgggcatactggtttggggaaagctgtccgtcccgtggaaaagcagggggctgttcctttcaaacggcatcggcccgcccgaaatctcaccgttccattttgaagcttccacttcgctggacggacacggcattaccatttccaccaccggcagcccttctgtccgcttcaacgccggcggagcggatgccgccggcctcggcctgcgtgcagacacttccttccgcaacctccacctgaccgcccaaatccccgcgctggcactcaggaacaacagcattaaaattgaaaccgtcaacggcgcatttaccgccggcggcgaatatgcccgatgggacggttcgttcaaactcgacaaagccaacctgcactccggcatcgccaacatcggcaacgccgaaatctccggcagcttcaaaacaccgcgccaccagaccaacttctccctcaattcgccgctcgtatggacggaaaacaaagggctggacgcgccgcgcctgtatgtatcgacccttcaggataccgtcaaccgcctgccgcaaccccgtttcatcagccggctcgacggttcgctgtccgtaccgaatctgcaaaattggaatgccgaattaaacggcacattcgaccgccaaaccgttgccgcgaaattcagatacacacatgaagacgcaccgcatctggaagccgccgtcgcactgcaaaaattgaacctgaccccctatcttgacgacgtgcggcaacaaaacggcaaaatatttcccgacaccctcgccaagctgtccggcgacatcgaggcgcacctgaaaatcggaaaagtccaacttcccggcctgcaactggacgatatggaaacctacctccacgccgacaaaggccatatcgcgctcagccgtttcaagtcagggctttacggcggccataccgaaggcggcatcagcatcgccaacacccgtcccgccacttaccgcctgcaacagaatgcaagcaacatccaaatccaaccgctgctgcaagacctgttcggcttccacagcttcagcggcaacggcgatgcggtcatcgacctgaccgcgagcggcgaaacccgaaaagagcttatccgctcgcttcagggcagcctgtcgctgaatatttccaacggtgcatggcacggtatcgacatggacaatatcctgaaaaacggcatttcgggcaaaactgccgacaatgccgcacccagcacacccttccaccgattcacgctcaacagcgaaatttcagacggcatcagccgccacatcgataccgaactcttctccgacagcctctatgttaccagcaacggctataccaatctggatacgcaggaattgtctgaagatgtccttatccgcaacgccgtccatccgaaaaacaaaccgattcccctgaaaatcaccggtacggtggacaagccgtccattaccgtcgattacggcaggctgaccggcggcatcaattcgcgcaaagagaaacagaaaatcctcgaagacaccctgctggaacaatggcagtggctcaaacctaaagaaccgtaa

SEQ ID NO: 51496 - DNA, 483 bp, Neisseria meningitidis
atgaaatacttgaatcttgccgcaatcacccttgccgccacatttgccgcacataccgcctcggcagacgaactggccggatggaaagacaacaccccgcaaagcctgcaatcactcaaagcccccgtacgcatcgtcaacctttgggcaacctggtgcggcccgtgccgaaaagagatgcctgccatgtccaaatggtacaaagcgcagaaaaaaggcagcgtcgatatggtcggcatcgcgctcgacacatccgacaatatcggcaacttcctcaaacaaactcctgtttcctacccgatttggcgttacaccggggcgaacagccgaaactttatgaaaacctacggaaacactgtcggcgtactgccctttaccgtcgtcgaagcaccgaaatgcggatacaggcagaccattacaggggaggcaaacgaaaaaagcctgaccgacgccgtcaaactcgcccattcaaaatgccgttaa

SEQ ID NO: 51497 - DNA, 3486 bp, Neisseria meningitidis
atgcgcctgacccatatcaaactctccggcttcaaatcttttaccgacccgaccacgattcatgtgccggggcagcttgtcgcggttatcgggccgaacggctgcggcaagtcgaatgtgattgacgcggtgcgctgggtgttgggtgaggcttcggcgaagcagcttcgcggcgagagtatgcaggacgtgatttttaacggtgcggcgacgcgccgtcctgcgccgagggcttcggtggagctggtgtttgacaacagcgaccacagtttgcagggggcgtgggggcagtatgccgaggtgagcatcaagcggcagttgacgcgtcagggcgaatcgacttatttcatcaataatcagaccgtgcgccgccgcgacattaccgatttgtttttgggtactggcgtgggcgcgcgcggttatgccgttatcgagcaggggatgatttcgcgcatcatcgaagcgcggccggaggagttgcgcgcctatatcgaggaggcggcgggcgtgtccaaatataaggaacgccgcaaggagacggaaggccgtctgaaagacacgcgcgagcatttgcagcgtttgggtgatttgcagaacgagttggcgcgtcaggtggaaaagctggaaaaacaggcggaaaccgccgaacgctacaaatccctgaccgcgcagttgaaccaacagcaggatttgctcgattacgcccaatggcagcaatcgcttgccgccgccgacaaggcgaccgcgcagcatcagtctttgcaggcgcagcaggacgaaaccgccgcgcaggttcaggcgttaaacgacgaagtacacgccttgcagaccgccgaacagtcgcagcagcaggcggtacacgaattgagcaacaaacgcggcgtgttgcgcgagcagattgcccgtttggaagaacaaatccgccatcagcaaaacctgcaccaacgcatcgaacgcgacaagcaggcggcgcaggcgcagatgcagcgcatccatcaagaacagcagcaaatccgcgtgcagcttgaggaaaacgagttgcaggcagaagaaaagcaaaccgagttggcggaatgggcgatgcaggttgccgaacacgaagagcgtctgcccgaattggaagaagcccaagccacgctcaacgccgccttccaaacccggcaggacgaggcaaaccgcatccgccgcgaactggcgttgaagcagcagcagcttgcccatgccgaacaaaccgttgccaagcacgaagagcgcaaaggtcgtctgaaacaggaaaaccaagccctgaacctgcccgacgaagccgaaaccgccgccgcgcaggaagccgccgccttgttgcaaaaccggcaagagcattacgaagaacaaatcatcgccgccgaagaagctctacacgccgcccgcgaggcgtttcagacggcatcaaaccgcttccaaagcctgaagcagcaacacatcaccttgcaggcgcagcagcaggcgttgtcgcaaatcctgtcgcaacagcaggaagccgccgacttctggcaggcaagcgaccacgccgccgcgccgcaactgtggcaacacatcaccgcgcccgccgagtggcagcacgccttgtccgtcatccttgccgaacgcctgcacgcccgcgccgtgccgcaaggtttcgttccccccgaacctttgccgcaggggcaggcggcgtggctttcagacggcctctccggtggcatcaaaaaatcgctgcccgtacaggcattgctgaaccaaatccaagcgcagccgccgtttcagacggcattgcaccactggctcgacggcgtattgtgtgcgcccgatttgagttacgccctcgctcatcaaagcgatttgggcgcgcatcaaatctggcttacgcccgaaggccatcaggtcgataaagtcagcgtcctgctctatgccaagcccgcgcaggaaagcctgattgcccaaaaagcgcgcctcgacggcatcgcatccgaactggacaacctagcccccgaactctccgctgacgaagccgcgttcaaacaggcagaagccgccgtgcgctcgtccgaagtgcaacataaaaacctgatgcagcagcaacagcagcacacgcgccaatacagtcaggcgcagcaacgcgccgccgaacttctggcgcgcaccaaccaagggcaaatccgccgcgaacacatcgagcgcgaactggcgcagttggcggaagagcagaccgtgttgcaacacacgtccgacgggctttcagacgacatcgttaccttgcaggaagccgccgccgaactcgaacaccagcagcaaaccaccgcgcacagccgccaagagcagcaaggccgtctgaaacaggcgcagcttgccctgttggaagccaaccgccaatacgggctggccgaagtcgccgttcacaagctcaaccagcaaaaacaaaactaccggcagcaaattgcccagctcgaacagcaaaccctagactggcaggaacgccagcaagagcttgccctcgcctatgaaaccgagttccaaaacgacgagcagcacatcaagcttgaagaattaagcgaagccgtacagaccttggacgaagaatatattgttgtgcaagagaaactcgcgcagattcaggaacagggcagggagcaatacgctaaagtgcaaaccctgcaaaccaagctgccgcagcttcaggccgccacccaaaccgccttgttgcagcagcaggaagccctgatcaacgccaaacgctaccatcaaaacctgaccgaacgcgccgccgatttggacgcgctcgaagcgttggcgaaagaatcgccgaaagtattgaacagcagcatcggcagcctttcgcaacaaatcgaagcactcggcgcggtcaacctcgccgccctgcaagaactcgaagaagcgcgcgaacgcgacggctactaccgcagccaaagcgaagacgtgcaggcagccatcacccttttggaagaagccatcgcccaaatcgacgacaaaaccaaagcgcgtttcaaagaaaccttcgatgccgtcaacggcaaagtccaaactttcttcccgaccctgttcggcggtggcgaagctaccctcaaaatgataggcgacgacctcctgaccgccggcgtgtccatcatggcgcgcccgcccggcaagaaaaacagcaccatccacctcctttccggcggcgaaaaagccctcaccgccatgagcctcgtgttcgccctgttcagcctcaaccctgctccgttctgccttttggacgaagtcgatgccccgctggacgatgccaacacctcgcgcttctgcaatttggtcaaagaaatgtcggcgcaaacccaattcctctacatctcacacaaccgcctgaccatggaaatggcggaacagctggtcggtgtaaccatgcaggaaaaaggcgtatcgcgcgtcgtcgccgtggacatcaagcaggcgttggaaatggcggaagccgtttga

SEQ ID NO: 51498 - DNA, 1374 bp, Neisseria meningitidis
atgagtaatccattttcctctttaggtttgggtacggaactcgtttccgcactgaccgcgcaaggttacgaaaacccgacgcccatccaagccgccgccattcccaaagcactcgccggtcatgatttactagccgccgcccaaaccggcacgggcaaaaccgccgcctttatgctgccctcgctcgaacgcctcaaacgttacgccaccgccagcacctcgcccgcgatgcaccccgtgcgtatgctcgtgttgaccccgacgcgcgaacttgccgatcaaatcgaccaaaacgtgcagtcctacatcaaaaacctgccgctgcgccacaccgtcttgttcggcggtatgaatatggacaaacaaactgccgacctgcgcgccggctgcgaaatcgtcgtcgccaccgtcgggcggctgctcgaccacgtcaaacaaaaaaacatcagtttaaacaaagtcgaaatcgtcgttctggatgaagccgaccgtatgctggatatgggttttatcgacgacatccgcaaaatcatgcagatgctgccccgccaacgccaaaccctgctcttttccgccaccttctccgcaccgatacgcaaactggcgcaagacttcatgaacgcgcccgaaaccgtcgaagtcgccgcgcaaaacaccaccaacgccaacgtcgaacaacacatcatcgccgtcgataccattcagaagcgcaacctgctcgaacggctgattgtcgatttgcatatgaaccaggtcatcgtgttctgcaaaaccaaacaaagcgtcgaccgcgtaacgcgcgaactggtgcgccgcaacctgtccgcacaggcgatacacggcgaccgttcccaacaaagccggctcgaaacactcaacgccttcaaagacggcagcctgcgcgtcctcgtcgccaccgacatcgccgcgcgcgggctggacattgccgaactgcccttcgtcatcaattacgaaatgcccgcccagcccgaagactacgtccaccgcatcgggcgcacggggcgcgcgggcgcggacggcgtggcgatttccctgatggacgaatccgaacagaaaatgtttgaatccattaaagagctgaccggcaacaagctgctcatcgagcgcatcgagggcttcgagccgcaatggtgggaacagggcggcgcaaaaccggaaaaaaccgaaatgcgcgaaccgagacaacgcaaccgctacgaatccgctagggctcagcgcgaaaaaaatacccgaccggaaaccacggcaaacgatgcgggcgcggcttgcggaaaaattgccggacgcagccgccgaagccgtcgggaacaccggacgtgcgccctgctccaaccgcgttacggcgtaaaataa

SEQ ID NO: 51499 - DNA, 1116 bp, Neisseria meningitidis
atgcgcttgtttaaaagcttgaaaaaccctaaaaaaacagatgccaagctccctaaaaaatcttcgggactcaataaccgcgcggcaatcggcatcgatatcgaccagcattccatcaaaatggtccaattgtcaggacgtagtttaaaccaaattcaattggaaaaatacgtcattgccaaattaccaaagaatatcattcaaggcaataaagtccaaaattacgatcaacttgttacatatttgcaacaagcctatgccaaactgggtacttcgtgcaaaaacatcatcgcgtccgtcccgcaaaatctggcaaccatcgaacaattgacctacacagacaaagatgcagaattagacctgcaggggttcgtggagtcctccatctccgaagtcagctcgatatcgctcgaagaagccaattacgactatcaggtcttgtcccaatcggccgccggcgaagctgtgttggccgtcgcatcgagaaaggatgaaatcgaacccctgattgacgcattcaacgccgccggtatgaaattatccgcgcttgatgtggacattttcggacaatacaacgcctacgcgctatggataaaccatttcgcccccgagcttgcagccgaaaaagtcgccattttcggcgtatatgccgcacagacctacgccttggtcatccaagacggaaaaatcctatacaaacaggaaacctccgtcagcgaagaacagctcaaccaactcatccagcgcacctatcaggtaacagaagaaaaagcggaagaaatcatcaactccccgcaaaaaccttccgattaccaagaaagcgtggcaaactatttcaaccagcagattacccaagaaatacaaagggtcttgcagttttattacaccacgcagaccgcagacgatatgaccgacatcaagcatatcctgctgaccggggaagcagcgcgccaggaaggcatcgcccaaaccgtcgcctcacaaaccaatgcagatgtacaatgcgtccatcccgcgcgttattttgcggacaacctcaaaacagacaaacaacaattcgaacttgatgcgccgacactgaccagggcgttcggtttggcggtacggggattataa

SEQ ID NO: 51500 - DNA, 276 bp, Neisseria meningitidis
atgaatgagggtgaagttgttttaacaccagaacaaatccaaaccttgcgtggttatgctttccgtggcgatacctatggcggttggcgttatttggctaatttgggtgaccgttatgcggatgatgctgctgcaattgtcggtaaggatgcaaacttaaatggtttgaatttatggatgaaaaaaggtgtggaaaacctatgggatgatacggtcggtaaaaagatccgtttaatgtgtatttccgttttttggattgtggttttcaatttgtag

SEQ ID NO: 51501 - DNA, 654 bp, Neisseria meningitidis
atgaagataacgcactgcaaattaaagaaaaaagtacagaaagaactgctccgtttttttgtactcgaagttaccgcccattctgccgccgatattttgggtatccatcccaattcggcagcactgttctaccgtaaaatccgcacggttatcaaccatcatttggccttggctgccgatgaggtttttgagggccctgtcgagccggacgaaagcgatttcggcggacggcgtaaaggtagacgtggtcgcggtgcagcaggaaaagtggttgtcttcggcattctgaaacgcaacggacgggtctataccgttgtggtggataatgccaagtctgaaacgttactccctgtcatcaagaagaaaatcatgccggacagtattgtttataccgatagtctgagcagctgcgacaagttggacgtgagcggttttatccattaccgcatcaaccattccaaggaatttgcagaccgtcagaaccacattaacggcattgagaacttttggaatcaggcaaaacgcgtcttgcgaaaatacaacggaatcgatcgtaaatctttcccgctgttcttgaaagaatgcgaatttcgatttaacttcggcacaccgtctcaacagcttaaaatcctgcgggattggtgtgggatttag

SEQ ID NO: 51502 - DNA, 1929 bp, Neisseria meningitidis
atggcaaaagtaatcggtatcgacttaggtacaaccaactcttgtttggccatttccgaaaacggtcaaaccaaagttatcgaaaacgcagaaggcgcacgcaccacgccgtccgttatcgcttatttggacggcggcgaaatcctcgtcggcgcgcctgccaaacgccaagcggtgaccaacgccaaaaacactatttacgccgccaaacgtttgatcggccacaaatttgaagacaaagaagtccaacgcgacatcgaatctatgcctttcgaaatcatcaaagccaacaacggcgacgcatgggtaaaagcacaaggcaaagagctgtctcctcctcaaatttccgcagaagtcctgcgtaaaatgaaagaagccgccgaagcttacttgggcgaaaaagtaaccgaagccgtgattaccgtcccggcctacttcaacgacagccaacgtcaagccaccaaagacgcaggccgtatcgccggtttggacgtaaaacgcatcatcaacgagccgaccgcagccgctttggcattcggtatggacaaaggcgacaacaaagaccgcaaagtagccgtatatgacttgggcggcggtactttcgatatttccatcatcgaaatcgccaacctcgacggcgacaaacaatttgaagtattggctaccaacggcgatactttcttgggcggtgaagacttcgaccaacgcttgatcgactacatcattgacgagtttaaaaaagaacaaggcattgatttgaaacaagacgtcatggctctgcaacgtctgaaagaagctgccgaaaaagccaaaatcgaattgtccagcggccagcaaaccgaaatcaacctgccgtacatcaccatggacgcaaccggcccgaaacacttggcgatgaaaattacccgcgccaaattcgaaagcctggttgaagacctgattgcccgctctatcgagccttgccgcaccgcattgaaagatgccggtctgagcactggcgacatcgacgacgtgattttggtcggtggtcaaagccgtatgccgaaagtacaagaagccgttaaagacttcttcggcaaagagccgcgcaaagacgtgaaccctgacgaagctgtcgccgtaggcgcagcgattcaaggcgaagtgttaagcggcggccgcagcgacgtattgctgctggacgtaacccctctgtccttgggtatcgaaaccatgggcggcgtgatgaccaagctgattcaaaagaacacaactatcccgactaaagcgtcgcaagtgttctctaccgccgaagacaaccaaagcgcagtaaccatccacgtactgcaaggcgaacgcgaacgcgcttctgccaacaaatctttgggtcagttcaacttgggcgacatcgcacccgcaccgcgcggtatgccgcaaatcgaagtcaccttcgatattgacgccaacggtatcctgcacgtttccgccaaagacaaaggcactggcaaagcagccaacatcaccatccaaggttcttcaggtttgagcgaagaagaaatcgaacgcatggtgaaagatgccgaagccaatgccgaggaagataaaaaactgactgaattggtcgcttcccgcaaccaagctgaagccctgattcactctgtgaaaaaatctttggccgactacggcgacaaactcgacgcagccgagaaagaaaaaatcgaagccgcgctgaaagaagccgaagaagcagttaaaggcgacgacaaagccgctatcgatgccaaaaccgaggcgctgggcgcagccagccaaaaactgggggaaatggtttacgctcaagcacaagctgaagcccaagcaggcgaaagcgaacaagccaatgcttctgcaaagaaagacgatgatgtcgtagatgccgactttgaagaagtaaaagacgacaaaaaataa

SEQ ID NO: 51503 - DNA, 1158 bp, Neisseria meningitidis
atgaaattcgccacgaaagccattcattccagctacgattgcgacgaacacaaccgcgcgctgatgccgccgatttatcaaaacagtatgtttgcgttgcacgagattggcgaaaatgtgccttaccgttattcgcgcctgagcaacccgacccgtcagattttagaagacaccgttgccgatttggaacacggtgcggcaggttttgcgttttccagcggtatggcgggaattgatgccgtatggcgcactttcctgcgcccgggcgataccattgtcgccgtcgccgatatttacggcggcgcttatgatttattggtcgatgtttatcaaaaatggggggtgaacgttgtttttgccgatttaggcaatccggataatttggacgaactgcttaaagcgcacaaggtcaaactggtttggctggaaacgccgtccaatccacttttacgcttggtagacatcaaagtccttgccgcaaaagccaaagcagccggtgcgctggtcggtatcgacaacacttttgccacgccgtatctgcaacagccgttggatatgggttgcgattttgtattccattccgctaccaaatatttgtgcggccattccgacgtgttgatgggcatcgtcgttgccaaaaccaaagaactggcgcagcctttgcacgatatgatggtgcataccggcgcggttgccggcccgctggactgctggctggtgttgcgcggcatcaaaacactggctctgcgcatgaacgcccattgccaaaacgcactcgaaatcgcgcgccgtttggaagcccatcctgccattgaaaaagtgttccatcccggcctgccgtctcacgaacattacgaactggcgaaaacacaaatgcccaaaggcatcggcggcgtggttacggtttatctcaaaaacgacacgcgtgaagcggcaaacagcgtgattaaaaacatgaaactggtcaaaatggcttccagcctcggcggcgtggaaagcttggtcaaccattgctattcccagtcccacagcggcgtgccgcatgatgtgaaaatggaaatgggcatcagggttggcctgctgcgtttctctgtcggtatcgaagatgtagatgatatttggaatgatatttccgccgcactggatacgactgtataa

SEQ ID NO: 51504 - DNA, 795 bp, Neisseria meningitidis; identical to SEQ ID NO: 42340

SEQ ID NO: 51505 - DNA, 207 bp, Neisseria meningitidis
atgtccgcactgctgctgactgcctgccaacacgtttcggacaggcatgaggcagtcggtatggcaaattccgcttccaaattctgcattgccaaaggcggcggacgggaagcaaaaaaagacgaaagcggcggcggatatgccctgtgccatttgccggacagcaggattgtcgaggagtgggaatatttccgttcacaacattga

SEQ ID NO: 51506 - DNA, 2265 bp, Neisseria meningitidis
gtgagcattagcgcgccgtatgccaatgaaaacagccgcatcctgctgagcaccacggatatcagttcggaaaacggcaaaatcaaactgcaatcctacggcgaccagttctactacgccggacagggtgagctctacaccttcgataaacgcagctataaaaccggtaagtggtacaaactaaaacatgttactgaaatcaaagagcataaaaacgccaaagccgacccggtgagcctcagtgcgtcacaaggtattgaaatcaaatccggcggcaatatcggtgcccacgccaccttgtttgatgcaccccgcggctccgttaaaatcgaagccggacgtgggctggttctctatgccgtggaagatctcaactacgacaaacttgacacccgtaccaagcgcaaatttatcggcattacctacgacaaggtgcacgacaccaccacccacaccatgaaaaccgccctgccctcaagggtagttgcagaatcggccaacctgcaatcaggctgggacgccaaactgcaaggcacccagtttgaaaccacgctgggcggcgcagccatccgtgcaggtgtaggcgatcaggcacgagcagatgccaagattattcttgaaggcatcaaaagtagtgtgcgcactgaaacagtaagcagtagcaaatctgccctctggcagaaacaggccggacgcggcagcaatatcgaaaccttgcaactgccaagtttcacaggctccgttgcgcccgtactctctgcccccggcggctatatcgttgatattccgaaaggcaatctgaaaaccgaaatcgaaaagctggccaaacagcccgaatacgcctacctgaaacagcttcagacggccaagaacgtcgattggaaacaggtgcagcttgtctacgacaagtgggactataaagccgaaggcctgaccggagccggagccgccattatcgcactggcagtagcggcagcaaccggaggcgtcggtgccggtttgatcggtgcagcacagggaaccacatctgccgccatagccaatgcagcatttacctcgctggctacccaagcttccatttcgctggttaataacaaaggcaacgtcggcaaaaccctgaaagaactgggcagaagccgtacggtgaaaaatctggtcgtggctgctgccaccgcaggcgtatccaacaaaatcggcacgtctgctttagccaatgtcagcgacaagcagtgggtcaacaacatgaccgtgaatctggccgatgcgggcagtgccgcgctgattaacaccgccgttaacggcggtagcctgaaagacaatttggaagcgaatatccttgcggctttggtgaataccgcgcatggggaggcggcgagtaagatcaaaggactggatcagcactatgtcgcccacaaaatcgctcatgccgtagcgggctgtgcggctgcagcggcgaataagggcaaatgtcaggacggcgcgatcggtgcggctgtgggtgagattgtcggggaggctttggttaaaaataccgattttagcgatatgaccccggaacaattagatctggaagttaagaaaattaccgcctatgccaaacttgcggcaggtacagttgcaggcgtaacgggaggagatgtcaatactgctgcacaaaccgcacaaaacgcggtagaaaataatgcggttaaagctgttgtaactgctgcaaaagtggtttataaggtagccagaaaaggattaaaaaacgggaaaatcaacgttagagatttaaaacagacgttgaaagacgaaggttataatttagccgacaacctgaccaccttattcgacgaaacattggattggaacgatgccaaagccgttattgatattgtcgtcggaacagagctgaatcgcgctaataaaggggaagcggcacaaaaggtcaaggaagttttagaaaaaaatcgtccttatatccctaataaaggtgctgtaccgaatatgagtacatacatgaaaaataatccttttggaaaacagctggctcaaatttcagaaaagacaacgcttccgacgcagcaagggcagtctgtcttcttggtaaaaagaaaccaagggttattaaaaaccggtgataggttttatttagatggccaacataaaaatcatttagaggtttttgataaaaatgggaactttaagtttgttctaaatatggatggttcgcttaaccaaatgaaaactggggcagcaaaaggtcgtaaattaaacttaaaatag

SEQ ID NO: 51507 - DNA, 372 bp, Neisseria meningitidis
atgaaaccatacaaaatctacacccatcccgccctgccgccccaagccgtcaaacaaggctggtcgtggccgggccttttgttcggcacgctgtgggcgtgtttcaaaagaatgtggggtttggggctggggctgacgggcgcgatattcgtgctggctgtgtttgcccaactggtttacggcgacacgcccgccacagactcggcgtttaacgtattgggcttggcggtttccgtctggttcggcgcaaagggcaacagcctttatgcacgccaccttttatcgcgcggctataccgaattgcccgaaacggttgaggcagccaatccccaagccgcattggcgcaatatttcgggcgcgggggccgataa

SEQ ID NO: 51508 - DNA, 1179 bp, Neisseria meningitidis; identical to SEQ ID NO: 43689

SEQ ID NO: 51509 - DNA, 285 bp, Neisseria meningitidis; identical to SEQ ID NO: 42876

SEQ ID NO: 51510 - DNA, 771 bp, Neisseria meningitidis
atgaaaatcaccacttggaacgtcaattcgctcaatgtgcggctgccgcaggtgcaaaacctgcttgccgacaatccgcccgatattttggttttgcaggaactcaaactcgatcaggacaaatttccggctgccgccttgcagatgatgggctggcactgtgtttggagcgggcagaaaacctacaacggcgtggcaatcgtcagccgcaacgcgccggaagacgtgaatatcgggctgcccgcgctgccggacgatccgcaacggcgcgtgattgcggcaaccgtcggcggcgtgcgcgtcatcaatgtctattgcgtcaacggcgaagccctcgacagcccgaaattcaaatataaagaacaatggtttgccgcgttaaccgaatttgtccgcgatgaaatggcacgccacggcaaactggtgctgttgggcgatttcaatatcgcgcctgccgatgcggactgttacgaccctgaaaaatggtatgaaaaaatccactgttcgaccgtcgaacggcagtggtttcaaaacctgctggatttgggattgaccgacagtttgcgccatatccatcccgaaggtgcgttttacacatggttcgactatcgcggcgcgatgttccagcgcaaactgggcctgcgtatcgaccatatattggttacatccgaaatggcggccgttttgaaggatgtccgtgtcgatttggatacacgcgctttagagcgtccgagcgaccacgcgccggtgacggcagaattcgattggtaa

SEQ ID NO: 51511 - DNA, 1419 bp, Neisseria meningitidis
atggaaaatatattgtctgttctggtgggtacagtcaatcggttcctttgggactacctgctgatttacgcgcttttgggtatcggcctgttttttacgctgtatctcggtgcgccgcagattaccaagctgggtgcgggattcaaatctgtattcggcggcttgtttgccaaaggcgataaagacgacaagtctttatcgcagtttcaggcgttggcggttgccatatctgcgcaaatcggtacgggcaacgtcgccggcgtggcgaccgccatcaccgcaggcgggccgggcgcgattttttggatgtgggtttctgccgttttggggatgtccacgatttttgcggaggcactgctggcgcagaaataccgcgtcgtcagccacggcaaatacatcggtgggccggcgttttatattacgcacggtctgactccgaaaatcggcaggggcgcggcgcgtttcctgtcgggctttttctccattgcgttgattatcgcattgggctttatcggtaatgcgacacaggcaaactccattgcttctgccgttaccattgcatttgatgtgccttctttggcagtcggtattgtgcttgccgtccttgcgggcatggttgtgattggcggcgtgaaccgtattgccaatattgcccagtttgtcgtgccgtttatggcggttgtttatattttgtgcgccgtcgttatcctgtttgaattttccgactatattgtgccgatgttcaaccacatctttaccgccgccttcaatcctgaagccgttttgggcggtgcggcgggtatcggtatgcgcgaagcgatacgtttcggcgtggcgcgcggtctgttttccaacgaagcggggatgggttctaccccgcacgcccacgcgactgcggatgtgaagcatcctgtgcagcaaggtatggcggcatttgtcggtgtgtttatcgatacgattttggtatgtacggcaactgcattgattatcctgctgaccgatgccaacctttcgggcgaacagggcgcggcggttactcaatttgcctttaacaaggcatttccgggattcggttcgcaattgcttgccgtgtgtctgaccttcttcgcctttacgaccattatcggctggtattatttcggcgagtccaacatccgttttcttttcaggggaagacacttgggcatctatcgcgcattggttctgcttgccattgttttgggtacgctcggcaaagtcgatttggtttggagcctgtcggatatgttcaacggttttatggttatccccaacctgattgccctgttcttgctgcgtaaggaaatccgtgccatttatgatgattatttggcacaaaaaaaagcgggtcgggatttgtcttatccgtatgaattccacgagttccacgacaagggctga

SEQ ID NO: 51512 - DNA, 354 bp, Neisseria meningitidis
atgtctgaaatcaaaattttccacaacccccgttgcagcaaatcgcgtgccgccttgtccctattggaagaacgcggcattgctgccgaagtggtcaaatatttggatacgccgcccgacttgtccgaattgaaggatattttcaacaaattgggcttggcatcggcgcgcgggatgatgcgcgtgaaagatgatttgtataaggaattgggtttggacaaccccaatttggacaatgacgcgctgctgcgtgccatcgccgatcatcccgccctgttggagcgtccgattgttttggcgaacggtaaggcggctgtcggcaggccgttggaaaatatcgaagcggtattgtga

SEQ ID NO: 51513 - DNA, 201 bp, Neisseria meningitidis; identical to SEQ ID NO: 38240

SEQ ID NO: 51514 - DNA, 474 bp, Neisseria meningitidis
atgtcccgcaataccgaagagctgcaaggcatctcgcttttgggtaatcaaaaaacccaatatccgatcggctacgcgcctgaaattctcgaagcattcgacaacaaacatcccgacaacgactatttcgtcaaattcgtctgccccgagttcaccagcctctgccccatgaccgggcagcccgacttcgccaccatctatatccgctacattccgcacatcaaaatggtggaaagcaaatccctgaaactctacctcttcagcttccgcaaccacggcgattttcatgaagactgcgtcaacatcatcatgaaagacctcattgccctgatggatccgaaatacatcgaagtattcggcgagttcacaccgcgcggcggcatcgccattcatccgtttgccaattacggcaaagcaggcaccgagtttgaagcattggcgcgtaaacgcctgtttgagcacgacgcacaataa

SEQ ID NO: 51515 - DNA, 843 bp, Neisseria meningitidis
gtgggaagtttaattgtaggatgctctgcgattccttcatcaggccccagcgcaaaaaaaattgtctctttagggcaacaatctgaagttcaaattcctgaagtggagctgattgatgtgaatcatacggttgctcagttattatataaggctcagataaatcagtcattcactcagtttggcgatggttatgcttcggctggtacgctaaatattggtgatgtattggatattatgatttgggaagcgccgccggcagtattgtttggtggtggcctttcttcgatgggctcgggtagtgcgcatcaaactaagttgccagagcagttggtcacggcacgtggtacggtttctgtgccgtttgttggcgatatttcggtggtcggtaaaacgcctggtcaggttcaggaaattattaaaggccgcctgaaaaaaatggccaatcagccacaagtgatggtgcgtttggtgcagaataatgcggcgaatgtgtcggtgattcgtgctgggaatagtgtgcgtatgccgctgacggcagccggtgagcgtgtgttggatgcggtggctgcggtaggtggttcaacggcaaatgtgcaggatacgaatgtgcagctgacacgtggcaatgtagtacgaactgttgccttggaagatttagttgcaaatccgcgacaaaatattttgctgcgtcgcggtgatgtggttaccatgattaccaatccctatacctttacgtctatgggtgcggtggggagaacacaagaaatcggtttttcagccagaggcttatcgctttctgaagccattggccgttatgggcggtttgcaagatcgccgttctga

SEQ ID NO: 51516 - DNA, 954 bp, Neisseria meningitidis
atgaatcataaaaagatcgttgttttggatgcggatactttgcccggtcgggtctttcattttgattttccgcacgagcttgcggtttacggtacgacaggtgcggatgaaacggcggaacgggtgcgcgacgcacatattgtcattaccaacaaagtgatgatttctgccgatattattgcggctaatccgcagttggagctgattgccgtcagtgcgaccggtgtgaacaatgtcgatattggggcggcgaaggcggcgggcgttgcggtatgcaatgtccgcgcctacggaaacgaatcggttgcggaacacgcctttatgctgatgattgcgttgatgcggaatttgcccgcctatcagcgtgatgttgcggcaggattatgggaaaagtcgccgtttttctgccattacggtgcgccgattcgggatttgaacggcaaaacgctggcggttttcggacgcggcaatatcggacggacgcttgccggatacgcgcaggcattcggtatgggggtggtgtttgccgaacacaaacacgcgtccgctgtgcgtgaaggctatgtttcctttgaagatgcggtacgggctgctgatgtgttgtcgctgcactgtccgctaaacgcccaaactgaaaatatgataggcgaaaacgaattgcggcagatgaagcctggcgcggttttaatcaattgtgggcgcggcgggctggtggatgaaaacgcgctgcttgccgcactcaaatacgggcagatcggcggggctggtgtcgatgttttgacggaggagccgccaaggggcggcaatcccctgctgaatgcacgacttcccaatctgattgttacgccgcataccgcgtgggcgagccgcgaggctttggacaggctgttcgatatattgttggcgaacattcacgcctttgtgaaaggcgaggcgcaaaaccgggtagtttga

SEQ ID NO: 51517 - DNA, 411 bp, Neisseria meningitidis
atgacaacttataccattccaaaaaaagattatcaatttctgtatatatatgagggcactctattaaactatactttgaaaaacgatgaattccatatcatcgtccagaatgtggattatccggactttcctcaagagattcctacaccaaattatacagactgggtaaaaattaaattcaagcagttcagctatctgaaatttatctatggatacgctacaaagagccaagatataaatatcgataatacattggaacttggcgaattaaagcaggatgatgaaatcttggattatggaggtgcgctggaattgataggcggtaggtatgattttccgactgcttttaggatagatatagtttgccgggaaatagagttagaatttttagatcaggagggtttcaattaa

SEQ ID NO: 51518 - DNA, 369 bp, Neisseria meningitidis
atgcggatattcaaaaaccaatggatagtgaaatttgccaagaagcacaaaatcaacgattccgagctgctggaagcggtagagcgggcggataacgggctgatagacgcagatttaggcggcggtgtgattaagcagcgcatagcaaggcaaggacaaggcagaagcggcggctatcgcagcctgatactgctcaaacaggcagacagggcattttttgtttacgcctttgccaagaacgacagggaaaacatttcggataaagaactggacgtttaccgaaaagccgccgcatattatctgaaatacacgcgggcagagctggcggctttgaaagaagacggcattatcacggagatagaatcatga

SEQ ID NO: 51519 - DNA, 717 bp, Neisseria meningitidis
ttggtcaaatgccgtctgaaaataatttcagacggcatttttatttggggagaaaatgaagtggcttcagtatttttagaaggagaagcagtcgaggtcggcaatattttctgtatcggcaggaactatgccgcacatattgaagagttaaaaaacgaaataccttccgaacctgtggtgtttatgaagccgtcaggcagcattttgaatagcggcggtacaatcttgctgcccgagtttagtagggatgtgcagtttgagtgcgaactcgtgctgctggtcggtaaggattcagacggcatgggagagggtgaagatattttgggatgtgtggcggggtacggcgtgggtttggatttgaccgcgcgagacatccaatgccatctgaaggcgcaggggctgccctggctgaaggcaaaagggttcaggcattccgcgtgcgtgtcggattttgcggcggcagacagaatcggcaatcccgagaaggtgttgttttcattaaaacaaaacggcgtattgaaacagcgcggggataccggtttgatgatttacccgattcgggaaattttacacaaactggcggcagattacggtttggggaaaggggatttggtgtttaccggaacgccttccggcgtgggcgcaatcggtgcgggggacaatttggcattggagctggacggcttggtgcgcgcctctttcacggtagggtgttaa

SEQ ID NO: 51520 - DNA, 288 bp, Neisseria meningitidis; identical to SEQ ID NO: 42693

SEQ ID NO: 51521 - DNA, 474 bp, Neisseria meningitidis; identical to SEQ ID NO: 47715

SEQ ID NO: 51522 - DNA, 768 bp, Neisseria meningitidis
atggcactggcaaaacgcatcatcccctgtctcgacgtaaaagacgggcgcgtcgtcaaaggcgtgaacttcatcggtttgcgcgacgcgggcgaccccgtcgaagccgccaaacgctacaacggcgaaggcgcggacgaattgaccttcctcgacatcaccgcctcatccgacaaccgcgacaccatcctgcacatcatcgaagaagttgccggacaagtcttcatccccctgaccgtcggcggcggcgtacgcaccgttgccgacatccgccgcctgctcaatgccggcgcggacaaagtcagcatcaacaccgccgccgttacccgtcccgatttaattgacgaagccgccggatttttcggttcgcaagccatcgtcgccgccgtcgatgccaaagccgccaaccccgaaaacacacgctgggaaatctttacccacggcgggcgaaatccgaccggtttggatgcggtggaatgggcggtcgaaatgcaaaaacgcggcgcgggcgaaatcctgcttaccggtatggacagggacggtacgaaacagggtttcaacctgccgctgacccgcgccgttgccgaagccgtcgacatccccgtcatcgcctccggcggggtcggcaatgtccggcacctgattgaaggcataaccgaaggcaaagccgatgccgtacttgccgccggcattttccatttcggggaaatcgccatccgcgaagccaaacgcgctatgcgcgaagccggcatcgaagtgcgcctctga

SEQ ID NO: 51523 - DNA, 1008 bp, Neisseria meningitidis
atgagcaccttcttccaacaaaccgcgcaagccatgattgccaaacacatcgaccgtttcccgctattgaagttggatcaggtaattgattggcagccgatcgagcagtacctgaaccgtcaaaaaaaccgttacctccgagaccaccgcggccgtcctgcctatcccctgctgtccatgttcaaagccgtcctgcccggacaatggcacagcctctccgatcccgaactcgaacacagcctcatcacccgcatcgatttcaacctgttttgccgtttcgacgaactgagcatccctgattacagcaccttatgccgctaccgcaactggctggcgcaagacgacaccctgtccgaattgctcaaactgattaaccgacaactgaccgaaaaaggtttaaaaatagagaaagcatccgccgctgtcgttgacgccaccattattcagaccgccggcagcaaacagcgtcagaccatagaagtcgatgaagaaggacaagtcagcggccaaaccacaccgagtaaggacagcgatgcccgttggatcaagaaaaacggcctctacaaactcggttacaaacaacatacccgtaccgatgcagaaggctatatcgagaaactgcacattactcccgccaatgcccatgagtgcaaacacctgtcgccgttgttggaagggttacccgaaggtacgaccgtctatgccgacaaaggctacgacagtgcggaaaaccggcaacatctggaagaacatcagttgttggacggcattatgcgcaaagcctgccgcaaccgcccgctgtcggaagtgcaaaccaaacgcaaccgatatttgtcgaagacccgttatgtggttgaacagagcttcggtacgctgcaccgtaaattccgctacgctcgggcagcctatttcggactgattaaagtgagtgcgcaaagccacctgaaagcgatgtgtttgaacctgttgaaagcggccaacaggttaagtgcgcccgctgccgcctaa

SEQ ID NO: 51524 - DNA, 1338 bp, Neisseria meningitidis
atgaccgacacagccggtctgcgccgccgcaacctgcggcaatggatagcagaacactacggcggtttgcaaacccgttttgccgaagccgttgccctcaacacaggcgaactctccgcccttttgaaaaacaaatccttcggcgagaaaaaagcccgtaaaatcgaacaggcggcaaaaatgcccgccttctggctcgataccgaacacaccgcccgcccgcccgaacacacaggaaaacacaccatgtcccatatttcccccatccccgaaatcctagccgacatcaaagccggcaaaatggtcatcatcaccgatgccgaagaccgagaaaacgaaggcgacctgctgatggcggcgcaattcgtcacgcccgaagccatcaacttcatgatcaaacacgcgcgcggcttggtctgcctgccgatggacggcgaaatggtcgaaaaactcgggctgccgatgatgacccaaaaaaacggcgcgcaatacggcaccaactttaccgtctccatcgaagccgcacacggcattaccaccggcatttccgccgccgaccgcgccctgactattcaaaccgccgtttccccgaccgctaaacccgaagacatcgtccaacccggtcatatctttccgcttcgcgcccaaaaaggcggcgtactcgtccgcgccggacacaccgaagccggcgtcgacctggcgcaaatgaacgggctgattcctgcctccgttatttgcgaaatcatcaacgacgacggcacgatggcgcgtatgcccgaactgatgaaattcgccgaagaacacaagctcaaaatcggcacgattgccgacctcatcgaataccgcagccgtaccgaaagcctgcttgaagacatgggcaatgcgcctgtacaaaccccgtggggcgagttccaacaacacgtttacgtcgacaaactctccggcgaaacccacctcgccctcgtcaaaggcacgccctccgccgacaccgaaaccctcgtccgcgtccacgaacccttcagtgtgatggacttcattcaagccaacccgcgtcattcatggtcgctgcccaaagcactcgagcgcatccaacaggccgaaagcggcgtagtcatccttctgcaccgcaccgaagacggcgcatccctgctcgaccgcaccctgcccaaaggcgcaaaccaagcctacaaatgggacagcaaaagctacggcatcggcgcacaaatcctcgccggcctcaacgtcaaaaaactgcgcgtcctcgggcagccctcatctttcaccggcctgaccggcttcggtttggaagtcgtcggctttgaagaagcggaaaaataa

SEQ ID NO: 51525 - DNA, 531 bp, Neisseria meningitidis
gtgttagaatgcgcctgtaatcaatctgctgttcctgaaaggacaaatatggctatcgtgaagaattccgtggtttcgctgcattatgagatgtatgatgccaacaatcagcttttggacaaaaccgaagaaccgattgcgtatctgcacggcggttacgacggcattttccctttggtggaagaggcgttgcacggtaaggatgccggcgatacggtcgatgtggcgctttcgcccgacgatgcgttcggcgagcaggattcggagttggttcgtattgaagatgtgggcgtgttccctgttgaagtcgaagtcggcatgatgtttgaagccgacgatcctgaaaccggcgatgttgtcgtctatcgtgtaaccgatgttgccgacggcaaggcggtggtggacggcaaccatcctttggcaggcatgaaaatccgttttaaggctacggttgaaagcgtgcgcgatgcatccgatgaggaaatcgcacacggtcatgtccacggcccgcacggtcatcaccaccactga

SEQ ID NO: 51526 - DNA, 438 bp, Neisseria meningitidis; identical to SEQ ID NO: 42580

SEQ ID NO: 51527 - DNA, 624 bp, Neisseria meningitidis; identical to SEQ ID NO: 36421

SEQ ID NO: 51528 - DNA, 450 bp, Neisseria meningitidis
atggacgtacaactccccatcgaagccaaagacatccaaaaactcatcccccaccgctatccgtttctccagctcgaccgcatcaccgccttcgagccgatgaaaaccctgaccgcgattaaaaacgtcaccataaacgaaccccagttccaaggccatttccccgacctgcccgtgatgcccggcgtactcatcatcgaagcgatggcgcaggcgtgcggcacgttggcgattttgagcgaaggcgggcgcaaagaaaacgaattcttcttcttcgccggcatagacgaagcccgtttcaaacgccaagtcatccccggcgaccaactcgtctttgaagtcgagctgctgaccagccggcgcggcatcggcaaattcaacgccgttgccaaagtggacgggcaagtcgccgtcgaagccatcatcatgtgtgccaaacgcgtggtttga

SEQ ID NO: 51529 - DNA, 1035 bp, Neisseria meningitidis; identical to SEQ ID NO: 42551

SEQ ID NO: 51530 - DNA, 1101 bp, Neisseria meningitidis; identical to SEQ ID NO: 45109

SEQ ID NO: 51531 - DNA, 318 bp, Neisseria meningitidis; identical to SEQ ID NO: 37073

SEQ ID NO: 51532 - DNA, 537 bp, Neisseria meningitidis; identical to SEQ ID NO: 43620

SEQ ID NO: 51533 - DNA, 531 bp, Neisseria meningitidis; identical to SEQ ID NO: 38478

SEQ ID NO: 51534 - DNA, 474 bp, Neisseria meningitidis
atgttatccacagaatccttaaaacaaatcgacatagagttggcgaaataccctgccgaccaacgccgctccgccattatgggtgcattgcgtattgcccagaccgaaaaaggctggctcgctcccgaaaccatcgcttttgttgccgaatacatcggcatctcgcctgcacaagcctacgaagtcgctaccttctacaatatgtacgaccttgagcctgtcggcaaatacaaactgaccgtttgtaccaacctgccctgcgccctgcgcggcggtatggataccggcgaatacctgaagaaaaaactcggtatcggctacggcgaaaccacgcctgacggcaaatttacccttgtcgaaggcgaatgcatgggcgcatgcggcgacgctccggtgatgctggtcaacaaccacagcatgtgcggctttatgactgaagaggcgattgagaagaaactggcggagttggagtag

SEQ ID NO: 51535 - DNA, 750 bp, Neisseria meningitidis
atgggcgattccgtcatttattatgtagaacaggcagacgaaccggtaaaccgtgccggcgaacgcgcccgtaaaacattcaaatatttttggcgcgagcttttttgggaacgccgccgcatcattcccgccttagattttgccatggtcaaagccccttttttccaagacggcgaaatttgcgaacatatgtggatcgacgatatttattttgacggtctttatatttacggtgtgctgaacaataaacccggcgaactgaccaatatcgaacaaggcgaaagcatttgcgttccggttgacgacatcagcgactggatgttcgtgtgcaacggcattccctacggcggctttaccatacaggcaatgcgtggacagatgacggaagaggagcgtaccgaacacgatgccgcatggggaatcgatttcggcgatcccgggcaggtattgctggtgtatgaagaaaaagaacatcccgaaaatctggaagagcatccgatgtgccggaactgtattgacgattttcggcaacagttgtcccaaaatccggattttctgcatgagcaggacgaagacggctatacgccgcttcatcatgaagccatcgcaggaaatgcacttatggttcaagccatgcttgaatacggcgcaaatcctgcctcaaagacatcggaaggctataccgccctcgattttgcccgcctgacgggctggcaaaatgttgccgacctgctcgaaccgcgacattag

SEQ ID NO: 51536 - DNA, 1044 bp, Neisseria meningitidis
atgagtaaaaaaatcaaagtcggcattgtcggcgcgacgggctacacgggcgtggaactgctgcgcctgcttgccgcccatcccgatgtcgaagtcgccgccgtaaccagccgcagcgaagcgggaactgcagttgccgattactttccaagtctgcgcggcgtgtacggcctcgccttccaaacgcccgacgaggcaggtttggaacaatgcgacatcgtcttcttcgccacgcccaacggcatcgccatgaaagacgcgccgcgcctgattgaacagggcgtgcgcgtcatcgacctttccgccgacttccgcatacgggacattccgacctgggaacactggtacggcatgacccacgccgcccccgacctcgtttcccaagccgtgtacggattgagcgaactcaaccgcgaagccgtcgcacaggcacgcctcgtcgccaaccccggctgctacccgacctgcgtatccctgccgctcgtgccgctgttgcggcaatgccgtctgaagcccggtatgccgctgattgccgactgcaaatccggcgtgtccggcgcgggcaggaaaggcaatgtcggttcgctgttgtgcgaagccggcgacaacttcaaagcctacggcatagctggacaccgccacctgcccgaaatcaggcagaccatcgccgggcttcaggacggcatcgccgaaggattcgtgttcacgccgcacctcgcgccgatgatacgcggtatgcacgccaccgtttacctccacctttcaaacggcatctgccccgaaaccgtcctgcgcgactattaccgcgacagcctgttcgtggacatcctgccgaccggttccgcccccgaaacccgcagcgtgcgcggcgcaaacctctgccgcatcagcatccaacaggcggcgcaatccgatgtgtgggtcgtcctttccgtcatcgacaacctcgtcaaaggcgcggcgggtcaggcagtccaaaatatgaacattatgttcggactggaggaaacacacggcttggacgcaatccccctgctcccctga

SEQ ID NO: 51537 - DNA, 2952 bp, Neisseria meningitidis
atgccgtctgaacaagggtttcagacggcatttgccttttccgttataatctggggttgtgcgggggcgggttttaagccggcatcgtccttccctatttttttctgtcccttatcggttttaagcgggttttttatgtccaacagacctacactcctcctcgttgacggatcgtcctacctctaccgtgcgtatcacgcgatggggcaaaacctgaccgcacccgacggtgcaccgacgggtgcgctgtatggcgtattgaatatgttgcgccgtttgcggtcggaatatccgcacgattattgcgcggtggtttttgatgcgaaaggcaaaaatttccgccatcaaatgtttgaagaatacaaggcgacgcgcccgccgatgcccgacgatttgcgtccgcaggcggaagctttgccggatttggtgcgcctgacgggctggccggtattggtgattgggcaggtggaagcggacgatgtgatcggcacgctggcaaaacagggggcggaacatggtttgcgagtcattgtttcgaccggcgataaggacatggcgcagttggtggatgagcgcgttacgctggtgaacacgatgagcggagaaacgctggatattgaaggcgtgaaggcaaaattcggcgtgcgccccgaccaaatccgcgattatctcgcgctgatgggcgacaaggtggacaacgtgccgggcgtggaaaaatgtggcccgaaaacggcagtgaagtggctggaagcctacggctcgttgcaaggcgtgatagaacacgcttcggaaatcaagggcaaagtgggcgagaatctgcgtgccgccctgccgcgcctgccgctgtcgtatgatttggtaacgattaaaaccgatgtggacttgcacgccgagctttcagacggcatcgaaagcctgcgctgtactacgccgaaatgggcgcagctggttgtcgatttcaaacgctggggcttccgcacctggctgaaagaagcggaaagccgtatgcacgaagcggcggacggcgatttgttcggcagcgatacgataggcgaacaggcggcgttggatatggaaacgtcgtctgaaaggctacctgaaaaagccgttgcccccgaaaagctggattatcaggccgttaccaccgaagcgcagtttgccactttgttagacaaattgtcgcaggcggaaaaaatcggcatcgacacggaaaccacttccctagacgcgatgaacgccgcgctggtcggcatcagcatcgcgttccaagcgggcgaagcagtttacatccccgtaggacacagcctgaccgccgcgccagaacagcttgatttgcaagacgtattaggccatctgaaaccgtatttggaaaatcctgccctgaaaaaaatcgggcaaaacctcaaatacgaccaacacgttttcgccaattacggcatcgccctgaacggcatcgccggcgacgccatgctcgcttcctacatcatcgagagccatctcggacacggcttggacgaattgtccgaacgctggctcggcttggaaaccattacctacgaatcgctgtgcggcaaaggcgcgaagcaaatcggttttgccgatgtcgccatcgggcaggcgaccgaatacgccgcccaagacgccgatttcgccctgcgcctcgaagcgcacctgcgcgcgcaaatggacgaaaaacagcttgaaatgtatgaaaaaatggagctgcccgtcgcgcaggtattgtttgaaatggaacgcaacggtgtgcaaatcgaccgcgccgaactcgcccgccaaagcgcggaactcggcgccgagctgatgaagctcgaacaagaagcctacgccgccgcagggcagccgttcaacctcaactcgcccaaacagctgcaagaaatcctgttcgacaaaatgggcatcccgacaaaagggctgaaaaaaaccgccaagggcggcatttccaccaacgaggccgtgctcgaacagctcgcgcccgactaccccctgcctaaaatcatcctgcaaaaccgcagcctggcgaagctcaaatccacctacaccgacaaactacccgaaatgatttcccccaaggacggccgcgtgcataccacctacgcccaagccgtcgccattaccggccgcctcgccagcaacaaccccaacctgcaaaatatccccatccgtaccgaagaagggcgtaaagtccgccgcgcctttaccgcaccgcaaggcagcgtcatcgtttccgccgactattcccaaatcgagctgcgcattatggcgcacctctccggcgacaaaaccctgattgccgcgttccaaaacggcgaagacgtacaccgccgcaccgccgccgaagtgttcggcactgcgcccgaaaacgtctcgtccgagcaacgccgctatgccaaaaccatcaacttcggcttaatttacggtatggggcaatacggtttggcaaaatcattgggcatcgacaacctttccgccaaaaactttatcgaccgctacttcgaccgctaccccggcgtcgccgaatacatgcagcgcaccaaagaacaagccgccgcccaaggctacgtcgaaaccctgttcggcagaaggctctacctgcccgacatccgcaacaaaaacgccaacgcccgcgccggagccgaacgcgctgccatcaacgcccccatgcagggcaccgcctccgacctcatcaaacgcgccatgatagacgtgtcccgctggctttcagagtgcgaagcctccccgtgggacgaactcttacaaagcaaactgattatgcaggtgcatgacgaactggtgctggaagtcgttgaaaccgaactggattttgtcaaagaaaaactgccgcagattatggcgaaagtggacggcggattattggatgtaccgctggtggctgaggttggcgtaggggagaattgggaagaggcacattga

SEQ ID NO: 51538 - DNA, 480 bp, Neisseria meningitidis; identical to SEQ ID NO: 40550

SEQ ID NO: 51539 - DNA, 1089 bp, Neisseria meningitidis
atgagcgactacacgcagcagcttcaagataaaaaagaccaccttaaaaccctttttgcaggtttggatgttcctgagtgggaagtgtacgaatctccggacaaacattaccgtatgcgtgccgagttccgtatttggcacgaaggcggtgaaatgttttacgccatgtttgaaaaagggcagaaggctggcggggcaagcctgatccgttgcgaccgcttcgatgctgcttcagaggcagtcaattgcctgatgcccgaattaattgccgttgccgcccaatctgccgaactgagaaaccgttggtatgccgtcgaatttttgtctacgctcagcggggaaatgctggttaccatgatttaccacaaaaggcttgatgatgagtggatgcaggcggcgcaagcgttacagcaacagttggatacttccgttattgggcggagcagggggcagaaaatagtcttgaaacaggactatgtaacggaaactttaaaggtcggtaatcgggattttcgttatcggcaaattgaaggcggttttacccaaccgaatgccgccgtgtgtcagaaaatgcttgaatgggcctgcggtgcggcagaaggattggatggggatttgctcgaactgtattgcggaaacggcaactttacgcttcctttatctgaaaagtttgaacgtgttttggcaaccgaaatctccaaaacctccatcagcgcggcgcaatggaatattgaggcaaacgggataggcaacatcaaaatcgcccgtctgtctgctgaagaatttaccgaagcctataccggaaaacgtgagtttaaacgccttaaggatggcggtattgctttgacggattacgcattttccactattttcgtcgatccgccgcgtgccggtatcgatgaggaaactttgaagctggtgtcgcagtttgacaacatcatctacatttcctgcaatcccgaaacgctgcgtgccaatttggacaccttggtggaaacccatgcggtcgaacgcgccgccctgttcgaccaattcccgtttacgcaccatatcgaaagtggtgtattgttgaaaaagaaaatcctttga

SEQ ID NO: 51540 - DNA, 318 bp, Neisseria meningitidis
atgggcaacaaattgaccccgcctgccgaactgcctgacgaacaggatttgcgggcggtattggcatacaatatgcggcttttccgcgtgaacaagggttggtcgcaagaagaattggcgcggcaatgcggtttggacaggacttatgtgtcggcagtcgaacgcaaacgctggaacatcgccctgtcgaatatcgaaaaaatggcggcggctttgggcgtggcggcgtatcagttgctgctgccgccgcaggaacggttgaacctgatgaccaattccgccgatacccgacaaatgccgtctgaaagcggtatttga

SEQ ID NO: 51541 - DNA, 618 bp, Neisseria meningitidis; identical to SEQ ID NO: 38231

SEQ ID NO: 51542 - DNA, 183 bp, Neisseria meningitidis
ttgccgcaaaaggcagcagccgtaaaaaagtcggggaattattggcaatttatgcgtaatttcgacaaattggctgaagaagctgccgaacacgccgctgaaggcgcggtgaaattcatagacggcaagcctgccaagaaaatcatcgccgtaccgggcagactggcgaacatcgtggtgtaa

SEQ ID NO: 51543 - DNA, 594 bp, Neisseria meningitidis
atggcaagcattcaaaatttatacgagaccgtcatcggtgtgctgggcaatcaggcaggcaaagtcatttcagctttgggcgagattaccgtcgagtgtctgcccgaacactatatctcagccatgaccgcattgcgcgaccatgaagatttgcatttcgagcttctggtcgatttgtgcggtgtcgattacagcacttacaaaaacgaagtatggcagggcaaacgctttgccgtcgtcagccagctgctttccgttaaaaacaatcaacgcatccgcgtacgcgtctgggtttcagacgacgacttccccgtagtcgaatccgtagtcgatatttacaacagcgcggattggtacgaacgcgaagccttcgatatgtacggcatcatgttcaacaaccacccggacttgcgccgcatcctgaccgattacggctttgtcggacatccgttccgcaaagacttcccgatttccggctatgtggaaatgcgttacgacgaagagcaaaaacgcgtgatttaccaacctgttaccattgagccgcgcgagatcacgccgcgtatcgtccgtgaggagaactacggtggccaataa

SEQ ID NO: 51544 - DNA, 204 bp, Neisseria meningitidis
atggacaatctgaatacgcaggaaatttccgtgttgccggaaaatctgccgctgtattgctcgggacccgacaacgagcagtggaacgggcatccgagagtgtttttgcctttgtgcgaaggagaatcgggcagcgttgcctgcccgtattgcggcacgcgctaccgccttgacggcaagatgccgcatcatcattacgcctga

SEQ ID NO: 51545 - DNA, 1092 bp, Neisseria meningitidis
atgcagacatttaatcgtgagagactggaatttgcgctggataaacgtggttgtacgcaaacaaaattagctgagttattaggtattaccgctcgacaggttagaaactatgtaaaagatgagcaaatacctgatttaaatgaattagccaatttattagagtttccagttcatttctttactaatgacgaaagactgcctgagttgaaatctcaggcagtaagttttcgtgctcgttcacgcacctcgaagaggcttgaaaaacaagcattaaatcatagcattacggcttttttgttaaatgactggctcgagacagaatttacactaagtcaagccgtattgcctgatttttctgatatttctcctgaagaggctgctcaggaactaagattagaatgggggcttggcaatgaacctattccgaatatgatcaccctacttgaagctaagggtgttcgtgtattttcattatctttagatacaaaggacattgatgccttttgtacttggtatgaaaatcatccatttgtatttttaaatacacaaaaatctgcagaacgtagtcgatttgatgctgcccatgaattagggcacttaatccgtgataaatacagtatggaacatagtaaaaatagtgaaattacagaagatgaacctcgtgatattatcgaaaaagaggctaatgcctttgcttcagcttttttaatgccggaggctgcactacgcttatatcgtcatgttcctatcactattgaaaatttattaaaaatcaaaagacgatttggtgtatcacttgttgccttagcatatcggatgcataaattaggaatgattactgataggatgtatatacacaatctttgtcctttgtttgcaaagaaaaaatatcgaactatcgaaccagagccaatggaaagggaaatatcaagcgcattacgtaaaatgcttactattttaaaaaatgatggcattggtattgaacagattgctgaaaatttaaacgtatcccccaaagatgttgctgatttaacttttggattagttgagagggacttaaatagatataggaaacttcgattagtcaaataa

SEQ ID NO: 51546 - DNA, 480 bp, Neisseria meningitidis; identical to SEQ ID NO: 43074

SEQ ID NO: 51547 - DNA, 903 bp, Neisseria meningitidis
atggaaaatatggtaacgttttcaaaaatcagaccgcttttggcaatcgccgccgccgcgttgcttgccgcctgcggcacggcgggaaacaatgccgcccgcaagccggtgcaaaccgccaaacccgccgcagtggtcggtttggcactcggtggcggcgcgtctaaaggatttgcccatataggcattattaaggttttgaaagaaaacggtattcctgtaaaagtagtaaccggcacatcggcaggttcgatagtcggcagcctttttgcatcgggtatgtcgcccgaccgccttgaattggaagccgagattttaggtaaaacggatttagtcgatttaaccttgtccaccagtggttttatcaaaggcgaaaagctgcaaaattacatcaaccgaaaagtcggcggcaggcggattcagcagtttcccatcaaatttgccgctattgctactgattttgaaaccggcaaggccgtcgctttcaatcaggggaatgccgggcaggctgtgcgcgcttccgccgccattcccaatgtgttccaacccgttatcatcggcaggcatacatatgttgacggcggtctgtcgcagcccgtgcccgtcagtgccgcccggcggcagggggcgaatttcgtgattgccgtcgatatttccgcccgtccgggcaaaaacatcagccaaggcttcttctcttatctcgatcagacgctgaacgtaatgagcgtttccgcactgcaaaacgagttggggcaggcggatgtggttatcaaaccgcaggttttggatttgggtgcagtcggaggattcgatcagaaaaaacgcgccatccggttgggcgaggaggctgcacgtgccgcattgcctgaaatcaaacgcaaactggcggcataccgttattga

SEQ ID NO: 51548 - DNA, 2625 bp, Neisseria meningitidis
atgaaaacctccgaactgcgccaaaaattcctaaaattttttgaaaccaaaggccacaccgtcgtccgctcttccagcctcgtgccgcacgacgacccgaccctgctgtttaccaacgcgggcatgaaccagtttaaagacgtattcttaggtttcgacaaacgcccgtacagccgcgccaccaccgcgcaaaaatgcgtacgcgcaggcggcaagcacaacgacttggaaaacgtcggctacaccgcccgccaccacaccttctttgaaatgatgggcaacttctccttcggcgactacttcaagcgcgacgcgatccacttcgcttgggaatttctgacttcccccgaatggctcaatatccccaaagacaaactgttggcgaccgtttacgcggaagacgacgaagcctacaacatctggttgaacgaaatcggtatgccgtccgagcgcatcgtccgcatcggcgacaacaaaggcgcgaaatacgcgtccgacaacttctggcaaatgggcgacaccggcccttgcggcccctgctccgaaattttctacgaccacggcgaagaaatctggggcggcattcccggcagtcccgaagaagacggcgaccgctggatcgaaatttggaactgcgtatttatgcagttcaaccgcgacgaacaaggcaatatgaacccgcttcccaaaccttccgtcgataccggtatgggcttggaacgcatggccgccgtcatgcagcatgttcacagcaactacgaaatcgacttgttccaagacctgctcaaagccgttgcccgcgaaaccggcgcagctttcagcatggaagaaccaagcctaaaagtcatcgccgaccacatccgctcctgctcattcctgattgcagacggcgtattgccttccaacgaaggccgcggctacgtattgcgccgcattatccgccgcgccgtgcgccacggttacaaactgggtcaaagcaaaccgttcttccacaaactcgttgccgatttggtcaaagagatgggcggtgcctaccctgagttgaaagagaaacaagcacaaatcgaagaagcgttgaaaaacgaagaaagccgttttgcccaaacgctggaaactggtatggctttgttggaaaacgcgctggccaaaggcggcaaaacactcgacggcgaaatcatcttcaaactctacgatacctacggtttcccctacgacctgactgccgacatggcgcgcgaactgggcatcgaactggacgaagcaggcttcgagcgcgaaatggaagcccaacgcgcacgcgcacgcgccgcccaaagcttcaaagccaacgcccaactgccttatgacggtcaagacaccgagtttaaaggttatagcgaacgccaaaccgaatccaaagtcctcgccctctacaaagacggcgagcaagtcgacgaattgaacgaaggcgacagcggcgcagtcgtcatcgactttaccccgttctatgcagaatccggcggccaagtcggcgatgtcggctatatcttctcaggcgaaaaccgctttgaagtacgcgatacccaaaaaatcaaagcggccgtattcggtcaattcggcgtacaaacttcaggccgtctgaaagtcggcgacagcgttaccgccaaagtggacgacgaaatccgcaatgccaatatgcgcaaccacagcgcaacccacttgatgcacaaagccctgcgcgatgtattgggcagacacgtcgaacaaaaaggctctttggttaccaccgaatccacccgtttcgacatttcccatccccaagcggtaactgccgaagaaatcgccgaagtcgaacgccgcgtcaacgaagccgttttggcgaacgttgccgtcaacgccgccattatgagcatggaagacgcgcaaaaaaccggcgccatgatgctcttcggcgaaaaatatggcgacgaagtacgcgtattgcaaatgggcggtttctctaccgaattgtgcggcggcacgcacgtttcacgcaccggcgacatcggcctcttcaaaatcatcagcgaaggcggtattgccgcaggcgtgcgccgtatcgaagccatcaccggcctgaacgcactcaaatgggcgcaagagcaagagcgtttggtgaaagacatcattgctgaaaccaaagcccaaaccgaaaaagacgtactggcgaaaatccaagcaggcgcggcacacgccaaagcattggaaaaagaattggcacgcgccaaagccgaactcgccgtccacgcaggcgcaaaactcttggacgacgcaaaagacttgggcgcagccaaactcgttgccgcccaaatcgaagccgacgcagccgccctgcgcgaaatcgtaaccgacctgaccggaaaatccgacaacgccgtgattcttttagcggcagtaaacgacggcaaagtctccctgtgcgccggcgtatccaaagccctgaccggcaaagtcaaagcaggcgatctggttaaatttgcagccgaacaagtcggcggcaaaggaggcggcagaccagatttggcacaggcagggggcacggatgccggcaaattgcccgccgtgttggatagcgtgaaagactgggtcggcgcgaagctggtttga

SEQ ID NO: 51549 - DNA, 7545 bp, Neisseria meningitidis
atgaataaaactctctatcgtgtaattttcaaccgcaaacgtggggctgtggtagccgttgctgaaactaccaagcgcgaaggtaaaagctgtgccgatagtgattcaggcagcgctcatgtgaaatctgttccttttggtactactcatgcacctgtttgtcgttcaaatatcttttctttttctttattgggcttttctttatgtttggctgtaggtacggccaatattgcttttgctgatggcattattgctgataaagctgctcctaaaactcaacaagccacgattctgcaaacaggtaacggcataccgcaagtcaatattcaaacccctacttcggcaggggtttctgttaatcaatacgcccagtttgatgtgggtaatcgcggggcgattttaaacaacagccgcagcaacacccaaacacagctaggcggttggattcaaggtaatccttggttggcaaggggcgaagcacgtgtggttgtaaaccaaatcaacagcagccattcttcacaaatgaatggctatattgaagtgggcggacgacgtgcagaagtcgttattgccaatccggcagggattgcagtcaatggtggtggttttatcaatgcttcccgtgccactttgacgacaggccaaccgcaatatcaagcaggagaccttagcggctttaagataaggcaaggcaatgttgtaatcgccggacacggtttggatgcacgtgataccgattacacacgtattctcagttatcattccaaaattgatgcacccgtatggggacaagatgttcgtgtcgtcgcgggacaaaacgatgtggtcgcaacaggtaatgcacattcgcctattctcaataatgctgctgccaatacgtcaaacaatacagccaacaacggcacacatatccctttatttgcgattgatacaggcaaattaggaggtatgtatgccaacaaaatcaccttgatcagtacggccgagcaagcaggcattcgtaatcaagggcagttgtttgcttcttccggtaatgtggcgattgatgcaaatggccgtttagtcaatagtggcacgatggctgccgccaatgcgaaagatacggataatacagcggaacacaaagtcaatatccgcagtcagggcgttgaaaacagcggtacggcggtatcgcaacaaggcactcaaattcacagtcagtcgattcaaaacactggcacattattgtcctcaggcgaaatattgattcacaattcgggcagcctgaaaaatgaaacatcaggcaccattgaagccgctcgtttggctattgataccgacacacttaataatcaaggcaaactctctcaaacaggttcacaaaaactccatattgatgcacaaggcaaaatggataaccgtggccgcatgggtttacaagataccgcaccaaccgcgtcaaatggttcaagcaatcaaaccggcaatagttacaatgcatctttccattcatccactaccacaccaacaacggcaacaggtacgggtactgcaaccgtttctatatcaaacataactgcgcctacctttgctgatgggacaattcgcactcatggtgcactggataattcaggcagtattattgccaatggtcaaacagatgttagtgcgcaacaaggtttaaataatgcaggacaaatagacattcatcagttaaatgcaaaaggttcggcgtttgacaatcacaatggaacaattatcagtgatgcggtccacattcaagccggcagcctgaataatcaaaatggcaacatcacaacacgccaacagttagagattgaaaccgatcaactggataacgctcatggcaagttattatcagcagaaatagcggatttagccgtttcaggcagcctgaacaatcaaaatggcgaaatagcgaccaatcaacaactgattattcacgatggtcagcaatctaccgctgtcattgataatacgaatggcacgatacaatcaggccgtgatgttgctattcaggcaaaatcgttatccaacaacggcacacttgccgctgataataaactggatattgcgttacaagatgatttttatgtagaacgcaatatcgtggcgggcaatgaattgtcgctcagtacacgaggcagcctgaaaaattcacatactttgcaagcaggaaaacgcattcggattaaagcaaataaccttgataatgcagcacaaggcaacattcaatccggcggtacgacagacattggcacgcagcacaatttaaccaatagaggcttgattgacggacaacaaaccaaaatccaagccgggcaaatgaataatatcggtacaggtcggatttatggcgacaatatcgctattgcggctacccgcttagacaatcaagatgaaaacggtacaggtgccgccattgcggcacgtgaaaacctgaatttaggcatcggacaattaaacaaccgtgaaaacagtctgatttacagcggtaacgatatggcggttggcggcgcattagataccaatggccaagccacaggcaaagcccaaaggatacacaatgccggcgcaaccattgaagctgcaggcaaaatgcgtttaggtgtagaaaagctgcacaataccaatgagcatttgaaaacgcagttggtagaaacagggcgcgagcatattgttgatcacgaagcatttggacgacacgaattattgcgagaaggcacgcaacatgaattaggctggtctgtctataacgatgaatcagaccacttacgcacccctgatggagcggcgcatgaaaattggcataaatacgattatgaaaaagtcacccaaaaaacccaagttacccaaactgcgccagccaaaatcatttcaggtaatgatttaaccattgatggtaaagaagtatttaataccgatagccaaatcattgctggtggcaatctcattgtacaaacagaaaaagacggtttgcataacgagcaaacctttggcgaaaagaaagtattcagtgaaaatggcaaattacacagctattggcgtgagaaacataaaggacgagactcaacgggacatagcgaacaaaattacactttgccggaggaaatcacacgcaacatttcactgggttcatttgcctatgaatcgcatcgcaaagcattaagccatcatgcgcccagccaaggcactgagttgccgcaaagcaacggtatttcgctaccctatacgtccaattcttttaccccattacccagcagcagcttatacattatcaatcctgtcaataaaggctatcttgttgaaaccgatccacgctttgccaactaccgtcaatggttgggtagtgactatatgctggacagcctcaaactagacccaaacaatttacataaacgtttgggtgatggttattacgagcaacgtttaatcaatgaacaaatcgcagagctgacagggcatcgtcgtttagacggttatcaaaacgacgaagaacaatttaaagccttaatggataatggcgcgactgcggcacgttcgatgaatctcagcgttggcattgcattaagtgccgagcaagtagcgcaactgaccagcgatattgtttggttggtacaaaaagaagttaagcttcctgatggcggcacacaaaccgtattggtgccacaggtttatgtacgcgttaaaaatggcgacatagacggtaaaggtgcattgttgtcaggcagcaatacacaaatcaatgtttcaggcagcctgaaaaactcaggcacgattgcagggcgcaatgcgcttattatcaataccgatacgctagacaatatcggtgggcgtattcatgcgcaaaaatcagcggttacggccacacaagacatcaataatattggcggcatgctttctgccgaacagacattattgctcaacgcaggcaacaacatcaacagccaaagcaccaccgccagcagtcaaaatacacaaggcagcagcacctacctagaccgaatggcaggtatttatatcacaggcaaagaaaaaggtgttttagcagcgcaggcaggaaaagacatcaacatcattgccggtcaaatcagcaatcaatcagagcaagggcaaacccggctgcaagcagggcgcgacattaacctagatacggtacaaaccagcaaacatcaagcaacccattttgatgccgataaccatgttattcgcggttcaacgaacgaagtcggcagcagcattcaaacaaaaggcgatgttaccctattgtcagggaataacctcaatgccaaagctgccgaagtcagcagcgcaaacggtacactcgctgtgtctgccaaaaatgacatcaacatcagcgcaggcatcaacacgacccatgttgatgatgcgtccaaacacacaggcagaagcggtggtggcaataaattagtcattaccgataaagcccaaagtcatcacgaaaccgcccaaagcagcacctttgaaggcaagcaagttgtattgcaggcaggaaacgatgccaacatccttggcagcaatgttatttccgataatggcacccagattcaagcaggcaatcatgttcgcattggtacaacccaaactcaaagccaaagcgaaacctatcatcaaacccagaaatcaggattgatgagtgcaggtatcggcttcactattggcagcaagacaaacacacaagaaaaccaatcccaaagcaacgaacatacaggcagtaccgtaggcagcttgaaaggcgataccaccattgttgcaggcaaacactacgaacaaatcggcagtaccgtttccagcccggaaggcaacaataccatctatgcccaaagcatagacattcaagcggcacacaacaaattaaacagtaataccacccaaacctatgaacaaaaaggcctaacggtggcattcagttcgcccgttaccgatttggcacaacaagcgattgccgtagcacaaagcagcaaacaagtcggacaaagcaaaaacgaccgcgttaatgccatggcggctgccaatgcaggctggcaagcctatcaaacaggtaagagtgcacaaaacttagccaatggtacaaccaatgccaaacaagtcagcatctccataacctacggcgaacagcaaaaccgacaaaccacccaagttcaagccaatcaagcccaagcgagtcaaattcaagcaggtggtaaaaccacattaatcgccacaggcgcagcagaacaatccaatatcaacatcgcaggctcagatgttgccggcaaagcaggcacaatcctgattgccgataacgacatcacactccaatcagccgagcaaagcaataccgaacgcggccaaaacaaatcggcaggctggaacgcaggtgctgccgtatcattcggacaaggaggctggtcattaggcgttaccgcaggcggcaatgtcggcaaaggctacggcaatggcgacagcatcacccaccgccatagccatatcggcgacaaaggcagccaaacccttatccaaagcggtggcgacactaccatcaaaggcgcgcaagtacgcggcaaaggcgtacaagtcaatgccaaaaacctaagtattcaaagcgtacaagatagagaaacctatcaaagcaaacaacaaaacgccagtgcacaagttaccgtaggttatggcttcagtgccggtggcgattacagccaaagcaaaatccgagccgaccatgtttcagtaaccgagcaaagcggtatttatgccggagaagacggctatcaaatcaaggtcggaaaccatacagacctcaaaggcggcatcatcaccagtacccaaagcgcagaagacaagggtaaaaaccgctttcagacggccaccctcacccatagcgacatcaaaaaccacagccaatacaaaggcgaaagttttggattgggcgcaagtgcgtccataagcggcaaaacactgggacagggcgcacaaaataaacctcaaaacaaacacctgacaagcgtagccgataaaaacagcgcaagttcatcagtgggttatggcagcgacagcgacagtcaaagcagcatcacaaaaagcggcatcaacacccgcaacattcaaatcaccgacgaagccgcacaaatccggctgacaggcaaaacagcggcacaaaccaaagccgatattgatacaaacgtaaccacagacaccgccgaacgacattcgggcagcttgaagaacaccttcaacaaagaagcggtgcaaagtgaactggatttacaaagaaccgtcagccaagattttagtaaaaatgttcaacaagccaataccgagattaaccaacatttagacaaactcaaagcagacaaagaagcagccgaaacagcagcagccgaggcattagccaatggcgatatggaaactgccaaacgcaaagcccatgaagctcaagatgcggcagcaaaagcagataattggcaacaaggcaaagtcattctcaacatgttagcctcaggtttagctgcgccgacccaaagcggagcgggcatcgctgcggctaccgcatcgccagccgtatcgtatgcgattggacagcactttaaagatttagccggtcaaaacgcgaatggtaaactaaccgccagtcaagaaaccgcacacgttcttgcccacgcggtattaggagcagcggttgccgcagtaggagacaacaatgctctagcaggagcattgagtgcgggcgggtcggaagcggctgcgccttacatcagcaaatggttatacggcaaagaaaaaggaagcgacttaacggcggaagagaaagagactgtaacagcgattacaaatgtattgggtacggctacgggtgcggcagtcggcaacagcgcaacagatgcagcgcaaggcagcctgaatgcgcaaagtgcggtggagaataatgatactgtagagcaagtgaaatttgctcttaggcaccctagaattgctattgcaattggatctgtacataaagatcctggctctacattagagcctaatatttcaacaattgcttcaacttttcaattaaatttatttcctaatagtgaatttggtggtgaaggtggagttggcaatgcattcaggcacgttttatggcaagcaaccatcacacgagaatttggcaaagatattgctgttaaagtaggaaatagtcatgaaagtggggaaaaaattaattattctataagacgtaatctttcattagataaagcagatgaaatgattgatcaactaaataacgaaataggaagagaaatagcattaaataccaataggttaaacacaaaagagttagttggattaattctggaaacttataaaaataatggtttttatcaagcagaaagaaacagtaatggaaattatgatgttgtaagaaaaagattatctgaaaaagattaccagaatacaagcaatatattgattcacttagataatactggtgccggatttaaaattcagcagaggagaaaacaaatcagagcacaaatttcagccagacaatggagaagataa

SEQ ID NO: 51550 - DNA, 1203 bp, Neisseria meningitidis
atgaagaactaccacgcgcccgacgagaagggctttttcggcgaacacggcgggctgttcgtgtccgagaccctgattccggctttgcaagagctggcggatgcctataaggcagcgaaaaacgatcctgaattttgggaagcgttccgccatgatttgaaacattatgtcggcaggcccagccccgtttaccacgccgcgcggttgtccgaacatctgggcggcgcgcaaatctggttgaagcgcgaagacttgaaccacaccggcgcgcacaaagtcaacaacaccatcggtcaggcactgttggcaaaacgcatgggtaaaaaacgcgtcatcgccgaaaccggcgcgggtcagcacggcgtggcgagtgccaccgttgccgcacgcttcggtatgacttgcgacgtgtatatgggcgcggacgacatccaacgccaaatgcccaacgtgttccgtatgaaattattgggtgcgaacgtggtcggtgtagaaagcggcagccgcacgctgaaagacgcgatgaacgaagccatgcgcgaatgggtcgcccgcgtggacgacacgttctacatcatcggtaccgccgccggccccgcgccgtatcccgaaatggtgcgcgatttccaatgcgtgattggcaacgaagctaaagcgcagatgcaggaagccatcggcagacagcccgacgttgccgttgcctgcgtgggcggcggatcgaacgccatcggtttgttccacccgtatatcggcgaagaaaacgtgcgcctcgtcggcgtggaggctggcggtttgggcgtgaacacccccgatcacgccgcgccgattacttcgggcgcaccgattggcgtattgcacggtttccgcagctatctgatgcaggacgaaaacggtcaggttttgggtacgcactctgtttccgcaggcttggattaccccggcatcggcccggaacacagccatctgcacgacatcaagcgcgtcgaatacactgttgccaaagacgacgaagcactcgaagcctttgacttgctctgccgcttcgagggcatcatccccgcgctcgaatccagccacgccgttgcttgggcggtgaaaaacgcgccgaaaatgggcaaagaccaagtgattctggtcaacctatccggtcgtggcgacaaagacatcaataccgtcgcgaagctcaaagggattaaactgtaa

SEQ ID NO: 51551 - DNA, 921 bp, Neisseria meningitidis
atgacaaagttatacgcagaaatcgccaagatggagacgcaggacgacggcacggtcaaggtttggggttacgcttcaagcgaggcggtcgattccgacggcgaagtcatcgcggcggcagctatgaaggcggcgattcccgattatatgaagtttggcgcggagcgcgagatgcacggctcaaacgctgcgggaacggcaattgaaatcaacgtggaagatgacggcagaacctttttcgtggcgcatatcgtcgatcccgttgccgtgacgaaggtcaaaacaggcgtttacaagggcttttccatcggcggcagcgttaccgcccacgatgagttgaacaagtcgcaaatcacgggtttgaagctgacggaaatcagccttgtcgagcgccctgccaatcccgatgcggtgtctacctgctttaaggcggacaaaggtgcggaaacggtaaacaacgatacagaacataatgctacatattttagccatttcccttccaaacaaaaaagcaccggcggcagccgatgccccttcctttacaggttcccctattttttcactgcgggcagcaccggtttagctgggccttttggtgcgggcgcgccgaccgaagcctggtccttcagcttcgccagcaccgcagggccgatgccctttaccttggtcaaatcgtctacagacttgaacgcaccgttttgcgcacggtattccgcaatggccttcgccttcgccgggcctatgcccggcagcgcctccaactcctgctgcgaagccgcattgatgtttaccgccgcaagggagaaggcgcaggagaacagcatacagaacagcacgaacattttcttcatggtttttcctttaagggttgcaaacaataaaccgcatcttgcgacgataaaacgagtcattctaaaatga

SEQ ID NO: 51552 - DNA, 2580 bp, Neisseria meningitidis
atgcgatacgacaaattaaccgccaaattccaacaggcccttgcagaagctcagagtttggcgttggctgcggacggcagctatctggaagcgggctttgtgctgaaagccctgcttgacgaccaaaacagcggtgctgccgcgctcttggctcatgcgggcgtgaacgtgccgcaggtgaaacagcgtttgcagcagcatttgaacagcctgccgaaagtgtccggccagggcggcgacattctgcccagccgcgaattgcaggcggtgttgaacctgatggacaaagccgcaaccaaacgcggcgatgcctatatcgccagtgaacttttcctgcttgccttggtgcagcagaacgatgcggccggcaaaattttgaaagaagccggcgcgaccgaacaaaacatcaatgccgcgattgacacggtacgaggaggacaaaacgtgaacgatgccaatgccgaagaccaacgcgatgctttgaaaaaatatacgctcgatctgacccaacgcgcccgagacggtaagctcgaccccgttatcggccgtgacgacgaaatccgccgtgcgattcaggtattgcaacgccgtaccaaaaacaaccctgtgctgattggcgaaccgggcgtgggtaaaaccgccatcgtcgaaggtttggcacaacgcatcgtcaacggcgaagtacccgaatccctgcgcaacaaacgcctactggttttggacttggcggcattgattgccggcgcgaaataccgcggcgaatttgaagaacgcttgaaaggcgtgttgaacgacttggcgaaagacgacggcaacactctgattttcatcgacgaaatccatactttggtcggcgcaggcaaaaccgacggtgcgatggatgcgggcaatatgctgaaaccggctttggcacgtggcgaattgcactgtatcggcgcgaccaccttggacgaataccgccaatacatcgaaaaagacgcggcactcgaacgccgcttccaaaaagtattggtcggcgagccaagtgtagaagacaccatcgctatcttgcgcggtttacaggagcgttatgaaatccaccacggtatcgatattaccgaccctgctatcgttgccgcagcggagttgagcgaccgctacattaccgaccgcttcctgcctgataaagcgattgatttgattgacgaagccgccagccgtgtcaagatggaaaaagaaaccaagccggaagcaatggacaaaatcgaccgccgtctaattcagcttcggatggaaaaggcgcacgttgaaaaagaaaaagacgatgccagcaaaaaacgtttggaactgatagacgaggaaatcaacggtctgcaaaaagaatacgccgatttagacgaaatctggaaagccgaaaaagcaatttcagacggtgctgctaatattaagaaacaaattgacgaagtcaaaattaaaatcgaacaggcaaaacggcaaggcgatttggcactggcttcaaaattgatgtatgaagatttggagcatttggaaaaacagcgtgcagccgccgaacgggcagatacggacagcacaaaaccggcaaacaaactcttgcgtaataatgtcggcgcagaggaaatcgcagaagttgtttcccgtatgaccggcattcctgtgtcaaaaatgatggaaggcgaacgcgacaagttgctgaaaatggaagaagtgttgcaccgccgcgtagtcggtcaagacgaagccgtgcgtgccgtgtccgacgctatccgccgcagccgctccggtcttgccgatccgaacaagccttacggcagcttcctgttcttgggcccgaccggcgtgggtaaaaccgagttgtgtaaagccctggcaggctttctgttcgacagcgaagatcatctgattcgcatcgatatgtccgaatatatggaaaaacacgccgttgcccgcttaatcggcgcgcctccgggttatgtcggctacgaagaaggcggctacctgaccgaacaagtgcgccgcaaaccgtacagcgtgattctgctggacgaagtggaaaaagcccatcccgacgtgttcaacatcctgctgcaagtattggatgacggtcgtttgaccgacgggcaaggtcgcaccgtggacttcaaaaacactgttatcgtcatgacttccaacatcggcagccagcacatccaacaaatgggcattcaggattacgaagcggtaaaagaagttgtgatggaggatgtgaaagaacatttccgtcctgaaatgatcaaccgcatcgacgaagtggtcgtgttccacggtttggatcaggcaaacatccgcagcattgcgaaaatccagctcaaaggtttggaaaaacgtttggaaaaacaaaacctgcgcctgactgtttccgatgccgcactggacatcatcgccaaagccggtttcgacccgatttacggcgcacgtccgctcaaacgcgccatccagtcggaaatcgaaaacccgctggcaaaagccctgcttgccggaaactatgcgcccgaaagcgaaatcagggtggaagccgacggcgacagactgaaatttgcctga

SEQ ID NO: 51553 - DNA, 831 bp, Neisseria meningitidis
atggcacattacgcaatcggcgacatacaaggctgtttcgacgaactgaccgcgctgctcggcaaaatcggtttcaaccacggcacggacaccctctggctgacgggcgacatcgtcaaccgcggcccgaaatccctcgaaacgctgcaattctgcatccggcacgaaaacagcgtgcaaatcgtcctcggcaaccacgacctgcacctgctcgctgtcggctgcggcgaaggcgcgcccaaacgcagcgacacaatcgaacccatactcaaacaccccgacggaaaaaaaatgctcgactggctgcgtgcgcaaccgctgttgatacgcgagggcagccgcgtgatggtacacgccggcatcctgccgcaatggcgcatcgccaaagccgaatcgctcgctagagaagccgaagccgaactgcgcggcaaaaaatacgtcaaattcttctccaaaatgtacggcaacaaaccggccgcgtgggacgaaggtttggaaggctatgcccgcctgcgcttcatcgtcaacgccttcacgcggatgcgcgccctgacctttaaaaacgaactggatttcgactacaaatccacagtgaaaaaaatgccgccttacctgcgcccgtggttcaaagcccccgaccggcaaaacctcgaccgcaccatcatcttcggacactggtcctcgctgggctacacgaatgccgacaacgtcatctcgctggacaccggcgcgctgtggggtggacagctgaccgccgtcaacctcgaaacggaagaaattacccaagtccaagccgccggcggcatagactggaaaagcttcgcaaaataa

SEQ ID NO: 51554 - DNA, 489 bp, Neisseria meningitidis; identical to SEQ ID NO: 39373

SEQ ID NO: 51555 - DNA, 1242 bp, Neisseria meningitidis
atgcccaccaaaaccccttcactgttcggcggcgcgatgattatcgccggcacggtcatcggcgcaggtatgctcgccaacccgaccgccacatccggcgtatggtttaccggctcgctggccgtgttgctgtacacctggttttccatgctctccagcggcctgatgattttggaagtcaacacccactacccccacggcgcgagcttcgacaccatggtcaaagacctgctcggacgcggctggaacatcatcaacggcatcgccgtcgccttcgttttatacctgcttacttacgcttatatcttcgtcggcggcgacctgaccgccaaaggcttaggcagcgcggcaggcggcgacgtttcactcaccgtcggacaactcgtcttcttcggcatcctcgccttttgcgtatgggcatccgcacgcttggtcgaccgcttcaccagcgtcctcatcggcggcatggtattaacctttatttgggcaaccggcggcctgattgccgatgccaaaatgcccgtcctgttcgacacccaagcccccgtcggcaccaactactggatttacgccgccaccgccctgcccgtctgccttgcgtcattcggtttccacggcaacgtctccagcctgctcaaatactttaaaggcgacgcgcccaaagtggctaaatccatctggacgggcacactgattgcgctggtaatttacgtcctctggcaaaccgccatccaaggcaacctgccgcgcaacgcgttcgcccccgtgattgccgccgaagggcaagtctccgtcctgattgaaaccctgtccaaattcgcccaaaccggcaatatggataaaatattgaccctgttttcctatatggcgatcgccacctcgtttttaggcgtaacgctcggactcttcgactacatcgccgacatcttcaaatggaacgacagcgtgtccggccgtaccaaaaccgccgcgctgaccttcctgccgcccctgatttcctgcctgctcttccctaccggcttcgttaccgccatcggctacgtcggcctggcggcaaccgtctggacaggcatcatccccgccatgctgctctaccgttcgcgcaaaaaattcggcgcaggcaaaacctataaagtttacggcggcttgtggctgatggtttgggtcttccttttcggcatcgtcaacatcgccgcacaggtattgagccaaatggaactcgtccccgtatttaaaggataa

SEQ ID NO: 51556 - DNA, 789 bp, Neisseria meningitidis; identical to SEQ ID NO: 39818

SEQ ID NO: 51557 - DNA, 651 bp, Neisseria meningitidis; identical to SEQ ID NO: 46222

SEQ ID NO: 51558 - DNA, 1008 bp, Neisseria meningitidis
atgagcaccttcttccggcaaaccgcccaagccatgattgccaagcacatcgaccgtttcccgctattgaagttggaccaggtgattgattggcagccgatcgaacaatacctgaatcgtcaaaaaacccgttaccttagagatcaccgcggccgtcccgcctatcccctgttgtccatgttcaaagccgtcctgctcggacaatggcacagcctctccgatcccgaactcgaacacagcctcattacccgcatcgatttcaacctgttttgtcgttttgacgaactgagcatccccgattacagcaccttatgccgctaccgcaactggctggcgcaagacgacaccctgtccgaactgttggaactgattaactgccaactgaccgaaaaaggcttaaaagtagagaaagcatccgccgccgtcattgacgccaccattattcagaccgctggcagcaaacagcgtcaggccatagaagttgacgaagaaggacaaatcagcggccaaaccacaccgagtaaagacagcgatgcccgttggacaaagaaaaacggcctctacagactcggttacaaacaacatacccgtaccgatgcagaaggctatatcgagaaactgcacatcacccccgccaatgcccatgagtgcaaccacctgttgcctttgttggaaggactgcccaaaggtacgaccgtctatgccgataaaggctatgacagtgcggaaaaccggcaacatctgaaagaacatcagttgcaggacggcattatgcgcaaagcctgccgcaaccgcccgctgtcggaagtgcaaaccaaacgcaaccgatatttgtcgaagacccgttatgtggtcgaacagagcttcggtacgatgcaccgtaaattccgctatgcgcgggcagcctatttcgggctgagcaaagtgagtgcacaaagccatctgaaggcgatgtgtttgaaccttttgaaagcggccaacaggctaagtgcgcccgctgccgcctaa

SEQ ID NO: 51559 - DNA, 1635 bp, Neisseria meningitidis
atgataaaaccgaacctgaggccgaagctcggctcttccgcgctgattgccttcctttccctgtattcctcgctggtattgaattacgccttttttgccaaagttgtcgagcttcatccttttaacggcaccggggcggatatcttcctctatacgatgccggtggtgctgttttttttaagtaatttcgtttttcacgtcattgccctgcctttcgtgcataaggtattgattccgttgatattggttatcagtgcggcggtgtcttaccaagaaatatttttcaatatctatttcaacaagtcgatgttgaataatgtcttgcaaactacggctgccgaaagcgcgcgcctgattacgccgggctatgtgctgtggattgtatgtttgggcgtattgcccgcgctggcgtatatcgccgtcaaggttaaataccgcgtttggtataaggagcttttgacgcgccttgtgcttgccgccgtttcctttttgtgcgcgttgggcatcgcaatgttgcaatatcaggattacgcctcgtttttccgcaacaataaatcagtaacccatctgattgtgccgtctaatttcatcggcgcgggcgtgtcgaaatacaaagattggaagcgttccaatattccttatacgcaattggatatggcggtcgtgcaaaaccggccggccggcagcctgcgccgtttcgtggtgctggtcgtgggcgagaccacgcgtgccgccaactggggtttgaacggttacagccgccaaactacgccgctgcttgccgcgcgcggcgatgaaattgtcaatttcccgcaggtcagaagctgcggcacatcgaccgcgcactccctgccgtgtatgttctcaaccttcgaccgcacggattatgacgaaatcaaagccgaacaccaagacaacctgctggacatcgtgcagcgcgccggcgtggaagttacctggttggaaaacgattccggctgcaagggcgtgtgcggcaaagtgccgaataccgacgttacctcgctcaacctgcccgaatactgccgcaacggcgagtgcctcgacaatatcctgctgactaagttcgacgaagtcctcaacaaaaacgataaagacgcggttttaatcctgcataccatcggcagccacgggccgacgtattacgaacgctataccgaagccgaacgcaaattcacgccgacctgcgacaccaacgaaatcaacaaatgcacccgcgccacgctggtcaacacttacgacaatacggttttgtatgtggaccagtttatcgacaaggttatccgcaaacttgaaaaccgcgacgatttggaaagcgtggtgcattatgtttccgaccacggcgaaagtttgggcgaaaacgggatgtacctgcacgccgcgccttacgccatcgcgccttccgggcagacgcatatcccgatggttatgtggttttccaaagccttccgccaacacgggggcatagatttccaatgcctcaaacaaaaagcggcggaaaacgaatattcgcacgaccactatttcagcacggtattggggctgatggacatttccaacagtcaaacctatcggaaggaaatggatatattggcagcctgccgccgtccgcgctga

SEQ ID NO: 51560 - DNA, 312 bp, Neisseria meningitidis
atgaaatacaaaagcgaggcattagccgccattcatgaaatgatggaaggggcttacaacatcggcgcaatcgacaaaaagactatgcgcggctttgacaagtcatgcctgaccgaaatcaaaccgttgagcggcggagacatcaaggcaatcagggagaaggaggcactatcgcaagccgctttcgccatctatctcaacgtgggaaaaaatcacgtttcggcttgggagcggggcgttaaaaagcccagcggcgcggcgttgaagctgctgaccatcgtcaaaaacaagggtatcgaagccattgcgtag

SEQ ID NO: 51561 - DNA, 1200 bp, Neisseria meningitidis
atgccccctgccgaagtcccttcagacggcattgtcaagaattttattaaaaacaggattcccatcatgagcacccccgccctcctcgtcctcgctgacggcagcgtattccacggcacatcaatcggttacgaaggttcgacttccggcgaagtcgtgttcaatacttcgatgaccggctatcaggaaatcctgaccgacccgtcctactgcaaacaaatcgttaccctcacctacccacacatcggcaacaccggcaccaacgccgaagatgaagaaagccgcagcgtttatgccgccggcctgattatccgcgacctgccgctcttgcacagcaacttccgcgcctccgaaagcctgcacgactatctggtacgcaacaaaaccgtcgccatcgccgacatcgatacccgccgcctgaccacgctgttgcgcgaaaaaggcgcgcaaggcggcgcgattctgaccggcgcggatgccacaatcgaaaaagcgcaagaactcatcgccgcgttcggcagtatggtcggcaaagacttggcaaaagaagtttcctgcacggaaacttacgaatggacggaaggcgaatgggcattgggcaagggtttcgttacccctgacgaacagccttaccacgtcgtcgcctacgatttcggcgtgaaaaccaacatcctgcgtatgctcgcctcgcgcggctgccgcctgaccgtcgtccccgcccaaacgagcgcacaagacgtgttggcactcaatcccgacggcgtgttcctgtccaacggccccggcgaccccgagccttgcacctacgccatcgaagccgtgcaaaaactgatggcaagcggcaaaccgattttcggcatctgcttgggacaccagctcatcagcctcgctatcggcgcgaaaaccctgaaaatgcgcttcagccaccacggtgcgaaccaccctgtgcaagatttggacagcggcaaagtcgtcatcaccagccaaaaccacggttttgccgttgatgccgacaccctgcccgctaacgcacgcattacccacaaatccttgtttgacaacactttgcaaggcatcgagctgaccgacaaacctgtgttctgcttccaaggccaccccgaagccagccccggtccgcaagatgtcggctatttgtttgacaaattcattggcaatatgaaagcggcaaaacgggcataa

SEQ ID NO: 51562 - DNA, 963 bp, Neisseria meningitidis
atgcccagtatctctgtccgccggctgtttgacgacaaccaatacaaactgcaacttgcctgggccgccggcaattcgggtgcggacaaccgtatcggtgtagaggcggacaagcccgtcctcgccctggtcggacacctgaattttatccaccccaaccaaatccaagtggtcggtttggcagagtcggaatatctgaaccgtctcgaatcgggggaaacgggttatcagttcggagacctgttcgatatttccatgtctttggtcattgtggcaaacggcttgccggtttccccgggactgcgcgactattgtcataaaaacgatattccactgctgacttccaaactcgaaagcccctatctgatggacgtgttgcggatttacctgcaacgcaccttggcggcatcgtccgtcaaacacggcgtatttctcgatgtgtttgaaatcggcgtgctgattaccgggcattccggcctgggtaagagcgaattggcattggaactgatttcgcgcggccacagcctgattgccgacgatgcggtcgagctgttccgcatcggcccggaaacgctggaagggcgttgttcgcctatgctgcgcgattttttggaagtgcgcggcttggggatactcaatatccgccatattttcggcgaaacttccatccgccccaaaaaaatcctgcaactcattatcaatttagtcgaggcggacgacgagtatatgaagcagcttgaccggttgagcatccgcaccgaaaccgaatccatcctcaacgtcaacgtccgttcggttacgctgcccgtcgccgtcggacgcaacctcgccgttttggttgaggcggcggtacgcaattacattttgcagttgcgcggtaaggacagtacgcgcgaatttttggaacgccatcagacgcaacttaaagaaaacgaacaacacaatgaagatcgtcctgattag

SEQ ID NO: 51563 - DNA, 855 bp, Neisseria meningitidis
gtgggtcaaagcggcgagttgttttgtttcggacagatgcccgtatggaaggcggaaaacctgccggaagttttgttgtcgggctattcgtccgaaggaggggaatgggtctgcctgaatgtgttgcagggcgatgtcgaagtccgcacgcaggacggggcggcggaggtttggtcggcagaaagcggcgattgcgtgtttgcgccgcagcaggtgttttcggtcaaaccgaaaacggacgatgccgaaatccgtttgtcgatgtattgtgtggccgaagattatttccacaaaaaatacggcatgagtgccacgcattctgcagtggcggcggctcaggatatcgtacctgcgggcagggcgctcgatatgggctgcgggcaggggcgcaacgcgctgtttctcggtttgaaggggtttgaagttactgcagtcgatcacaatcccgccgccttggcaaacgtggcggagctggcagaggcggagggtttgaacgtccgcacgctggaatatgatttgaacgccgccgccttgcagggcgagtttgattatattgtggcaacagtggtgctgatgttcctgatgccgcagcgcgtacccgacgtgattgccgatatgcaggcgcatacggcggcgggcgggtacaacttgattgtatcggcaatggatacggcggatttcccctgcccgatgccgttccccttcaaatttaaagagggagaactgaaggattattatcgggattgggagctggtcgaatataaagaagaattgggcgcgatgcacgccaaagacgaaaacggcaatccgatacggtttaaatttgtaaccatgctggcgaaaaggcctgaataa

SEQ ID NO: 51564 - DNA, 816 bp, Neisseria meningitidis; identical to SEQ ID NO: 38138

SEQ ID NO: 51565 - DNA, 465 bp, Neisseria meningitidis; identical to SEQ ID NO: 36919

SEQ ID NO: 51566 - DNA, 2274 bp, Neisseria meningitidis; identical to SEQ ID NO: 47948

SEQ ID NO: 51567 - DNA, 1671 bp, Neisseria meningitidis
atggaaaaaatctggttagacagctacgagaagggcgtcagtgccgaaatcgacatcacgcaatacaattccgtcagcgacgtattccgccaaagcgtggaaaaatttgccgaccaacctgcttttcaaaacatgggtaagacgctgacttatgccgaaaccggcaaactggcgaccgatttcgcctcttatctgcaaaacgtcctcaagctgccgcgcggcgaacgtgttgccattatgatgccgaacgtattgcaatacccgattgcccttttcggcattttgcaggcaggtttggtagcggtgaacaccaatccgctctataccccgcgcgagctggagcatcagttgaaagacagcggcgcgaccgccatcatcgttttggaaaatttcgccaacacgctggatctggtgctgccgcgcacgcagatcaaacacgtcatcgtcgcctctgtcggcgaaatgttcgggctgcttaaaggttcgctgatcaatttcatcatccggaaaatcaagaaaatggtgcccgaataccgtattcgggaaaccgtttcctttcagacggcattgaaagagggggcgaagcacgttttccaacctgtcgcattaaaccgcgaagataccgcgctgttgcaatacacgggcggcacgacaggtgttgccaaaggggcggtgctgagtcacggcaacatctgcgccaatatgcttcaggcaaaagaatggattaaaaaccagttgcgcgagggcaaagaaaccgttatcgccgccctgccgctgtatcatatttttgccttaaccgtgaatctgatgatttttgccaatgccggctcgaaaatcatcctgattaccaacccgcgcgatatgaaaggctttatcggagaactgaaaaaacagcgggttaatgtatttatcggcgtgaacacgctgtttaacgcgatggttaaccgtcctgattttgccgaagtcgatttttcagaattgcggctgactttgggcggcggtatggcgacccaaaaagccgttgccgaaaaatggaaaaaaatcaccggcacgcccatcgtcgaagcctacggtctgaccgaagccagccccggcgtgtgctgcaaccccttaaacatcgaatcatacagcggcagcatcggtttgcccgtctcgtccaccgaagtcgaactgcgcgacgcaaacggcaaagaagtccccgtcgggcagccgggcgaattgtgggtaaaaggccctcaagtgatgcaaggctactggaaccgtcccgaagaaaccgctaaagccatagacgcgcgcggtttcttggaaaccggcgatattgccgtcatggacgaaaaaggctggttgaagctggtcgatcgtaagaaagacctcgtcgtcgtttccggattcaatgtttatccgaacgaaatcgaggaagtcatcgcgcatcacggcaaagtgatggaagtcgcctgtatcggcgttcccgacgaaaaaaccggagaagccctaaaagtatttgtcgtcaaaaaagacccgtcattgaccaaagaagaacttatcgccttttgccgcaccgaattaaccgcatataaagtaccgaaaaacattgaattccgtgaggaactgccaaaatccaacgtcggtaaaattctgcgtcgcgagttgcgccaaagtaccgggaaataa

SEQ ID NO: 51568 - DNA, 1170 bp, Neisseria meningitidis
atgacagcacataaaatcctgcccgtcctgctttccatcatcttaggcgtttctcacgcaacggccgcatcgcccgcgcccaacaaaccggcggtacacgccgcccccacgttccaaacacccgaaaccctcacagcggcacacatcgttatcgaccttcaaagcaaacagattttatccgccaaaaacatcaatacccctgtcgaaccggcggcactaacccaactgatgaccgcatatctggttttcaaaaacatgaaatcgggaaatatccgatctgaagaaaacttaaaaatacccgaatccgcatgggcttcagaaggaagcagaatgtttgtacgtcccggcgatacggtcagcaccgacaaactcttaaaaggcatgattgcactatccgcaaacgatgccgccctaacccttgccggccggctgggcaacggctcgattgaaaattttgtgcaacaaatgaacaaagaagcccgacgcttgggcatgaagaacactgtattcaaaaatccgacaggcttgagtagagaaggacaggtttccaccgccaaagacctcgcccagctgtctgaagcattgatgcgcgactttccggaatattacccgctgttttccatcaaatctttcaaattcaaaaatatagagcaaaacaaccgcaatatccttttatatagggacaacaatgtaaacggtctgaaagccggacacacagaaagcggcggctacaaccttgccgtgtcatactccggcaacggcaggcacatccttgtcatcacattgggttcggaatcggcggaaacacgcgcatcagacaacagcaagctgctgaactgggcattgcaggccttcgatacgcccaaaatatatccgaaaggcaaaaccgttgcccaaatccaaatttccggaggcagcaaaaaaaccgtccgcgcaggcttcctcaaagaagcctacatcactctgccacataaggaagcgaaaatggcagaacaaattctagaaaccatacagccgattcccgccccagtaaaaaaagggcaaattttaggaaaaatcaaaatcagacaaaacggatacaccattgccgaaaaagaaatcgtcgcactggaaaatgtaaaaaaaagaagccggtggcaaaggctttgggcgtgtctgacagggcagtaa

SEQ ID NO: 51569 - DNA, 483 bp, Neisseria meningitidis; identical to SEQ ID NO: 38977

SEQ ID NO: 51570 - DNA, 1422 bp, Neisseria meningitidis
atggacacaaaagaaatcctcggctacgcggcaggctcgatcggcagcgcggttttagccgtcatcatcctgccgctgctgtcgtggtatttccccgccgacgacatcgggcgcatcgtgctgatgcagacggcggcgggactgacggtgtcggtattgtgcctcgggctggatcaggcatacgtccgcgaatactatgccgccgccgacaaagacaccttgttcaaaaccctgttcctgccgccgctgctgtctgccgccgcgatagccgccctgctgctttcccgcccgtccctgccgtctgaaatcctgttttcgctcgacgatgccgccgccggcatcgggctggtgctgtttgaactgagcttcctgcccatccgctttctcttactggttttgcgtatggaagggcgcgcccttgccttttcgtccgcgcaactcgtgcccaagctcgccatcctgctgctgctgccgctgacggtcgggctgctgcactttccggcgaacaccgccgtcctgaccgccgtttacgcgctggcaaaccttgccgccgccgcctttttgctgtttcaaaaccgatgccgtctgaaggccgtccggcacgcaccgttttcgcccgccgtcctgcatcgcggcctgcgctacggcataccgatcgcactaagcagcatcgcctattgggggctggcatccgccgaccgtttgttcctgaaaaaatatgccggcctagaacagctcggcgtttattcgatgggtatttcgttcggcggagcggcattattgttccaaagcatcttttcaacggtctggacaccgtatattttccgcgcaatcgaagcaaacgccccgcccgcccgcctctcggcaacggcagaatccgccgccgccctgcttgcctccgccctctgcctgaccggcattttctcgcccctcgcctccctcctgctgccggaaaactacgccgccgtccggtttatcgtcgtatcgtgtatgctgccgccgctgttttgcacgctggtagaaatcagcggcatcggtttgaacgtcgtccgcaaaacgcgcccgatcgcgctcgccaccttgggcgcgctggcggcaaacctgctgctgctggggcttgccgtgccgtccggcggcgcgcgcggcgcggcggttgcctgtgccgcctcattctggctgttttttgccttcaagaccgaaagctcctgccgcctgtggcagccgctcaaacgcctgccgctttatctgcacacattgttctgcctgacctcctcggcggcctacacctgcttcggcacgccggcaaactatcccctgtttgccggcgtatgggcggcatatctggcaggctgcatcctgcgccaccggaaagatttgcacaaactgtttcattatttgaaaaaacaaggtttcccattatga

SEQ ID NO: 51571 - DNA, 573 bp, Neisseria meningitidis; identical to SEQ ID NO: 46418

SEQ ID NO: 51572 - DNA, 918 bp, Neisseria meningitidis
atgtctgtctataccagtgtttccgatgatgaaatgcgcggcttcctgagcggttacgatttgggtgaatttgtttccctgcagggcatcgcgcaggggattaccaacagcaattattttctgacgacgacttcgggacgttatgtgctgaccgtgtttgaagtgttgaaacaggaagagctgccgttttttctggagcttaaccggcatttgagtatgaagggcgtggcggttgccgcgccggttgcgcgcaaagacggccggcttgattccgttttggcgggcaagccggcttgtttggttgcctgcctgaaaggttcggataccgcgctgccgacggctgagcagtgtttccataccggcgcgatgttggcgaaaatgcaccttgccgccgccgatttccctttggaaatggaaaacccgcgttacaatgcgtggtggacggaggcgtgcgcccggctgctgcccgtcctgtcgcaagacgatgccgcgctgctgtgttccgaaatcgatgcgttaaaggacaatctcggcaatcatctgccttcgggcatcatccatgccgatttgtttaaagacaatgtgttgcttgacggcggtcaggtatcgggtttcatcgatttctattatgcctgccggggcaattttatgtatgacttggcgattgcggtcaacgattgggcaaggacggcggacaataagttggatgaggcgttgaaaaaggtgtttatcggcggttatgagggcgtgcgccccttgagtgccgaagaaaaggcgtatttcccgaccgcccaacgtgccggctgcatccgtttttgggtgtcgcgcctgttggactttcattttccgcaggcgggcgagatgacgtttatcaaagacccgaacgcgttccgcaacctgctgttgagtttggattga

SEQ ID NO: 51573 - DNA, 2664 bp, Neisseria meningitidis
gtgagcattagcgcaccgtatgccaatgagaacagtcgcatcctgctcagcaccacggatatcagttcggaaaacggcaaaatcaaaattcaatcttacggtgaccaatattactatgcgagacagagcgaactctatacctttgaacgccgcagctacaaaaccggcaaatggtacaaccgcaaacacattaccgaagtcaaagaacacaaaaacgccaagcccgacgcagtaaccctcagcgcatcccaaggcatcgacatcaaatctggtggcagcatcgacgcctacgccaccgcattcgatgcccccaaaggcagcattaacatcgaagccgggcggaaattgacactctatgccgtagaagagctcaactacgacaaactagacagccaaaaaaggcgcagatttctcggcatcagctacagcaaagcacacgacaccaccacccaagtcatgaaaaccgcgctgccctcaagggtagttgcagaatcagccaacctccaatcgggctgggataccaaactgcaaggcacacagtttgaaaccacactgggtggcgcaaccatacgcgcaggcgtaggtgagcaggcacgggcagatgccaagattatcctcgaaggcatcaaaaccacgatccacaacgaaaccgtgagcagcagcaaatctgctctatggcaaaaacaggcaggacggggcagtaacatcgaaaccttgcaattgccgagtttcaccggtcccgttgcgcccgtactgtccgcacccggcggttacattgtcgacatccccaaaggcaatctgaaaaccgaaatcgaaaagctggccaaacagcccgaatacgcctacctgaaacagcttcagacggccaagaacgtcgattggaaacaggtgcagctggcctacgacaaatgggactataaacaggaaggcttgaccggagccggtgcagcgattgtggtgattattgtaaccgctctaacttatggatacggagcggctgcagcgggtagcgtaactgccgcaggaagtagtacagccgcagctgcaacaacgacagcggcagcaactaccactgtttctactgcagctgccatgcaaaccgcagctttagcctccttgtatagccaagcagctgtagccatcatcaataataaaggcgatgtaggcaaagcattaaaagatctcggcaccagtgatacggtcaagcagattgttacttccgcactgacggcgggtgcattaaaccagatgggcgcagatattgcccaattgaacagcaaggtaagaaccgaactgttcagcagtacgggcaatcaaaccattgccaaccttggaggcagattggccaccaacctcagcaatgcaggtatctcagctggtatcaataccgccgttaacggcggcagcttgaaagacaacttaggcaatgccgcattgggagcattggttaatagcttccaaggggaagccgccagcaaaatcaaaacaaccttcagcgacgattatgttgccaaacagttcgcccacgctttggcgggttgtgttagcggactggtacagggaaaatgtaaagatggggcaattggcgcagcagttggggaaatcgtagctgaatccatacttggcggcagaaaccctgctacactcagcgatgcagaaaagcataaagttatcagttactcgaagattattgcgggcagcgtggcggcactcaacggcggcgatgtgaatactgcggcgaatgcggctgaggtagctgtggtgaataatgctttgaattttgacagtacccctaccaatgcgaaaaagcatcaaccgcagaagcccgacaaaaccgcactggaaaaaatcatccaaagtattatgcctgcacatgcggcaggtgcgatgactaatccgcaggataaggatgctgccatttggataagcaatatccgtaatggcatcacaggcccgattgtgattaccagctatggagtttatgcagcaggttggacagctccgctgatcggtacagctggtaaagcagctatcagcacctgtatggctaatccttctggttgtactgtcatggttacgcaggctgctgaagcgggcgcgggaatcgtcacgggtgcggtaacggtaggcaacgcttgggaagctccagtaggagcgttgtcgaaagcgaaggcggctaagcaagctgctcctaaagaaacaataaacaatttggcaaatttagccaaagcagaacagcagattttattccgtattgcccaacgcgatacgcaactggatgcatggaagacgggatttaacaatagagtaaggaaaggagcaggcttgcttgatgcaagtaatattccgataaccattaacggaaaaaccatcaaacctgtacaagccataagcttaaagggagcacccgtttacagcggcgtaagcgaacaggagatttttgcgctttatcggcagatgactggccagaatccgaattttagagttttgcctgacggaagattagcaaatggcattatcagtactggagaatgggcaggaacaaaaattgcattaagaaatttttcaaaaacagagaattcaactcaagcacgatggacattagatttgcagaatcctccatcatttattaaaggtactaaattggagcttaaattccaataa

SEQ ID NO: 51574 - DNA, 1332 bp, Neisseria meningitidis
atgagcggatggcataccttattgcaggacgcatcttacaagggcgtcggctttgatattgaggtggtggacgagagcaacggcaaggcattggccgagcatgcgcggccgtttgtgcagggtatcgaccttgaagacatgggcacgaccgggcggcaggtgcagattaatgcggtgttttggggcaagggctatgcaggccgtctgaaaaagctgctggatgcgctggagcagccgggcggcggcgtgctggtgcaccctgtttgggggcggatgcacaacatgattgcggcatcatggagctaccgacatgaggccgattatgtggattatgcgggcatcgatattactttccgcgaggcggccgaagcgcaggaaatctttgtttttgaaaacgcctttttggtcgagcttgaggcgttgattgctgatatcgacacctaccgcgaggcggctatcggctttgttgatgcggtgttggcggtggatgcgggcgtatcggctttatggggcagcgcgctgggcatttggagtgcggcatcgggtacgtttggcgcggtgcgccgtttgtttgatttggacaaaattgcctttcccgatcggggcggatacagcgcagcggcgtttaaaaacggctcggccaagctgtttgcggatatatcggtcatggtagatactggcatacgccgtgaggcgggtttggccgataatgccatgcaccatgccggttggtcgccgcgacagcggtttgacggggctgcggctgttgccgaccgtgccgccgctatccctgataatttgctgaccggccgcttttcagacggcctgcaaaaccgcctgaaccgtttaaccgccaaacaggtgcagccggtagcgcaggcggtgcgcctgttatccacgtcatcgctgttgtcggtggcaacggcattaatcgaggcgcatggcgaagagatgaccgcgcccgatttgattgaggttaaccgcgccatgcgccgccgtatgcaggccgagattgccgccttacgggcggtgcagacggctgctgccgagtctggtgggctgacggccaacgccgtgtataccgaggcttaccaaacggcagaatccctgcgcgcggcggcaggccgtctgaatgcgttggttgcggcggtcatcaaccaaaagccgccgctgattgtgcgccaagccccaatcgacggtacgatacaccaaatcgcccacgagttttacggcgatatagcccgcgcagcagagctggtgcggctcaatccccatatccaccaccccgcgtttatcaagcgcggcactttggtcaacagctatgcaaaataa

SEQ ID NO: 51575 - DNA, 2016 bp, Neisseria meningitidis
atgatgaaactcaatccccaacagctcgaagccgtccgctacctcggcggcccactgctcgtccttgccggtgcaggcagcggcaaaaccggcgtgattactcaaaaaattaagcatttgattgtcaatgtcggctacctgccgcataccgttgccgcaattacctttaccaacaaagccgccgcggaaatgcaggagcgcgtcgccaaaatgctgcccaagtcgcaaacgcgcgggctgacaatttgcacgttccattctttgggcatgaagattttgcgcgaagaggcgaaccatatcggttacaaaaaaaacttctccattctcgattctaccgacagcgcgaaaatcatcggcgaactcttaggcggtacgggcaaagaagccgtattcaaggcgcagcaccagatttccttgtggaaaaacgatttaaaaacgcctgaagatgtcgttcagacggcatcgaacatttgggaacaacaaaccgcacgcgtgtatgcgagctatcaggaaaccttacaaagctatcaggcagtggacttcgacgacttgatccgcctgcctgccgtgctgttgcagcaaaacagcgaagtgcgcaacaaatggcagcggcggctgcgttatctgctggttgacgaatgccaagatacgaatacctgccaatttacgttgatgaaacttctgaccggcgcggaaggtatgtttaccgccgtcggcgacgacgaccagtccatctacgcatggcgcggcgcgaacatggaaaacctgcgcaaaatgcaggaaaactatccgcagatgaaggtcatcaaactggagcaaaactaccgctccaccgcgcggattctcaaaatcgccaacaaagtcatcgagaacaaccccaagctgttcaccaaaaaactttggtcgaaattgggcgaaggcgagcccgtcaaagtcgttgcctgccaaaacgagcagcacgaagccgactgggtcgtcagccaaatcgtcaaacaaaaactcatcggcggcgacaaaacccaatatgccgatttcgccgtgttgtaccggggaaagcatcaggcgaggattttcgaggaagcattgcgcggcgcgcgcatcccctaccgtctctccggcggacaaagctttttcgacaaagccgaaatcaaagacgtgttgtcttatgtgcggctgcttgccaaccccaacgacgatcccgcctttctgcgtgccgttaccacgcccaaacgcggcatcggcgatgtaacgctgggcaagctcaacacttacgcgcacgaacacgaatgcagcctgtatgaagccgcgcaaaacgaagaagccctcgccacgctgaacaataccaaccgccaacacctgcaagcctttatggatatgttcggcagttaccgtgccaaagccgaaaccggcgaagcgggcgagttcatcaacagcctgctcgaagaaatcgactatgaaaaccacctgcttgccagtgaagaaggcaaagctggcgaaatcaaatggcgcaacgtcggcgatttggtatcatggtttgcgcgaaaaggcggggaagacggcaaaaacatcatcgaactcgcccaaaccgtcgccttgatgacgcttttggaaggaaaagacgaagaagaaaccgatgccgtctcgctatccacgctacacgccgccaaaggtttggagtatccgtatgttttccttgtcggttgcgaagaaggcgttttgccgcacaacgacagcatcgaagaaggcaacgtcgaagaagaacgccgcctgatgtacgtcggcatcacccgcgccaaacgccaactcacactgacccactgcgtcaaacgcaaaaaacaaggcacatggcagttccccgaacccagccgattcatagacgaaatgccgcaggaagatttgaaaatcctgggtcgcaaaggcggcgaaccgattgtcagcaaagaagaaggcagacgcaaccttgccgatataatcggaaggctcgacagcatgaaaaaaggcggtccggaggattaa

SEQ ID NO: 51576 - DNA, 726 bp, Neisseria meningitidis
atgagcatcattgtcgaaaacctgaccgtcagctaccgccgccgtcctgccgtacaccacgttgacattacttttgaagaacatagtatgtgggcggttttcggtcccaacggcgcagggaaatccacctttctcaaatccttaatgggattgcagcctatcgatacgggcagcatccggctggacggattgacccgtcagaacattgcctaccttccccagcagtccgacatcgaccgctcgcagcctatgaccgttttcgacttggcggcaatggggctatggtatgaaatcggttttttcagaggaataaatgccgttcaaaaacaacgcgttcacgaatctttggaacgcgtcgggatgcggcagtttgccggccgccaaattgcccacctctcaaacggacaattccaacgcgtcctgtttgcccgaatgctggttcaaaacgccaaattcctgcttttggacgaacctttcaatgccgttgatgcacggacaacctatgagcttctcgacgtattgcagaaatgccattgcggcggacacgctatcattgccgtactgcacgattacgaacaagtccgtgcctactttcccagtaccctgctgctcgcccgagaaaaaattgcggcaggcgcaaccgagaccattctgacagaaccctacctcgcccaagccaacgccaaaatgcagcaacaggaaagccccgactggtgcgcctcataa

SEQ ID NO: 51577 - DNA, 699 bp, Neisseria meningitidis
atgaaatccagacaccttgccctcggcgttgccgccctgttcgcccttgccgcgtgcgacagcaaagtccaaaccagcgtccccgccgacagcgcgcctgccgcttcggcagccgccgccccggcagggctggtcgaagggcaaaactataccgtccttgccaacccgattccccaacagcaggcaggcaaagtcgaagtccttgagtttttcggctatttctgtccgcactgcgcccacctcgaacctgttttaagcaaacacgccaagtcttttaaagacgatatgtacctgcgtaccgaacacgtcgtctggcagaaagaaatgctgacgctggcacgcctcgccgccgccgtcgatatggctgccgccgacagcaaagatgtggcgaacagccatattttcgatgcgatggttaatcagaaaattaagctgcaagagccggaagtcctcaaaaaatggctgggcgaacaaaccgcctttgacggcaaaaaagtccttgccgcttacgaatctcccgaaagccaggcgcgcgccgacaaaatgcaggagctgaccgaaaccttccaaatcgacggtacgcccacggttatcgtcggcggtaaatataaagtcgaatttgccgactgggagtccggtatgaacaccatcgaccttttggcggacaaagtacgcgaagaacaaaaagccgcgcagtaa

SEQ ID NO: 51578 - DNA, 726 bp, Neisseria meningitidis
atgagtgagggaatggtgtctcctgttttgtatttgattcctacgcctttgggtacgcccgatacgccgtgcctgttgccgcatgatcaacgggcggttgtcgggctgacggattttgtcgtggaagcggaaaaaacggcgcgcgcgcatttgaaacatttgggcgtgacaatgcctatccgcgaactgaatttgcaaacgctgaacgaacacacggatttgaagactttgccggaattgctaaaacctttgcaagaagggcgcagtatgggcattgtcagcgaggcgggttgcccggctgtggctgatccgggtgcgaatttggtggcattggcgcataaacacggttttgaagtacggcctttggtcggtccgtccagcttgttgctggcgctgatggcttcgggtgcgaatgggcagaactttgcgtttaagggttatttgccgtctgaaaaaaatgagcggattcagagtttgaaggctttggaacaacgttcgcgccagcagaatgaaacgcagctgtttatcgaaacgccgtatcgcaacgatgtgttgttggcggatgcggtggaaaacctgcatcctgaaacgcgcttgtgcacggctacggatttgacgttgccgactcagtcggtggtcagtaaaacggttgcggattggcgcaggatgaaggaaatgcccaatctgaaaaaacgcccgacgatttttgtgatgtatgcaggttga

SEQ ID NO: 51579 - DNA, 444 bp, Neisseria meningitidis; identical to SEQ ID NO: 45126

SEQ ID NO: 51580 - DNA, 1197 bp, Neisseria meningitidis; identical to SEQ ID NO: 42954

SEQ ID NO: 51581 - DNA, 693 bp, Neisseria meningitidis
atgaccgcctttgtccacaccctttcagacggcatggaactgaccgtcgaaatcaagcgccgtgccaagaaaaacctgattatccgccccgccggcacacataccgtccgcatcagcgtcccaccctgcttctccgtctccgctctaaaccgctggctgtatgaaaacgaagccgtcctgcggcaaacactggcgaaaacaccgccgccgcaaactgccgaaaaccggctgcccgaatccatcctcttccacggcagacagcttgcccctaccgcccatcaagacacgcaaatcctgctgatgccgtctgaaatccgtgttcccgaaggcgcacccgaaaaacagcttgcgctgctgcgggactttttggaacggcaggcgcacagttacctgattccccgcctcgaacgccacgcccgcaccacacaactgttccccgcctcctcctcgctgacctctgccaaaaccttctggggcgtgtgccgcaaaaccacaggcatacgcctcaactggcggctggtcggcgcaccggaatacgttgccgactatgtctgcatacacgaactctgccacctcgcccacgccgaccacagccgcgcgttctgggcactgacccgccgcttcgcaccctacacgcccgaagcgaaacagtggctcaaaatccacggcagggaacttttcgccttgggctga

SEQ ID NO: 51582 - DNA, 828 bp, Neisseria meningitidis
atgcctgaattgccggaagtggaaacgacgttgcgcggcatcgcgccgcatattgaagggaaaacggtggaagccgtggtattgcgccaattgaagctgcgctggcagattaatcccgatttgggggagattttgtccggccggcaggtgttgtcctgcggcaggagggcgaaatacctgcttatccgctttcaaacgggcgtgctgctgattcacttggggatgtcgggcagcttgcggatttttacgccgtcggacggacgtatcggcaggccggacagacacgatcacgtcgatattgtgttttcagacggcacggtcatgcgttaccgcgatccgagaaagttcggcgcgatactttggtatgagggaatcgaagaacatcatccgctgttggaaaaactggggccggagcctttgtcggaggcattttgcacggattatctgtatgtgaggctgaaagcgcagaaacgcgcggtcaaacttgccctgatggacaatgcggtcgtggtcggtgtgggcaacatttatgccaacgagagcctgtttagggcgggcatttcgccccaccgtcctgccaaccgcctgaaaaagaaagagtgcgcgcttttggttgaaaccgtcaaagcggtgttgcagcgcgccattgaaacgggcggcagcaccttgagggattttgtggacagtgacggcaaaagcggctacttccaacaggaatatacggtgtacgggcggcacaatcagccgtgcccccggtgcggcggtttggttgtgaaagaaactttggggcagcgcggcacgttttattgcccgaactgtcagaaatag

SEQ ID NO: 51583 - DNA, 291 bp, Neisseria meningitidis; identical to SEQ ID NO: 39715

SEQ ID NO: 51584 - DNA, 1182 bp, Neisseria meningitidis
atgattattgatgtaaaagtacctatgctgtctgaaagcgtatctgaaggcacgctcttggaatggaagaaaaaagttggcgaagcagttgcccgtgacgaaatcctgatcgatatcgaaacggacaaagtggttttggaagtaccttctccacaagccggcgtattggttgaaatcgtagcgcaagacggtgaaaccgttgttgccgaccaagttttggcacgtatcgataccgctgctactgccgctgctgaagcacctgccgccgctcctgccgaagcagccccggccgccgctcctgctgccgcgcaaaacaacgccgctatgcctgccgccgccaaactggctgccgaaaccggtgttgacgtgaacgcattgcaaggttccggccgtgacggtcgcgtattgaaagaagacgtacaaaatgccgctgccaaacctgccgcagccgctgctcctgccgttgcacttcctgccggcgcgcgtcccgaagaacgcgtaccgatgagccgcctgcgtgcccgtgttgcagaacgcctcctggcttcccaacaagaaaacgccattctgactacattcaacgaagtcaacatgaaaccaatcatggacttgcgtgcgaagtacaaagaaaaattcgagaaagaacacggcgtaaaattgggctttatgtccttcttcgttaaagccgctgtcgccgccctgaaaaaatacccggttgtgaatgcttctgttgacggcaaagacatcgtgtaccacggctacttcgacatcggtatcgcgattggcagcccacgcggtttggttgtgccaatcctgcgcgatgccgaccaaatgagcattgccgacatcgaacaagcaattgttgattacgcgaaaaaagccaaagacggcaaaatcgctatcgaagatctgaccggcggtacattcagtattaccaacggcggtactttcggttctatgatgtccaccccgatcatcaatccgcctcaatctgcgattttgggtatgcacgccactaaagagcgcgctgtggttgaaaacggccaagttgttgtccgtccaatgatgtatctggctctgtcttacgaccaccgtatcatcgatggtcgcgaagctgtattgaccttggtagccattaaagatgcgttggaagacccggcccgcctgttgttggatctgtaa

SEQ ID NO: 51585 - DNA, 198 bp, Neisseria meningitidis; identical to SEQ ID NO: 43079

SEQ ID NO: 51586 - DNA, 1170 bp, Neisseria meningitidis; identical to SEQ ID NO: 39478

SEQ ID NO: 51587 - DNA, 249 bp, Neisseria meningitidis; identical to SEQ ID NO: 38918

SEQ ID NO: 51588 - DNA, 786 bp, Neisseria meningitidis
atgaatccgtttttgaatacagcctttaaagccgcccgccgtgccggtcagatgatgatacgcgccgcgggcaatctcgatgccgtcaaaaccgacagcaaagccttcaacgattttgtttccgatgttgaccgcaattccgaaatcatcctggttgaggctttgaaagaagcctatccgcaccacaaaatcacttgtgaagaaagcggctcccacggcaaagccgcagccgagtacgaatggattatcgatccgctcgacggcacgaccaatttccttcacggtcatccccaatacgccatctctatggcgctgctgcacaaaggcgtgttgcaagaagctttggtttacgcccccgaacgcaacgacgtatatatggcttcgcgtggcaaaggcgcgttgctcaacgaccgccgcatccgcgtttccaaccgcatcgaactgaaccgctgcctgattggtaccggcttccctgttgtcgatcaaagcatgatggacaagtatctggcgattttgaaagatttcttggcaaaaaccgccggcggccgtcgtgaaggtgcggcttctttggatttgtgcgccgtagcaacaggacgttttgacggctttttcgagtttaacctcaaaccgtgggacattgccgccggtgcattgattgttcaggaagcgggcggtatcgtaaccgatatgtcgggtgaagacggctggctggaaagcggcgatattgtggctgccaatcccaaagtgctggcgcaaatgttgaaaatcatttccgcacacgtttaa

SEQ ID NO: 51589 - DNA, 1389 bp, Neisseria meningitidis
atgtctattaaatttgccgatttgaaccttgataaaaacattttgtccgccgtcagcagcgagggttacgaaagcccgacgccgattcaggcgcaggcgattccgtttgctttggaaggccgcgacatcatggcttcggcgcaaaccggctccggcaaaaccgccgcctttctgttaccgactttgcagcgactgaccaaacgcagcgaaaaaccgggcaaaggcccgcgtgctttggtgttgaccccgacccgcgaattggcggcacaagtggaaaaaaacgcgctggcgtatgccaaaaatatgcgctggttccgtaccgtcagcatcgtcggcggcgcatcgttcggctaccaaacccgcgccctgagcaaaccggtcgatctgattgtcgccacgccgggccgcctgatggacctgatgcaaagcggcaaagttgattttgaacgtttggaagtgctgattttggacgaagccgaccgtatgttggatatgggctttatcgacgacatcgaaaccatcgtcgaagccaccccgaccgaccgtcagactttattgttctccgccacttgggacggcgcggtcggcaaactggcacgcaaactgaccaaagaccctgaaatcatcgaagtcgaacgcgtggacgaccaaggcaaaatcgaagaacaactgctgtactgcgacgatatgcgtcacaaaaaccgcctgctcgaccacatcctgcgcgatgccaatatcgatcaatgcgtgattttcacgtccaccaaagcgatgaccgaagtcatcgcggatgaattgtacgaaaaaggtttcgccgccaactgcctgcacggcgacatgccgcagggctggcgcaaccgcacgctgatggatttacgcaaaggccgctgcaaaattttggttgccaccgacgttgccgcacgcggtatcgacgtaccgaccattacccacgtcatcaactacgacctgccgaaacaggcggaagactacgtccaccgcatcgggcgcaccggccgcgcaggccgcacgggtattgcgattacgtttgccgaagtgaacgaatacgtcaaagtccacaaaatcgaaaaatacattaaccgcaaactgcccgaactgaccatcgaaggcatggaaccgacccgcaaacgcaaatccgcaggcggtaagccaaaaggcaaaggcggctggggcgataggaaatccggcggccggcgcggcgatcataaaccgggcaaagaaggcttcggcggcaaaacgcgcggcgaaggtttcaagaaagaaggctttaagaaagacggtttcaaaaaaaccggcgaaggcttcaaaggcaaacgcaaagccggcgattcttttgcaggcagaggcgaacgccgttacaaagaccgctaa

SEQ ID NO: 51590 - DNA, 678 bp, Neisseria meningitidis
atgcaagctgattttaaccgtcccgtcctggccatcgataccggtacttcctatttgtcgctcgcgctgcgcgccgacggcgaaacccacctgttccatcaagaggccggcagccgccaatccgaactgatcctgccggaaatccgcacgctgtttcacgatgcgggcattaccgccgccgatttgggggcgattgtttatgcgaaaggccccggcgcgtttaccggactgcgtatcggtatcggcgtggcgcaaggtttggcaacgccgtttgatacgcctttaatcggcatccccacgctcgatgccgccgcctcgctgccgccgccgcaaagctgcatactcgccgctgcggacgcgcgtatgggcgaagtgttttatgcgtggttcgacacgctgaaccgccgccgtttgagcggttatcaagtcggtagggcggcagacatccggctgccggagggatgtgccttttcagacggcatcggcaatgcgttcgcgctggaaaaccgtccgcccttctcaggcaaacccgatatgccgactgccgccgattttctcaatctggcggaagaaggcggttttcccgccgtcgctgcggcacacgccgagctgctctacgtccgcaacaaaatcgccttgactgccaaagaacaggcggaacggagggcgctcctgtga

SEQ ID NO: 51591 - DNA, 507 bp, Neisseria meningitidis
gtgatccatcatgagctgtcgcgcatgagccttcaaagtgttcattttttcgtcctttctcgtgatgatttagggtgtttgtgtttcgatgtggaaattataggaagaattcttcctattttgcaaggaatatttatgaataactcttccttttttggcaaccgattgaaagaagaaagaaaaaaattaaaaatgactcaagctgaaatcgctgaaaaatgtggggtttcaggaagaatgtggggggattatgaacgtggcatcagccagccaaaagcggaacttttcttccaatttgaaaaggtgggtatagacgttcaatacgtcatgcacggcagacgcggcgaaacagcggtcatgccgtctgaaaccctgaacgccgaagaacaagaactgctggtcttgttccgcgaggcggcagctgccgaccgtgaaatgattctgatggttgcgcgcagggcagagaaaaaagcccaaactgcgcttggtaaagtgagtaatggataa

SEQ ID NO: 51592 - DNA, 408 bp, Neisseria meningitidis
atgactgtatggtttgttgccgctgttgccgtcttaatcatcgaattattgacgggaacggtttatcttttggttgtcagcgcggctttggcgggttcgggcattgcttacgggctgaccggcagcacgcctgccgccgtcttgaccgccgctctgctttccgcgctgggtatttggttcgtacacgccaaaaccgccgtgggaaaagttgaaacggattcatatcaggatttggatgccggacaatatgtcgaaatcctccgacacacaggcggcaaccgttacgaagttttttatcgcggtacgcactggcaggctcaaaatacggggcaagaagagcttgaaccaggaacgcgcgccctaatcgtccgcaaggaaggcaaccttcttatcatcgcaaacccttaa

SEQ ID NO: 51593 - DNA, 696 bp, Neisseria meningitidis; identical to SEQ ID NO: 39886

SEQ ID NO: 51594 - DNA, 405 bp, Neisseria meningitidis
atgaccgcccaaccctgccccatctgcacggcacaagatgaagatattttgctgcaaacccccaagctgcgcgtcatcgccgtccataacgacagcggttcgcctgcattctgccgcgtcatttggcgtaagcatattgccgaaatgaccgacctttcggcagcggaacgcggcgaattgatggaaatggtgtacaaagtcgaagccgctatgcgccaagtgtttcaacctgccaagattaacctcgccagcttgggcaatgtcgtgccgcacctgcattggcatattatcgcccgctttgaaaacgatgcgtccttccccgcgccgatttgggcaaaccccatccggaaacacggtatgaccctgccgcaagattggacggaacagcttaaaaagctgctttaa

SEQ ID NO: 51595 - DNA, 936 bp, Neisseria meningitidis
atggacatcgtatttgcggcagacgacaactatgccgcctatctttgcgttgcggcaaaaagcgtggaagcggcccatcccgatacggaaatcaggttccacgtcctcgatgccggcatcagtgaggcaaaccgggcggcggttgccgccaatttgcgggggggggggggtaatatccgctttatagacgtaaaccccgaagatttcgccggcttccccttaaacatcaggcacatttccattacgacttatgcccgcctgaaattgggcgaatacattgccgattgcgataaagtcctgtatctggatatagacgtattggtcagggacagcctgacgcccttatgggataccgatttgggcgataactggcttggcgcgtgcattgatttgtttgtcgaaaggcaggaaggctacaaacaaaaaatcggtatggcggacggcgaatattatttcaatgccggcgtattgctgatcaacctgaaaaagtggcggcggcacgatattttcaaaatgtcctgcgaatgggtggaacaatacaaggacgtgatgcaatatcaggatcaggacattttgaacgggctgtttaaaggcggggtgtgttatgcgaacagccgtttcaactttatgccgaccaattatgcctttatggcgaacaggtttgcgtcccgccataccgacccgctttaccgcgaccgtaccaatacggtgatgcccgtcgccgtcagccattattgcggcccggcaaagccgtggcacagggactgcaccgcgtggggtgcggaacgtttcacagagttggcgggcagcctgacgaccgttcccgaagaatggcgcggcaaacttgccgtcccgcaccgtatgttttcgacaaagcgtatgcttcaaagatggcgcagaaagctgtctgccagattcttacgcaagatttattga

SEQ ID NO: 51596 - DNA, 567 bp, Neisseria meningitidis
atgctggttcatcccgaagctatgagtgtcggcgcgcttgccgacaaaatccgcaaaatcgaaaactggccgcaaaaaggcatcttattccacgacatcacgcccgtccttcaaagcgcggaatacttccgccttttggttgatttattggtttaccgctatatggatcagaaaatcgacatcgttgccggtttggacgcgcgcggcttcattatcggcgcggcactcgcctaccagctcaacgtcggtttcgtccccatccgcaaaaaaggcaagctgccttttgaaaccgtatcgcaaagctacgcgctcgaatacggggaagctgcggtggaaatccacaccgatgccgtcaaactcggttcgcgcgtgctgctggtcgatgatttggttgccacgggcggcacgatgcttgccggactggaactgatccgcaaactcggcggagaaattgtcgaagccgccgccattttggaatttaccgaccttcaaggcggcaagaatatccgtgcaagcggcgcgcccttatttaccctgcttcaaaacgaaggctgtatgaagggctga

SEQ ID NO: 51597 - DNA, 360 bp, Neisseria meningitidis
ttgagtgatcgggcttaccctgaaaaattttatatttacggtgaaaatcaagagcgaaataccaatcatttatttggtgataatggcattattgatgggacggatcgactgaacaaaatgggttatttccctgaaaacatcccagtttggctcgcagatcacccccgtgcttgcgtggattatctttacacagcagtgttacaaactggctcaatcggtcgggtgattttagatgattggtttccaagcgatgaagacaagcaatcagtttatgacttacttaaccaaatcgaaccgcacttgaatactcaagaatgggagaatttacagctatggaaacgcaaaaacccaataatgtaa

SEQ ID NO: 51598 - DNA, 375 bp, Neisseria meningitidis; identical to SEQ ID NO: 38650

SEQ ID NO: 51599 - DNA, 441 bp, Neisseria meningitidis; identical to SEQ ID NO: 47081

SEQ ID NO: 51600 - DNA, 1302 bp, Neisseria meningitidis
atgccgtctgaaaccgcccgccccctttatgcggacacgtgcgccgcacacacgctcgtctggttccgccaaaacctccgcatccgcgacaacgccgccttatgcgccgccgttgccgaaggtttgcccgttatcggtatttggattgacgatgccgaaacagacaaccctcgccgcgccgcgttctaccgccaatccgccgccgaactcgcccaagggcttgcagggcgcggcatcccgctctacacggcggcatcgcctgccgagctcgtccggctcgccgtccgcctcaatatccgcgccgtcatcgccgacgaatcccatacttttgccgacaaactcgccgacaacgccctttggcatgaattgaacaaacacggcatcgcgttaaccttcgtcaatgaccgcgccgttttcggcaaaaccgacctgatacccgacggcggcacggcacacaccgatttcgaccgctaccgcgaagtatggctcgaccgcttttccaagcagccccccgccggtccggacctattcgcggcataccgccaacccttccccgaaaacctttccgccccgccgcctgccgccctttcagacggcatcttcctgccgcaaaacagcggcgaaacggcggcttggcggcagtggcggcggtttctcgaacaggcggattcctactccgttttaaaggatttcccctcgcgcaaacacacttcgctgatgggcgcgtatttgagtgccggctgcatctcgccgcgcctgctcgcgcgggaaagcctcgaacgccgtctgaacgcgtgggcggacaacatcatccgccgcgattttttccttcaacttgccttgcagcacgcggatgacgacccttcagacggcaatccagaacacaccctgcgcctgacgctttggcagcagggccggaccggcattccgattatcgatgccgcgatgcgctgtttgcacaaaaccggcagcctccaccccgccctgagacgcttgagcgcggattttttctgccacgttttaaacctcccccgccgcgaaggcgagatatggtttgcccggcagctgaccgatttcgatgcggcaatcaaccaaggcaactggcggcttgctgcctcacggcacacctgccccgacattgccgccgccgcacacaagaccgaccccgacggcacctttgtcagacggcacatccccgagcttgcccacctgtccgccgacaccgtccacacgccttggcggtttgcctgttcggtcgatacccacggctatcccgcctatcctgtcgccggtattccctaa

SEQ ID NO: 51601 - DNA, 1011 bp, Neisseria meningitidis
atgagcgatacccccgctacccgcgattttggcctgatcgacgggcgtgccgtaaccggctatgtgctgtccaaccggcgtggtacgcgtgtctgcgtgctggacttgggcgggattgtgcaggaattttccgttttggcagacggcgtgcgcgaaaacctcgtggtgtcgttcgacgatgcggcttcctatgcggacaatccgtttcagattaacaagcagatagggcgcgtggccggacgcatccgcggtgcggcgttcgacatcaacggcaggacttaccgcgtggaggccaacgaaggcaggaacgcgctgcacggcggttcgcacgggctggccgttacccgtttcaacgcggtggcggcagacggccgttcggtggtgctgcgcagccgcctgcaacagtcggccgacggttatcccaacgatttggatttggatatttcctaccgcttggacgaggacgaccggcttaccgttagctatcgcgccaccgcgctcggcgacacggtgttcgacccgacgctgcacatttactggcggctggacgcgggcctgcacgatgcggttctgcatattccgcagggcggacatattccggccgatgccgaaaaactgcccgtctcaacggtttcagacggcctcgaagtatttgatttcagccggcccaagccgctggatgccgccgttgccgccctgcgccgcgaaacgggccgggccggttttgacgacgcttaccgcgtgccgtccgatataggccgtcccgccgctgtgttgcaagccggacgccgccgtcgtatcagcatatacagcgaccgcaacggcttggtcatctttaccgccgccccgcaggatttcgcgcggcacgatgcgggcgtttacgacgcgctggcgaccgaggcgcagacgctgcccgacagcctgcattggcccgagttcggcaatattcgtctgaacaagggtgataccagggaggcgacgattgcttacggcatcgaatccctttcttag

SEQ ID NO: 51602 - DNA, 483 bp, Neisseria meningitidis; identical to SEQ ID NO: 36360

SEQ ID NO: 51603 - DNA, 1056 bp, Neisseria meningitidis
atgattacacttgccgtagatgccatgggcggcgaccaaggacttgccgttaccgtacccggcgcaaccgcattcctccaagcacaccccgatgtccgcctgattatgaccggcgacgaaacgcaactgcgccaagccctgaccgcggcaggcgcaccgatggaacgcatcgacatctgccataccacccaagttgtcggcatggatgaatcccctcagtccgccctaaagaacaaaaaagactcctccatgcgcgtcgccatcaaccaagttaaagaaggcaaagcccaagccgccgtatccgcaggcaacacgggtgcgctcatggcaaccgcacgtttcgtcctcaaaaccattcccggcatcgaacgccccgccatcgccaaattccttccttccgacaccgaccacgttacccttgcactcgaccttggcgcgaacgtcgactgcacgcccgaacagctcgcccaatttgccgttatcggcagcgaactcgtccacgcactccatcctcaaaaaggacagccgcgcgtcgggctggtcaacgtcggcacggaagacatcaaaggtacggacaccgtcaaacaaacctacaaactgctgcaaaacagcaaactcaactttatcggcaacatcgaaagcaacggcatcctctacggcgaagcagatgtcgtcgtcgccgacggctttgtcggcaacgtcatgctcaaaaccatcgaaggcgcggtcaaattcatgagcggagccatccgccgcgaattccaaagcaacctgttcaacaaacttgccgccgttgccgccctacccgccctcaaagggctgaaaaacaaactcgatccgcgcaaattcaacggggccatcctgctcgggctgcgcggcatcgtgattaaaagccacggcggcacagacgaaaccggtttccgctacgcactcgaagaagcctaccacgaagccaagtccgccggcctttccaaaatcgaacagggcgtagccgaacaactcgccgcactcgaaactgccaaagccgtccaaaacgaaaatgtcggcggtctgtaa

SEQ ID NO: 51604 - DNA, 1749 bp, Neisseria meningitidis
atgattcattataaaataaccccgtcccctctcgaccacgagtggcacatcctgctgacattcacacaagatgatgatcttcctatagaaataagcctgccaaactgggttccgggcagctatctgattcgggatttttcccgccacatcacttctatccatgcatcctgtaacggcacgtccatgccgctcgaacaaattgccaaaaaccgctggcatgccgccgccgtacgcggcgagtggcaaatccgctacaccgtatatgcattcgatttgtcggttcgaggttctttcctgacgacagaacgcggtttttttgacggatcgtgcctgtttttgaaagtcgaaggaacggaaacgctgccgcaccgcttggaattgacgggtattccgtccgaatggcgtattgccacaacgctgccggaaacagggaggtttgtctttcaggcggcatcttatgccgaattgattgaccgacctgtcgagatgggcttgattgaatttttagattttgaggcggcaggcattccgcacacaattgccttaagcggcatatatcccgatttcgaccgcaacaggctggtttcggatatcaaaaaaatctgcgaaacagaactggcggtgttttcctcccctgccccgtttcaaaaatatttgttcctgctccacgtcggcgaccatatttacggcggtttggaacacaccgacagcaccgccctgctcgccgaccgccacagccttccgccgtacggtatgaccgatgccgacgatacctacaccacattgctcggacttttctcccacgaatattttcacgcgtggaacgtcaaatccatcaaacctgccgcgttcgtcccttatgacctcgacaaagaaaactataccgaacaactatgggcattcgaaggtattacatcctattacgacgatttgtttttggcacgcagccgcaccatctcgcccgaatcttatttaaacctgctggcacaaggcattacgcgcgtacaacaaacccgcggccgtttgaggcagaccttggcggaatcgagttttaccgcgtggaacaaattttacaaacctgatgaaaacagccccaacgccatcgtcagctactaccagaaaggcgcgcttgccgcattgtgccttgatctgataatacgcaaccgaagcaacggcagacattctctcgatacggtaatggacaaactctatcgggagtggagggacacacactcgggtattccggaaaaacactggcaaatccgctgtcaggaaattaccggcttggatttggaagattttttccaaaaagcgttatacagtaccgaagatttgccgcttgccgaatgcctggcaaccgcaggcgtgggactgaccttcctgccgcttccccgacaacacggcggcggatacgcagaacacatctgccccgtcccgtcggcaggcgattttggcgcacgtttcaaacaaaacaccgaccacatcgtcctgacccatgtcttcaacggcggcagcgcggaatctgcggcactgtgcccgcaagacaaaatcattgctttagacggttatgcctgcaccgactttgccgcacaatgggcccgataccacgtcaatgcaaaaatcaatatccacttcttccgtgccggcatattgcgtcaaaccgtcttgacggttcaggcagcggcagcggatactgccatcctacatatcacagaccggaacctgttggacaactggttgttcggttaa

SEQ ID NO: 51605 - DNA, 918 bp, Neisseria meningitidis
atggttttggacgggtttgcggcgcattttgacgcttatttggaaaacatcgtgcgcgagggcaagtcggagcacacggtggcggcataccggcgcgatttggaagaactgtttgcgctgttggcacaaatgccgtctgaagctgaaggcggcgtgccgcagggcttgtcgcaacgcgattttacggcggcgttgcggcggctgtcgcagcgcggtttgaatgcgcggacgctggcgcgcaagctgtcgtcttggcggcagtattgtgtttggctggtggaacgcgggctgatgcgcgccgacccgaccgccgacatcaaaccgccgaagcagcccgagcgcgtacccaaagcactgccgcaggaatggctgaaccggatgctggatttgcccgtggacggcggcgacccgctggcggtgcgcgaccacgccctgttcgaactgatgtacggcagcggtttgcgcgtgagcgagatacacggcttgaatgcagatgatgtctatttggacgaggcgtgggtacacgttaccggcaaagggcgcaagcagcgtcaggtgccgctgactggcaaaagcgtggaagccctgaaaaactatctgccgctgcgtcagacggcatcggacggcaaagccctgtttaccggcaggaacggcacgcgcctgagccaacgccaaatccaaaaacgtttggcgcaatgggcggcgcaaaacggcgacggcaggcacgtttcgccgcatatgatgcgccacagctacgccggacacctattgcaggcttcgcgcgacatcagggcggtgcaggagctgctcgggcacagcagcctttcgaccacgcagatttataccaagctcgatttcgaccacatcgcccgcctgtatgacgaagcccacccgcgcgccaagcggcaggacgaatga

SEQ ID NO: 51606 - DNA, 1311 bp, Neisseria meningitidis
atgaacacgccgcatccgcgcccgaaaatcgccgtcatcggcgcaggctgggccggcttgtccgccgccgtcaccttgacgcggcacgccgacgttaccctgtttgaagccggccggcaggcgggcggcagggcgcgcacactggccggaaataccgacggtttcggttttttggacaacgggcagcacattttgctcggcgcataccggggcgtgttgcgcctgatgaaaaccatcggttcggatccccgtgccgcctttttgcgcgtaccgctgcactggcatatgcacggcggtttgcagttccgcgccctccccctgcccgcaccgctgcatattttgggcggcgtgctgcttgcccggcgcgtaccgtccgcattcaaagccaaactgcttgccgatatgtccgatttgcagaagtccgcacgcctcggacagcccgacacgacagttgcacaatggctgaaacagcggaacgtgccgcgtgccgccgtgatgcagttttggcagccgctggtgtggggcgcgctcaacacgcctttggaaaccgcaagcctgcgcgtgttgtgcaacgttttgtccgacggcgtgctgacgaaaaaatccggcagcgactatctcctacccaagcaggatttgggcgcaatcgtcgccgaacccgccttggcggagcttcaacggctcggcgcggacatccgcctcgaaacgcgcgtatgccgtctgaacaccatcccggacgggaaagtgctcgtcaacggcgaagctttcgatgccgccgtccccgccaccgcgccctaccacgccgccgcgctcctgcccgaaggcacgcccgaacacgttcagacggcatatcaaaaccttcgctatcacgccatcaccaccgtctatctgcgctacgccgaacccgtccgcctgcccgccccgctgaccggccttgccgacggcacggcacaatggctgctttgccggggcaggctcggactgcctgaaaacgaagtgtccgccgtcatcagcgtttccgaccgcgtcggcgcgtttacaaaccgagcgtgggcggacaaagttcacgccgacctcaaacgcatccttccgcatttgggcgaacccgaagccgtgcgcgtcatcaccgaaaaacgcgccacaaccgcagccgatgccccgccgccggatttgtcgtggctgcaccggcaccgcatcttccccgccggcgactacctccacccggactaccccgccacgctcgaagccgccgtacaatcaggtttcgcggcggcggaaacctgcctgcaaagcctgagcgatgccgtctga

SEQ ID NO: 51607 - DNA, 444 bp, Neisseria meningitidis
atgccgttccgcctgtttttagggatattatgcggcctgtcaatggttgcccccgtatatgcacaggggcaaccggatgcggtcaacgcttatattcaaaagaaaaaagtcatcgtcgatacatccaaagcggaactctgtttcgctgacgaccgtcagtgccaccccgtcctcatcggtgttgccacgcccaaggggacgttcgggctgacgctgaacagtaccgacaagcccggatacggcggcgaagtcatcggtttcaagcaggagggtgattttcttttcgccctgcaccgcgtttggaatcagataccgtcggaaaggcggaacgaacgcatcgcctccccgtccgtgtccgacaggattatgaccaacggctgcatcaacgtcagcgatgcggtgtacgaaaaactgcgtcattattttgtgttggaagtgatttga

SEQ ID NO: 51608 - DNA, 648 bp, Neisseria meningitidis; identical to SEQ ID NO: 44828

SEQ ID NO: 51609 - DNA, 1140 bp, Neisseria meningitidis
atgagccgtttatggttttttgccgcaaaaaacattataatccgccttatttacctattgcccaaggagacacaaatggcactcgtatccatgcgccaactgcttgatcatgctgccgaaaacagctacggcctgcccgcgttcaacgtcaacaacctcgaacaaatgcgcgccattatggaagccgccgaccaagtcaacgcgcccgtcatcgtacaggcgagtgcaggtgcgcgcaaatatgcgggcgcgccgtttttgcgccacctgattctggcggcagtcgaagaatttccgcacatccccgtcgtgatgcaccaagaccacggcgcatcgcccgacgtgtgccaacgctccatccaactgggcttttcctccgtgatgatggacggctcgctgatggaagacggcaaaaccccttcttcttatgaatacaacgtcaacgccacccgtaccgtggttaatttctcccacgcttgcggcgtatccgtcgaaggcgaaatcggcgtgttgggcaacctcgaaactggcgaagccggcgaagaagacggtgtaggcgcagtgggcaaactttcccacgaccaaatgctcaccagcgtcgaagatgccgtgcgtttcgttaaagataccggcgttgacgcattggcgattgccgtcggcaccagccacggcgcgtacaaattcacccgtccgcccacaggcgacgtgttgcgtatcgaccgcatcaaagaaatccaccaagccctgcccaatacacacatcgtgatgcacggttccagctccgttccgcaagaatggctgaaagtcatcaacgaatacggcggcaatatcggcgaaacctacggcgtgccggttgaagaaatcgtcgaaggcatcaaacacggcgtgcgcaaagtcaacatcgataccgacttgcgccttgcttccaccggcgcggtacgccgctaccttgccgaaaacccgtccgacttcgatccgcgcaaatatttgagcaaaaccattgaagcgatgaagcaaatctgcctcgaccgctacctcgcgttcggttgcgaaggtcaggcaggcaaaatcaaaccggtttccttggaaaaaatggcaaaccgttatgccaagggcgaattgaaccaaatcgtcaaataa

SEQ ID NO: 51610 - DNA, 3204 bp, Neisseria meningitidis
atggctaaattttttatcgaccgccccattttcgcgtgggttatttcgattttcattattgcggcgggtattttcggcattaaaagcctgcctgtttcgcaatatccgtctgtcgccgccccgaccatcaccctgagggccacttatccgggcgcgtccgcgcaggtaatggaagacagcgtgctttccgtgatcgagcggaatatgaacggcgtggaaggtttggattatctgtccacttccgccgattcgagcggcagcggcagcgtgagcctgacctttacgcccgataccgacgagaatctggcgcaggtggaagtgcagaacaagctttccgaagtattgagcacgctgccggcaaccgtccagcaatacggcgtaaccgtatccaaggcgcgttccaatttcctgatgattgtgatgctttcgtcggatgtgcagtcaaccgaagagatgaacgactacgcgcagcgtaatatcgttcccgagttgcagcgtatcgaaggcgtggggcaggtacgcctgttcggcgcgcaacgcgcgatgcggatttgggttgatcctaagaaactgcaaaactacaatttgtcgtttgccgatatcggcagtgcgctgtccgcccagaacgtccagatttcagcgggttctatcggttcgcttcccgccgttcgcggacagacggttacggctaccgtaacggcgcaagggcagttgggtacggcagaagaattcggcaacgtcatcctccgcgccaataccgacggttctaatgtttacctgaaggatgtggcaagggtcggactgggtatggaagactattcttcctcaacccgtctgaacggtgtaaataccaccggtatggcggtgatgctgtccaacagcggcaatgcgatggcgacggcaaaggcggttaaagaacgcatggcgacgttggaaaaatactttcctcagggtatgagctggaaaaccccttacgatacttccaaattcgtcgaaatttcgattgaaaaagtgattcatactttaatcgaagcgatggtgctggtgtttgtcgtaatgtatctcttcctgcaaaacatccgttatacgctgattccgaccatcgtcgtaccgatttcgttgttgggcggtttcgccttcatctcttatatgggcatgtcgattaacgtactgaccatgtttgcgatggttttggtcatcggcatcgtggtcgatgacgcgattgtggtggttgaaaacgtcgagcgcattatggcgggtgaaggcttgccgcccaaagaagcgaccaaaaaagcgatgggtcagatttcgggcgcggtcatcggtattaccgccgttctgatttccgtgttcgtaccgttggcgatgttcagcggggcgacgggcaatatttacaaacagtttgccctgacgatggcgtcatcaatcgcattctccgccttccttgcgctgacccttacccctgctttgtgtgccacaatgttgaagacaatcccgaaagggcatcacgaagagaaaaaaggtttcttcggctggtttaacaagaaattcaacagttggacgcacggttacgaaggccgggttgccaaagtgctgcgtaagactttccgcatgatggttgtctatatcggcttggcggttgtgggcgtgttcctgtttatgcgcctgccgacttcattcctgccgaccgaagaccaaggcttcgtcatggtcagcgtgcaactgcctgcaggagcgacccaagagcgcaccaatgcgactttggcgcaagttacccaactggcgaaaagcattcctgaaatagaaaacatcattaccgtttccggcttcagcttttcgggcagcggtcagaatatggcgatgggttttgccatattgaaagattggaacgagcgtaccgcgcccggcagcgatgccgttgcgattgccggcaagctgacgggtatgatgatggggacgcttaaagacggttttggcatcgccgtcgtcccgcctccgattctggagttgggcaatggttcgggcctgagcatcaacctgcaagaccgcaataataccggccataccgcattgctggcgaagcgcaacgagttgattcagaaaatgcgtgccagcggtttgtttgaccccagcaccgtccgtgctggcggtttggaagactcgccgcagttgaaaatcgacatcaaccgtgccgccgcggcggcgcaaggcatttcgtttgccgacatccgcaccgcattggcaagtgcgctgagttcgtcttatgtcagcgacttcccgaaccaaggccgtctgcaacgcgtgatggtgcaggccgacgaggatgcccgtatgcagcctgccgatattttgaacctgaccgtgccgaacaaatccggcgtcgccgtaccgctttccaccattgctactgtttcttgggaaaacggtacggaacagagcgtacgcttcaacggttatccttcgatgaagctgtccgcttcgcctgcaaccggcgtttccaccgggcaggctatggcggcggttcaaaaaatggttgacgaattgggcggcggttacagcttcgaatggggcggacagtcgcgcgaagaggcaaaaggcggctcgcaaaccctgattttgtacggtttggcggttgcagccgtatttttggtacttgccgcgctttatgaaagctggtcgattccgctggcggtcatccttgtgattccgttgggtttgatcggtgcggctgcgggcgtaaccgggcgcaacctgtttgaaggactgttgggcagcgttccctcgttcgccaacgacatctactttcaagtcggtttcgttaccgtgatgggtttgagtgcgaaaaacgcgattttgattatcgagtttgccaaagaccttcaagcgcaagggaaaagcgcggtcgaagccgctttggaagccgcccgcctgcgtttccgtccgattatcatgacctcgttcgcctttattttgggcgtggttcccctgtatattgccggtggtgcaagttctgccagccagcgcgccatcggcacgaccgtattctgggggatgctcatcggcacgctcttgtccgtgttccttgttccgcttttctatgtggtggtgcgcaaattcttcaaagaaaccgcgcacgaacacgaaatggcagtaaaacacgccgccgaagcgggcatcaccggttcggacgacagccaacattaa

SEQ ID NO: 51611 - DNA, 723 bp, Neisseria meningitidis; identical to SEQ ID NO: 42122

SEQ ID NO: 51612 - DNA, 1455 bp, Neisseria meningitidis; identical to SEQ ID NO: 43531

SEQ ID NO: 51613 - DNA, 285 bp, Neisseria meningitidis; identical to SEQ ID NO: 42876

SEQ ID NO: 51614 - DNA, 627 bp, Neisseria meningitidis
gtgaaccctttttcagaggacggcaaaatgagcgagttggataacatccttgcccataaccggcagtttgtcgagtcgggcgaatatgaaaaatactttaccgacaaataccccgaacgcgggctggcagttttgtcctgtatggatgcgcggattatcgggctgctgcccgacgcgttgggtttgaaaaacggcgatgccaagctgattaaaaatgccggcgcgctggttacgcacccgtggggttcggtgatgcggagccttttggttgccgtgtttgaattgaaggtcagagagattatggtcatcgcccatcacgattgcggtatgcaggggctgaatgccgaagaattcctcgggcgcgtccgggaaagccggattcccgaagaccgtatcgaaaccctgcgttatgcaggtgtcgacctcgacggctggctgaccggtttcgacaacgtcgaagacagcgtgcgccatactgtcgaactcatccgccgccatccgctgatgccgcgccatatcgccgttcacggattggtcatccatcccgttaccggcaaactgacgctggttgtggacggcagtgtttcagacggcatggacttatcggaaggaatggaaacatcatga

SEQ ID NO: 51615 - DNA, 780 bp, Neisseria meningitidis
atggcagcctcgcccgaagcaaaattcaccgaagaaaagattttgtgggtcaaacaccacacgccgaaactcatcactttcgccatcagccgtcccgaatcctaccgctttaaagccggacagttctcccgactcggtttctacgaaggggaaggctttatttggcgtgcctattccattgtttccgcagaatatgccgacacgctcgaatattttgccgtactcatccaagacggccccatgtcggcccgtttcgccaaaatgcaacagggcaacaccatcctgctcgataaaaatgccaccggcttcctcctgcccgaacgcttccccgacggcaaggatttggtgatgctctgcaccggctcgggcatcgcccccttcctttccattctcgaacaacccgaaatccgtcaacgtttcgataccgtcaacctgatacattccgtatcttttcccgaagaattgattttcaacgaccgactcgccgcattgactgaacatcccttggtaggcgaatacggacactctttccgtttcgtccctgttaccacccgtgccgccaacccctcgggcttaagcggaaaacgcattccggaactcttaaaaaacagcagcatcgaacaggcgctgcataccaagttcaccccggaatccacacggtttatgatttgcggcaacccggaaatggtcaaagatactttccaaacgctgcttgacatgggttacgccatgcaccgcaaccgcattcccggtcaaatcatgatggaaaacggcttctaa

SEQ ID NO: 51616 - DNA, 369 bp, Neisseria meningitidis
  misc_feature 6, 7, 8, 9, 10, 346, 347, 348, 349, 350: 'n' is a, c, g or t
gtgtgnnnnnagacggcattgcagaccgccgcccgccgtgtcgaaagctaccaccaacgccaaaaaatggaatcgtggagctacaccgatgaagacggcacgctgttgggacaacaggactactggcgtgtaacggaaacgctgaaatccgctttaaaacggtttgagtccggctgttatctcatctggtatccctgcctcagccgcgaagaaagccgcaagctgcccgaagaactgaaaaaactcgttcccgacaactaccttcacgccgaactgcacgtccacgcgccgaaagccgacggtttcggtatgcacggcagcggaatgttcgtcatcaatccgcccnnnnncacacacttaattaattaa

SEQ ID NO: 51617 - DNA, 291 bp, Neisseria meningitidis
atgaccatccgtcctttacacgaccgcgttgtcgtcaaacgcttggaagctgaagaaaaaaccgcatcgggcatcgttttgccgggtgcggccgccgaaaaacccgatatgggcgaagtcatcgccgtgggcgcgggcaaaatcggtaaagacggcgcgcgccgtccgctggatgtcaaagtcggcgacaaaatcatcttcggcaaatacagcggccaaaccgtcaaagccgacggcgaagagctgttggtgatgcgcgaagaagacatcttcggcatcgttgaaaaataa

SEQ ID NO: 51618 - DNA, 978 bp, Neisseria meningitidis
atgatttatccgtggcataatgagcaatggcggcagattgcggaacattgggagcgtcgtcccaatgcatggctgtttgccggcaaaaaagatacggggaaaactacatttgcccgctttgcggcgaaggcactgttgtgcgaaacccctgcaccgggctgcaaaccctgtggcgaatgtatgtcctgccatctgtttggacagggaagccatccggatttttacgaaatcacccccttgtcggacgaatccgaaaacgggcgcaaactgttgcagattaaaatcgatgccgtcaggaaaattatcgataacgtgtatctgacttcggtacggggcggtttgcgcgtggtactcatccatcctgcggaaagtatgaatgtccaggccgccaacagtttgttgaaagtgttggaagagccgccgccacaagtggtctttttgctggtcagccacgcggcggacaaggttttaccgaccattaaaagccgctgccggaagatggttttgcccgctccttcccatgaagaggcattggcatatctgcgcgacaggggtgtggcggagccggaagaatttttggcgttccattcgggtgcgccgctgtttgatgaggcggacggtgtccgtgcgttgcggattaaactgttagatattttggcagaaccaaggttgttgaagattttggattacgccgcgcttttcgataaggagaaacttccgctcgacgtatttgtcgggtggatgcagaaatggctggtcgatttgggattgtgcctgcaacacatgaaacccgtctattatcccgcttatgaagacaggctgcttcagacggtatccggtttccgtccgcgcaatgtatttgcggcggaggatatgctcaaacagcttgccccctacgggtttcatactttaaatgtcaaaatgcagatcgagcatctgctcatcaactatttggaattgaagaaagagaacgggtga

SEQ ID NO: 51619 - DNA, 534 bp, Neisseria meningitidis
atgtttccccccgacaaaacccttttcctctgtctcagcgcactgctcctcacctcatgcggcacaacctccggcaaacaccgccaaccgaaacccaaacagacagtccggcaaatccaagccgtccgcatcagccacatcgaccgcacacaaggctcgcaggaactcatactccacagcctcggactcatcggcacgccctacaaatggggcggcagcagcaccgcaaccggcttcgattgcagcggcatgatccaattcgtttacaaaaacgccctcaacgtcaagctgccgcgcaccgcccgtgacatggcggcggcaagccgcaaaattcccgacagccgcctcaaggccggcgacctcgtattcttcaacaccggcggcgcacaccgctactcacacgtcggactctacatcggcaacggcgaattcatccatgcccccagcagcggcaaaaccatcaaaaccgaaaaactctccacaccgttttacgccaaaaactacctcggcgcacatactttttttacagaatga

SEQ ID NO: 51620 - DNA, 474 bp, Neisseria meningitidis; identical to SEQ ID NO: 51534

SEQ ID NO: 51621 - DNA, 1929 bp, Neisseria meningitidis
ttgatcgaatgtaaaaacatcaaccgctatttcggcagcggcgagaaccgcgtccatattttgaaagacatcagcctgtcgatagagaagggcgattttgtcgccatcatcgggcagtccggttcgggaaagtccacgctgatgaacatcctcggctgtttggataccgccggttccggttcgtaccgaatcgacggcatcgaaactgccaaaatgcagcctgacgagctggcggcattgcgccgcgaacgcttcggtttcatcttccaacgctacaacctcttaagctcgctgaccgcaagggataacgtcgcgctgccagccgtctatatgggcgcgggcggcaaagagcgttccgcgcgggcggagaagttgttacaggatttgggtttggcaagcaaagagggcaacaagcccggcgaactctcgggcggacagcagcagcgcgtctccatcgcccgcgccctgatgaacggcggagaaatcatcttcgccgacgagccgaccggcgcactcgataccgccagcggcaaaaacgtgatggaaatcatccacaagctgcacgaagccgggcatactgtcattatggtcacgcacgaccccggcatcgccgccaatgccaaccgcgtcatcgaaatccgggacggcgaaatcatttccgacacctcgaaaaatcccgaaatccccgcaagcaatgtcgggaggattcgggaaaaagcctcgtggtcgttttattacgaccagtttgtcgaagccttcagaatgtcggtgcaagcagtattggcgcacaaaatgcgttcgcttctgacgatgctcggcatcatcatcggtatcgcttcggttgtctccgtcgtcgcattgggcaacggttcgcagaaaaaaatccttgaagacatcagttcgatagggacgaacaccatcagcatcttcccagggcgcggcttcggcgacaggcgcagcggcaggattaaaaccctgaccatagacgacgcaaaaatcatcgccaaacaaagctacgttgcttccgccacgcccatgacttcgagcggcggcacgctgacttaccgcaataccgacctgaccgcttctttgtacggcgtgggcgaacaatatttcgacgtgcgcggactgaagctggaaacggggcggctgtttgacgaaaacgatgtgaaagaagacgcgcaggtcgtcgtcatcgaccaaaatgtcaaagacaaactctttgcggactcggatccgttgggtaaaaccattttgttcaggaaacgccccttgaccgtcatcggcgtgatgaaaaaagacgaaaacgctttcggcaattccgacgtgctgatgctttggtcgccctatacgacggtgatgcaccaaatcacaggcgagagccacaccaactccatcaccgtcaaaatcaaagacaatgccaatacccaggttgccgaaaaagggctgaccgatctgctcaaagcgcggcacggcacggaagatttcttcatgaacaacagcgacagcatcaggcagatagtcgaaagcaccaccggtacgatgaagctgctgatttcctccatcgccctgatttcattggtagtcggcggcatcggcgtgatgaacatcatgctggtgtccgttaccgagcgcaccaaagaaatcggcatacggatggcaatcggcgcgcggcgcggcaatattttgcagcagtttttgattgaggcggtgttaatctgcgtcatcggcggtttggtcggcgtgggtttgtccgccgccgtcagcctcgtgttcaatcattttgtaaccgacttcccgatggacatttcggcggcatccgttatcggggcggtcgcctgctcgaccggaatcggcatcgcgttcggctttatgcctgccaataaagcagccaaactcaatccgatagacgcattggcgcaggattga

SEQ ID NO: 51622 - DNA, 1251 bp, Neisseria meningitidis
atgaccaaactgacacgaagacaaatcatccgccgcaccgccggcacactgttcgccctaagccccatcgcatccgccgttgccaaaacggtacgcgcaccacaattcaccgccgcacggatatggccgtcgcacacctacacccgcctgacgctggaaagcacaaccgcgctcaaataccaacacttcacgctcgacaacccgggcaggttggtcgtcgacatacaaaacgcgaacatcaataccgtattgcacggactgtctcagaaggttatggcggacgacccttttatccgcagcatacgcgcgggtcagaacacgccgaccaccgtccgcctcgtcatcgatttgaaacagccttcctacgcgcaagttttttccctcccccccgtcggcggctttaaaaaccgcctcgtcgtcgatctctatccgcaagggatggatcccgacgatccgatgatggcgctgcttaacggcagcctgaacaaaacccgtcgcggctcccctgaagccgacctcgctcaaaacactcccgcacaaaccgaacgcggcaaaaacgggcgcagacccgtcattatgatcgaccccggacacggcggcgaagaccccggcgccgtcagcccgggcggtttgcaggaaaaacacgtcgtcctctccatcgcccgcgaaaccaaaaaacaattggaagccttgggttacaacgtctttatgacgcgcaacgaagacgtgttcatcccattgggcgtgcgtgtcgccaaagggcgcgcacggcgggcggacgtatttgtctccatccacgccgatgccttcaccagcccctccgcgcgcggcacgggggtttatatgttaaacaccaaaggcgcgaccagctctgccgccaaattcttggaacagacgcaaaacaatgccgacgcggtcggcggcgtaccgaccagcggcaaccgcaacgtcgataccgccctgctcgatatgacccaaaccgccacactgcgcgacagccgcaaactcggcaaactggtgcttgaagaattgggcaggctcaaccatctgcacaaaggcagggtggacgaagccaatttcgccgttttgcgcgcacccgatatgccgtctatcctggtcgaaaccgccttcctgtccaaccctgccgaagagaagctgctgggcagcgaatccttccgccgacagtgcgcccaatccattgcctcgggtgtccaacgctacatcaatacatccgtattgaagcggggttga

SEQ ID NO: 51623 - DNA, 819 bp, Neisseria meningitidis
atgaaaaaaacagtttttacatgtgccatgattgccctgaccggtactgccgccgctgcacaagagcttcaaaccgctaatgagtttaccgtccacaccgacctctcttccatttcttcaactcgtgctttcctgaaagaaaaacacaaagctgccaaacacatcagcgtgcgtgctgatattccttttgatgccaaccaaggcatccgcttggaagccggtttcgggcgcagcaaaaaaaatattattaatttggaaacagatgagaacaagctgggtaagactaaaaatgtaaaactgcccaccggcgttcctgaaaaccgtatcgatctttacacaggctacacctacacccaaacgttaagtgattctttaaatttccgtgtgggtgccggcttgggttttgaatcttcaaaagacagcattaaaaccaccaagcatacgcttcacagcagccgtcagtcgtggttagccaaagttcacgcggatttgctttcccaactgggtaacggctggtatatcaacccttggtctgaagtgaaatttgacctcaattcccgctataaattaaacaccggcgttaccaatctcaaaaaagacatcaatcaaaaaaccaacggctggggctttggattgggtgcaaatattggtaaaaaactgggcgaatccgccagcatcgaggcggggccgttctacaaacaacgcacttacaaagaatccggcgagtttagtgtaacaaccaagagtggcgacgtatcgctcaccatcccgaaaaccagtattcgtgaatacggcttgcgcgtcggcataaaattctga

SEQ ID NO: 51624 - DNA, 390 bp, Neisseria meningitidis
atgtggaaaatcataaaagaggatagtgatgatttaggatttgcaattaaatgcttattctctcaatctattgatttaaatgaattcaaattatggattgaacaagtaatacgcgatatgcccatcgaggacatccctttttatatttttgacttggcggatttcgatgtaggaattggcgatattggcaatattgtaggttttgctccgagttccagcctgccgaaatcgaaaaaaaatgccttgaccggcattgccttcttaagggggatagatgtctatgaccctcccgtttcaaaagaaaaagcattaaaagccttagagaaatatcctgaaatttatcagaaatttcagcatttctttccgtttgtagagctgcctccgctttaa

SEQ ID NO: 51625 - DNA, 1977 bp, Neisseria meningitidis
atgtccaaactcaaaaccatcgctctgaccgcatcaggtctgtccgtttgtccgggtttcctatacgcccaaaacacctcatcacaccaaatcggtttggcgattatgcgcttaaactcttcaatactcgacctgcccccgacaaaacaatatttccaatccggcagcctgtggagcgagctgcgccaaggcttccggatgggcgaagtcaatcccgaactggtacgccgccacgaaagcaaattcatcgcaagccacagctatttcaacagggtcatcaaccggagtagaccctatatgtaccatatcgccaacgaagtcaaaaaacgcaatatgcccgccgaagccgccctgcttcccttcatcgaaagcgcgttcgtcaccaaagccaaatcacacgtcggcgcatcaggattatggcagtttatgcccgctaccggcaggcattacggcctggaaaaaacaccggtttacgacggcaggcacgacgtttacgccgccaccgatgccgcactcaactatctgcaatacctctatggactgttcggcgactggccgcttgcctttgccgcctacaactggggtgaaggcaacgtcggacgcgccatcaaccgcgcccgcgcccaagggctcgaaccgacctacgaaaacctgcgtatgcccaacgaaacgcgcaactatgtccccaagctgctcgccgtgcgcaacattattgccactccccaatctttcggcatgaatatcagcgacatagacaacaaaccctattttcaggcagtcgaaccggatcgtccgctcgacaacgaagccatcgcccggcttgccggcatcacgcaaagcgagctgctcgccctaaaccccgcattcaacgtccccgcgtttatccccaaaagcaaacgcaaactgctgcttcctgtcgcgtccgtacaaaccttccaaagcaactacctcaacgccgcacccgacagcctgttttcatgggaagtctatacgcctgccgccaaaaccagcctgtccgacatctcgacggcaaccggcatgagcattgccgacatcaaacgcctcaacaacctgaacggcaaccttgtcaacgcaggacgcagcatccttgtcgccaagaacggcaaaacccttcagacggcatcggaatccgtcgtttccatcgacatcgacaatacgcccgacacctaccgttccaatatgccggcaggcacggtgaacgtcggcattgcccgaatccgacccgccgccgcacagacagcggacattaccgtcgcacctttgccgcagaaaaccgtccgtacggaacccgatccccttgtccgtattgccgaacctgcccttgcgacagccgcagcgcaacctcaaaccgaaaaacagaccgccatgccgtctgaaacccaaaccgcaacactcgcgcagatcatcccccaaaacgacatgcaggcggcagacgaactcatgcagcttgttgcccgaaacaacctgcgccgacaggctgaagaaaccatctccgccgtcatcggcacgcctgacacagttgccgaacacaaaatttccgcatctccgcaacataccgctgccgccgacggcaaacgccggatacgtttggaaacacgtatagccaaagctgccgacggcgaagccgaaatctccccgctccatgccagcatccaccgcgttgtagaaggcgacaccctgttcaacattgccaaacgctacaatgtcagcgtagccgacctgattgtcgccaacaacatcaaaggcaacaccatccaaaaaggacaggtactccgcctggcgcaggcagcccccgcccaaacccgtattgaaaaagtatcctacaccgcgcgcaaaggcgacaccttcaaaagtatcgccgcgcgcttcaatatccatatcgacgacatccgccggctgaatcccaacctgaacaccatcaatccgggacagagggtcaaactgattggaagctga

SEQ ID NO: 51626 - DNA, 747 bp, Neisseria meningitidis
atgaacgttttgatttccaacgacgacggctacctctccgaaggcatcgccgttttggcgcgcgttacggcggaatttgccaacgtcagggtggtcgcgcccgaacgcgacaggagcggggtcagcaattcgctgacgctggaacgccctttgcagttgaaacaggcgcaaaacgggttctactatgtcaacggcacgccgaccgactgcatccacatcgggcagtctgtattttcggattttcaggccgattttgtcttttcgggcatcaaccggggcgcgaatatgggggacgacacgctttattcggggacggttgcggcggcaaccgaagcctaccttatgggcatacccgctgtggcgttttccttaaacgacgcttccggacgctattgggcaaccgcagaaaaggcactgtggacattgttggcgcattttttcaaaacccccccgcagtcccctattttgtggaacatcaatatccccgccgtcgagccggaagatgtgcggggcattaaaatcgcccgtttgggcaggaggcatcacggtcagaacgtcatccccgcgcgcaatccgcgcggcgaacagatttattggataggaccggtcggcgaagtttccgatcgggaagagggaacggatttcggtgaatgcggcgcaggtttcattaccgtaacgccgctgcaaatcgacctgaccgcctatccggacatggcggaaacagcggcattctggcatgcggactga

SEQ ID NO: 51627 - DNA, 195 bp, Neisseria meningitidis
ttggaatctcatgacttagcagaaggatatacttatttcttcaatgaaaatacggatgattgctatgttttgaaacaagattttattaataatgagcgatatgaaaaaacagaattatatccccaaaaagataaggtaattctatttccaaagtttggcgaatatgatttggtgttaaatccggacattatttaa

SEQ ID NO: 51628 - DNA, 303 bp, Neisseria meningitidis; identical to SEQ ID NO: 46454

SEQ ID NO: 51629 - DNA, 318 bp, Neisseria meningitidis
atgcaaaaacgtattgaagaaatccaaagcaaataccgcgaatggtgtcatttactaccgcaattggaagaagacatccgccgttggaaacatgccgtcgctttgattcgcgatatggacaatttttatacccacgaatatcaggcttgtcatcgggctattgaagatggagcggaggtggatttgcgcacagaaggcgaatacagcattatgagtgaagatgcactatggaacgcgctgggcgaattccatcaactggcttggttatatttgcgctccagcgtcgatgccttagacaaatatacacaagaagattag

SEQ ID NO: 51630 - DNA, 1056 bp, Neisseria meningitidis
atgaaaacctacgcaccggcactctataccgcagccctgctcaccgcctgcagccccgcagccgattcaaaccatccgtccggacaaaatgccccggccaataccgaatccgacggaaaaaacattaccctgctcaacgcctcatacgatttggcacgggatttttacaaagaatacaaccctttatttatcaaaacataccaatccgaacaccccggcacatccgtcagcatccaacaatcccacggcggctccagcaaacaggcattatccgtagccaacggccttcaagccgatgtcgtaaccatgaaccaatcctccgacatcgacctgctcgaaaaaaaaggactggtagaaaaaggctggcaacaagccctccccgaccacgccgcgccctacaccagcactatggttttccttgtccgaaaaaacaaccccaaacagatccgcgattggaacgaccttgccaaagacggcgttaacatcgtcatcgccaatcccaaaacctcgggcaacggacgctacgccttcctcggcgcatacggttacggtctgaaagccaccaacggcaacgaacaggaagcccaaaaactcgtcgcatccatcctcaaaaacacccccgtttttgaaaacggcggacgcgccgccaccaccaccttcacacaacgcaacatcggcgacgtactcatcacttttgaaaacgaagccaactacgtcagcaaaaaactgacccaaggacagtttgaaatcgtctatccgagctacaccatttccgccgaaagccccgtcgccgtcgtcaacagcgtcgtcgcgaaaaaaggcacgcaaaaaaccgcccgcgcctatctcgaatacctttggagcgaaccggcgcaagaactcgccgcctcactctacctgcgcccccgcaaccccgaagtattggcaagacacaaagccgacttcccagacttagacaccttctctcccgaaaaaaaattcggcggatgggacaacatcatgaaaacctacttcgccgacggcggcatattcgaccgcctgaccgcacaaaaatga

SEQ ID NO: 51631 - DNA, 267 bp, Neisseria meningitidis; identical to SEQ ID NO: 43047

SEQ ID NO: 51632 - DNA, 813 bp, Neisseria meningitidis
atggaaaatatcggcaggcagcgacccatcggcgtttttgactcgggaatcggcggtttgaccaatgtacgcgcgctgatggagcggctgccgatggagaacatcatttatttcggcgacacggcgcgcgtgccttacgggacgaaatctaaggcgaccatcgaaaatttctcgatgcagattgtcgattttttattggaacacgatgttaaggcgatggttatcgcgtgcaatacgattgcggcggtggcggggcagaaaatccgtcaaaagacgggcaatatgcctgtgttggacgtgatttccgccggcgcgaaagccgcactggcaacgacgcgcaacaacaaaatcggcattatcgccaccaataccacagttaacagcaatgcttatgcgcgcgccatccatagggacaaccccgacacgcttgtccgcacgcaggccgcgccgctgctcgtccctttggtggaggaaggttggttggaacacgaagttacccgcctgaccgtatgcgaatacctcaaaccattgcttgcagacggcatcgatacgctggtgttgggctgcacgcactttcccttgctcaaacccttaatcggcagggaggcgcacaatgtcgcgctggtcgattccgcgattacgactgccgaagaaaccgcacgcgtccttgctcaggaaggattgctcaataccgacaacaacaatcccgactaccgtttttacgtcagcgatattcctttgaaattcagaaccatcggcgagcgttttctgggcaggacgatggagcagattgaaatggtgtctttgggttag

SEQ ID NO: 51633 - DNA, 1248 bp, Neisseria meningitidis
atgcaacttaccgctgtcggactcaatcatcaaaccgcacctttaagcatacgggaaaagctggcgtttgccgcggcctgcctgcccgaagccgtccgcaatcttgcccgaagcaatgcggcaacggaggcggtaatcctttctacctgcaaccgcaccgagctttactgcgtcggtgattcggaagaaatcatccgatggcttgccgattaccacagtttgccgattgaagaaatccgtccgtatctgtacgcgctggatatgcaggagactgtgcgccatgctttccgcgtcgcctgcgggctggattcgatggtgttgggcgagccgcagattttaggacagattaaggatgccgttagggttgctcaagagcaggaaagtatgggtaagaaactcaatgccctgttccaaaaaaccttttccgttgctaaagaggtccgtaccgatactgccgtcggcgaaaactcggtttccatggcttccgcttccgtcaaattggcggaacagatttttcccgacatcggcgatttgaatgtcttgtttatcggcgcaggcgaaatgattgagctggttgccacttattttgccgccaaaagtccccggctgatgacggttgccaaccggacgctggcgcgtgcacaggagttgtgcgacaagctcggtgtcaacgccgaaccgtgcctgctgtccgatctgcctgccattctgcacgattacgacgtagtggtttcttcaacggcaagccagttgcccattgtcggcaaaggcatggtggagcgtgcattgaaacaaaggcagagtatgccgttgtttatgcttgacttggccgtgccgcgagacattgaggcggaagtcggagatttgaacgatgcctatctttatacggtggacgatatggtcaatatcgtccaaagcggcaaggaggcaaggcagaaggccgccgccgccgccgaaacgctggtgtccgagaaggttgccgaatttgtcaggcagcagcagggcaggcagagtgtcccgttaatcagggcattgagggatgagggagagaaagcgcgcaaacaggtcttggaaaatgcgatgaaacagcttgccaaaggcgcaacggcagaagaggttttggaaaggctgtcgatccaactgaccaacaagctgctgcattcgccgacccaaaccttgaataaggcgggggaagaagataaagatttggttcacgccgtcgcgcagatttatcatttggacaaataa

SEQ ID NO: 51634 - DNA, 1509 bp, Neisseria meningitidis; identical to SEQ ID NO: 36192

SEQ ID NO: 51635 - DNA, 1176 bp, Neisseria meningitidis
atgcaaaatatttttgaccctttggttattcgtggaaaatcccttacccccatcgtgcaaggcggtatgggggtcggtgtttccgcatcgggtttatccagcgcggtggcacgtgaaaacggtatcggaacgattgccagtgtggatttgcgccaccttcacgaagacctactcgccgaatcacaaatcaatccgagtgaagagaaatatacatctttgaactgtaccgcattagacagggaaatccaaaaagccaaaagcgcttcagagggaaaaggactgattgcggtcaacgtgatgaaggcggtcaaagaccacgccgcgtatgtccgccaggcttgcgaatcaggggcggatgcggttgtaatgggtgccggcctgcctttagacctgccggaaatgaccgagggctatcataaagatgtcgcgctgctgccgattctgtccgaatcgcgcggtattaatatcgtcttgaaacgttggatgaaaaaaggcatattgcccgatgcgattgtagtcgaacatcctgcccacgcggccgggcatttgggcgcgtcaaccgtcgaaggcgtaaacgatgctaaattcgacttcaaacgcgtgattgaggaaacgtttgaagttttcaaaagtttagggctggaaagcgaaaaaatcccgcttattcttgcgggaggcatggcaaattttgaaaaagtcaaaaccgccctaaagaactggggagcatccgccgttcaaatcggtacggcttttgccgttaccgaagaaggagatgcacaccttaacttcaaaaaaacgctcgccggtgcggaaactgaaaaagtagtcgaatttatgtctgttgccggtttgccggcgcgcggtgtccgcaccaaattcctagacagctacatcaagcgtgaaagcaaacttcagacaaacgccaaagccgacccgcgccgctgtacccaaggtttaaactgcctaaccagttgcggtctgcgcgacgggctttccaaagccggacaattctgcattgatatccagcttgccgccgcattccgtggagaagtagataaaggcctgttcttcagaggtaaagacccgctgcccttcggcaatgccatccgcaccgtccgcgagacgatacaatatctgctgacggggagcgaacctgttgcaacgctcggacgctga

SEQ ID NO: 51636 - DNA, 540 bp, Neisseria meningitidis
atgtcccaagtttttaaagattttgatttgtcctccgtatgggaatccgacagttgggcagatgaaaactacaaagaagccccgtttacccctgaaattttggctgccgtagaaagtgaactgggctataaattgccgcaaagttttattgaattgatggcggtacaaaacggcggaatatttgtcaaaaactgttttccgaccacgcagagaaattcgtgggcggaaaatcatgtgcaaatttgcgaggtatcgggcatcggctttgaaaaagaagggagtttgtgcggcgaaacagggcaaaaactttggctggaagaatgggaatatccgcccatcggcgtgtattttgccaacgacccgtcaggcggtcatgccatgtttgccttggactatcgggcgtgcggcaaagacggcgagccgaaagtggtgtttgtcgagcaagaatcggattttgaaatcgtcgaacttgcccccgattttgaaacctttatccgcagcttgcggcatgaagatgagtttattgacgaggaaatataa

SEQ ID NO: 51637 - DNA, 270 bp, Neisseria meningitidis; identical to SEQ ID NO: 37651

SEQ ID NO: 51638 - DNA, 324 bp, Neisseria meningitidis
atgtctattttggaagagaatgtaattgattcagcctctattgaaaacggaatactcatattaactatttctgatcatttaaaatgggataacgagcatttgtttttgttgcaagaaaaaataaattcatatattcaatatattgaatcaggtcaaatttttgaagattttggagaaagtagctatgagactattgaaatacagcttatatataaatataaaccaaatgaaaattatagaaaatttttatatcgcctagaaggtgctttattaaaacttaaattacggttttcccatggaactatctcatatttttatagttga

SEQ ID NO: 51639 - DNA, 1005 bp, Neisseria meningitidis
atgcaacgacaaatcaaactgaaaaattggcttcagaccgtttatcccgaacgggacttcgatctgacttttgcggcggcggatgctgatttccgccgctatttccgtgcaacgttttcagacggcagcagtgtcgtctgcatggatgcaccgcccgacaagatgagtgtcgcaccttatttgaaagtgcagaaactgtttgacatggtcaatgtgccgcaggtattgcacgcggacacggatctggggtttgtggtattgaacgacttgggcaatacgacgtttttgaccgcgatgcttcaggaacagggcgaaacggcgcacaaagccctgcttttggaggcaatcggcgagctggtcgaattgcagaaggcaagccgtgaaggggttttgcccgaatatgaccgtgaaacgatgctgcgcgaaatcaacctgttcccggaatggtttgtcgcaaaagaattggggcgcgaattaacattcaaacaacgccaactttggcagcagaccgtcgatacgctgctgccgcccctgttggcgcagcccaaagtctatgtgcaccgcgactttatcgtccgcaacctgatgctgacgcgcggcaggccgggtgttttagacttccaagacgcgctttacggcccgatttcctacgatttggtgtcgctgttgcgcgatgcctttatcgaatgggaagaagaatttgtcttggacttggttatccgctactgggaaaaggcgcgggctgccggcctgcccgtccccgaagcgtttgacgagttttaccgctggttcgaatggatgggcgtgcagcggcacttgaaggttgcaggcatcttcgcacgcctgtactaccgcgacggcaaagacaaataccgtccggaaatcccgcgtttcttaaactatctgcaccgcgtatcgcgccgttatgccgaactcgccccgctctacgcgctcttggtcgaactggtcggcgatgaagaactggaaacgggctttacgttttaa

SEQ ID NO: 51640 - DNA, 417 bp, Neisseria meningitidis
atgattgatgtcaaaatagacaatatctttgtcgtcctaaaccaaatcgagcggcttggcaacgggatcgaaaaccgctacctgctgatgcgccgactgtccgaaaccatgcacacggcggtcaagctcaatttccgctacgcaggccgtccgaaatggttggggctaaaataccgcgacggcaagccgctttcggattcgggtcgtctgaaagacagtttttccacactgtcagacaacgatacagcccttgtcggtacgaatatcgtctatgccgccatccacaacttcggcggtatggcggggcgcaaccgcaaagttcggattccgcaacgggaatttttgacgctgacggacgacgacaaacaggctttgatggacgatgtgcaggattatttttcgggtctgataccgtga

SEQ ID NO: 51641 - DNA, 564 bp, Neisseria meningitidis
atgaaactcatcattctcgaccgcgacggcgtcatcaatcaggaccgcgacgacttcgtcaaatccgccgacgagtggatacctgtcgaaggcagtatggatgcggtggcattcctgacgcaggcaggctacaccgtcgccgttgccaccaaccaatccggcatcgggcgcaaatattttaccgttcaaaaccttaccgaaatgcacgccaaaatgcaccgcctcgtccgtcaggcaggcggcgaaatcaacggcatctggttctgcccgcacaccgatgccgacaactgcaactgccgcaagcccaaaccgggtatgattgaagacatcatcggacgcttcaacgcccaagcctcggaaacctggctggtcggcgacagcctgcgcgatttgcaggcaatcgatgccgtcggcggaaaacccgcgctggttctgaccggaaaaggcaaaaaaacgctctcccaacacggacacgaattgcccgaacacacacaggttttcgataccctgctcgatttctcacaatacatcatgcaggaaaacaccgcaccgcaagccgactga

SEQ ID NO: 51642 - DNA, 1368 bp, Neisseria meningitidis
atgcctgaccttcataccgaattttcccgactcctgccggcagatgaaattgccgaactttctccgacgcttttaaaagaccagcgcaaccgctttacgtctgcaccagacatcattttgcagccgcgcagcgttgaaagcgtgcaaaccattatgcgtttttgttacgaacaccgtattccggttacgccgcaaggcggcaataccggtttgtgcggcgcggcagtatcggaaaacggcgtattgctgaacctttccaaactcaaccgcatccgcagcatcaatttgtcagacaactgcataaccgtcgaagcaggttccgtactccaaaccgtccaacaggcagccgaagcctcaaacaggctgtttccactcagtctcgccagcgaaggctcgtgccaaatcggcggcaacatcgcctgcaatgccggaggtttgaacgtattgcgttacggcacgatgcgcgacctggttatcggtttggaagtcgtcctccccaacggcgaacgggtttcccatctccatcccctgcataaaaacaccaccggctacgacctgcgccatctgtttatcggcagcgaaggcacactgggcatcatcactgccgccacactcaagctttttgcccgtccctcggacaaggcaacggcatgggtcggcatacccgacatcgaatccgccgtccgcctgctgaccgaaacccaagctcactttgccgaacgcctatgcagttttgagctgatcggccgttttgccgccgagttgtcttccgaattcagcaaattccccctgccgacacattcagaatggcatattttacttgagttgaccgactcattacccgacagcaatcttgatgatcggcttgtcgaatttctttataaaaaaggatttaccgacagcgtattggcacaaagcgaacaagaacgtatccatatgtggacactgcgtgaaaacatctccgcatcgcaacgcaaactgggcaccagcatcaaacacgatattgccgtccccatcgggcacgttgccgactttgtccgccggtgtgccaaagatttggaacagaatttcaaaggcatacaaatcgtctgcttcggacatctgggcgacggcagcctacactacaatacttttctgccggatatactcagtaacgaggcatatcgttacgaagatgacatcaacagcacagtctatcgcaacgttcttgcctgcaacggtacagttgccgccgaacacggcataggcatcatcaaaaaacagtggctggacaaagtacgcacgcctgccgaaatcgccctgatgaaaagcatcaaacaacaccttgatccatataacattatgaatccgggcaaactgcttccgtaa

SEQ ID NO: 51643 - DNA, 132 bp, Neisseria meningitidis; identical to SEQ ID NO: 39343

SEQ ID NO: 51644 - DNA, 600 bp, Neisseria meningitidis; identical to SEQ ID NO: 36546

SEQ ID NO: 51645 - DNA, 375 bp, Neisseria meningitidis; identical to SEQ ID NO: 38650

SEQ ID NO: 51646 - DNA, 390 bp, Neisseria meningitidis
atgtggaaaatcataaaagaggatagtgatgatttagaatttgcaattaaatgcttattctctcagtctattgatttaaatgaattcaagttatggattgaacaagtaatacgcgatatgcccatcgaggacatccctttttatatttttgatttggcggattttgatgggggaattgccgatattgacaatattgtaggttttgtttcaagttgcagactatcaaaatcgaaaaaaaatgccttgaccggcattgccttcttaagggggatagatgtctatgatccgcctatttcaaaagaaaaagcattaaaagccttagagaaacatcctgaaatttatcagaaatttcagcatttctttccgtttgtagagctgcccccgctttaa

SEQ ID NO: 51647 - DNA, 468 bp, Neisseria meningitidis; identical to SEQ ID NO: 40006

SEQ ID NO: 51648 - DNA, 435 bp, Neisseria meningitidis; identical to SEQ ID NO: 43640

SEQ ID NO: 51649 - DNA, 2265 bp, Neisseria meningitidis
atgcttgcacccgaattggaacagattttgcagcagctttaccgcgaggcgcgtaaggctcattatgaatttatcagcctcgagcatctgcttttggtactcatcgaagaagatgcctccgtgccgaacgtcttaaaactatgcggcgcggatttgaaagtggtgtccgaacagctcgccgccagcgttgccgaaaacacccccctgattcccgaacaccttttagacacggtcgaaacccggcccacgctcggcttccaacgcgtgatgcaacgggcgatggtgcatacccagtctgccggaaaagccgcagtcgaaccgttggacgttttggtcgcgctgatgagcgaaaccgacagccacaccgtctatttcctcaagctgcaatcggttacgcgttttgaagttttgcgctgtattgcccatggctcgcccgatgacgaggatggcaatgattcagacggcctgggacgcgagggcgaagaagcggaacaaaaaaccggctccctttccgactacaccgtcaacctcaacaccgaagtcaaagccggccgtatcgaccctttgattggtcgcaaacacgaaatggaacggctggtgcaaatcctatgccgccgccgcaaaaacaatccgcttttggtcggcgaagcaggcgtgggcaaaaccgcgctggcggaaggtttggcacatcaaatcgtcaacggcggcattccagacgcgcttaaagatgccgaagtgtacgcgctggatatgggctcgctgttggcgggcacgaaataccgtggcgactttgaagcgcgggtcaaatccgtcttgaaacagctcgaaaaaatcccgcacgccattttgtttatcgacgaaatccacaccatcatcggcgcgggcagcaccagcggcggcaccatggacgcgtccaacctgctcaaacccgcgctggcaaaaggttcgctgcgctgcatcggcgcgaccacctacgacgaataccgcaccattttcgacaaagaccatgccttaagccgccgcttccaaaaaatcgacgtggtcgaacccaccgtttccgaaaccgttcaaatcctgcgcggcttgaaaccgatgtttgaagccttccaccaagtccgctacactcaaggcgcactcgaagccgccgccgaactctccgcacgctacatcaacgagcgtttcctgcccgacaaagccatcgacgtaatggatgaagcaggcgcggcgcaacggattctgcccaaatccaaacagaaaaaagtcatcggcaaagcacaaatcgaaaccgtcatcgccaaagtttcgcggattcccgaaaaaaccgtgtcgcacgacgacaaacaagtgttgcaattcctcgaccgcgatttgaaaaacatggtttacggtcaggaaaacgccatcgacgcgctggttgccgccgtcaaaatgtcgcgctccggccttgccctgcccgacaaaccgataggcagtttcctcttctccggtccgaccggcgtgggcaaaaccgaagccgccaaacagcttgcctactcgatgggcgtaccgctgcaacgctttgatatgtccgaatacatggaacgccatgccgtatcacgactcatcggcgcgcctccgggctacgtcggctttgaacaaggcggccttttgaccgaagccgtcaacaaacagccgcattgcgtattgctcttggacgaaatcgaaaaagcccaccccgacattttcaacgtcctcctgcaagtcatggacgcaggcaaactgaccgacaacaacggcaagagtgccgatttccgcaacgtcatcctgattatgaccaccaatgcaggtgcggagagtctcagccgccccagcctcggctttaccgccaagcgcgaacgcggcgacgaaatgcaggcaatcaacaagctcttcacgcccgagttccgcaaccgcttggacgcgattatcccgtttgcacccttgtccgaacccatcatcgtcaaagtcgtggacaaattcctgctccagctcgaacaccagctcctcgacaaaaaagtcgaagccgaattcacgccggcattgcacaaatatctggcggaaaaaggttttgacccgcaaatgggcgcgcgcccgatgcaccgcctgattcaggaaaaaatccgcaaaccgctcgccgacgaactgctgttcggcaaactatccgacggcggcttcgtgcggatagactgggatgcggcaaaagaagaagccgtgttgaaatttaagaaaagtaaggtcaaaatatag

SEQ ID NO: 51650 - DNA, 1134 bp, Neisseria meningitidis; identical to SEQ ID NO: 47140

SEQ ID NO: 51651 - DNA, 1050 bp, Neisseria meningitidis
atgccgaattgtttcaaatttcataccgttatcgaacggcattggcaaaaaccttatccggttttgtcttttctgcttaagccgctctccgggctgtttgccaaaattgcggcaaaacggcggacggattttttatcgggaaaacggcaaagcgaaaagctgcccgtgcctgtggtcgtggtcggcaacatccacgcgggcgggacggggaaaacgccgattgttgccgcgctggtgtcgggtttgcaggaaaagggcgtcaaggtcggcatcatcagccggggctacgggcgtaagagcaaggcggttcatgtattgaatgccgcaagccgagcggaagatgcgggcgacgagcctttgctgctgttcagcaaaaccggtgcgccgacggcggtgggcagcagccgtgcagaggtaggcagggcattgctggcggcgcatcccgacatcggactgattgtggcggacgacggtttgcagcattacgccctacagcgggatgtagaaatcgcggtgtttccgtctgccgacacagcaaggcaagatttggatttgctgcccaacggcaatttgcgcgaacctttgtcgcggctggattcggtggatgcggtcgtcgtcagcggcggcaaggcggatgcgctgtttaggccgtctgaaaatatgtttcacagccgtatcgaagcgggacgaatttaccgtttgaacaatccgtccgaaatactggacacaggccgtctgaaaaatcaaaccgtcgtcgccgtggcaggtattgccaagccggcgcgttttttcgattcgttgcggcatatgggcatcaccttgaaccaaaccgtcgcgctgcccgaccacgccgatatttcggcggcagatctgcccgatgcggacgcggtgattattacagaaaaggatgcggtcaagttttcagacggcatcggtttgaaccatatatgggtgctgcccgtttgtgcgataatcgaacctgatttggcagaatttgtgctggagcggttggaaggtgccgaaggccgtctgaaagcgcggtttggatga

SEQ ID NO: 51652 - DNA, 342 bp, Neisseria meningitidis; identical to SEQ ID NO: 39758

SEQ ID NO: 51653 - DNA, 405 bp, Neisseria meningitidis
atgagaaaaagtcgtctaagccggtataaacaaaataaactcattgaactgtttgtcgcaggtgtaactgcaagaacagcagcagagttagtaggcgttaataaaagtaccgcagcctattattttcatcgtttacgattacttatttatcaaaacagtccgcatttggaaatgtttgacggcgaagtagaagcagatgaaagttattttgctgaacgacaaaaccatatcaatggaattgggaacttttggaaccgggcaaaacgtcatttacgcaagtttgacggcattcccaaagcgcattttgagctgtatttaaaggggtacgaacggcgttttaacaacagtgagataaaagttcaaatttccattttaaaacaattagtaaaatcgagtttatcctag

SEQ ID NO: 51654 - DNA, 1266 bp, Neisseria meningitidis
atgaacacactccaacgccgcaagacgcatcaagtccgcatcgatcatattaccgtcggttcagaagcacccgtcgttatccaatctatgaccaacaccgacactgccgatgcaaaagccaccgcattgcagattaaggaattgagcgatgccggatccgaaatggtgcgtattaccgtcaacagccccgaagccgcgtccaaagttgccgaaatccgccgccgcttggacgatatgggctatgccacaccgcttatcggcgatttccacttcaacggcgaacgcctgttggcggaatttccagaatgcggcaaagcattgtccaaataccgcatcaatcccggcaatgtcggcaaaggcgtaaaaggcgatgaaaaatttgcctttatgattcggactgctgctgaaaacgataaagccgtccgcatcggcgtaaactggggttctttggatcaaagcctcgccaaacgtatgatggatgccaacctcgcttcttccgcgccgaaaccgcccgaagaagtgacgaaggaagcactgattgtctccgctttggaatctgccgaaaaagccgttctattgggactgcccgaagacaaaatcatcctgtcgtgcaaagtcagcgcggttcaggatttgattcaggtttaccgcgaactgggcagccgttgcgcctatccgctgcatttgggtttgaccgaagccggtatgggcagcaaaggcattgtcgcatcaacggcggcattatccgtcttgcttcaagaaggaatcggcgacaccatccgcatttcactgactccggaacctggcagcccgcgtactcaggaggtcgtcgtcgggcaagagattttacagactatgggattgcgttcgtttacgccgatggttaccgcctgccccggctgcgggcgtaccaccagtaccgtatttcaagagctggcacaagatgttcaaaattacctgcgccaaaaaatgtctatatggcgtaccctttatcctggggttgaatccctgaacgttgccgtaatgggctgcgttgtcaatgggcccggagaaagcaaattggccgacatcggcatcagcctgcccggtacgggagaaacacccgttgcccctgtttatgtagatggtgaacgtaaagtaacgctgaaaggcgacaacattgcaacggaatttctggctattgttgaagagtatgtcaaaaccaattatggggagaacggactcaaacgccatcaagggaaggttatcccgatacactccctataa

SEQ ID NO: 51655 - DNA, 975 bp, Neisseria meningitidis
atggacacactgacccgattcctccccgaacacctgcaacaaaaccagctgcccgaagcactcggcggcgttttactgtccgttgtttccgcctgcaccgaaatcaacgccaaagtccgcctcggcgcactggccggcgtattgggtatggcgggcacgggcaatattcagggcgaagaccaaaaaaaactggatgttatcgccaacaacatcatgattgacacactcaaagccaaccctgccgttgccggtttggcaagcgaggaagaagactctttcgtaagtgccggtgaaaacggacgctatctcgtcctattcgaccctttagacggatcgtccaatattgatgtcaacatttccgtcggtacaattttctccatccttgaaaaacccgaaggcgcattggcaaccgaatcattccttcaaacgggcagacagcagcttgccgcaggctatatcctctacgggcctcaaacccagctcgtattcacattcggacacggcgtatatatgttcacgctcaatgccgaaaacgaatttgtgctgaccaaagaaaaaccgaaagtacccgaaagtaccaaagaatttgccatcaatatgtccaaccgccgccactggctgccccccgtccaacaatacatcgacgagctcttggcgggcgaaaccggcacgcgcggcaaaaactacaatatgcgctgggtagccagcatggttgccgaaatccaccgcatcctgatgcgcggcggcgtgttcatgtatccgcaagacaaacgcgaccccgccaagcccggcaaactgcgcctgatgtacgaagccaaccctatgagcctgatactcgaacaggcgggcgcatcggcaagcaacgcatatcaagccatgctcgacatacagcccgaaaacctgcaccaacgcgtcgccgtcttcatgggcagcagcgaagaagtcgcctatctcgaccgcctgcacgcaaaatag

SEQ ID NO: 51656 - DNA, 1497 bp, Neisseria meningitidis
atgtcgcttgccttggtttacagccgcgccttgagcggtatgaatgcgccgttggtcgaagtggaagctcaccttgccaacggcctgccgcatttcaacatcgtcgggctgcccgatacggaagtaaaggaaagtcgcgaccgcgtccgtgccgccattattcaaagcggttttgaattccccgccaaaaaaattaccgtcaacctcgcccccgccgacctgcccaaagagtcggggcgtttcgatttgccgattgcaatcggcatccttgctgcatcggggcaggttgcacccgaaaaactggcggaatacgagtttgcgggggaattggcactgtcggggctgttgcgccccgtgcgtggcgcgttggcgatggcgtggcagggtatgcaggcaaaacgtgcatttgttttgcctgaagaaaacgcaggacaagccgccgtgatgcgcggcattaccgtttacggcgcgcgctctttgggcgaagtcgccgcccatttgaacggtatcgaacctttggtgcaaaccgactgtcaagttcctcagatgccgtctgaaaacaccaaattgctcgacctcgtcgatgtcaagggtcagcacactgcccgccttgctttggaaatcgctgccgcaggcggacacagccttttgatgatgggtccgccgggaacgggcaagtctatgctctcccaacggctgcccggcatcctgccgccgctgaccgaagacgaattggtagaagtttgggcattgcgttcgctcctgcccaaccaccagcaacaactcgacagcaaccgtcctttccgcagtccgcatcacagcgccagcgcggcggctatggtcggcggcggttcggatccgcgtccgggcgaaatttcattggcgcatcacggcgttttatttttggatgaattgcccgagttcgaccgcaaagttttggaagttttgcgcgaaccgttggaaaacggcgagatccacatttcccgagcggcgcgccaagccgtctatcccgccaaattccaacttgtcgccgccatgaacccctgcccgtgcggctatctcgggcatcccgtcaaaccctgccgctgcacgcccgaaagcgtcgcgcgttaccgcagcaaaatttccggcccgctgctcgaccgcatcgatttgaccatcgaagtccccagcctgtccgccgccgaactgatgcagcaggaagcgggtgaaagcagcgcgtccgttttggaacgcgttatcgccgcccgcgacaaacaatacgcacggcaaggcaaagtgaatgccgccttgagtgtcagtgaactcgacacatccgcccgcattcaaaaagaagcgcaggaagcattgggcggcctgctggaaaaactctccctttccgcccgcagcttccaccgcattatgcgcgtggcgcgtacattggcggatttggcgggcgacgaagaagtcggcagaagccacgtcatgaaagccataggtttccgtcgcgctttatag

SEQ ID NO: 51657 - DNA, 1248 bp, Neisseria meningitidis
atgttttctctagaggcttggataggcttgaggtatctcagggcgaaaaagcgcaacggctttatgtcgtttatcacgatggtttcgattgccggaatcgccttgggcgtaaccgcgctgattgtcgtcttgtcggttatgaacggctttcagaaagaaatacgcgggcagctcctgaatgtcgcgccgcacgccgaaatcggctatatcgacaatacggatacggattggcgcaacctgcttcggtttaccgaaaaccgcaaaggtattttggctgccgcgccctatgtttccaatcaggcattgctggccaatgcgggcgaaatcaggggcgtgcagatgcgcggcattttgccgtctgaagagcgcaaagtggtggaatacggcgacaaaatgccggcaggcaaatttgaagacctgattccgggcgagtttgacattatcctcggtgtcggcttggcggaggctttgggggcggaagtcggcaataaagttaccgtcatcacgccggagggcaacgttacccctgccggagtcgtgccgcgcctgaagcagtttaccgtggtcggtctggttaagacgggcgtttacgaagtggacaactcattggcgatgacgcatatccaagacgcgcgcgtactgtaccgcttggataaggaagttgcggggctgcggctgaaactcgccgacccgcaaaacgcccccgccttgacggcaaagctgattccggaggcgcaaagggatacggtttgggtacgcgattggacgttcagcaaccgcagctattttgaggcggtcgagttggaaaaacggatgatgttcatcatcctgacgctgattatcgccgtggcggcgttcaaccttgtctcttccttggtgatggcggttacggaaaagcaggcggacattgcgattttacggactttgggtctttcccctggcggcgtgatgaagatttttatggtgcagggcgcgttttcaggctttttcggcacgttggcgggtgtggtctgcggcgtgcttttgggttggaacgtcggcagggtcgtggcgttttttgaaaacctgctcggtgtccacctcatcaattcgcaggtttattttatcgactacctgcccagcgatgtcgatatgggcgacgttgccctgattgcctgcatttctttgggactgtctttcgttgccacgctctacccgagccggcgcgcgtcaaaaacccaaccggcggaggctttgcgttatgagtga

SEQ ID NO: 51658 - DNA, 1836 bp, Neisseria meningitidis
gtgaacactactcctatccactccaaactcgccgaaatcaccgggcgcattattgaacgcagccgtccgacgcgtgaaaaatatctggcgaagatccgcagtgccaaacaaatgggacgcttagagcgcaaccagctcggctgcagcaacttggcacacggctatgctgccatgcctaaaagtatcaaaatcgaaatgcttcaggaaaccgtccccaacttaggcatcatcaccgcctacaacgacatggtttccgcacaccagccgtttaaagacttccctgaccaaatcaaagacgaagcgcagaaaaacggcgcgaccgcccaagtcgccggcggcacgcccgccatgtgcgacggcatcacgcaaggctacgccggcatggaattgtcgctgttctcccgcgacgtgattgccatgagtaccgccatcgggctgtcgcatcaaatgtttgacggcagcctgtttatgggcgtatgcgacaaaatcgttccaggtttgatgataggcgcgctttcgttcggtcatattccgggtatcttcgtccccgcaggcccgatgtccagcggtatcggcaacaaagaaaaagcccgcacccgccagcttttcgccgaaggcaaggtcggacgcaacgaacttttgaaaagcgaaatgggttcttaccacagcccgggcacctgcactttctacggcacggcaaactccaaccaaatgatgatggaaatgatgggcgtgcacctgcctgccgccgccttcgtccacccttacaccgacctgcgcgaagcgctgacccgctacgccgccggacacctcgcgcgcggcatcaaaaacggcacgattaaacctttgggcgaaatgttgaccgaaaaatcctttatcaacgccttgattggcctgatggcaaccggcggttcgaccaaccacaccatgcacctcgtcgctatggcgcgtgcggccggcgtgattttgaactgggacgacttcgacgaaatttcctccatcatcccgctgctcatccgcgtttatccgaacggcaaggccgacgtgaatcactttaccgcagcgggcggactgcctttcgttatccgcgaattgctgaatgcaggcctgttgcacgacgatgtcgataccgtcgtcggacacggtatgcgccactacaccaaagagcctttccttatcgacggcaaactcgaatggcgcgaagcccccgaaaccagcggcaacgacgacatcctgcgcaaagctgacaacccgttctcccccgacggcggtctgcgcctgatgaaaggcaacatcggacgcggcgtgattaaagtgtccgccgtgcgcgaaggctgccgcattattgaagcgcctgccatcgtgttcaacgaccaacgcgaagtgttggctgcgtttgaacgcggcgagttggaacgcgattttgtgtgcgtcgtccgctaccaaggcccgcgtgccaacggtatgcccgaattgcacaaactgaccccgcctttgggcatcctgcaagaccgcggcttcaaagtggcgctgctgaccgacggtcgtatgtccggcgcatctggcaaagttccggcctccatccacatgacacccgaagccctgatgggcggcaacatcgccaaaatccgtaccggcgacctgatccgcttcgactccgttagcggcgaactcaacgtcctgattaacgaaaccgaatggaatgcccgcgaagtcgaaagcatcgacttgggcgcgaaccaacaaggctgcggccgcgaactcttcgccaacttccgcagcatgaccagcagcgcggaaaccggtgccatgagtttcggcggcgaatttgcctga

SEQ ID NO: 51659 - DNA, 1311 bp, Neisseria meningitidis; identical to SEQ ID NO: 43019

SEQ ID NO: 51660 - DNA, 390 bp, Neisseria meningitidis
atgaacccgcacgagaaactcttgaccaccgacaaccccatcttgcgccaacgcgccaaagccatgcgccaagaaatgagcggggcggaagcaaaattgtggcagcacctgcgggcaggtcgtctgaacggctataaattccgccgccagcagccgatggggaattatattgttgattttatgtgcgtaacgcccaagttgattgtcgaagcagacggagggcagcacacagaacaagccgcatacgaccacgcgcggacggcatatctcaacagcttgggctttaccgtactgcggttttggaatcacgagattttacagcagacaaacgatgtactggcggaaatcctgcgcgtattgcaggaattggaaaagcagtatgcgcaataa

SEQ ID NO: 51661 - DNA, 291 bp, Neisseria meningitidis; identical to SEQ ID NO: 39870

SEQ ID NO: 51662 - DNA, 648 bp, Neisseria meningitidis
atggcttctaaatcatctaaaaccaacttggatctcaacaaccttcacctgctcaaccttcctgccaggctttttatcgccctgctggccgttgccgccgtgctggggctcggttatgccggattgttcaaaagccagatggaatcccttgaggaatacgaagcaaaagaaaccgaactgaaaaacacctacaaacagaaaagtatcgacgcggccagcctgaacaacctgagggacgaacttgcctcaatccgctctgccttcgatatcatgttgaaacagctgccgacagatgcagaaattcccaacctggttcaagagcttcatcaggcaggttcgagcaacggtctgcgcttggacagcgttatgccccaacctcccgtagatgacggccccatcaaaagattaccctattccatttccattaccggaaattacgaacagatcagccaatttacccgcgatgtcggcagcctctcccgaatcattacccttgagtcgctgaaaatcgcccaatctccggaaaacggcggcaatcctgacggcaagagcagcatcctgaacctcaacgccattgccaccacctaccaagcaaaatccgtagaagagcttgccgcagaagcggcacaaaatgccgagcaaaaataa

SEQ ID NO: 51663 - DNA, 993 bp, Neisseria meningitidis
atgaaaaaatccctgattgccctgactttggcagcccttcctgttgcagcaatggctgacgttaccctgtacggcaccatcaaaaccggcgtagaaacttcccgctctgtatattacgaagacggcaaagctgctgaagttacaaccggtaccggcatcgttgatttgggttcgaaaatcggcttcaaaggccaagaagacctcggtaacggtctgaaagccatttggcaggttgagcaaaaggcatctatcgccggtactgactccggttggggcaaccgccaatccttcatcggtttgaaaggcggcttcggtaaattgcgcgtcggccgtttgaacagcgtcctgaaagataccggcgacatcaatccttgggatagcaaaagcgactatttgggtgtaaacaaaattgccgaacccgaggcacgcctcatttccgtacgctacgattctcccgaatttgccggcctcagcggcagcgtacaatacgcgcttaacgacaatgcaggcagacataacagcgaatcttaccacgccggcttcaactacaaaaacggcggcttcttcgtgcaatatggcggtgcctataaaagacatgagcagatagataacgtgaagattgagaaataccagattcaccgtttggtcagcggttacgacaatgatgccctgcacgcttccgtagccgtacaacaacaagatgccaaattggttgaagacaattattcgcacaactctcaaaccgaagttgccgctaccttggcataccgcttcggcaacgtaacgccccgcgtttcttacgcccacggcttcaaaggctcgtttgatgatgcagaccgctacaatacttacgaccaagtggttgtcggtgcggaatacgacttctccaaacgcacttctgccttggtttctgccggttggttgcaagaaggcgaaggcgaaagcaaattcgtatcgactgccggcggtgtcggtctgcgccacaaattctaa

SEQ ID NO: 51664 - DNA, 1686 bp, Neisseria meningitidis
atgtctatggaaaattttgctcagctgttggaagaaagctttaccctgcaagaaatgaacccgggtgaggtgattaccgctgaagtagtggcaatcgaccaaaacttcgttaccgtaaacgcaggtctgaaatcagaatccctgattgatgtagctgaattcaaaaacgctcaaggcgaaattgaagttaaagtcggcgacttcgttaccgttaccatcgaatccgtcgaaaacggcttcggcgaaaccaaactgtcccgcgaaaaagccaaacgcgctgccgattggattgccctggaagaagccatggaaaacggcaacatcctgtccggcatcatcaacggcaaagtcaaaggcggcctgaccgttatgattagcagcatccgcgcattcctgccgggttctttggtcgacgtacgtcctgtaaaagacacttctcacttcgaaggtaaagaaattgaattcaaagtgatcaaactggacaaaaaacgcaacaacgttgttgtgtcccgccgcgccgttctggaagctaccttgggtgaagaacgcaaagccctgctggaaaacctgcaagaaggctccgtcatcaaaggcatcgttaaaaacattaccgattacggtgcattcgttgacttgggcggcatcgatggtctgctgcacatcaccgacttggcatggcgccgtgtgaaacacccgagcgaagttctggaagtcggtcaagaagtagaagctaaagtcctgaaattcgaccaagacaaacaacgcgtttctctgggtatgaaacaactgggcgaagatccttggagcggcctgacccgtcgttacccgcaaggtacccgcctgttcggtaaagtatccaacctgaccgactacggtgcgttcgttgaaatcgaacaaggcatcgaaggcttggtgcacgtttccgaaatggattggaccaacaaaaatgtacacccgagcaaagttgtacaattgggcgacgaagtcgaagtaatgatcctcgaaatcgatgaaagccgccggcgtatctctttgggtatgaaacaatgccaagccaatccttgggaagaatttgccgccaaccacaacaaaggcgacaaaatctccggcgcggttaaatccattaccgatttcggcgtattcgtcggtctgcctggcggcatcgacggtttggttcacctgtccgacctgtcctggaccgaatccggcgaagaagccgtacgcaaatacaaaaaaggcgaagaagtcgaagccgtcgtattggcaatcgacgtggaaaaagaacgcatctccttgggtatcaaacaactggaaggcgatccgttcggcaacttcatcagcgtgaacgacaaaggttctttggttaaaggttccgtgaaatctgttgacgccaaaggtgctgttatcgccctgtctgacgaagtagaaggctacctgcctgcttccgaatttgcagccgaccgcgttgaagatttgaccaccaaactgaaagaaggcgacgaagttgaagccgtcatcgttaccgttgaccgcaaaaaccgcagcatcaaactttccgttaaagccaaagatgccaaagaaagccgcgaagcactgaactccgtcaatgccgccgccaatgcgaatgccggcaccaccagcttgggcgacctgctgaaagccaaactctccggcgaacaagaataa

SEQ ID NO: 51665 - DNA, 1911 bp, Neisseria meningitidis
atgaatatattatctgtagaaaacgcttcttttgccatcggccacgttgccttgctcgacaaaacttcttttcaactcgacagcggcgaaaaagtcggcttaatcggacgcaacggcgcaggcaagtcttcgtttttaaaaatcctcgccggtttgcaaaagctcgacgacgggcagattattgttcaaaacaacctcaaaatcgtttatgtaccgcaggaatccttttttgataaggacgcaaccgtatttgataccgttgccgaaggtttgggcgaaattcgtgatttattgcgccgttatcatcatgtcagccatgagttggaaaatggttcgagtgaggctttgttgaaagaactcaacgaattgcaacttgaaatcgaagcgaaggacggctggaaactggatgcggcagtcaagcagactttgggggaactcggtttgccggaaaatgaaaaaatcggcaacctttccggcggtcagaaaaagcgcgtcgccttggctcaggcttgggtgcaaaagcccgacgtattgctgctggacgagccgaccaaccatttggatatcgacgcgattatttggctggaaaatctgctcaaagcgtttgaaggcagcttggttgtgattacccacgaccgccgttttttggacaatatcgccacgcggattgtcgaactcgatcgcggtattttgcgttcctatcccggctcgttctctaaatacagcgagaaaaaagcgcaagagttggcagtcgaagcggaacacaaccgcctctttgacaaattccacgcacaggaagaagcatggatacgcaaaggcatcgaagcgcgccgtacccgcaacgaaggccgcgtgcgccgtttggaagagctgcgccgccagcgtgcagaacgccgcaacgtacagggacaagtcaacttcaagctcgatagcggtgagaaaagtggcaaaatcatcgccgaattggaacacgcttcgtttgcctatggcggcaaagtcattatggacaaattctccgctatcttgcagcgcggcgacaaaatcggcctaatcggccccaacggcatcggcaaaaccaccttccttaagctgattttgggcgaattgcagccgacctacggcagaatccgtatcggcagtaagcaggaagtcgcctatttcgaccagttccgcagcgcgttgaatgaaaacgacaccgtgttttacaccctcggacagggaaacgattacgttgaagtcggcggtaagaaaaaacacgtcatgagctatttggaagatttcctgttccatccagcccgtgcgcaaagccctgtttcatcgctctccggcggagaacgcaaccgccttttgctggcaaaactctttacccgtcctgccaatatcctggtcttggacgaaccgaccaacgacttagacatcgacacccaagagctgctcgaagacctgttgcgcgattatcaaggcacagtattccttgtctcgcacgaccgtatgttccttgataacgtaattacccaaagcattgttttcgaaggacaaggccgtctgaaagaatacatcggcggctatcaggactatatcgacgcaaaatcgcgggaagataaaattcagacggcatccgcacccaaagcatccgatgccgaacccgccaaagaaaaacccaaagccaaccgcacggtcaaactgtcctacaaagagcagcgcgaactcgatgccctgcccgacgaaatcgccgctttggaagccgagcaggctgaaatcaatacccaactttcctatcctgaaattttcaaagattacgaaaaagcaggtgcattgcaaaaccgcgccgaagaaatcgaaatgctgcttttggaaaagctggaacgctgggagctgctggaaaccaaacggaacggcaatgccgtctga

SEQ ID NO: 51666 - DNA, 1104 bp, Neisseria meningitidis
atgaatacgacagcaaacccttccaatatcatcgtcgggctctccggcggtgtcgattcttccgtaaccgccgccctgctcaagcagcagggttatcaagtgcgcggtgtgttcatgcagaactgggaagacgacgacaacgacgaatattgcagcatcaaacaggattcgttcgatgccatcgccgttgccgatattatcggcatcgatatcgacatcgttaatttcgccgcgcaatataaagacaaagtctttgcttattttcttcaggaatacagtgcggggcgcacgccgaatccggatgtgttgtgcaacgccgaaatcaaattcaaatgctttttggactacgccgtagggcagggcgcggataccatcgccaccggccactatgcgcgcaaagaagttcgcaacggcgtgcattacctgctcaaaggtttggatcgaaacaaagaccaaagctatttcctctaccgcctcaagcctttccaactcgaacgcgcgatttttccgttgggcggtttggaaaaacccgaagtgcgccgccttgccgccgagttcaaactgccgaccgccgccaaaaaagacagcacgggcatctgcttcatcggtgaacgcccgtttcgcgagtttctgcaaaaatacctgccgaccgacaacggtaaaatggttacgcccgaagggaaaaccgtcggcgaacacgtcgggctgatgttctacacgctcggacagcgcaaaggtttgggcatcggcggcgcgggcgaaccgtggtttgttgcggctaaagatttgacgaaaaacgaactgattgtcgtgcaaggacacgaccatccgctgctctatacccgcagccttgtgatgaacgatttgagtttcacgctgcccgaacgcccgaaggcaggacgctatacctgcaaaacgcgttaccgtatggcggacgcgccttgtgagttgcgctatttggatgaagaaaccgccgagctggtgtttgacgaaccgcaatgggcggttacgccgggccagtctgccgtgctgtacgacggcgacatctgtttgggcggcggcatcatccaaacgaccgacaaaccagtcatcatcacacgataa

SEQ ID NO: 51667 - DNA, 195 bp, Neisseria meningitidis; identical to SEQ ID NO: 37083

SEQ ID NO: 51668 - DNA, 363 bp, Neisseria meningitidis; identical to SEQ ID NO: 43023

SEQ ID NO: 51669 - DNA, 612 bp, Neisseria meningitidis; identical to SEQ ID NO: 42191

SEQ ID NO: 51670 - DNA, 579 bp, Neisseria meningitidis
atgtttaataaatcctttaacactatacatcttaccgaaggaggaaaaatgaacgcaatccgaactttccaaaaccgcacgcccgaaatccacgaaagctgtatgatagacgaagcgtgcgtcgtcatcggcgaagtgtcgcttgccgaagacgtttctgtgtggccgtgcgccgtgttgcgcggcgatgtgaacagcatcaccgtcggcgcgcgcagcaatatacaggacggcagcgtcctgcacgtttcccacaaaaccgccgccaaacccgaagggtcgccgctggttatcggcgaagacgttaccgtggggcacaaagtgatgctgcacggctgccgtatcggcaaccgcgtcctggtcggcatggggacgacggttctggacgatgccgtgattgaggacgaagtgatgatcggcgcgggcagcctcgtgcctccgcgcaaacgtttggcgggcggctatctttatgtcggttcgccggtcagacaagtgcgcgtgttgaccgatgaggaaaaagcctttttgaagtattccgccgcgcattatgtgaagctgtcgaaacagtacgggatgtga

SEQ ID NO: 51671 - DNA, 2361 bp, Neisseria meningitidis; identical to SEQ ID NO: 42776

SEQ ID NO: 51672 - DNA, 801 bp, Neisseria meningitidis
atgaacgcgttcaacctcatcatcatcggcgacgaaatcctgcacggcagccgccaagacaagcatttcgcctttttcaaatccctgctcgaatccaaagggctgaagctcaatcaggtgcaatatctgcccgacgaacccgatttgctggtcaggcaactgcgccgcagcttttcagacggcataccgacgtttgttaccggcggcatcggcgccacgcccgacgatcatacccgccaagcggccgccgccgctttggagttgcccgtcgtccgccatcctgaagccgccgggtttatcgaaggcataacccagaaacgcggcgagccgcttgattcgccggaacacgcccaacgcctgaaaatggcagatttccccgaaggcgcggaattggtgcccaatccgtttaataatatcgccggattttccattcgcgagcattatttcttccctggttttcctgtgatggcgcacccgatggcggaatgggttttggatacttattacgccggccgcttcaaccaaacccaacgcggcagccgcagcgtgtatgtgttcgagcagcccgaatcgcgcattacgccgattatggagcatatcgagcaaacttatcccggcgtgcgttcgtacagcctgcccagcgtcggttggacgcattcagacggcacgcaggtcaaaccgcacattgagttcggcatcaaagccgaaggagaagccgtcaaccttttggacgcggcgtgggcggaagtgttgcacagcttggacggattgggagcagagctgaaaaatcgggtaaactga

SEQ ID NO: 51673 - DNA, 402 bp, Neisseria meningitidis
ttggctgaaggtcaaaaatcagccgttaccgagtattacctgaatcacggcgaatggcccgccaacaacagttctgccggcgtggcaacctccgccgacatcaaaggcaaatatgttaaaagcgttgaagtcaaaaacggcgtcgttaccgcccaaatggcttcaagcaacgtaaacaacgaaatcaaaggcaaaaaactctccctgtgggccaagcgtcaagccggttcggtaaaatggttctgcggacagccggttacgcgcaaagccaacaacgccgacgacgtcgccgacgacggcaacgacaaaatcgacaccaagcacctgccgtcaacctgccgcgatgaatcaactgccggttgcatagaaacaccacctacggctttctataaaaatacctaa

SEQ ID NO: 51674 - DNA, 336 bp, Neisseria meningitidis; identical to SEQ ID NO: 43327

SEQ ID NO: 51675 - DNA, 2586 bp, Neisseria meningitidis; identical to SEQ ID NO: 43570

SEQ ID NO: 51676 - DNA, 483 bp, Neisseria meningitidis; identical to SEQ ID NO: 45182

SEQ ID NO: 51677 - DNA, 1779 bp, Neisseria meningitidis
atgaacaaaatataccgcatcatttggaatagtgccctcaatgcctgggtcgtcgtatccgagctcacacgcaaccacaccaaacgcgcctccgcaaccgtggagaccgccgtattggcgacactgttgtttgcaacggttcaggcaagtgctaacaatgaagagcaagaagaagatttatatttagaccccgtacaacgcactgttgccgtgttgatagtcaattccgataaagaaggcacgggagaaaaagaaaaagtagaagaaaattcagattgggcagtatatttcaacgagaaaggagtactaacagccagagaaatcaccctcaaagccggcgacaacctgaaaatcaaacaaaacggcacaaacttcacctactcgctgaaaaaagacctcacagatctgaccagtgttggaactgaaaaattatcgtttagcgcaaacggcaataaagtcaacatcacaagcgacaccaaaggcttgaattttgcgaaagaaacggctgggacgaacggcgacaccacggttcatctgaacggtattggttcgactttgaccgatacgctgctgaataccggagcgaccacaaacgtaaccaacgacaacgttaccgatgacgagaaaaaacgtgcggcaagcgttaaagacgtattaaacgcaggctggaacattaaaggcgttaaacccggtacaacagcttccgataacgttgatttcgtccgcacttacgacacagtcgagttcttgagcgcagatacgaaaacaacgactgttaatgtggaaagcaaagacaacggcaagaaaaccgaagttaaaatcggtgcgaagacttctgttattaaagaaaaagacggtaagttggttactggtaaaggcaaagacgagaatggttcttctacagacgaaggcgaaggcttagtgactgcaaaagaagtgattgatgcagtaaacaaggctggttggagaatgaaaacaacaaccgctaatggtcaaacaggtcaagctgacaagtttgaaaccgttacatcaggcacaaatgtaacctttgctagtggtaaaggtacaactgcgactgtaagtaaagatgatcaaggcaacatcactgttaagtatgatgtaaatgtcggcgatgccctaaacgtcaatcagctgcaaaacagcggttggaatttggattccaaagcggttgcaggttcttcgggcaaagtcatcagcggcaatgtttcgccgagcaagggaaagatggatgaaaccgtcaacattaatgccggcaacaacatcgagattacccgcaacggtaaaaatatcgacatcgccacttcgatgaccccgcagttttccagcgtttcgctcggcgcgggggcggatgcgcccactttgagcgtggatgacaagggcgcgttgaatgtcggcagcaaggatgccaacaaacccgtccgcattaccaatgtcgccccgggcgttaaagagggggatgttacaaacgtcgcacaacttaaaggcgtggcgcaaaacttgaacaaccgcatcgacaatgtggacggcaacgcgcgtgcgggcatcgcccaagcgattgcaaccgcaggtctggttcaggcgtatctgcccggcaagagtatgatggcgatcggcggcggcacttatcgcggcgaagccggttacgccatcggctactccagtatttccgacggcggaaattggattatcaaaggcacggcttccggcaattcgcgcggtcatttcggtgcttccgcatctgtcggttatcagtggtaa

SEQ ID NO: 51678 - DNA, 750 bp, Neisseria meningitidis
atgccgactatgctgattgtccgtccgtcgggcagggcgaaggacgatgtggaaatctgccgtcgtaccggatggcaggcggaagtgttgagtccgattgaaatcgaaaccgacaaagcaagcctgaaacggctgccggaaatgtatgcccgtgcggatgccgtgttttgggtcagtccgaccgccgttgaaaccgccgtcccgtaccttaacctttcagacggcataaaggcgcagattgccgtagggcagggcagccgccgcgcattggaacgctgtttggtcagaacggtcatcgcgcctgatgacggcaacgacagcgaggcggttttgcgcctgacggtttggaacagtctgcccgaaggtgcgcgcgtattgtttgtgcgcggacacggcgggcgggattttctgatgaatgccttgcaggagaaaggttttcggacggaggtggcagaagtctatttcagacggcataaacctttgaactttcaaaatttccaaaccgaaaatattgccgccgcctatattacgtccacagaactcgtgcgcttgctgttcggacagcttccgccgcaattttcccgattcttcaaatccttgctatactttacccatcatccgcgcattgcggaggcattgaagcgcgaaggcgtgtgttcggtcgaaaccgtccctacgctggaagccgcgctttcccattcttccatttccgtttcagacggcatggtctttcccggaacctcaaattaa

SEQ ID NO: 51679 - DNA, 402 bp, Neisseria meningitidis; identical to SEQ ID NO: 42860

SEQ ID NO: 51680 - DNA, 1977 bp, Neisseria meningitidis
atgtcccgaatcgccgccctgcccgaccatcttgtcaaccaaatcgccgccggcgaagtggtcgaacgccctgccaacgccttgaaagaaatcgttgaaaacagtatcgatgcaggcgcaacggcgattgaagtcgagctggcgggcggcggcatccgcctgattcgcgtcagcgacaacggcggcggcatccaccccgacgacatcgaacttgcgctccaccgccacgccaccagcaaaatcaaaaccttaaacgatttggaacacgtcgccagtatgggctttcgcggcgaaggtttggcaagcatcgcctccgtcagccgcctgaccctgaccagccgtcagaacgacagttcgcacgcgacccaagtcaaagccgaagacggcaaactcagcagccccaccgccgccgcccaccccgtcggcaccaccatcgaagccgccgaactcttcttcaacacccccgcacggcgcaagttcctcaaatccgaaaacaccgaatacgcccactgcgccaccatgctcgaacgcctcgcgctggcgcatccgcacattgccttctcgctcaaacgcgacggcaaacaagtgttcaaactccctgcacaaagcctgcatgaacggattgccgccattgtcggcgaagactttcagacggcatcattgggaatcgacagcggcaacggcgcgctgcggctctatggtgcgattgccaaaccgactttcgccaaaggtaaaaccgacaaacaatactgcttcgtcaaccatcgcttcgtgcgcgacaaagtgatgctccacgccgtcaagcaggcataccgcgacgtattgcacaacgcactcactcccgccttcgtcctctttctcgacctgccgcccgaagccgtggatgtcaacgtccacccgaccaaaaccgaaatccgcttccgcgacagtcagcaggtgcaccaacttgtgttccacacgctcaacaaagcccttgccgacacacgcgccaacctgaccgaaagcgtcggcaacgcaggcgaagtgttgcatgacattaccggcgttgtctccaccccaatgccgtctgaaaacgacagcgaaaatctgtttgatagcgtatccaactacccgacaggcaacaaatcagatacacacaatgcctttggttcatcaggcaaaaccgcgcccatgccctatcagtccgcatatgcgccgcaacaacgcagcctgtccctgcgcgaaagccgcgcggcaatgaatacttacgccgaactttacaaaaaaaccgacgacatcgaccttgagttaagccgattcgagcaggcacgtttcggcaatatgccgtctgaaacgcctgctccccaaacagatacgccgctttcagacggcatcccatccccatccgaactaccgccgctcggttttgccattgcccaattacttggcatctacattcttgcccaagccgaagacagcctgttgctcatcgatatgcacgccgccgccgaacgcgtcaactacgaaaaaatgaaacgccaacgtcaggaaaacggcaacctgcaaagccaacgcctgcttattcccgtaacctttgccgcgtcccacgaagaatgcgccgcccttgccgattatgccgaaacgctggcaggcttcgggctggaattatccgatatgggcggcaacaccctcgccgtccgtgcagttcccgccatgctcggcaaagccgatgtcgtctcgctcgccaaagacgtattaaacgaactcgcccaagtcggcagcagccaaaccatcgaggaacacgaaaaccgcatcctcgccaccatgtcctgccacggctcgatccgcgccggccgccggctcaccctgcccgaaatgaacgcccttctgcgcgatatggaaaatacgccgcgcagcaaccagtgcaaccacggcaggccgacttgggtcaaactgactttgaaagaattggacgcactgttcttgcgcggacagtaa

SEQ ID NO: 51681 - DNA, 435 bp, Neisseria meningitidis; identical to SEQ ID NO: 42997

SEQ ID NO: 51682 - DNA, 1155 bp, Neisseria meningitidis
atgaaattcatcgacgaagcaaaaatcgaagtcgccgcaggcaaaggcggtaatggcgcaaccagtttccgccgcgaaaaattcgtaccccgcggcggccctgacggcggcgacggcggcaaaggcggcagcgtttgggcagaagccgacgaaaacaccaacaccctcgtcgaataccgcttcgtcaaacgctaccaagccaaaaacggcgaaaaaggtcatggttccgaccgttacggcgcaggtgcggacgacatcgtcctcaaaatgcccgtcggcacccttatccgcgacctcgacaccgatgaaaccgttgccgacctcacctaccacggacagcgcgtctgcctcgccaaaggcggcaaaggcggcttgggcaacatccacttcaaatcctccgtcaaccgcgcacccaaacaatccacacccggcgaagaaggcgaaacccgctccctgcaactcgagcttaaagtccttgccgatgtcggcttattgggtatgcccaacgccggcaaatccaccctgattaccgccgtctccgccgcccgccccaaaattgccaactatccctttaccaccctgcatccgaacttgggcgtggtacgcatcgacgaaaaccacagcttcgtgatggcggatattcccggcctgattgaaggcgcggcagaaggcgcgggtttggggcatcgtttcctcaaacacttatcgcgcaccggattattgctgcatgtcgtcgatttggcacccttcgacgaaaccgccaaccccgccgaagaagccctcgccatcatcaacgaattacgcaaatacgacgaagaactctacggcaaaccgcgctggctggtgctgaacaaactcgatatgctcgacgaagaagaagcccaagcacgcaccgccgccttcctcgaagccgtcggctgggattaccccaaacccgacgaccgcttccaattcgacacggaaaccccgcgcctcttccaaatcagcgcactgacccaccaaggcacgcaggaattggtacaccaaatcaaccaatacctgatcgagaaaaaacgtatcgaagctgaaaaagcggaggcggagcgggcagcgacaaatgttgagattgccgagcaacagcctaaaacggatacgggcgtgtttaagccggagtga

SEQ ID NO: 51683 - DNA, 2451 bp, Neisseria meningitidis
atgacacaaaaagaaaagcattttgaggaatatgccgccttggcaacccttcctttgcgggatgtcgtcgtttacccgcatatggttctgccgctgtttgtcggcaggccgaaatccatcgccgcactggaaaacgccattacccgcgaggagccggttttcctgttggcgcaaaccgatgcggcgctagaagaaccggttgccgccgacctgtatcagaccggtacggtcgcacaagtcctgcaagtgttgaaactacccgacggcacggtaaaagtattggtcgaagggctgtatcgcggacgtgttctgaccattgaagacacgggcggtctgttcgtttcccatatagagacggtcgtggaagaagacacgggcggcaataccgacctcgaagccgtgcgccgcaccctgttggcgcagtttgaacaatacgccaaactcaataaaaaaatccccgccgaaattatcggcagcattaacggcattgccgaaaacagccggctaaccgatacggtcgcagcgcatttgcagttgaaactggcgcaacgccaacagattttggaaattcccgaaatcggcaaacggatggaattcctgctggcacagctggaatccgaactcgacattatgcaggccgaaaaacgcatacgcggacgcgtcaaacgccaaatggaaaaatcccagcgcgaatattatctgaacgaacagattaaagcgatacacaaagaattgggcgaagaagacgaaaacggcgaactggatgccttggaagcaggcatcaaaaaggcggggatgagcaaagaagcggaagaaaaatgcctgtccgaactgaaaaaactcaaaatgatgccgccgatgtctgccgaatccaccgtcgtacgcaactacatcgacaccctgctcgaactgccgtggaagaaaaaatcccgcgtcagcaaagacatcgccaaagccggattggtgctggataccgaccactacggcctggaaaaagtcaaagaacggattttggaatacctcgccgtccaaaaacgtatggacaaactcaaaggcccgattctgtgcctggtcggccctccaggcgtgggcaaaacctctttgggcgaatccatcgccaaagcaacggggcggaaatatgtccgcatggctttgggcggcgtgcgcgacgaaagcgaaatccggggacaccgccgcacctatatcggctccatgcccggtaagattttgcagaatatggcaaaagccggcgtaaaaaacccattgttcctgctcgacgaaatcgacaaattgggtagcgacttccggggcgatcccgccagcgcgttgctcgaagtgcttgatcccgagcaaaacaacaagttcgccgatcattatgccgaagtggattacgatttgagcgatgtgatgtttattgcgacttcaaacagcctgaatatcccgacaccgctgctcgaccgtatggaaatcatccgtctgtccggctataccgaagacgaaaaaatcaatatcgcgatgcagtacctcgtgccgaagcaaatgaagcgcaacggcgtaaaagaaggggaattggcaatcgaagaaagcgcggtgcgcgatattatccgttactacacccgcgaggcgggcgtgcgttcgctcgaccgcgagattgccaaaatctgccgcaaggtggtgatgcagattaccttggacgaagactcaaaaaccaaaaaaaccggaaaagccaagcccagggcggttaaagtaaatgagaaaaatctgcacgactatttgggtgtgcgccgcttcgattacggcgttgccgaaagcgaaaaccgtatcggacaagtaaccggtttggcgtggacggaagtcggcggcgaattgctgaccgtcgaagccgcagcattgccgggtaagggcgtgattcagtgcaccggccagttgggcgatgtgatgaaggaatccgtgtccgcagcgtggtcggttgtccgctcccgtgcggaatcagtgggtttggctcctgatttttacgagaaaaaagacatccacatccacgttcccgaaggcgcgacgccgaaagacggccctagtgcgggtattgcgatgaccttggcggcggtatctgcctttaccaaaatcccggtacgcgccgatgtggcgatgacgggcgaaattaccctgcgcggcgaagtcctgccgattggcggtctgaaggaaaaactgttggctgcgcttcgcggcggcatcaaacacgttttaattccaaaagacaacctcaaagacttggaagaaatccctgaaaacgtgaaaaccggcctgaccatccatccggtcaaatggatagacgaggtattggctctgggtttggaaagccagcctgagccttgggcagaaccttctggtgcggaagcggcggcggaatccgcttcaaaaccaaaaccccgcagcagggcaaccaaacattga

SEQ ID NO: 51684 - DNA, 402 bp, Neisseria meningitidis
atgccgtctgaagccttcagacggcatcgtgcctatcgggagaataaattgcagcctttagtcagcgtattgatttgcgcctacaacgcagaaaaatatttcgcccaatcattagccgccgtcgtgaatcagacttggcgcaacttggagattttgattgtcgatgacggctcgacagacggcacacttgccattgccaaggattttcaaaagtgggacagccgtatcaaaatccttgcacacgaccgcctcctgaaccgcaaacagcaaaggcgcgattcccccgccaacacattcaaacaccgcctgatccgcgccttgaccaaaatcagcagggaaagggaaaaacgtcggcaaaggcgcgaacagttaatcggcaagatcattgtgcctttccaataa

SEQ ID NO: 51685 - DNA, 825 bp, Neisseria meningitidis
atgttgaaaaaattcgtactcggcggcattgccgcattggttttggcggcctgcggcggttcggaaggcggcagcggagcatcttccgcgcctgcacaatcggcagtttccggttctttaatcgagcgcatcaacaataaaggcacggttaccgtcggcacggaaggtacttacgcaccgtttacctaccacgacaaggacggcaaactgaccggttacgatgtggaagtaacccgcgccgtggcggaaaaactgggcgtgaaagtcgagtttaaagaaacgcaatgggattcgatgatggcgggtttgaaggcggggcgtttcgacgtggtggcaaaccaagtcggtctgaccagccccgaacgccaagcgacattcgacaaatccgatccttacagctggagcggtgccgtattggttgcccgtaacgacagcaacatcaaatctatcgacgacatcaaaggcgtgaaaaccgcacaatccctgaccagcaactacggcgaaaaagccaaagctgcaggcgcagatttggtggctgttgacggtttggcgcaatcgctgaccctgattgaacaaaaacgtgccgatgcaaccctgaacgacgaattggcggttttggactatctgaagaaaaacccgaatgcgggcgtgaaaatcgtttggtccgcacctgccgatgaaaaagtcggttccggcctgattgtcaacaagggcaatgacgaagccgtggcgaaattcagtacggcaatcaacgagctgaaagccgacggtacgctgaaaaaactgggcgaacaattcttcggaaaagacatcagtgttcaataa

SEQ ID NO: 51686 - DNA, 975 bp, Neisseria meningitidis
atgacagaatatcccggcatcgggtcgccgttgttttacggcgttttttttgcggcagtgctggtcatgattgccttggatatgttttcgctgaagaaaaacagcagccataaagtcggcgtcaaagaagccttggcatggagcggcttgtgggttgccgtatcctgcctgttcgcaggctggctgtatttcaaactcgccggcaatcccggctacggcgcggcagtcgcaaaagaaaaagtattggaattctttaccggctacattttggaaaaatcgttggcagtcgataatattttcgtgttcctgatgatattcggctacttcaaagtcgcaccgcagtttcagcaccgcgtgctgctgtacggcgtattgggcgcattggtattgcgcaccgtcatgattttcgtcggcgcggcactggttcggcagttcgagtggattctgtatctgttcggcgcgttcctgctctataccggcatacacatgatgaagcccgagggcgatgaggaagaggatttggcaaacagcaggctgctgaatgccgtcaagaaagtcgttccggtcggcacggaatttcacggcgagaaattttttaccgtcgaaaacggcaaaaaaatcgccacgccgctgtttttggtgctggtcatgattgaattgagcgatgtcgtgtttgctgtggacagtattcccgccgtctttgccgttaccaccgatccgtttatcgtgctgacttccaatattttcgctattttgggtttgcgggcgatgtatttcctactggcggatgtggcggaacgctttatcttcctgaaatacggcttggcattcgtgttgagttttatcggtgtgaaaatgctggtaatgcattgggtgcatatcccgatttccgtttcactgtcgatcgtcttcggcgcgttgggtgcatcgatactgacctcgttaatttatacgaaaaaacagcttgataaataa

SEQ ID NO: 51687 - DNA, 798 bp, Neisseria meningitidis
atgaaccgtctttacccccacccgattatcgcccgtgagggctggccgattattggcggcggtttggctttgagcctgctggtgtcgatatgttgcggctggtggtctttgccgttttgggtgtttaccgtatttgcattgcagtttttccgcgaccctgcgcgtgagattccgctaaatcctgaagcggtgttgagcccggttgacggccgtatcgtggtggtcgaacgcgcacgcgatccgtatcgtgatgtcgatgctttgaaaatcagtatttttatgaacgtgttcaacgtgcattcgcaaaaatcgcctgccgattgtacggtaacgaaagtggtctataacaaaggcaaattcgtgaatgcggatttggacaaagccagcacggaaaacgaacgtaatgcggtgttggcgactacggcttcaggtcgtgaaattacttttgttcaagtggccggtttggtggcgcgccgtattttgtgctacacccaagcaggtgcgaaactgtctcgcggcgaacgctatggctttatccgttttggctcgcgcgtggatatgtatctgcctgtcgatgcgcaggcgcaagtggcgattggcgataaagtaaacggcgtcagcactgtattggcgcgtttgccgctgactgcgccgcaaatcgaatccgagcctgaatctgagccagcttcacaagcggcttcggttgaaacagcggcaaacccatctgccgaacaacggcaaattgaagcaacggcggctaagattcaagcggctgtgcaagatgtgttgaaagattaa

SEQ ID NO: 51688 - DNA, 1086 bp, Neisseria meningitidis; identical to SEQ ID NO: 43799

SEQ ID NO: 51689 - DNA, 237 bp, Neisseria meningitidis; identical to SEQ ID NO: 37642

SEQ ID NO: 51690 - DNA, 159 bp, Neisseria meningitidis; identical to SEQ ID NO: 47859

SEQ ID NO: 51691 - DNA, 1986 bp, Neisseria meningitidis
atggctaaaaacaaccaatacagcgaatccagcatcaccgtcctcaaaggtttggaaccggtcaaagaacgtcccggtatgtacacccgcaccgacagcccgacccatatctgccaagaagtcatcgacaacgcggcggacgaggcgttgggcggtttcgctacggcaatcgacgtgcaaattcatgaagacggttcgctttccgtacgcgacaacggccgcggtattcccgtcggtctgcaccctgaagaaggcgtacccgtagtcgaactcgtgttcacccgtctgcacgcgggcggcaagttcaacaaaaaagacggcggcagcgcgtatgccttttcaggcggcctgcacggcgtgggcgtatccgtgaccaacgccctttccacccgccttgaggtaacggtcaaacgcgaaggcaaaatccaccgcatcgtgtttgccggcggcgacgtggtcgaaccgttggcacaagtgggcaaatgcgccgtcaaagacagcggtacagaagtgcgcgtctggccggacggcaaatattttgaaagcccgaattacagcattcccgaactcgaacgcctgctgcgtgccaaagccgtgctgctgccgggtgtgcgcgtttccctgacccgtccggtcaaaggcgaagacgaagcgcacacccaaacctggcattaccccgacggcctgaaaagctatctgaccgacctgattgccgacgcgcaagaagctgtgccgctgttctcctgcgaaaactacatttcagacggccacaacggcgatttcagcatcggcgaaggagcggcgtttgccctgacctggctggaagaaggctcgtgcgccaacgaaagctacgtcaacctcatccccaccccgctgggcggcacgcacgaagcaggtttgaaacaagccgtgttcaacgccgtcaacaatttcatcaatctgcacaacctcctaccgcgcggcgtgaaagtacaaagtgacgacgtgttcggtaaaaccgccttcgtcctctccgcccgcgtcctcgacccgcagttccaaggtcaaaccaaagacaagctgaccaaccgcgacgcgttgaaactcgttgccgccgtatcgggcgaccctttggaattgtggctgaaccaaaacgtggacttcggtaaaaaaatcgccgaactcgccatccgtcaggcgcaggcgcggatgcgttcggttaagaaaatcgaaaagaaaaaaggcagcggcgtcgccgtcctgcccggcaaactgaccgactgcgaaagcgaagacatccgcgaaaacgaactcttcctcgtcgaaggcgattccgccggcggctcagccaaactcgcccgcgacaaagccacccaagccatcctgcccctgcgcggcaaagtgctcaacagctttgaagtccaccccgaccaactcttcggcaacgccgaaatccacgacatttccgtcgccatcggcgtcgatccgcacggtattaacgaccatcccgatttaagcggcctgcgctacggcaaaatcgccatcctgtccgatgccgacgtggacggctcgcatattcaagttttgctgctgaccttattctaccgccacttcccgaaactggttgccgacggacacatctacgtcgcccagccgccgctgttccgcgtcgatgtcaacgcacaaggcaaaagcaaacctgcccgcaaattctacgccctcgaccaaaacgaactcgacagcattttggagcggctgcaaaaagaaggcgtcaaagaaaccgcctattccatcagccgtttcaagggcttgggcgaaatgaaccccgaccagctcaaagacaccaccatgcaccctgacacccgccgcctgttgcaggtgcaaatccccgaaggcgcggatgacgaaacacgcgacatcttcgtcaaactgatgggcaaaggcgaagccgccgcccgccgtgcctggatggaacgcgaaggcgatacggcggaactcgatatttga

SEQ ID NO: 51692 - DNA, 297 bp, Neisseria meningitidis; identical to SEQ ID NO: 45238

SEQ ID NO: 51693 - DNA, 972 bp, Neisseria meningitidis; identical to SEQ ID NO: 39558

SEQ ID NO: 51694 - DNA, 501 bp, Neisseria meningitidis
  misc_feature 486, 487, 488, 489, 490: 'n' is a, c, g or t
atgagaaaaatccttgttaccggcggtgcgggctttatcggctctgccgttgtccgtcatattatccgaaacacccaagattccgtcgtcaacctcgacaaactgacctacgcgggcaatctcgaatcgctgaccgacattgccgataatccccgctatgctttcgagcaagtggacatttgcgaccgcgccgaactcgaccgcgtattcgcacaacaccggcccgatgccgtgatgcacttggcggcggaaagccatgtcgaccgttctatcggttcggcaggcgagtttatccaaaccaatatcgtcggcacattcaatctgcttgaagcagcccgcgcctactggcaacaaatgccgtctgaacagcacgaagccttccgtttccaccatatttccaccgatgaagtctatggcgatttacgcggcacggacgatttgtttaccgaaaccgcgccctacgcgccgtccagcccctactctgcnnnnncacacacttaa

SEQ ID NO: 51695 - DNA, 1497 bp, Neisseria meningitidis
atgaaattgtctattcaaaaattcatgatgctgtttgcagcagcaatatcgttgctgcaaatccccattagtcatgcgaacggtttggatgcccgtttacgcgatgatatgcaggcaaaacactacgaaccgggtggtaaataccatctgttcggtgatggtcgcggcagtgttaaaaatcgggtttacgccgtccaaacatttgatgcaactgcggtcggccccatactgcctattacacacgaacggacaggatttgaaggtgttatcggctatgaaacccatttttcagggcacggacatgaagtacacagtccgttcgataatcatgattcaagaagcacttctgatttcagcggcggtgtagacggtggttttactgtttaccaacttcatcggacagggtcggaaatccatccggaggatggatatgacggaccgcaaggcagcgattatccgccccccggaggagcaagggatatatacagctactatgtcaaaggaacttctacaaaaacaaagataaacactgttccgcaagccccattttcagaccgttggctaaaagaaaatgccggtgccgcctctggttttctcagccgtgcggatgaagcaggaaaactgatatgggaaaacgaccccaatcaaaattggtggggtaaccgtatggatgatattcgcggcatcatccaaggtgcagccaatccttttctaacgggttttcagggattgggagttggggcaattacagacagtgcggtaaacccggtaacctatgcggcagcacggaaaactttacagggtattcacaatttaggaaatttaagtccggaagcacaacttgcggccgcaaccgcattacaagacagtgcttttgcggtaaaagacagtatcaactctgccagacaatgggctgatgcccatccgaatataactgcaacagcccaaactgccctttccgtagcagaggccgcaggtacggtttggggcggtaaaaaagtagaacttaacccgactaaatgggattgggttaaaaataccgattataaaacacctgctgcccgacctatgcagactttagatggggaaatggccggtgggaataaaccgcctaaatctataacgtctggaggaaaagccaatgctgcaacttatcctcaattagttaatcaattaactgggcaaaacttaaaaaacattgcggctcaagatccaagattgagtctagctcttcataagagtgaaaaaaattttccaataggaactgcaacttatgaagaggcagataggctaggtaaaatttgggttggtgagggtgcaagacaaactagtggaggcggatggttaagtatagatggcactcgacaatatcggccaccaacagaaaaaaattcacaatttgcaactacaggtattcaagcaaattttgaaacttatactattgattcaaatggaaaaaggaataaaattaaaaatggacatttaaatattaggtaa

SEQ ID NO: 51696 - DNA, 234 bp, Neisseria meningitidis
atggaagccaccgtctatctcgaagacaacgaatacatcgccctgtgcgacctcttgaaattggccggacttgccgaaagcggcggacaggcgaaggcgttgattgccgaagggttggtgtcgcgcaacggcgaaaccgaaacccgtaaaaccgccaaaatacgcggcggcgaagtcatcgagtttgacggtgcgcgcttggaaatcgccgatggatatgaccctgaagcataa

SEQ ID NO: 51697 - DNA, 258 bp, Neisseria meningitidis
atgaaacccagaaatctcttttttgcaggctgcctgctgacttcggcgacgtttgccgaggatatcggcgtacctgtcgaactgattaacgtcggtaatcggattgcgatgccgtctgaaggggaaagcctcgccctcctgccgtttgccgaggatgtaccgccggttcgcgatgcaatgccgtctgaagttcctaaaagcgcggcaggcggcgatgttcggggtgaccggatgggaatgccgattaacatcggatga

SEQ ID NO: 51698 - DNA, 621 bp, Neisseria meningitidis
atgctgaccccgaaaagttgcgatttgttcaatatcccgtttttccaattttcccagcttaaaaaataccggcctgaaagcattccgcaaatcaaggctgactataaagaaaactggcagatatggcagcagttgattcagcaggtcgccgccgaattgggtgcgccgtttgcgccgcctcacatcgaacgctggtgtaacggctggcaggttcgcgcccatttctttgcctatttcaaatacgcccaatacaaaaactctgccgccatcctgtcgatactacttaaccgccgccgtctgagtgtcagcttggattggcactgctacaaagccgacgtgtcgccgattactctgcccgattacaaccgatggctggataattttgacactgaaaaatacgccgcattcgatatgtggcacggcgcggaaagcgaatacgacgactaccgcaccgtcgcgcaacaaaacgagtccgaccgaaagttgcaaaacgacgaagactttttctgcatcggcaaacacatcgaacgcgacgatttgggcaggcaggatgtcgcgaaatggatagcggaaacggtggaagatttgctgccgctttacgaagcctgccacggcaaatga

SEQ ID NO: 51699 - DNA, 483 bp, Neisseria meningitidis
atgggaatagaaggcgttttgaaaaaaggtttcatcaccaccagcgcggatacggtgctgaactatatgcgtaccggttcattgtggccggttactttcggcttggcctgctgcgccgtggaaatgatgcatgcaggtatggcgcgttatgaccttgaccgtttcggcatcattttccgtccgtccccacgtcaggccgacctgatgattgtggcaggtacgctgaccaacaaaatggcgcccgccctgcgccgcgtatacgaccagctcgccgagccgcgttgggtattgtctatgggctcgtgtgccaacggcggcggttattatcactattcttattccgttgtgcgcggtgccgaccgcgtcgtgccggtagacgtttatgtgccgggttgtccgccgactgcggaagccctgatttacggcctgattcagctccaacaaaaaatcaagcgcacttccaccatcgcgcgtgacgagtaa

SEQ ID NO: 51700 - DNA, 351 bp, Neisseria meningitidis; identical to SEQ ID NO: 41719

SEQ ID NO: 51701 - DNA, 477 bp, Neisseria meningitidis; identical to SEQ ID NO: 43468

SEQ ID NO: 51702 - DNA, 267 bp, Neisseria meningitidis
atggcacgaatggtattctgcgtcaagctcaacaaagaagccgaaggcatgaaatttccaccgcttcccaacgaattgggcaagcgcatttttgaaaacgtatcgcaagaagcatggatggcgtggacgcgccaccaaacgatgctgattaacgaaaaccgcttaagccttgccgatccgcgcgcgcgcgaatacctagctcagcagatggagcagtatttcttcggcgacggcgcggatgccgtgcagggatacgttccgcaataa

SEQ ID NO: 51703 - DNA, 2058 bp, Neisseria meningitidis
atgcccgaacaaaaccgcatcctctgccgcgaactgagcttgctggcattcaaccgccgcgtgttggcgcaggcggaagaccaaaacgtcccccttttggaacgcctgcgcttcctgtgcatcgtttcatccaacctcgacgagtttttcgaagtccgtatggcgtggctgaagcgcgaacacaaacgctgcccgcagcgcaggctggacaacggcaaaatgccgtctgaaaccatcgccgacgttaccgaagcggcgcgctccctgatacggcaccagtacgacctgttcaacaacgtccttcagcccgagctggcacaagaaggcatccatttttaccgccgccgaaattggacagacacacagaaaaaatggattgaaaactattttgaccgcgaattgctgccgattctgacccccatcggactcgacccttcccaccccttcccgcgcccgctgaacaaatcgctcaacttcgccgtcgaactcgacggcacagacgcgttcggcaggccttcggggatggcgattgtgcaggcaccacgcatcctgccgcgcgttgttcccctgccgtccgaactgtgtggcggcggacacggcttcgtcttcctgtcgtccatcctccacgcccacgtcggcaaactcttcccgggcatgaacgtcaaaggctgccaccagttccgcctgacgcgcgacagcgacttgaccgttgacgaagaagacctgcaaaacctccgcgccgccatccaaaacgaactgcacgaccgcgaatacggcgacggcgtgcggctcgaagtcgccgacacctgtcccgcctacatccgcgactttctgctcgcgcaattcaaactgaccgccgccgaactctatcaggtcaaaggcccggtcaacctcgtgcgcctcaacgccgtccccgacctagtcaaccgccccgatttgaaatttcccacacacacgccgggcagactgaaagccttgggcaaaaccgcgtccatattcgatttggtgcgccagtcgcccatcctgctgcaccacccctaccaatccttcgaccccgttgtcgaaatgatgcgcgaagccgccgccgaccccgccgtgcttgccgtcaaaatgacgatttaccgcaccggcacgcgctccgaactcgtccgcgccctgatgaaggcggcactcgccggcaaacaagtaaccgtcgtcgtcgaactgatggcgcgttttgacgaagccaacaacgtcaactgggcgaagcagctcgaagaggcgggcgcgcacgtcgtgtacggcgtgttcggctacaaagtccacgccaagatggcactggtcatccgccgcgaagacggcgtactcaagcgttacgcccacctcggcacgggtaactaccaccaaggcacatcgcgcatctacaccgacttcggcctcatcacagccgacgaacaaatcaccgccgatgtgaacacattgtttatggaaatcacaggcttgggcaaacccgggcggctgaacaaactctaccaaagcccgtttaccctgcacaaaatggttatcgaccgcatcgcacgcgaaaccgaacacgcaaaagccggcaaaccggcgcggattaccgccaagatgaattcgctcatcgaaccgaccgtcatcgaagccctgtatcgggcaagcgcggcaggcgtacaaatcgatttgattgtgcgcggtatgtgcaccttgcgcccgggtgtaaaaggcttgtccgaaaacatccgcgtccgctccatcatcggcaggcagctcgaacacgcgcgcgtgtattgcttccacaacaacggcgcggacgatacctttatctccagcgcggattggatggggcgcaacttcttccgccgcatcgaaaccgccgcgccgattaccgcgcccgaactcaaaaaacgcgtcatccgcgaaggtttggaaatggcattggcagacaatacgcacgcgtggctgatgcagcccgacggcggctatatccgcgccacgcccgccgagggcgaaagcgaagccgacctgcaaaacgatttgtggacactgctcggaggctga

SEQ ID NO: 51704 - DNA, 3045 bp, Neisseria meningitidis
atgttttggatagttatgatcgttattttgttgcttgcgcttgccggcttgttttttgtccgcgcacaatccgaacgcgagtggatgcgcgaggtttctgcgtggcaggaaaagaaaggggaaaaacaggcggagctgcctgaaatcaaagacggtatgcccgattttcccgaacttgccctgatgcttttccatgccgtcaaaacggcagtgtattggctgtttgtcggtgtcgtccgtttctgccgaaactatctggcgcacgaatccgaaccggacaggcccgttccgcctgcttctgcaaatcgtgcggatgttccgaccgcatccgacggatattcagacagtggaaacgggacggaagaagcggaaacggaagcagcagaagctgcggaggaagaggctgccgatacggaagacattgcaactgccgtaatcgacaaccgccgcatcccattcgaccggagtattgctgaagggttgatgccgtctgaaagcgaaatttcgcccgtccgtccggtttttaaagaaatcactttggaagaagcaacgcgtgctttaaacagcgcggctttaagggaaacgaaaaaacgctatatcgatgcatttgagaaaaacgaaacagcggtccccaaagtccgcgtgtccgataccccgatggaagggctgcagattatcggtttggacgaccctgtgcttcaacgcacgtattcccgtatgttcgatgcggacaaagaagcgttttccgagtctgcggattacggatttgaaccgtattttgagaagcagcatccgtctgccttttctgcggtcaaagccgaaaatgcacggaatgcgccgttccaccgtcatgcagggcaggggaaagggcaggcggaggcaaaatccccggatgtttcccaagggcagtccgtttcagacggcacggccgtccgcgatgcccgccgccgcgtttccgtcaatttgaaagaaccgaacaaggcaacggtttctgcggaggcgcgaatttctcgcctgattccggaaagtcagacggttgtcgggaaacgggatgttgaaatgccgtctgaaaccgaaaatgttttcacggaaaccgtttcatctgtgggatacggcggtccggtttatgatgaaactgccgatatccatattgaagaacctgccgcgcccgatgcttgggtggtcgaaccacccgaagtgccgaaagttcccatgcccgcaatcgatattccgccgccgcctcccgtatcggaaatctacaaccgtacctatgagccgccgacaggattcgagcaggcgcaacgcagccgcattgctgaaaccgaccatcttgccgatgatgttttgaatggaggttggcaggaggaaaccgccgctattgcagatgacggcagtgaaggtgcggcagagcggtcaaacgggcaatatctgtcggaaaccgaagcgttcgggcatgacagtcaggcgatttgtccgtttgaagatgtgccgtctgaacgcccgtcctgccgggtatcggatacggaagcggatgaaggggcgttccaatctgaagaaaccgatgcggtatacgaacacctgccgacaaccgacctgcttctgccgccgctgttcaatcccgaggcgacgcaaaccgaagaagaactgttggaaaacagcatcaccatcgaagaaaaattggcggagttcaaagtcaaggtcaaggttgtcgattcttattccggccccgtgattacgcgttatgaaatcgaacccgatgtcggcgtgcgcggcaattccgttctaaatctggaaaaagacttggcgcgttctctgggcgtggcttccatccgcgttgtcgaaaccatccccggcaaaacctgtatgggtttggaacttccgaacccgaaacgccaaatgatacgcctgagcgaaatcttcaattcgcccgagtttgccgaatccaaatccaagctgacactcgcgctcggtcaggacatcaccggacagcccgtcgtaaccgacttgggcaaagcaccgcatttgctggttgccggtacgaccggttcgggcaaatcggtgggtgtcaacgcgatgattctgtctatgcttttcaaagccgcgccggaagacgtgcgtatgattatgatcgatccgaaaatgctggaattgagcatttacgaaggcatcccgcacctgctcgcccctgtcgttaccgatatgaagctggcggcaaacgcgctgaactggtgtgttaacgaaatggaaaaacgctaccgcctgatgagctttatgggcgtgcgtaatcttgcgggcttcaatcaaaaaatcgccgaagccgcagcaaggggagaaaaaatcggcaatccgttcagcctcacgcccgacgatcccgaacctttggaaaaactgccgtttatcgtggtcgtggtcgatgagtttgccgatttgatgatgacggcaggcaagaaaatcgaggaactgattgcccgcctcgcccaaaaagcccgcgcggcaggcatccatcttatccttgccacacaacgccccagtgtcgatgtcatcacgggtctgattaaggcgaacatcccgacgcgtatcgcgttccaagtgtccagcaaaatcgacagccgcacgattctcgaccaaatgggcgcggaaaacctgctcggtcagggcgatatgctgttcctgccgccgggtactgcctatccgcagcgcgttcacggcgcgtttgcctcggatgaagaggtgcaccgcgtggtcgaatatttgaaacagtttggcgagccggactatgttgacgatattttgagcggcggcggcagcgaagagctgcccggcatcgggcgcagcggcgacggcgaaaccgatccgatgtacgacgaagccgtatccgttgtcctgaaaacgcgcaaagccagtatttcgggcgtacagcgcgccttgcgtatcggctacaaccgtgccgcgcgtctgattgaccagatggaggcggaaggcattgtgtccgcaccggaacacaacggcaaccgtacgattctcgtccccttggacaatgtttga

SEQ ID NO: 51705 - DNA, 825 bp, Neisseria meningitidis
atgaaatggctcttcacccttttggcggtactcaatattgccgtattcggcggcacggtgggctataaattggccgttaaagcgacgggcggcgtgccggaaaaccgggccgtcgaaaacacgccccccgcaacgcccgccgccgacaatgcggcggcatccgtggaggatacggcggcactgctcaaaccgggcgacatcctgaccgaagagcaggccgagcagttgcgcttgaaaaaggaagcggaacagaaaaaactgagggagaaaaaacagcgtgaagaaaaagcccgccgcgaaaaactcgccgccgaaaaggcgcaggcggaacgcgaaaacggcgcggcggatgccttatgcgccgcgcaggcaagcctcacgatggacgaagacgactaccaccgcatcaaagggcttttgggcaaatggtcgcacgttgccagcaggagcgttgaaaaacgcaccgccaaagccaaacctgccgacaaaacctaccgcgtcgtcctgcccgtttccgccgatgccgaaaatcaggcggcggagctgtctgccaaaggtttcaaccccataccgtttgacggcgcattgagtttgggtgtcggcaacagtcgggaaaacgcccaagccctgcaaaaccggcttgccggcgccggattcggcggggcgcatattgtcgaacactttgccgaagccgacaggcaggacgattctttgagcgtgtcgcgtatgacggttttgtttaccggcgtgaatgccgccgatgcggacgaaatccgtaaaatcacgtccctatacggcaaactgaacctcaagtcttgcaaatag

SEQ ID NO: 51706 - DNA, 612 bp, Neisseria meningitidis
atgcgccgcaccgccctcctgctgctcgcactcaccgccggcacgtcccttgctgccggcttcaaccaaaaagacacgccgatcaacacccgctaccgcgaaacgcccgaagaagccgccgcccgcgaatttaaagaacataccgccaaactgccgccgctgcccgatacgcactcggacggctggtttgacatttatgtggatgaaaattacggcaaacagccgaaaatcctgctcgacagcctgcaaattatgcccgcgcccgacggcagcatccgctacattctcaatatccgctccgacaaaggctacgacaacctgactgccgaaggcatattctgcgcccacttctccatcaggttcggcaacggcaaaccttcctcctataaagtgttcggctacggcgacacggtcaaccgccgctggatacagccccgaaacgccgaatggaaaccgataggcggtacattaagccgcaacgacgcattacgcgccgtgctgtatgcagcattctgtgaagacggcataccgaccgacacgcgcggcctgatacaacgtctgaaagaacgtgccggacattatgcgccatcgatgaaacaacactccaaataa

SEQ ID NO: 51707 - DNA, 612 bp, Neisseria meningitidis
atgattacgacttataaaaccattacctccttgacgcaggctgagtttaaagataaaggcagccgttttattgcatttgcctatccgattcggacattggctgatgtgaaaaaatacctcgatccgttaaaggaagagcatcataaagcacgacactggtgctatgcctatcgtttgggtgtggatggtgtgcaatttcgtgccaacgatgatggagagccatcaggaagtgctggacgaccaattttgggacagattgattcggtgggtattaccgacgttttggtcgtggtcgtccgctatttcggtggtactttgttaggtgttccaggtctgatacatgcgtacaaagaggcgacggctcaagcgttggcagttgcagaagtagttgaaaagaatattgaaaaaactgtttggctgaaatgtgaatatccgtttttgaatgaagcgatacgcattgctaaacaatatcaggcggatgtattggagcgggatttgcagttggattgccgattgacggtcagtttgtcgttggtaaattatgaggcctgtgttgcggcttggaagagtacacggcagattgaagtaaatacggaaaagccttttgaatga

SEQ ID NO: 51708 - DNA, 1881 bp, Neisseria meningitidis
atgaatattttttacgaagagtccggccaattcaaaatcgccgccatcatccaaaaaaacgatgccacctaccaagtcgatacccaacacggcaagcgcaccaaagtgaaggcaaacaatgtctttgccgagtttgacggcgatatggcggcgtttttggaaaacgcgcaggcacaggcggcggacatcgacaccgatttattgtgggaagtatgcggcgaagaggaatttaccgccgaagccatcgccgaagaatattacggccatgcgccgaccaaaaccgagctggcggcaactttgattgcgctttacgccgcgccgatgtatttctacaaaaaagccaaaggcgtgttcaaagccgcgcccgaagaaactttaaaacaagcacttgccgccatcgaacgcaaaaaacagcaagacgcgcaaatcgacgcttgggcggaagccttgaaacgcggcgagatgccgtctgaaatcgcggcggatttgaaaaccatcctgcacgcgcccgacaagcagtcgctgacctacaaagcctttaccaaagccgccgacgcgctgaaaacctctgcctacgaattggcgaaaaaaacgggcggcattacgtccattccccaatacctgcaagacgggtttgaaatcaaatatttccccaaaggaacaggcttccccgaccttccgcttcctgaaatgcctgacttacccaaagccgacgttaccgccttttccattgacgacgaatcgactaccgaagtggacgacgctttaagcctgaccgatttgggcaatggcataaaacgcgtcggcatccacatcgccgcgccgtcgcttgccattaaacaaggcgacaaaatggaaaaaaacatcatggaacgcttgagcacggtttatttccccggcggcaaaatcacgatgctgcccgaaaactggattgccgcgttcagccttgatgcaggtgcataccgcccttccatcagcatttatttcgatgtggacagcgagttcaacgtcggcgcgccgacctgcaaaatcgaagccgtcaacatcgccgaaaacctgcgtatccaagccatcgaaccgcatttcaacgccgaagcgggcttggacgaagcgggcgaaatgatgttcgcccaccatcaagacctgatttggttttatcaattcgccatcaccctgcaaaaagcgcgcggcaaatacgaacccgaccgcgcgccgcaatacgattacagcatcgaattggatgaggaaggcaaagtctccgtcgtccgccgcgaacgcggttcgcccatcgatacgctggtcagcgagatgatgattcttgccaacagcacttgggcgcaaatgctccatgacaacgacctgcccggcctcttccgcgtccaacccaccggaaaagtacgcatgagcacccaatccgagccgcatatcggcatgggcgtgcggcattacggctggtttacctcgccgctgcgccgcgccgccgactacatcaaccaaaagcagctgatcagcctgatagacgacactgccgagccgctgtatcaaaacagcgatgccgagcttttcgccgcactgcgcgactttgatgccgcctataccgcctacgccgacttccaacgccaaatggaagcctactggagcctggtttacctgcaacagcaaggcacgagcgagctgacggcgacgattctgaaagaagacctcgtccgcatcgaaggtctgccgctagtaacacgcgcgaccggtattccgtttgacgcgctgcccaaatcgcaggcattgttcaaaatcaccgaattagatgccgagaagcagtttgtctcgctcaactacatcaaggcagtcgcacccgcgggtacaacggcaggcaatgccgtctga

SEQ ID NO: 51709 - DNA, 1101 bp, Neisseria meningitidis
atggcaggcaacactttcggacaactcttcaccgtgaccacgttcggcgaaagccacggcgcaggtttgggctgcatcatcgacggctgcccgcccggactggcattaaccgaatcagacatccaagccgacctcgaccggcgcaaacccggcaccagccgccacgttacccaacgccgcgaagccgaccaagtcgaaatcctctccggcgtatttgaaggcaaaaccaccggcacgcccatcgccctcttaatccgcaataccgaccaacgcagcaaagactatggcaacatcgcccaaagtttccgccccggccacgccgactatacctactggcacaaatacggcacgcgcgactaccggggcggcggtaggagttccgcccgcgaaaccgccgcccgcgttgctgccggagccgttgccaaaaaatggttgaaagaaaaattcggcacggaaatcaccgcctacgttacccaagtcggcgaaaaaaaaatccggtttgaaggctgcgaacacatttcccaaaatcctttttttgccgccaaccaaagccaaattgccgagctggaaaactatatggacagtgtgcgcaaatcgttggattccgtcggagcgaagctgcatattgaagccgccaacgtccccgtcggcttgggcgaacccgttttcgaccgcctcgatgccgaaatcgcctacgcgatgatgggcatcaacgccgtaaaaggcgtggaaatcggcgcaggttttgacagcgtaacgcaacgcggcagcgaacacggcgacgaactcaccccgcaaggcttcctgtccaaccactcaggcggcatcctcggcggcatcagcaccggacaagacatctgcgtcaatatcgccatcaaacccaccagctccatcgccactccgcgccgaagcatcgacatcaacggcgaccccgtcgaactcgccacgcacggcaggcacgacccctgcgtcggactgcgcgccgcgccgattgccgaagctatgctggcattggttttaatcgaccacgccctgcgccatcgtgcgcaaaatgccgacgttcaggttaatacgcccgacattaccctttcaaacaaataa

SEQ ID NO: 51710 - DNA, 687 bp, Neisseria meningitidis
atggcagacctgaccttccaacaagccgtttccaacatcatcggtatgaaaggcgaaatcgtccgcgcattgggcgaaaccttcgtgatggtcggcttgtccaccacattcgccgtcgttttcggcacgttgctgggcgtgttgctcttcgtaacttccagccgccaactgcattacaacaagccggtgaacttcctgctcgacaacctcgtcaacctcatgcgcgccttccccttcgtcattttgatgattgcgatgatacccgccacacgcgccatcgtcggcagcaccatcggcccgattgccgcctcgctggtgttgagcgtgtcgggattgttttattttgcccgactggtggaacaaaacctgcgcgaagtccccaaaggcgtgattgaagccgccgccgcgatgggtgcgccgccgcttgccatcgtccgcaaagtcctcttaaacgaagcgcgcgcgggtatggtttccagcattaccgtgcttgccatcgggcttttgtcatacagcgcggcggcgggcatgataggcggcggcggcttgggcgacctcgccatccgctacggctactaccgctaccaaaccgaagtcatcgtcttcatcgtcgccctcctcgtgctgctggtcatcctgattcaaagcaccggcaacacgttggcgcggaaattggataaacgttaa

SEQ ID NO: 51711 - DNA, 366 bp, Neisseria meningitidis; identical to SEQ ID NO: 37025

SEQ ID NO: 51712 - DNA, 3615 bp, Neisseria meningitidis
atgtctgcaagcatccaagcattcgacccgctaaccgtccccattgccggcaccaacctgattgaggcctctgccggcaccggcaaaacctacggcatcgccgccctgtttacgcgcctgatcgtattagaacaaaaaaacgtcgagcgcgtattggtcgttaccttcaccaaagccgccaccgccgagttgaaaacacgcctgcgcgcgcgtttggacgatgtgttgcaggttttagaaagcaaagaaattgccgaacttggagacggcgcgctttcagacggcattgccgcctactgcgccgaacaccacgaaggcgacaccttcctgcccgaactcttaaaacaggctttgcaaaaagagggccggacgcgtctgattgtccgcctcaaggccgccatcgggcaattcgacaacgccgccatctataccatccacggcttctgccagcgcatcctgcgcgactacgccttcctgtgccaagcaccgttcgatgtcgaaatgaccgaagaagacggcgaccgcctgcttatcccggcgcaagatttttggcgggaacgcgtcagcaatgatccggtgcttgccgcattggcgtttaaacgcaaagctgtgccgcaaaccgtccttgcccaaatttcgcgctatctttcccgcccgtacctgaatttccgccgtccgcaggcggatttgaaacaggcgcagcgcaacgccgaaacctcatggcaaaccgtctgccgcctgctgcccgagctggaagccggcttttggcgcatccatcccgacctcaacggcaacagttaccgcaaaaacagcttcggcaacctttttaaagaactggcacaaaaatccgccgccggacaactgccctttctggacaaagacacgcacgacagactcttgaaacttgcgtccgacaaactcgaagccggactgaaaaaaggcaaaacgcccgatgcggcagtatttgccgaattgcagaaactggcagacttcgggtacgatttgaacgcactcgaagaagcggaagaagcaacaataatccggctgcaactggatttaatcggatacctcaaccgcagccttgccgagatgaaaaaatcgcgccgcgaacgcggtttcgacgacctgctgctcgatgtccacaccgcgctgaccgacaatccgcacgccgaaaccctcgcccgcgccgttgccgaaaactgggaaaccgcgctaatcgacgagttccaagacaccgacccgctgcaatacgaaattttccaaaaaatcttcatcgcccaaaaccgcccgctgtttctggtcggcgatcccaaacaggcgatttacagctttcgcggtgcggacatttacgcctaccttcaggcggcggaagatgcgcggcaccgctacacgctcgccaccaactaccgcagccacgccgcgcttatcggcagcataggcgcgctgttccgcctcaaagaacgcccgttcgttttggaaaacatcggctattcggaagtcggtgcggcgcgtgccgaaagcaggttgtcccccgaacgtcctgccgtacaggttcgttggctgcacgaaaacgacaatgaaaaagccaacaaagacgttttgcgccgccgtgccgccgactattgcgccgacgaaatcgcccacgcgctcaacgaagccgccggaggccgtctgaatttcaaaggctgcccgttgcagtcgggcgatattgccgtgctggtacgcacgcacaacgaggcggtgatggtttccgccgccctgaaaaaacgacaggtgcaaagcgtcctgctttcgcgcgaatccgtgttcgcctcgcccgaagccgccgccctgtccgcactcatcggcttctggctcgaaccgcgccgcgccggaacgctgcgctttgtcctgacaagcggcatattcggttatgacgcgcagcaattgcacgacttcaaccaaaacgaaagcgagattttgcattgggcggaatctgcccgaaccgcactcgacaactggaatcaatacggcattttcgccgctatgcagcaattttcccaaacacacggcatcgaaacgcgcctcttaagccggaacaacgggcgcagcctgaccaactatttccaactgctcgaactgcttgccgccgaagacgcgcaaaaccgcaaccccgccgcgctgcacaaatggttgcgcgaccaaatcagcctggccggcaacaacagcggcgacaaccgcgccatccgtctggaaagcgacgaagatttggtcaaaatcgttaccatgcacgcctcgaaaggtttgcagtatccgctggtgtactgcccgtttgcgtgggacgcgcaagataccgggccgtccgactggcaaatcctccaccaaagcgcaaaccgaaccgaactgttggcaaaggcgcaactgtcggaagacgaacagaaacaatacgccgatgaagaaatggcggaacgcctgcgcctgctttatgtcgcactgacgcgtgccgaggaacagctcaacatctacgccgcgtactccaccaatactgccgacaaccccctcgcctacctgattgaaggctcgccccaagacagccgtgaaaccgtccgccgtgcctatgcgtgtgaaaaagacggcatcgcgatgctcaaacgcaactggcggcgcgtggcggacaacgccccttccggcacaaatttcgccttcaccgaaaatgcgccgccccctgccgcctatcgcagcaacgccggtcaaaccgccgaatttgccgcaaacagcattcccgaacgcggattccgatttgtccgccacactagctttaccgccttaagccgccatacccaaacgcccgacggcggcgaagaagatgcctgcccgtccttggatgccgccgaaacctcggtgccggcgatgccgtctgaaacgccgacggcttcagacggcatatcgatacacgattttccgaaaggcacgcaggcggggctgtgcctgcacgaaattcttgaagatttcaaattcggacaagcagccgccggacaggaaaccctcattgccgacaagctgaaaaaatacggttttgaagaaatatggctgcccgccgttgccgaaatggcggaagcctgccgtaaaacgccgctgacgggggcatactgcctgtccgacattccgcccgagtgccgctgtcccgaaatgggctttaccctccataccgaagacttcggcctcaaacggctgcgcgactggtttgcccgcgacgacatcaggctgcccgaagtctgccgtgccgccgccgaaacgctcgacttccacaccgtcaacggctttttaaacggctttatcgatatggtctgccaagaccccgacggcaatatctgcatcatcgactacaaatcaaaccatctcggcgcggacgcatccgcctacacgcaacaggcgatggacgaagccgtcacgcaccaccactattaccttcaggcgctgatttacgccgttgccgccgcacgctacttcaaactgcgcggacaaccgcccgccgccgtttccgtccgctacctgtttttgcgcggcacagacggcaaaggcggcggcgtttggcgttgggacatagatgccgccgctttggaacagataaaataa

SEQ ID NO: 51713 - DNA, 729 bp, Neisseria meningitidis
atgggagggaaaatgtccgacaaaaaatataatgtcgatgagggggaaatcgccaaattcagccggattgccgacaaatggtgggacaagtcgggcgagttcaaaaccttgcacgacatcaatccgctgcggctggattatatcgacggacacgcggatttgcgcggcaaacgggttttggatgtgggctgcggcggcggcatcttggcggaaagtatggcgcggcgcggcgcggcgtttgtaaagggtatcgacatggcggagcagtcgctggaaaccgcccgcctgcacgcggctttgaacaatgtcgccgatatcgaatacgaatgtatccgcgtggaagaccttgccgaggcggaaccgcactcgttcgatgtggtaacgtgcatggaaatgatggaacacgtccccgatcccgccgccatcgtgcgtgcttgtgccaatctggtcaaaccggacggcatggtgtttttttccaccatcaataaaaacccgaaatcgtacctgcatctgattgtggcggcggaatatctgttgaagtttgtccccaaaggcacgcacgactggaaaaaattcatcgcgcctgccgagctggcgcggatgtgccgtcaggcaggcttggatgtggcggatacgaagggtatgacttaccatgtgttgtcgcaaacttatgccctgtgcgattcgaccgatgtgaattatatgtttgcctgccgtccggcgttctga

SEQ ID NO: 51714 - DNA, 1218 bp, Neisseria meningitidis
atggagattattttaggtatcgtgatgtttaccgtcatcgttttggttttggcactgatgattctatttgccaaatccaaactggtcagcgaaggcgacatcaccatcaaagtcaacggcgaaaaagagctgacgatgcccgccggcggcaaactcttgggcgcgcttgccaacgaaggcatctttatcccctccgcctgcggcggaggcggttcgtgcggacaatgccgcgtcgtcgtaaaaagcggcggcggcgacatcctgccgaccgagctgtcccacatcagcaaacgcgaagcacgcgaaggctgccgtctgtcgtgccaagtcagcgtcaaaaccgacatggacatcgaagtgcccgaagaagtgttcggcgtgaaaaaatgggaatgcaccgtcatctccaacgataacaaagccacgttcattaaagaactcaagcttgccattcccgaaggcgaagaagtccccttccgcgccggcggctacattcaaattgaagctcctcctcacactgttgcctacaaagacttcgacattcctaaggaatatcacgaagactgggacaaatacaatttgtggcaatacgtttccaaagtggacgagccgattttgcgtgcctactctatggcttcgtatcctgaagaaaaaggcatcattatgctgaacgtgcgtatcgccacgccgcccccgcgcgtacctgatgcgcctccgggacaaatgtcgtcctacatctggtcgctcaaacccggcgacaaagttacgatttccggcccgttcggcgaatttttcgccaaagacaccgatgccgaaatggtatttatcggcggcggtgcgggtatggctccgatgcgttcccacattttcgaccagttgaaacgtttgaactccaaacgtaagattaccttctggtacggcgcacgttccaaacgcgagatgttctatgtcgaagactttgaccaactcgcggcagagttcccgaacttcacgtggcacgtcgccctgtccgacccgctgccggaagacaactgggacggctacacgggcttcattcacaacgtggtttacgaaaaccacctgaaaaaccacgaagcaccggaagactgcgaattttatatgtgcggccctccgattatgaaccagtccgtcatcaaaatgctcaaagacttgggcgtggaagacgaaaacatcctcttggacgatttcggcggttaa

SEQ ID NO: 51715 - DNA, 762 bp, Neisseria meningitidis
atgccttttaagccatccaaacgaatctctttattacttgtccttgccttgggcgcgtgcagcacttcctaccgcccctcgcgggcagaaaaagccaatcaggtttccaatatcaaaacccagttggcaatggaatatatgcgcggtcaggactaccgtcaggcgacggcaagtattgaagacgccttgaaatcagaccctaaaaacgagcttgcctggctggtccgtgccgaaatctatcaatacctgaaagttaacgacaaggcgcaggaaagtttccggcaagccctctccatcaaacccgacagtgccgaaatcaacaacaactacggctggttcctgtgcggcaggctcaaccgccctgccgaatctatggcatatttcgacaaagccctggccgaccccacctacccgaccccttatattgccaacctgaataaaggcatatgcagcgcaaaacaggggcaattcggattggcggaagcctatttgaaacgttccctcgccgcccagccgcagttcccacccgcatttaaagaactggcgcgcaccaaaatgctggccgggcagttgggcgatgccgattactactttaaaaaataccaaagcagggtagaagtccttcaggccgatgatttgctgctaggctggaaaattgccaaagccctcggcaacgcacaggcggcatacgaatatgaagcacaattgcaggcgaatttcccctactcggaagaattgcaaaccgtcctcaccggtcaataa

SEQ ID NO: 51716 - DNA, 945 bp, Neisseria meningitidis
atgtctgcatctaagaaatttccgattcctttgagctatttcagcatcgcgctgggcttgtttgccttggggctgtcgtggcgttacggcgcgtctgtcgggctgctccccgccttggccgccgaatcgctgcttgcggtggcttcggttgtctggctcttgctggtggcggcatacctgatcaaaatgtttgcgtaccgaaacgattttttgtctgatttgcgcgacttggtgcaatgctgcttcatcagcgcgattccgattaccgctatgctggagggactcgcgctgaagccctatcaggcaggcgcggcggcagtcctgatttatgtcggcgttgccggacagttggcgttttcgatgtatcgggcggccggtctgtggcgcggcctgcattccttggaggcgacgacgccgattatttatctgcctacggttgcgacaaactttgtcagcgcgtcatctctggcggcgttggggcatcatgattatgcagctttgtttttcggcgcgggtatgttttcctggctgagcttggaagcctccatcttgggcaggctgcgcacggcggcaccggtcggcacggcggcgcgtggcgtggtcggcatccagcttgcgcccgcctttgtcggctgcggcgcgtattttgccgtcggcggtaaagtcgacggttttgcgttggcattaatcggctacggctgcctgcagcttttgttcttgctacgcctgacccgctggttttgggaaggtggttttacgatgagcttttggggattttcattcggtttcgcggcaatggcaggatgcggtctgcatctggcggcttctggcgtattgtcgggcttggggctgacgcttgccaccgccggatcggcaggcgtggcgctgctgcttgtcggtacgctgcaccggatagcgacggggcgtttcttggtacgcggctga

SEQ ID NO: 51717 - DNA, 948 bp, Neisseria meningitidis; identical to SEQ ID NO: 43198

SEQ ID NO: 51718 - DNA, 843 bp, Neisseria meningitidis; identical to SEQ ID NO: 42241

SEQ ID NO: 51719 - DNA, 840 bp, Neisseria meningitidis
atgaccgccacagccgccgccatagaccgcctgcttccccaaacccaatgccgcgaatgcggctacgacggctgcctgccctacgcacaggcagtcgcaacaggcgaagcgtacaacctctgcgccccgggcggcgcaaccgtcgtccgcgaccttgccgccctgctcggcaaaccccttgtcgcacctgccaaaacccaagccaaagcactcgcccggatagacgaatccgcctgtatcggctgcaccgcctgtatccgcgcctgccctgccgatgccattatgggcgcgggcaaacttatgcacaccgtcatcgccgacgaatgcaccggctgcggactctgcgtcgccccctgccccgtcgactgcatccatatgcagcccgttgccgacaccgtcctgccccgcgcgcgccgcttcagcctgtccgccgacagccgttttgccgccgccgaacacgcgcgcgcgcgctacctcaaacgcaacgaacgcaaacagcgcgaagccgacgaacgcaaggccatgcttgccgaacgcgaagccgccgtccgcaacgcgcgtccgcaaacacccgacacaccgaaaaaaccggcgtttaaccctgccgacctcatcgccaaagccatggcaaaagcgcaaacccaacaagaccgcctcgccgccgccgacaaccgcaaagactatcaggcgaaacagatagccgaagcccgcgaacgcgccgagttgcgccgcgcccaacgcgatatgaaatacggcagcgacagcgaaaaagccgccgccctcgaatacctcaaacaatacaaagccaaacaggaagccgcacagaataccgcctcctga

SEQ ID NO: 51720 - DNA, 1104 bp, Neisseria meningitidis
atggaagccgaagtaatcaaccagctcaacaacaccctgaacgacttggagaagcgcagcgaagacatccgcgtttatatggattatcagggtaagaaagaccgattggaagaagttgtcggtctttccgaagaccccgaactttggaacgacccgaaacgcgcccaagaaatcggcaaagagcgcaaaatcctcgaaggcatcgtgttgacgctcgacaacatcgcttcgggcatcgaagacaaccgtatgctgattgaaatgaccgtcgaagaaaacgacgaagaaggtttcgccgccgtgcaggaagatgtggcggggctggaaaaacagatggcggatttggagttcaaacggatgttcaaccagcctgccgatccgaacaactgctttatcgacatcaccgcaggcgcgggcggtacggaagcggaagactgggcggggatgctgttccgtatgtacagccgctacgccgagcgcaaaggcttcaaaatcgaaatccttgaggaagacgacggcgaaatcgcgggcatcaaccgcgcgactatccgagtggaaggcgaatacgcctatggtttgctgcgtaccgaaaccggcgttcaccgcttggtgcgctattcaccgtttgactcgaacaacaaacgccatacttcgtttgcctccgtgttcgtttaccctgaaatcgatgattccattgaaatcgaaatcaaccccgccgatttgcgtatcgacacctatcgcgcatcgggcgcgggcggtcagcacatcaataaaaccgactccgccgtgcgcattacccacgagccgacggggattgtggtgcaatgtcaaaacgaccgttcgcaacacgccaacaaagccgccgcgatggaaatgttgaagtccaaactgtatgaattggaaatgcgcaaacgcaatgaagagaaacaggcgttggaagaaggtaaatccgatgtaggttggggcagccaaatccgttcgtatgttttggattcctcacgtatcaaagacttgcgtacaggctacgaagtcggcaacaccaaagccgtattggatggcgatttggacggctttatcgaagccagcctgaaacagggcgtgtag

SEQ ID NO: 51721 - DNA, 1239 bp, Neisseria meningitidis
atggctttttatgcttttaaggcgatgcgtgcggccgcgttggctgccgccgttgcattggtactgtcgtcttgcggtaaaggcggagacgcggcgcagggcgggcagcctgctggtcgggaagcccctgcgcccgtcgtcggtgtcgtaaccgtccatccgcaaaccgttgcgttgaccgtcgagttgccgggacgtttggaatcgctgcgtaccgccgatgtccgtgcgcaagttggcggcattatccaaaaacgcctgttccaagaaggcagttatgtccgtgccggacagccgctgtatcagatcgacagttccacttatgaagcaaatctggaaagcgcgcgcgcgcaactggcaacggctcaggcaacgcttgccaaagcggatgcggatttggcgcgatacaagcctttggttgccgccgaagccgtcagccggcaggaatacgatgctgcggtaacggcgaaacgttctgccgaggcaggtgtcaaagcagcacaggcggcgatcaaatctgccggcatcaatctgaaccgttcgcgcattaccgcgccgatttccggctttatcggtcagtccaaagtttccgaaggtacgctgttgaatgcgggcgatacgaccgtgctggcaaccatccgccaaaccaatccgatgtatgtgaacgttacccagtctgcatccgaagtgatgaaattgcgccgtcagatagccgaaggcaaactgctggcggcggatggtgtgattgcggtcggcatcaaatttgacgacggcacagtttaccctgaaaaaggccgcctgctgtttgccgatccggtcgtcaacgaatcgaccggtcagattaccctgcgcgccgccgtaccgaacgatcagaatatcctgatgcccggtctgtatgtgcgcgtgctgatggaccaagtggcggtggataacgcatttgttgtgccgcagcaggcggtaacgcgcggtgcgaaagataccgtgatgattgtgaatgcccaaggcggtatggaaccccgcgaggtaacggttgcgcaacagcagggtacgaattggattgttacgtcgggtctgaaggacggggacaaggtggttgtggaaggcatcagtatcgccagtataacgggtgcgaaaaaggtaacgcccaaagaatgggcgccgtctgaaaaccaagccgccgcgcctcaatccggcgttcagacggcatctgaagccaaaactgcttctgaagcggaataa

SEQ ID NO: 51722 - DNA, 510 bp, Neisseria meningitidis
atgattatcctgcacaccaacaaaggcgacatcaaaatcgaactcgatttcgacaaagcccccgttaccgccaaaaacttcgagcaatacgtcaaagacggcttctacgacggcgtaatcttccaccgcgtcatcaaaggcttcatgattcaaggcggcggcatggatgaaaacatgaacgaaaaagaaacccgagatccgattcaaaacgaagcgtccaacggcctgcccaacgataaatacaccatcgccatggcacgcacttccgccccccattccgccagcgcgcaattcttcatcaacactgccgacaacgctttcctgaacttccgttctaaagagctgtacggcaaaaccgtcgtccaagactggggctatgcagtattcggtaaagtcgttgacggttttgacgttgtcgatgccatcgaaggcgtatccaccaaacgccacggctaccatgacgacgtaccgagcgaacctgtcgtcatcattaaagccgaagcggtataa

SEQ ID NO: 51723 - DNA, 1008 bp, Neisseria meningitidis
atgagcaccttcttccggcaaaccgcacaagccatgattgccaaacacatcgaccgtttcccgctattgaagttggatcaggtaattgattggcagccgatcgagcagtacctgaaccgtcaaaaaaaccgttacctccgagaccaccgcggccgtcctgcctgtcccctgctgtccatgttcaaagccgtcctgcccggacaatggcacagcctctccgatcccgaactcgaacacagcctcatcacccgcatcgatttcaacctgttttgccgtttcgacgaactgagcatccctgattacagcaccttatgccgctaccgcaactggctggcgcaagacgacaccctgtccgaattgctcaaactgattaaccgacaactgaccgaaaaaggtttaaaaatagagaaagcatccgccgctgtcgttgacgccaccattattcagaccgccggcagcaaacagcgtcagaccatagaagtcgatgaagaaggacaagtcagcggccaaaccacaccgagtaaggacagcgatgcccgttggatcaagaaaaacggcctctacaaactcggttacaaacaacatacccgtaccgatgcagaaggctatatcgagaaactgcacattactcccgccaatgcccatgagtgcaaacacctgtcgccgttgttggaagggttacccgaaggtacgaccgtctatgccgacaaaggctacgacagtgcggaaaaccggcaacatctggaagaacatcagttgttggacggcattatgcgcaaagcctgccgcaaccgcccgctgtcggaagtgcaaaccaaacgcaaccgatatttgtcgaagacccgttatgtggttgaacagagcttcggtacgctgcaccgtaaattccgctacgctcgggcagcctatttcggactgattaaagtgagtgcgcaaagccacctgaaagcgatgtgtttgaacctgttgaaagcggccaacaggttaagtgcgcccgctgccgcctaa

SEQ ID NO: 51724 - DNA, 1194 bp, Neisseria meningitidis
atgtaccgacacatcgaatactatccgggcgacccgattttgagtttggtcgaaaccttcaaaaacgacccgcgccctgaaaaagtcaatttgagcataggcatttatttcgacgacgaaggcaaaatgcccgtgttggaatccgtgcgccgtgccgaaaccgcccgcgccgccacgcctgcgccgtcgccctacctgccgatggaaggcttggacacttaccgcagcgcggtgcagcatttattgttcggcaaagacaaccctgcgctcgcgcaaggacgcatcgctaccgtacaaaccttgggcggctcgggcgcgctcaaagtcggggcggacttcctgcaccgctggtttcccgaagcgcgcgcctacgtcagcgacccgacttgggacaaccatcgcggcatttttgaaggcgcaggtttcgaggtcggcacttacccatattacgaccctgctgccgtcggcgtgaaattcgacgaaatgaccgcgtttttcaacaccctgcccgaaaacagtgtcctgatcctccatccctgctgccacaacccgaccggtgtggatatgtcggaacaacaatgggacgaagtgttgcacatcatcaaaacgcgcaaactgattccgtttatggacatcgcctaccaaggcttcggcggcgatttggacagcgatgcctacgccgtccgcaaagcggtggaaatggaattgcccttgttcgtcagcaattccttctcaaaaaacctgtcgctctacggcgagcgcgtcggcggcctgagcgtggtttgcccgaataaggaagaagcggatttggtgttcggacagctcaaattcaccgtccgccgcatctactccagcccgcccgcgcacggcgcgtatatcgccgccgacgtgatgaacagccccgaactttacgccttgtggcaaaacgaggtttatatgatgcgcgaccgcatccgtgcgatgcggcagaaactttatgatgtcttaactgcgcaaatccccgatcgcgatttcacttatttcatcaaacagcgcggcatgttcggctacacaggattgagcgtggaacaagtccgcaggctgcgcgacgaatttgccgtttacctgctggattccggcaggatgtgcgtcgccggactgaatacgtcgaataccgactatgttgcccgcgcatttgcggaagtcttgaaataa

SEQ ID NO: 51725 - DNA, 642 bp, Neisseria meningitidis
atgcaaaaacccgaaaccatacacatatccggtcctgccggcattttagaaaccatccatatcccgtccgaacaagtaccggcacgcggtgttgccgtcatcaatcatcccaaccccctccagggcggaacaaacaccaacaaagttatccaaactgccgccaaagccttaagcaaactcggcttccactgctacctgcccaaccttcgcggcgtaggcggcagcggaggcacacatgattacggacgcggcgaaacgcaagactgcctcgccgtcatcgattatgcccgcgcccaacaccccgaagcccccgaatttgccttatccggcttctccttcggcggttatgtcgccacatttgccgcacaagcgcgcatacccgatttattgctgctcatcggcgcggcagtctgccactataccggccgccccgagccgtccgccgttcccaatgttgccaaaacgctgatgatacacggcgcggaagacgaagtcgtcgaaatcgaaaaagccctgaaatgggcggaaccgcaagatttgcccgtcattaccatcgccggttccacgcatttctttcacggcaaactcatcgtcctgcgcgacaccatcctccgcttcgcgcccgtatgcctgaacggataa

SEQ ID NO: 51726 - DNA, 2202 bp, Neisseria meningitidis; identical to SEQ ID NO: 42438

SEQ ID NO: 51727 - DNA, 1470 bp, Neisseria meningitidis
atggacaaacataatgggacttatcgggatttgcaccgtccggcttcggaatttgcgacgcgggacgaatatttggaacatgaattgcagattatgcaaccaaaacgctggcggcccaacctgccctttcgcgattaccgcttcgagtgggaggatttgattcctgcgatggcgggaacgattggaaaagtggtgatggtgggggcggtggcggcggcgtttgccgcacctttggggctgcctgacagctttgtactggaaaatgtgcgctatgagcttttaatcgccgccgcgtttatcttattggtatcgggcttttttctgcccggcgccaacctgcccggtacgcacgggccgctgattccgatgattcccatcgttgtgtcggcaggcgggcatcctttggcgttcggcatttcgattgcggttttaggtctgctgatggctttatttcgcggcggcagtattatggcgaagctgacaagcaacggcgtatgcggcggattattactctatttgggctttatcggcacgacggggcaggtaaaaaaattgttttcgtgggcaggcggttttaatatgccctacatcgcttttaccgtcattattgtaacgattgtgatgtacgctttgttggagcattggaaaaaacgctggttagccgtgcctttgggatgcttgattgccggtgtggtggcatttgcattgggtgcgccgtttgagtttcacaccgcccccggcctgcctccaatgagtcctgcttattggtggggtgaaaacagcggctggcatctggggttgccgacggcagaaagttttttggttgtctttccatttgcggtattggctgttgcaatgtggtcgcccgattttttaggacatcaagtgttccaaaaaatcagctatccggaaaaaaccgataaggtattgatgaatatagacgacaccatgacaagttgttctgtccgtcaagcagtgggttctattttagggggtgcaaattttacctcttcttggggaacttatatcgtaccggcatcgattgccaaacgccccattccgggcggtgcggttttaacggcggttttatgtattatcgccgggttatggggctatccgatggacttggcgatttggcagccggtattgagcgtagccttggtcgtaggcgtatacttaccgcttttggaagcgggcatggaaatgacgcgcaaaggcaaaaccacccaatccgccgccatcgtggtgttctcttccgccttggtcaatccggttttcggctgggcgttgacgatgctgttggataatttgggcttaatcggctgcaaagagcgcagtgcgcaattaggtttcgccggacgcgtgttgatacccgcagtaggtttcttgatcttgtgtgtggcgatgggtgcggtcgggatgctgcccggtatcccgccgtttttggaacacttcaaatctttgggctag

SEQ ID NO: 51728 - DNA, 777 bp, Neisseria meningitidis; identical to SEQ ID NO: 42565

SEQ ID NO: 51729 - DNA, 876 bp, Neisseria meningitidis
atgttacaaggtagcctggttgccctgattaccccgatgaatcaagacggcagcatccattacgaacaactccgcgacttaatcgactggcacattgaaaacggcacggacggcatcgttgccgtcggcacgacaggcgaatccgccaccctctccgtcgaagaacacaccgccgtcatcgaagccgtcgtcaaacacgttgccaaacgcgtccccgtcatcgccggcacaggggcaaacaacaccgtcgaagccatcgccctttcccaagccgccgaaaaagccggggcggactacaccctctccgtcgtcccctattacaacaaaccttcgcaagaaggcatgtaccgccatttcaaagccgttgccgaagccgccgcgattccgatgatactctacaacgtacccggcagaaccgtcgtcagcatgaacaacgaaaccatcctgcgccttgccgaaatccccaacatcgtcggcgtgaaagaagccagcggcaacatcggcagcaacatcgaactcatcaaccgcgcgcccgaaggcttcgtcgtcctttccggcgacgaccataccgccctgccgttcatgctgtgcggcggacacggcgtgattaccgtagccgccaacgccgcgcccaagctctttgccgatatgtgccgcgccgcgctgcaagtcgacattgccctcgcacgcgaactcaacaaccggctgattccgatttacgacaccatgttctgcgaacccagccccgccgcaccgaaatgggcggtatccgccttgggcagatgcgaaccgcacgtccgtttgccgctcgttccgctgacggaaaacggacaagcaaaagtccgcgccgccctgaaagcctcaggacaactttaa

SEQ ID NO: 51730 - DNA, 1014 bp, Neisseria meningitidis; identical to SEQ ID NO: 36441

SEQ ID NO: 51731 - DNA, 777 bp, Neisseria meningitidis
atggctaagaaattcgataaagacagcttcagcggcacgctgattgtcgtgttggcggtcagcctgatttgctcggtcatcgttgccggtgcggtcgtcggcttgaaacccatccaagagaaacaaaaactccaagacaaacaaggctatatcttgagcgtagccggtttgatggataaggacaccgacatcggtaaaacctttgccgagcgtatcgagcaacgtgttgtcgatttggcgaccggcgaatacgtcgccgatgcgcctaaagacttcagcgcgcgcatcgcaggcaaagaccctgcccaaagcatccgcatcaaacccgaagacgatttggcaggcatcaaaagccgtgccaaatacaccgaggtttatttggtaaaaggcgaagacggcaaaatcgggcaaatcatcctgcctatgcacggtaacggtttgtggtcggtcatgtacggctttgtcgccatccagcccgacggcaacaccatcaacggcattacctactacgaacaaggcgaaaccccgggcttgggcggcgaaatcggcaatccgttgtggcagcaaaaattcgtcggcaaaaaactgtttgacggacaaggcaaactcgccctgcacgtcggcaaaggcgcgggttcggacaaagaacacggcgtagatgccctctccggtgcatcgctgacatccaaaggcgtgcaaggttcgttcgcctactggttcggcgaaaacggctatatcccctacctgaacaaattgaaatcagcaggagcgcaataa

SEQ ID NO: 51732 - DNA, 792 bp, Neisseria meningitidis
atgaatttatttttcgatactgaattgggaaagcaacaaaataaagcaacccacaaaatccgtgtaatgagcgaggcttggctggaaaaaaacggctactgtccctgttgcggaagcaagccgatgaagagatttgccaataacaaacctgttgcagacctcttttgcccaaattgccacgagcaatatgaattaaagagtaaaaatcaaaaaaccataggcaacatcgtgcctgacggtgcatatcacaccatgttggagcgcatccggtcagataccaaccccaactttttctttcttgcatataaaaaagcggattactccatacggcaattggtgcttgtacccaaacatttcatcacgccggatatgattattcccagaaataaaggcattaaaaaccggccgcaccacattatgtgttccatcaatctcgcccctttgcctgaaagcggaaaaatattcttaatagacgattcccgcattatcgaacccgaaaccgttctgaaaaaatggcaatccaacctgtttttacgcaaccaaaatgcggagcgtaaaggctggcttttggctgttatgaaatgtatcgaccaactccccgaagaattcacattgtcgcaaatgtatggatttgaagacaaactatccatccaatttccccaaaacaaccatatcagagacaaaatccgccaacagttgcaaattttgcgcgaccaaaatacgatcgaattcattggtcgcggactttacaaaaaaatcgacaaattgcccccgacttccaaggcgttttaa

SEQ ID NO: 51733 - DNA, 1059 bp, Neisseria meningitidis
atgaccgccgccctgcacatcggacacctgtccaaaagttttcaaaacaccccggttttaaacgacatttcgctcagcctcgacccgggcgaaatcctctttatcgtcggcgcgtccggctgcggcaaaaccacccttttacgctgccttgccggttttgaacaacccgattttggcgaaatttcgctttccggcagaaccatcttctcgaaaaataccaacctccccgtccgcgaacgccgtttgggttatgtcgtacaggaaggcgtactgttcccccacctgaccgtttaccgcaacaccgcctacgggctgggcaacggcaaaggcaagacggcgcaagagcggcagcgcatcgaagctatgttggaattgaccggcatttccgaacttgccggacgctatccgcacgaactttcgggcggacagcaacagcgcgtcgccctcgcccgcgccctcgcacccgatcccgaactgattttgttggacgaacccttcagcgcgctggacgaacagttgcgccgccagattcgcgaagacatgattgccgccctgcgcgccaacggcaaatctgccgttttcgtcagccacgaccgcgaagaagccctgcaatacgccgaccggattgccgtgatgaaacaggggcgcatcctccaaactgcaagccctcacgaattgtaccgacaacctgccgaccttgatgccgccctgtttatcggcgaaggcatcgtgttccccgccgcgctcaacgccgacggcaccgccgattgcggattgggccgcctgcccgttcaaagcggcgcacccgcaggcacacgcggcacactgctcatccgtccggaacagttcagccttcacccccattccgcacccaccgcctccattcacgccgtggttctcaaaaccacgcccaaagcgcggcataccgaaatcagtctccgggtcggacaaaccgtcctcacgctcaacctcccttccgcccccaccctgtcagacggcatttccgccgtcctccatttggacggtcccgccctgttcttccccggaaataccctctga

SEQ ID NO: 51734 - DNA, 657 bp, Neisseria meningitidis
gtgaacaaacggctgttttgcagccgcaacggcttgcgctattacctgttgggcggtttctgtttgagtgtttttccgtttttgctggtgtttgcctcatccgtttgggcggtttatcggacgggcgggcaggttttgccgccgtatgtccgggcggatgccgcgctggtgttgggtgccgccgcgtgggacaaacgcccttctccggtttttcgggaacgcatcaaccacgccatcgcgctttatcagagccgcagggtaggcaaaatcgtgtttacgggagggcgaaccaaaaaaggctatatgaccgaagccgaggtcgggcggcggtacgcgctcaaacagggggttccggcgcgcaacatcctgtttgaaaacacttcgcgcaacacttatgaaaacctgaacaacatccgtccggttttgcgtgccaacggtattgccagcgtggtgattgtcagcgatccctaccatttggcgcgggcggcggaaatggcggaggatttgggtgtccgcgtttatatgtctgccaccccgaccacgcggtttgatgcgggaaataagaaaaaaatctttatgctgcaagagggatatgcgttgtccctctaccgtttggaaaaatggggcagccgctttttgggatggctgtctgattga

SEQ ID NO: 51735 - DNA, 1785 bp, Neisseria meningitidis
atggaactgatgactgttttgctgcctttggcggcgttggtgtcgggcgtgttgtttacatggttgctgatgaagggcaggtttcagggcgagtttgccgatttgaacgcgcaactggcggaaaaggcggcaagatgtgattttgtcgaacaggcacacgcagaaattgcatcggaattggccgttttggacgggaaataccgacatttgcaggacgaaaattatgctttgggcaaccgtttttccgcagccgaaaagcagattgcccatttgcaggaaaaagaggcggaatcggttcggctgaagcagtcgtatatcgagttgcaggaaaaggcacagggtttggcggttgaaaacgaacgtttggcaacgcagctcggacaggaacggaaggcgtttgccgaccaatatgccttggaacgccaaatccgccaaagaatcgaaaccgatttggaagaaagccgccaaactgtccgcgacgtgcaaaacgaccttgccgatgtcggcaaccgttttgccgcagccgaaaaacagattgcccatttgcaggaaaaagaggcggaagcggagcggttgaggcagtcgcataccgagttgcaggaaaaggcacagggtttggcggttgaaaacgaacgtttggcaacgcaaatcgaacaggaacgccttgcttctgaagagaagctgtccttgctgggcgaggcgcgcaagagtttgagcgatcagtttcaaaatcttgccaacacgattttggaagaaaaaagccgccgttttaccgagcagaaccgcgagcagctccatcaggttttgaacccgctaaacgaacgcatccacggtttcggcgagttggtcaagcaaacctatgataaagaatcgcgcgagcggctgacgttggaaaacgaattgaaacggcttcaggggttgaacgcgcagctgcacagcgaggcaaaggccctgaccaacgcgctgaccggtacgcagaataaggttcagggcaattggggcgagatgattctggaaacggttttagaaaattccggcctccagaagggacgggaatatacggttcaggcagcatctgtccgtaaggaggaagacggcggcacgcgccgcctccagcccgacgttttggtcaacctgcccgacaacaagcagattgtgattgactccaaggtctcgctgacagcttatgtgcgctacacgcaggcggcggatgcggatacggcggcacgcgaactggcggcacacgttgccagcatccgtgcacacatgaaaggcttgtcgctgaaggattacaccgatttggaaggtgtaaacacattggatttcgtctttatgtttatccctgtcgaaccggcctacctgctggcgttgcagcatgacgcgggattgttccaagagtgtttcgacaaacggattatgctggtcggccccagtacgctgctggcgactttgaggacggtggcgaatatttggcgcaacgaacagcaaaatcagaacgcgctggcgattgcggatgaaggtggcaagctgtacgacaagtttgtcggcttcgtacagacgctcgaaagcgtcggcaaaggcatcgatcaggcgcaaaacagctttcagacggcattcaagcaacttgccgaagggcgcgggaatctggtcggccgcgccgagaaactgcgtctgttgggtgtgaaggcaaacaagcagcttgcacgcgatttgaccgaacgtgccaatgaaacaacggcgttgtcggaatctttggaatatgcggcagaagatgaagcagtctga

SEQ ID NO: 51736 - DNA, 201 bp, Neisseria meningitidis; identical to SEQ ID NO: 37363

SEQ ID NO: 51737 - DNA, 753 bp, Neisseria meningitidis
atgaccgacatccttattgacaacaccgccaccgaagccgtccgcgccctgatacgggcattcccccttgtgcccgtttcccaaccgcccgaacaaggcagttacctccttgccgaacacgataccgtcagcctcaggcttgtcggggaaaaaagcagcgtcatcgtcgattttgcctccggcgcggcacaataccggcgcacaaaaggcgggggcgaactcatcgccaaagccgtcaaccacaccgcgcaccccaccgtttgggacgcaaccgcaggattggggcgcgacagcttcgtcctcgcctcgctcgggctggccgttaccgccttcgagcaacatcccgccgtcgcctgcctgctttcagacggcatccgccgcgccctcctcaatcccgaaacgcaagacaccgccgcgcacatcaacctccatttcggcaacgccgccgaacaaatgcccgcccttgttcaaacacaaggcaaacccgacatcgtctatctcgaccccatgtatcccgaacgccgcaaaagtgccgccgttaaaaaagaaatgacctacttccatcggctcgtcggcgaagcgcaagatgaagcggcactcctgcataccgcacgccaaacagcaaaaaaacgcgtcgtcgtcaaacgcccccgcctcggcgaacaccttgccggacaagcccctgcctaccaatacaccggcaaaagcacccgcttcgacgtttacctgccctacgggacggacaagggataa

SEQ ID NO: 51738 - DNA, 1596 bp, Neisseria meningitidis
atgtcccaagaaatcctcgaccaagtgcgccgccgccgcacgtttgccatcatctcccaccctgacgcaggtaaaaccacgttgactgaaaaactcttgctgttttcaggtgcgattcaaagcgcgggtacggtaaaaggcaaaaaaaccggcaaattcgccacttccgactggatggacatcgagaagcagcgcggcatttccgtggcatcaagcgtgatgcagttcgactataaagaccacaccgtcaacctcttggacacgccgggacaccaagatttctcagaagacacctaccgcgttttgaccgccgtggacagcgcgttgatggtcatcgacgcggcaaaaggcgtggaagcgcaaaccatcaaactcttgaacgtctgccgcctgcgcgatacgccgattgttacgttcatgaacaaatacgaccgcgaagtgcgcgattccctggaacttttagacgaagtggaaaacattttaaaaatccgctgcgcgcccgttacctggccaatcggtatgggcaaaaacttcaaaggcgtgtaccacatcctgaacgacgaaatctatctctttgaagcgggcggcgaacgcctgccgcacgaattcgacatcatcaaaggtatcgataatcctgaattggaacaacgctttccattggaaatccaacagttgcgcgacgaaatcgaattggtgcaggcggcttccaacgagttcaatctcgacgaattcctcgccggcgaactcacgcccgtattcttcggctctgcgattaacaacttcggtattcaggaaatcctcaattcattgattgactgggcgcccgcgccgaaaccgcgcgacgcgaccgtacgtatggtcgagccggacgagccgaaattctccggatttatctttaaaatccaagccaatatggatccgaaacaccgcgaccgcatcgccttcctgcgcgtctgctccggcagattcgagcgcggtatgaagatgaaacaccttcgcatcaaccgcgaaatcgccgcctccagcgtggtaaccttcatgtcgcacgaccgcgagctggtggaagaagcctacgccggcgacatcatcggcatcccgaaccacggcaacatccaaatcggcgacagcttctccgaaggcgaacaactggcatttacaggcattcccttcttcgcgcccgaactgttccgcagcgtccgcatcaaaaacccactgaaaatcaagcaactgcaaaaaggtttgcaacagcttggcgaagaaggcgcggtacaggtgttcaaaccgatgagcggcgcggatttgattttgggcgcggtcggcgtgttgcagtttgaagtcgtaacctcgcggctcgccaacgaatacggtgtagaagccgtgttcgacagcgcatccatctggtcggcgcgctgggtatcgtgcgacgacaagaaaaaactggcggaatttgaaaaagccaatgcaggcaatctgtcgatagacgcaggcggcaacctcgcctacctcgcccccaaccgcgtgaatttgggactcacgcaagaacgttggccggacatcgtgttccacgaaacgcgcgagcattcggtcaaactttaa

SEQ ID NO: 51739 - DNA, 2691 bp, Neisseria meningitidis
atgtccgacaaccgcctcgacaccgcccgccgccattccctcttcctcgcccgccagctcgacaacggcaaactcaagcccgaaattttcctgcctatgctggacaaggttttgaccgaagcggatttccaagcctttgccgactgggacaaaatccgtgcggaagaaaacgaggaagaattggcgcggcagttgcgcgggttgcgccgttatgtggtgtcgcagattatcgtgcgcgatataaaccgcatcagcgatttgaacgaagtgacccgcacgattacgctgtttgccgattttgccgtcaataccgcgctggactttgcctacgactattatcgggacatgtacggcacgccgatcgggcgttataccaaatcgccgcagcatttgagcgtggtggcgatgggtaaggcgggcggttatgagttgaatgtgtcttccgacatcgatttgattttcgtctatcccgaatcgggcgacaccgacggcaggcgcgaacggggcaatcaggaatttttcaccaaagtcgggcagaaactgattgcgttgttgaacgacattaccgccgacgggcaggtgttccgcgtcgatatgcggttgcggccggatggcgattcgggcgcgttggtattgagcgaaaccgcgctggagcaatatttgattacgcaggggcgcgaatgggaacgctacgcgtggtgcaaaggccgcgtggttacgccgtatccgaacggaatcaaatcgctggtgcgccccttcgtgttccgcaaatatctggattacggcgcgtatgaggcgatgcgtaagctgcaccgccaaatcagcagcgaagtcggcaaaaaagggatggcggacaatatcaaactcggcgcgggcggcatccgcgaagtcgaatttatcgcccagatttttcagatgatacgcggcgggcaaatgcgtgcgctgcaactgaaaggcacgcaggaaacgctggagaaacttgccgaatcgggcattatgccgtctgaaaacgtcgaaaccctgctcgccgcctaccgctttttgcgcgatgtcgaacatcgtttgcaatattgggacgaccggcaaacccaaaccctgccggcttcgcccgaacagcggcaacggctcgccgaaagtatgggatttgatgattacgccgattttttgaatgctttaaatcaacatcggaaccaagtcaatcggttgtttaacgaaattttgagcgaacccggagaacaaacgcaaagcaacggcgaatggcagtgggtttggcaggaaaaacccgacgaagaagggcggcaatgccgtctgaaagaacacgggttcgatgccgaagccgtcgcagcaaggctcgaccaaatccgccacggccataaataccgccgcctctccgcccacgcccagccgcgtttcgatgcgcttatgccgttgttggtacgggcggcggcagcgcaaaacaatccgaccgatacgctgatgcggctgtttgacttcctcgaaaacatcagccgccgctccgcctatctcgccttcctcaacgaacatccgcaaaccctggcgcaactggcagagattatgggtcaaagttcttgggcggcggcgtatctgaacaaatatccgattttgttggacgaactcatcagcgcgcaattattagatacggcgtttgattgggacaaactcgccgccgaactttcagacggcatcaaagcctgcggcggcgatactgaagcgcaaatggacaccctgcgccgcttccagcacgcccaagtcttccgcctcgccgtccaagacctcgccggactgtggacggtagaatccctctccgaccaactctccgccctcgccgacaccatcctcgccgccgccctgctgtgcgcatgggcggacatgcccaaaaaacaccgcgacaccccgcaattcgccgtcgttggttacggcaaactcggcggcaaagaactcggctacgcctccgacctcgacctcgtctatctctacgacgatccccaccccgacgcaggcgacgtgtacagccgcctcgcccgtcgcctgaccaactggctttccgccgccactggcgcaggcagcctctacgaaaccgacctgcgcctgcgccctaatggcgacgccggtttcctcgcccacagcatcgccgcctttgaaaaataccagcgcgaaaacgcctggacgtgggaacaccaatccctcacccgcgcccgcttcatctgcggcacacccgaaattcagacggccttcgaccgcatccgcaccgaaatgctgactgccgaacgcgaccaaaccgccttagcaggcgaaattatcgaaatgcgcgaaaaaatgttccccacccatccgcctgccgacagcaacgtcaaatacgcgcgcggtggcgtggtcgatgtcgaatttatcgtccaatatctgatacttgcccatgcccgccagtatccgcaactcttggacaactacggcaacatcgccctcttaaacatcgccgccgactgcagccttatcgacaaaaacctcgccgaacaaagccgcaccgcctaccgcttctaccgccggcagcagcacaacaccaaactgcgcgacgcggcaaaaaccgaagtaaccggcgaactgttggcacattacggcaatgtcaggaaattgtggcgggacgtgttcggcgaagaagcggcaaccgcctga

SEQ ID NO: 51740 - DNA, 672 bp, Neisseria meningitidis; identical to SEQ ID NO: 43608

SEQ ID NO: 51741 - DNA, 1677 bp, Neisseria meningitidis
atgagcgtaggtttgctgaggattctggttcaaaaccaggtggttactgttgagcaggccgagcattactacaatgagtcgcaggcgggtaaggaagtgttgccgatgctgttttcagacggtgtcatttcgcccaagtcgcttgcggcattgattgcgagggtgttcagttattcgattcttgatttgcgtcattatccgcgccacagggtgctgatgggggtgttgacggaggagcagatggtggagttccactgtgtgccggttttccgtcggggcgacaaagtattttttgcggtttccgatccgacacagatgccgcaaattcagaaaaccgtttctgccgcagggattgaggttgagttggtcattgtcgaggatgaccagttggcgggtttgctcgattgggtgggttcgcgttcgacatcgctgcttcaggagcttggggaggggcaggaggaagaggaaagccacaccctgtatatcgacaacgaggaggcagaagatggccctgttccgaggtttatccataagactttgtcggatgccttgcgcagcggggcatcggacatccatttcgagttttacgaacacaatgcccgtatccgtttccgtgtggacgggcagctccgcgaggtggttcagccgcccattgcggtaagggggcagcttgcttcccggattaaggtaatgtcgcgtttggacatttccgaaaaacggataccgcaggacggcaggatgcagctgacctttcaaaagggcggcaagcctgtcgatttccgtgtcagcacattgccgacgctgtttggcgaaaaggtcgtgatgcggattttgaattccgatgccgcgtctttgaacatcgaccagctcggttttgagccgtttcagaaaaaattgttgttggaagcgattcaccgtccttacggcatggtgttggtaaccggtccgacaggttcgggaaagactgtgtcgctctatacctgtttgaatattttgaatacggagtcggtaaatattgcaacggcggaagaccctgccgagattaacctgccgggcatcaatcaggttaacgtcaatgataagcagggcctgacttttgccgctgctttgaagtctttcctgcgtcaggacccggacatcattatggtcggtgagattcgtgatttggaaactgccgatattgcgattaaggcggcacaaacagggcatatggtgttttccaccctgcacaccaataatgcgccggcgacgttgtcgcgtatgctgaatatgggtgtcgcgccgtttaatattgccagttcggtcagcctgattatggcgcagcgtcttttacgcaggctgtgttcgagctgcaaacaggaagtggaacgcccgtctgcctctgctttgaaggaagtcggcttcaccgatgaggaccttgcaaaagattggaaactttaccgcgccgtcggttgcgaccgttgccgggggcagggttataaggggcgtgcgggcgtgtatgaggttatgcccatcagcgaagaaatgcagcgtgtgattatgaacaacggtacggaagtggatattttggacgttgcctataaggagggtatggtggatttgcgccgggccggtattttgaaagttatgcagggcattacttcattggaagaggtaacggcaaataccaacgattag

SEQ ID NO: 51742 - DNA, 501 bp, Neisseria meningitidis
ttgccacaatgccgtctgaagcctttcagacggcattatcctgccaaatgttcaaacaatatgccgaaagccaccttttacacgcacgttgcccaagttccgattttcacctgccgcctgattgcccgtgcgattcgggacggcggcaggatactggtgtggtccgattcgttcgggcagcttcaggaattggacaaaatgctttggcaatacgaggccgagagtttcattccgcacgaaatttgggaaacggaagaagccatgccgtctgaaccatccgtcctgcttgcctgcggcggcaatctgccccgaattcccgaaggcatgaccgttttgaacctgtccgacggtttttggaacaccgctccggtcttgcccgcgcgcgttttggaaatcgtcggcaacagcttggaagagctcgccgactcgcgcgaacgctttaccgcctaccgccgaagcggttttgccatcgaacatcacggcatggagggcaaggcataa

SEQ ID NO: 51743 - DNA, 591 bp, Neisseria meningitidis; identical to SEQ ID NO: 48758

SEQ ID NO: 51744 - DNA, 762 bp, Neisseria meningitidis; identical to SEQ ID NO: 41676

SEQ ID NO: 51745 - DNA, 552 bp, Neisseria meningitidis
ttgagcggcatcaacatcaaactcaaaagcggcgattccctgctgatacgcggcccgagcggttgcggcaaaacttcgttgctgcgcgcgctggctgggctttggccgttcggcagcagcggcaaagtcagccgtccgccgcatcaagacatcctcttcctgccgcaacgcccgtacacggcacagggcagcctgcgcgacgcggtttgttatcccgacatcgacaaacagcatccggagctaatcgaagccatgaacacctgccgcttgggttatctggttgataaattagataaaaccgacgactggcaacacaaactctccccgggcgaactgcaacgcgtcgccttcgtccgcgccctgctttccaagcccaaaatcgtcctgctcgacgaagccaccgccgctttggacgaaccgaccgaggccctgctctaccgcgcactgaaacaaaaactgcccgacagcatcatcatcagcatcggccaccgcagcacgctcaacgcgttccacaatatgcacctcgatgtcggcaacgctgcctgcggctga

SEQ ID NO: 51746 - DNA, 1302 bp, Neisseria meningitidis; identical to SEQ ID NO: 50407

SEQ ID NO: 51747 - DNA, 195 bp, Neisseria meningitidis
atgtgcgactttcgcggttatgaagaaccggaaatggtcaagaaacgccctgtcgtcgtcatagcgcgaaacaggcacaacggcaaactggtaacggtcgtacccttaagcagcacagaacctgtccctttggcggactaccaccacaaaatgagtggaaaccccttaccggacaagccgcacatccaatgttga

SEQ ID NO: 51748 - DNA, 438 bp, Neisseria meningitidis; identical to SEQ ID NO: 43498

SEQ ID NO: 51749 - DNA, 2283 bp, Neisseria meningitidis
atgacggtttttcggatttgctttattatccgtttatttttgaaatatctggggtggggagacgtgttccgtcgttggtttttgccgtgttgggttgtcggtgcggcggcttcgttcgcgctgccggtcgtgccgcattggctgttttggctggcggcttttgcggtttttgctgtgtttgcaaggcgttttgcgtttgccggtctgatgctgtgcgtgttggcgggcgcggcttacggcgtattcaggacggaggcggcattgtcttcccaatggtgggcagaagccgtttcaggcgtgcctttgacggtggaagtggcggatatgccgaggtcggacgggcggcgtgtgcagtttgcggcaaaggctgtggacagcggtggtcggacgtttgatttgctgctgtcggactacaaacggcgcgaatgggcggtcgggagcagatggcggataacggcacgtgtgcaccctgtcgtcggggagttgaacctgcgcggtttgaaccgtgaggcgtgggcattatccaacggaataggcggcgcggggacggtcggtgcggacagggttttgctgcatggcggaagcggttgggggattgcggtttggcgcagccgcatcagccgtaattggcagcaggcggatgcggacggcgggctttcagacggcatcgggctgatgcgcgcgttgagcgtgggcgaacagtcggcattgcgccccgaattgtggcaggcgttccggccgttggggctgacgcatttggtcagtatttcgggtttgcacgttacgatggtggcggtaatgtttgcgtggctggcgaagcggctgcttgcctgttccccgcgccttcctgcccggccgcgcgcgtgggttttggcggcggggtgtgcaggcgcgctgttttacgcgctgcttgccggtttttccgtgccgacgcagcgcagcgttttgatgttggcggcgtttgcgtgggcttggcgcaggggaagattgtcggcgtgggcgacgtggtggcaggcgttggcggcggtgctgctgttcgacccgtcggcggtcttgggtgtggggacttggctgtctttcggtttggtggcggccctgatatgggcgtgctcggggcgtttgcacgagggaaaacggcaaactgctttgcgcgggcagtgggcggcttcggtgttgtcgctggttttgctcggttatctgtttgcttcgctgcctttaatcagccctttggtcaatgcggtggcaattccgtggttttcttgggtattgacgccgctggcgttgctgggttcggtcgtgccgtttgcgcctttgcaacagttgggggcatttttggcggaatatactttgcggtttttggtgtggcttgccgatgtgtcgcccgagtttgccgttgcctccgcacctttgccgctgttggtgttggcggtgtgtgccgctttgctgttgctgctgccgcgcggcttgggtttgcgtccgtgggcggtgttgctgttggcagggtttgtgttttaccgttcacccggcgtgccggaaaatgaggttgcggttacggtttgggatgcggggcagggtttgtcggtgtcggttcagacggcaaatcatcatcttttgtttgacaccggaacggcagcggcggcgcagatggggattgtgccgagtttgaatgcggcgggtgtccgccgtttggacaagctggttctgtcgcatcacgacagcgaccacgacggcggttttcaggcagtcggcaagataccgaacggcgggatttatgccggacagccggaattttatgagggggcgcggcattgtgcggaacagcgttggcaatgggacggcgtggattttgagtttttgatgccgtctgaacgcaaaaacatcgatgataatgggaaaagttgtgttttgcgtgttgtggcgggcggtgcggcactgctggtaacgggcgatttggatacgaagggcgaggaaagcctggtcggcaagtatggaggcaacctgtacagccaggttttggttttgggacatcacggcagcaatacgtcctcgtcgggcgtgttcctcaatgccgtctcgcccgaatatgccgttgcttcaagcggttatgccaacgcctacaaacatccgaccgaagcggtgcagaaccgtgtccgcgcacacggcatcaaattgctgcgtaccgatttgtcgggcgcactgcaattcggcttgggacgcggcggcgtgaaggctcaacgtttgagagggtataaattctattggcagaaaaaaccgtttgaatga

SEQ ID NO: 51750 - DNA, 615 bp, Neisseria meningitidis
atgtcttttgataactatcttgtccctaccgttatcgagcagagcggtcgcggtgagcgtgcattcgatatctattcccggcttttgaaagagcgcatcgtattcttggtcggcccggtaaccgacgagtccgccaatctggtggttgcccaactgttgtttttggaaagtgagaatccggataaggatattttcttctatattaactcgccgggcggttcggtaacggccggtatgtcgatttacgacaccatgaattttatcaagcccgatgtatcgactttgtgcttggggcaggcagcaagtatgggcgcgttcttattgtcggcaggcgaaaaaggcaaacgtttcgccctgcccaacagccggattatgattcaccagcctttaatcagcggcggcttgggcggtcaggcatccgatattgaaattcacgcacgcgaactgttgaaaatcaaagaaaaactcaaccgcctgatggcgaaacattgcggccgcgatttggcagatttggagcgcgacaccgaccgtgataatttcatgtccgccgaagaggctaaagaatatggtctgattgaccagattttggaaaaccgcgcttctttgcggctttaa

SEQ ID NO: 51751 - DNA, 579 bp, Neisseria meningitidis; identical to SEQ ID NO: 43267

SEQ ID NO: 51752 - DNA, 1146 bp, Neisseria meningitidis
atgcaaaataattcatacggctatgccgtgtcggtgcgcgtgggcggtaaagagcaccgccactgggagcgctacgacatcgacagcgactttttaatccctgccgacagcttcgattttgtcatcggcaggttggggccggaggcggccatacccgatttaagcggagagagctgcgaggtagtgatagacgggcaaatcgtgatgacgggcatcatcggcagccagcgccacggcaaaagcaagggcggccgcgagttgagcttgagcgggcgtgatttggccggttttttggtggattgctccgcgccgcagctcaatgtaaagggcatgacggtattggatgcagccaaaaagctggccgcgccgtggccgcagattaaagcggtggtgcttaaggccgaaaacaaccccgctttggacaaaatcgacatcgagccgggcgaaaccgtatggcaggcattaacccatattgccaactcggtcgggctgcatccgtggctggagccggacggcacgttggtggtgggcggtgcggattacagcagcccgccggtggcgacattgtgttggagccgcaccgacagccgccgcaatatcgagcgcatggacattgagtgggataccgacaaccgcttttccgaggttacttttttggcgcaatcgcacggccgcagcggcgacagcgccaaacacgatttaaagtgggtgtacaaagacccgacgatgacgctgcaccgccctaaaacggtggtggtgtccgatgccgacaatttggccgcattgcaaaagcaggctaaaaagcagctggccgactggcggctggagggattgacactcacgataaccgtgggcggccataaaacccgcgacggcgtattgtggcaacctggccagcgtgtgcatgtgatcgacgacgagcacggtatcgatgcggtgttttttctgatggggcggcggtttatgctatcccgcatggatggcacgcaaaccgagctgcggctcaaagaggacggtatttggacacccgacgcttaccccaaaaaggccgaggcggtgcgcaagcgcaaaggcaaacgcaaaggcgtgagccataagggcaaaaaaggcggcaaaaaacaagcagaaacggcggtgtttgaatga

SEQ ID NO: 51753 - DNA, 1404 bp, Neisseria meningitidis; identical to SEQ ID NO: 36865

SEQ ID NO: 51754 - DNA, 419 bp, Neisseria meningitidis
atgacagaatatcccggcatcgggtcgccgttgttttacggcgttttttttgcggcagtgctggtcatgattgccttggatatgttttcgctgaagaaaaacagcagccataaagtcggcgtcaaagaagccttggcatggagcggcttgtgggttgccgtatcctgcctgttcgcaggctggctgtatttcaaactcgccggcaatcccggctacggcgcggcagtcgcaaaagaaaaagtattggaattctttaccggctacattttggaaaaatcgttggcagtcgataatattttcgtgttcctgatgatattcggctacttcaaagtcgcaccgcagtttcagcaccgcgtgctgctgtacggcgtattgggcgcattggtattgcgcaccgtcatgattttcgtcggcgcggc

SEQ ID NO: 51755 - DNA, 1053 bp, Neisseria meningitidis; identical to SEQ ID NO: 44860

SEQ ID NO: 51756 - DNA, 5589 bp, Neisseria meningitidis
atgaataaaggtttacatcgcattatctttagtaaaaagcacagcaccatggttgcagtagccgaaactgccaacagccagggcaaaggtaaacaggcaggcagttcggtttctgtttcactgaaaacttcaggcgacctttgcggcaaactcaaaaccacccttaaaactttggtctgctctttggtttccctgagtatggtattgcctgcccatgcccaaattaccaccgacaaatcagcacctaaaaaccagcaggtcgttatccttaaaaccaacactggtgcccccttggtgaatatccaaactccgaatggacgcggattgagccacaaccgctatacgcagtttgatgttgacaacaaaggggcagtgttaaacaacgaccgtaacaataatccgtttctggtcaaaggcagtgcgcaattgattttgaacgaggtacgcggtacggctagcaaactcaacggcatcgttaccgtaggcggtcaaaaggccgacgtgattattgccaaccccaacggcattaccgttaatggcggcggctttaaaaatgtcggtcggggcatcttaactaccggtgcgccccaaatcggcaaagacggtgcactgacaggatttgatgtgcgtcaaggcacattgaccgtaggagcagcaggttggaatgataaaggcgaagccgactacaccggggtacttgctcgtgcagttgctttgcaggggaaattacagggtaaaaacctggcggtttctaccggtcctcagaaagtagattacgccagcggcgaaatcagtgcaggtacggcagcgggtacgaaaccgactattgcccttgatactgccgcactgggcggtatgtacgccgacagcatcacactgattgccaatgaaaaaggcgtaggcgtcaaaaatgccggcacactcgaagcggccaagcaattgattgtgacttcgtcaggccgcattgaaaacagcggccgcatcgccaccactgccgacggcaccgaagcttcaccgacttatctctccatcgaaaccaccgaaaaaggagcggcaggcacatttatctccaatgatggtcggatcgagagcaaaggcttattggttattgataccggggaggacatcggtttgcgtaacggagcggtcgttcaaaacaacggcaaccgccctgctgctacggtattaaatgccggccgtaatttggttatcgaaagcaaagcaaatgtgaacaatgctaaaggttcgaccaatctgtcgaccggcggtcgtactacgatcaatgatgctactattcaagcgggcagttccgtgtacagctccaccaaaggcgatactgaattgggtgaaaatacccgtattattgctgaaaacgtaaccgtattgtccaacggcagtattggcagtgctgctgtaattgaggctaaagacactgcacacattgaagcgggtaaaccgctttctttagagacttcaaacgttgcttctaacatccgtttgaacaacggtagcattaaaggcggaaagcaggtggtattgatggctgatgacgacattcaggcaaaagcctcccacctgaatgcgtccggcaatctgtatattcatgcaggtaaggatctggatttgaatgccgataaagacttatcaacacaaagtatcagcctgagggcagacaacaccgccctcatcagcagcaacggtaacaccttgactgcagaaaagaatctggatattcaggcaggtagcttgagtgtgcgtcaaagtaatctgcaatccagtggcggtaatgtgcagatgagcgcgactaaaggcaacatcagcttgaatcagagttggataaatgccagtcagaatattgatacggcagcacttcaaggcaatattatttcagacggtctgactgctgttgccgaagttggacgcgtatctcttcttgccaacggcaatgttgatttcaacggtctaaataccttgattgcggaaggagacattaatgctggttcagtcggtaaaggccgtctgaaaatggacaataccgatatttatgcttctgcaggcgatgtgaaactggttgccggaggtcaattagatttaggcaacggcaccgttaacggcggtcatatcagcttagacagcaataaaggcagcatggtggtgcagaatgtacacctgaatgcccgcgcatcactgaaagtggatgcggatcaaactttaaccattaataacagcaagctcaattccgatcacaatacccagattaatacaaatcatggtcatatgacgcttaatcagcttgatgctcattcacgtcgtcatatgagtatcagtgcacagggtaaaggcaaaggaaaagacagcggtcaaattttacaaaacgaccagcaaaacagtaaaagtactttggcggcagatggtgtattgtcattgaacagcagcgcattacaggttttggacaatactaccctgcgcggtggcgcgataaacatcaaagctggcggaggcatcatcaaacgggggcatatcgattgggaaacccaagatacggcaactatgcgttcagcggaactgaaaccactgtccggtatgatgtcgatagaatcgggcggtgataaccctttaaccgttgaacccggtaaccgtatcgtttctgcaggtgatttggccgtgaaccacaacggcacattccaaatcagtgccagagcaggaaataacggcaatccgagtgcgcaaacagccagcgtttcagctaaaggcaatatcgggattgtggcgggagaggtggatattgatgcagcaaatattgccgcagggaaagatttggctttagtggcaactaaagggaatatttcactaaacagtattaggaatacgtttagtaactatcaattgaaaacagataaacacaatatcacacagcaacttactgatgtagagcaggagcttagtaagttaacgagcgatcctaaatatcgtaaagcacaggatctttcacaaatgttgaggcgtaaatataagaggcgtgacaaagtattcggtgatagtgaggccagattacgtggtttacgagcaaagataaatgctgctgatgaggcttgggcagaacgccaatccccagtaaaagcgttacttgaacgtaaacaattgttacaacaagcccttttaacagtttcccaaccgggtagtggtcacgaaaaccaaggtagcacccttagcggtcaaaatatcaaactgctcgctgcaggtggtatccgtatccagggctccaaagttgctgccacccaacaggcaaatatccaagctgcaggatttttacctgcaccagccgcagaggaactgcaagaaggtcgacttcaatcagccattgacatcagcggtgtacttgatacttttgaatatggtcagcaaggcagcgataaatacggctatgccattttcagcaggccatctgaaatttcaggaaaaacaggtgttaccctctctgcaccaaatgccaatgagaacagccgcatcagtctgagtgcggcaaacatcgaagctgaaaacggcaaaatcaaaattcaatcttacggtgaccaatattactatgcgagacagggcgaactctatacctttgaacgccgcagctacaaaaccggcaaatggtacaaccgcaaacacattaccgaagtcaaagaacacaaaaacgccaagcccgacgcagtaaacctcagcgcatcccaaggcatcgacatcaaatctggtggcagcatcgacgcctacgccaccgcattcgatgcccccaaaggcagcattaacatcgaagccgggcggaaattgacactctatgccgtagaagagctcaactacgacaaactagacagccaaaaaaggcgcagatttctcggcatcagctacagcaaagcacacgacaccaccacccaagtcatgaaaaccgcgctgccctcaagggtagttgcagaatcagccaatctgcaatcaggttgggataccaaactgcaaggcacacagtttgaaaccacactgggtggcgcaaccatacgcgcaggcgtaggcgagcaggcacgggcagatgccaagattatcctcgaagggatcaaaagcagcatccacacagaaaccgtgagcagcagcaaatctactctatggcaaaaacaggcaggacggggcagtaacatcgaaaccttgcaattgccgagtttcaccggtcccgttgcgcccgtactgaccgctcccggcggctatatcgccgacatccccaaaggcaacctcaaaaccgaaatcgaaaagctgtccaaacagcccgagtatgcctatctgaaacagctccaagtagcgaaaaacatcaactggaatcaggtgcagcttgcttacgacagatgggactacaaacaggagggcttaaccgaagcaggtgcggcgattatcgcactggccgttaccgtggtcacctcaggcgcaggaaccggagccgtattgggattaaacggtgcggccgccgccgcaaccgatgcagcattcgcctctttggccagccaggcttccgtatcgttcatcaacaacaaaggcgatgtcggcaaaaccctgaaagagctgggcagaagcagcacggtgaaaaatctggtggttgccgccgctaccgcaggcgtagccgacaaaatcggcgcttcggcactgaacaatgtcagcgataagcagtggatcaacaacctgaccgtcaacctagccaatgcgggcagtgccgcactgattaataccgctgtcaacggcggcagcctgaaagacaatctggaagcgaatatccttgcggctttggtcaataccgcgcatggagaagcagccagtaaaatcaaacagttggatcagcactacatagtccacaagattgcccatgccatagcgggctgtgcggcagcggcggcgaataagggcaagtgtcaggatggtgcgataggcgctgcagtcggtgagattgttggtgaggctttggttaagaatactgatttcagtcgtatgagtgcgaccgaaatcgaaaaagctaaagcgaagattactgcctattcaaaactggttgccggcactgcgtctgccgttgtaggcggggatgtgaatacagcggcgaatgcggctactgtggcggtagagaataattccctctttcagccacaaaccacattagaagcgggagtaagaaatgcaattttacgaggagatattcaggaattacggcttttgttgggcgaagcaaatttttcaacagctgatgctgcctatgctcaaaggattttagcttcgatggaaaaaataggtgaaagtaattctcgactattggctgaaagatacggtgtagattggctaaataaagttcatcacatctttaaggggcatcaaggaagcatcggtaatacattgattcaaaaatcaggctccatggaaaatgctgttgtagcgacgcaaaaggcagtggatgctttaaaactgacaaaaacaggaaattatccagttactgtaacggtcaatggtataacggtaattgttcgcgtatatgtcaataatggagtatctcgtattgcaactattttgaaaatgtaa

SEQ ID NO: 51757 - DNA, 1521 bp, Neisseria meningitidis
atgcagctgatcgactattcacattcatttttctcggttgtgccaccctttttggcactggcacttgccatcattacccgccgcgtactgctgtctttaggcatcggtattctggtcggcgttgcctttttggtcggcggcaaccccgtcgacggtctgacacacctgaaagacatggtcgtcggcttggcttggtcagacggcgattggtcgctgggcaaaccaaaaatcctggttttcctgatacttttgggtatttttacttccctgctgacctactccggcagcaatcaggcgtttgccgactgggcaaaacggcacattaaaaaccggcgcggcgcgaaaatgctgaccgcctgcctcgtgttcgtaacctttatcgacgactatttccacagcctcgccgtcggtgcgattgcccgccccgttaccgacaagtttaaagtttcccgcgccaaactcgcctacatcctcgactccactgccgcgcctatgtgcgtgctgatgcctgtttcaagttggggcgcgtcgattatcgccacgcttgccggattgctcgttacctacaaaatcaccgaatacacgccgatggggacgtttgtcgccatgagcctgatgaactattacgcgctgtttgccctgattatggtgttcgtcgtcgcatggttttccttcgacatcggctcgatggcgcgtttcgaacaagccgcgttgaacgaagcccacgatgaaactgccgtttcagacggcagccggggcagggtttacgcattgattattcccgttttggccttaatcgcctcaacggtttccgccatgatctacaccggcgcgcaggcaagcgaaaccttcagcattttgggggcatttgaaaacacggacgtaaacacttcgctggtattcggcggcacttgcggcatccttgccgtcgttctctgcacgctcggcacgattaaaaccgccgactatcccaaagccgtttggcagggtgcgaaatctatgttcggcgcaatcgccattttaatcctcgcttggctcatcagtacggttgtcggcgaaatgcacaccggcgattacctctccacactggttgcgggcaacatccatcccggcttcctgcccgtcatcctcttcctgctcgccagcgtgatggcgtttgccacaggcacaagctgggggacgttcggcattatgctgccgattgccgccgccatggcggtcaaagtcgatccctcactgattatcccgtgtatgtccgcagtaatggcgggggcggtatgcggcgaccactgttcgcccatctccgacacgaccatcctgtcgtccacaggcgcgcgctgcaaccacatcgaccacgttacctcgcaactgccttacgccttaaccgttgccgccgccgccgcatcgggctacctcgcattgggtctgacaaaatccgcgctgttgggctttggcacgacaggcattgtattggcggtgctgatttttctgttgaaagataaaaaacgcgccaacgcctga

SEQ ID NO: 51758 - DNA, 360 bp, Neisseria meningitidis; identical to SEQ ID NO: 42625

SEQ ID NO: 51759 - DNA, 219 bp, Neisseria meningitidis; identical to SEQ ID NO: 36291

SEQ ID NO: 51760 - DNA, 1005 bp, Neisseria meningitidis
atgaccatcattgtaacaggcgcggccggctttatcggcagcaacatcgtcaaagcacttaatcaacgcggtattaccgacatcgtcgccgtcgataatttgagcaaaggcgaaaaattcaaaaaccttgccgagtgtgaaatcgcccattatctcgataaacacgaattcatccgccaagtgagggaacacattttaccttatcaaaacatcgaagccgttttccatcaaggcgcgtgttccgatacgatgaaccacgacggtttgtatatgatggacaacaactaccagtacacgctggatttgctggactggtgtcaggacaaacgcatccctttcctttatgcctccagtgcggcggtttacggcaaaggagaaatcttccgcgaagagcgcgaactcgaaaaaccgctcaacgtgtacggctactccaaattcctgttcgaccaagtattgcgtcgccgcatgaaagaaggtctcaccgcccaagtcgtcggcttccgctacttcaatgtttacggacaacacgaacaacacaaaggccgcatggcatctgtcgccttccaccatttccaccaataccgcgaacacggttacgtcaacctgttcggcagcaacgacggctacggcaacggcgaacaaacccgcgacttcgtcagcgtcgaagacgttgccaaagtcaacctctacttcttcgaccatcccgaactttccggcatctacaatctcggcaccggccgcagccaacagttcaacgaactagccgccgccaccgtcaacgcctgccgcgccgccgaaggcaaacccgaaatgagcttgaaagagctggtagaagaagaacttatccgctacatccccttccccgacgcactcaaaggcaaataccaaagcttcacccaagccgacatcaccaaattgcgcgaagccggatataaggaagaatttttcgatgtcaaatcaggcgtcgaccgctacgtcaaatggatgctggaaaatttggcttaa

SEQ ID NO: 51761 - DNA, 501 bp, Neisseria meningitidis; identical to SEQ ID NO: 51694
  misc_feature 486, 487, 488, 489, 490: 'n' is a, c, g or t

SEQ ID NO: 51762 - DNA, 1539 bp, Neisseria meningitidis
atgttccattccatcgaaaaatacagaacgcccgcccaagtcttattaggcctgattgcattgaccttcgtcggcttcggggtcagcacggtatcccatccgggcgccgactacatcgtccaagtgggcgacgaaaaaatcagcgagcagtcgcttaacgccgccgtccaaaacgagcaggcggacggcggcagcccttcgcgcgacgcggtgttccaatccctgctacaacgcgcctacctgaaacagggcgcgaagctgatgggcatttcggtttcttccgaacaaatcaagcagattatcgtggacgatcccaatttccacgacgcaaacggcaaattcgaccacgcgcttttaaaccgctacctgtcgcaacgccatatgtctgaagaccagtttgtcgaagaaatccgcgatcagtttgccttgcagaatttggtaaacctcgtccaaaacggcgtattggtcggcgacgcgcaggcggaacagctgatcaggctgacgcaggtcaaccgcaccatccgttcgcacactttcaaccccgacgaattcatcgcccaagtcaaagtgtctgaagccgatttgcagaagttttataacgcaaacaaaaaagactacctgcttcccaaagcggtcaaattggaatatgtcgcattgaatctgaaagactttgcagacaaacagaccgtcagcgaaacagaagtgaaaaatgcgtttgaagagcgcgtggcgcgtttgccggcaaatgaagccaaaccttctttcgagcaggaaaaagccgccgtcgaaaacgaattgaaaatgaaaaaggcggttgccgacttcaacaaggcaaaagaaaaattgggcgacgatgcgttcaaccatccttcctcgcttgccgaagccgccaaaaacagcggtttgaaagtcgaaacccaagaaacttggctgagtaggcaggacgcgcaaatgtccggtatgcccgaaaacctgatcaatgccgtattcagcgacgacgtattgaagaaaaaacacaattccgaagtgctgaccatcaacagcgaaaccgcgtgggtcgtccgcgccaaagaagtccgcgaagagaaaaccctgccgtttgccgaagccaaagacgcggtacgtcaggcttatatccgtaccgaagccgccaaacttgccgaaaacaaggcaaaagacgtgcttacccaactgaacggcggcaaggctgttgacgtgaaatggtcggaagtgtccgttttgggcgcacagcaggcaaggcagtccatgccgcccgaggcttatgcggaactgctgaaagcaaaaccggcaaacggcaaacccgcctacgtcaggctgatcggtctgccggcacccgtgattgtcgaagtacaggctgtaaccccgccggatgatatcgccgcacagcttccgcttgcaaaacaggctttggcgcaacagcagtctgccaatactttcgacttgttgatacgttatttcaacggcaaaatcaaacagaccaaaggagcgcaatcggtcgacaacggcgacggtcagtaa

SEQ ID NO: 51763 - DNA, 396 bp, Neisseria meningitidis
gtgaaactgctggcgaataactggcaaccgattgccattatcgcgcttgtcggcacgctcttggctgtgtcgcaccatcaaggctacaagtcggcatttgcgaagcagcaggcggtcatcgacaagatggagcgcgacaaggcgcaagccctgctgttgtcggctcaaaactatgcgcgcgaactggaactggcacgcgcggaagctaaaaaatatgaagtcaaggcgcacgctgtcggcatggctttggcgaaaaaacaggcggaagtcagccgtctgaaaacggaaagagacctttgcaaaattcctttccctcccgacagccgaaacccaaacacaggttttcggctgttttcgccccaaataccgcctaattttacccaaatacccccttaa

SEQ ID NO: 51764 - DNA, 546 bp, Neisseria meningitidis; identical to SEQ ID NO: 40451

SEQ ID NO: 51765 - DNA, 372 bp, Neisseria meningitidis
atgaagcggcaggctttcttcaaactgatggcgtgtgcggcatttctgtctgccatttcgctgcgcctccccgtattgggcgcgtgttacgcaatattgtccctctatgcgtttgcactttacggcatcgacaaacggcgtgccgtgcggggaaaacgccgcattcccgaacaccgcctgctgctgcctgccttgttcggcggttgggcgggcgcatacttgggcagcaggatattcaggcataaaacggcgaaaaagcgttttgttgtgctgttccgtctgactgtttcgggcaatgtcctggcgacctgcatcctgattgattatttcgttccgcccgaactttttgtcaaactcgggcaacatctctga

SEQ ID NO: 51766 - DNA, 195 bp, Neisseria meningitidis; identical to SEQ ID NO: 42321

SEQ ID NO: 51767 - DNA, 738 bp, Neisseria meningitidis
atgggcggacaaaaaacgcatttcgggttcagtacggtcaacgaagatgaaaaagccggcaaagtggcggaagtgttccactccgtcgccaaaaactacgacattatgaacgatgtgatgtcggcagggctgcacagggtgtggaagcatttcaccatcaacacggcgcacctgaaaaaaggcgataaagtgttggacattgcgggcggtacgggcgatttgtcgcgcggttgggcgaaacgggtcggcaaggaaggcgaggtttggctgaccgatattaattcctctatgctgaccgtcgggcgcgaccgtctgttgaacgaaggcatgattttgcccgtatcgcttgccgatgcggaaaaactgcctttccccgacaattatttcaacttggtttccgtggcgttcggcttgcggaacatgacgcataaagatgccgcgctgaaagagatgtaccgtgttttgaaaccgggcggcacgttgctggtgttggagttttccaaaatctacaaacctttggaaggcgcgtatgatttctattcgttcaagctgctgccggtcatgggcaggctgattgcgaaagatgcggagagttaccagtatcttgccgaatccatccgtatgcaccccgatcaggaaactttgaaacagatgatgctggatgcgggcttcgacagcgtggattatcacaatatgagtgcgggcattgtcgcgctgcataagggcgtgaaattttaa

SEQ ID NO: 51768 - DNA, 417 bp, Neisseria meningitidis; identical to SEQ ID NO: 42505

SEQ ID NO: 51769 - DNA, 213 bp, Neisseria meningitidis; identical to SEQ ID NO: 36410

SEQ ID NO: 51770 - DNA, 642 bp, Neisseria meningitidis
atgagatgttttatgattcaaaatgtcgttacttcaataatcctgtattctgggacagccgtagacttacttattatcctaatgttattttttgccaaaagaaaaagtagaaaagacatcattaacatctatttaggacaatttctaggctctgttagcctgatattgctaagtttgctttttgcatttgtcttagattatattcctagtaaagagattttaggtttgctcggcttgattccgattttcctaggcatcaaagttttgctgttaggagattctgatggagaggctattgccaaagagggtttgcgcaaagataataaaaacctgatttttctagtcgctatgattacttttgcaagttgtggtgctgacaatattggtgtctttgtcccatattttactaccttaaatttagcgaatttgatagtggctttacttacctttctagtcatgatttatctcttggttttttctgcccaaaaattagcacaagtcccttctgttggagaaactttggaaaaatatagcagatggtttgttgctgttgtttatttgggattgggggtatatatcctgattgaaaacaacagttttgatatgctatggactgtgtcgggccaggaaaaaatattatga

SEQ ID NO: 51771 - DNA, 1050 bp, Neisseria meningitidis
ttgatattaatgaacacacccatccccttctccgaacggctcatccgctggcaaaaacaacacggtcgccaccacctcccttggcaggtcaaaaacccttattgcgtctggctttccgaaatcatgctccagcaaacgcaggtcgccaccgtgttggactactatccgcgtttcttggaaaaattcccgaccgtacaagcacttgccgccgcgccgcaagacgaagtgttatcgctgtgggcgggcttgggttattacagccgcgcgcgcaacctgcacaaagccgcgcaacaagtcgtcgaacaattcggcggcacgtttccgtcggagcgcaaagacttggaaaccctctgcggcgtaggcagaagcaccgccgccgccatttctgccttctccttcaaccgccgcgaaaccattttggacggcaacgtcaaacgcgtactctgccgcgtgttcgcccgcgacggcaatccgcaggacaaaaaatttgaaaactcgctctggacacttgccgaaagcctgctgccgtctgaaaacgccgatatgcctgcctatacacaaggtttgatggatttgggcgcgaccgtgtgcaaacggacgaaacccttgtgccaccaatgcccgatggcggacatctgcgaagcaaaaaagcaaaaccgcaccgccgagctgccgcgcaaaaaaaccgccgccgaagtaccgaccctgccgctttactggctgattgtccgcaaccgggacggcgcgattttgctggaaaaacgccccgccaaaggcatttggggcgggctgtattgcgtgccgtgttttgaaagtttgaacgggctttccgactttgccgccaaattctccctgaccatggcagatatggacgaacaaaccgccctgacccaccgtctgacgcaccggctgctgatgattacgccgtttgaaggacaaatgccgtctgaaagcccttcagacggcatttggataaagccggcgcatttgaaagattacggtttgcccaagcctttggaaatttatttaaacggtaataggttagaataa

SEQ ID NO: 51772 - DNA, 726 bp, Neisseria meningitidis
atggaaacacaaaacaaacctaccgttaccgacattgaccgccccatactcgtcccgcccggcggacataaaaaagtcttgctgcattcctgctgcgccccgtgcagcggcgaagtgatggaagccatgctggccagcggcattgattacaccatttatttttacaatcccaatatccatccgcataaagagtatatgctccgaaaagaggaaaacgtacgctttgcggaaaagttcggcatccctttcatcgacaaagacgacgattacgaaaacgaccgcaaagaatggtttgccaaagccaaaggcatggagtttgagccggaacgcggcatccgctgcaccatgtgtttcgatatgcgtttcgaaaaggcggcgcaatacgcgcatgaacacgggttccccgtctttaccagttcgctgggcatttcccgttggaaaaatatggcgcaaatcaacgactgcggccgccgtgccgccgcgccttacgatgatgtggtgtattgggatttcaactggcgcaaaggcggcggcagcgcgcgtatgattgaaatcagcaaacgtgaaaacttctaccagcaggaatattgcggttgcgcctattccctgagggattccaacgcccaccgcaaatcgcagggacgcatccccatcaaactcggcgtgctgtattacggcgacgaatcgacacaatacgaacctgcacccatccgggtggacaaataa

SEQ ID NO: 51773 - DNA, 957 bp, Neisseria meningitidis
atgaaagtcctctttatcgccgacccgatggcaagtttcaaaacctacaaagacaccacctacgccatgatgcgcgagatggcaaaacgcggctggcaactgtttcacacattgagcggggaattgtctgtaaacggcggtctggtaacggcacaggcatcggcatttgaatttttgggtgcaaaaaacgatgatgaccatgaatggtttaaagcggcggacaaagttcagacggcattgaaagcatttgatgccgtgattatgcgtaccgatccgccgttcgatatgcaatacctctacgccacccaattactgacgctggcggaacagcagggcgcgaaagtctttaacagcggacaggcgatgcgtgatttcaatgaaaaactggcgattttgaacttcagccgctttatcgcgcccacgctggtaacgacccgttccgccgatgtccgcgtatttttgaaagaacacggcgacatcatcattaaaccgctcgacggcatgggcggtatgggcatcttccgcctgaccgaaaaagaccccaacatcggcagcatcctcgaaaccctgatgcagcttgattcccgcaccattatggcgcaacgctacattcccgaaatcgtacacggtgacaaacgcatcctgattatcggcggcgaagtcgtcccctatgctttggcgcgtatcccgcaaaacggcgaaacacgcggcaaccttgcggcaggcgggcgcggcgtggcgcaggaattgggcggacgcgaccgcgaaattgccgaaacgctcgcccccgaactcaaacggcgcggcatcctgctggccggtttggacgttatcggcagcaacctgaccgaagtcaacgtaaccagcccgaccggattccaagaaatcatgaaacaaaaaggtttcgatgtggcggcaatgtttgccgatgccgttgccgcgtggtcggtacgttaa

SEQ ID NO: 51774 - DNA, 360 bp, Neisseria meningitidis; identical to SEQ ID NO: 44577

SEQ ID NO: 51775 - DNA, 966 bp, Neisseria meningitidis
atgagctacacgcaactgacccaaggcgaacgataccacatccaatacctgtcccgccactgcaccgtcaccgaaatcgccaaacagcttaaccgccacaaaagcaccatcagccgcgaaatcagacggcaccgcacccaagggcagcaatacagcgccgaaaaagcccagcggcaaagccggactatcaaacagcgtaagcgacaaccctataagctcgattcgcagctgattcagcacatcgacacccttatccgccgcaaactcagtcccgaacaagtatgcgcctacctgtgcaaacaccaccggatcacgctccaccacagcaccatttaccgctaccttcgccaagacaaaagcaacggcagcacgttgtggcaacatctcagaatatgcagcaaaccctaccgcaaacgctacggcagcacatggaccagaggcaaagtacccaaccgtgtcggcatagaaaaccgacccgctatcgtcgaccagaaatcccgtatcggcgattgggaagccgacaccattgtcggcaaaggacagaaaagcgcattattgaccttggtcgaacgcgttacccgctacaccatcatctgcaaattggatagcctcaaagccgaagacactgcccgggcagctgttagggcattaaaggcacataaagacagggtgcacaccattaccatggataacggcaaagagttctaccaacacaccaaaataaccaaagcattgaaagcggagacttatttttgtcgtccttaccattcttgggagaaagggctgaatgagaacaccaacggactcatccggcaatacttccccaaacaaaccgatttccgtaacatcagtgatcgggagatacgcagggttcaagatgagttgaaccaccgaccaagaaaaacacttggctacgaaacgccaagtgttttattcttgaatctgttccaaccactaatacactag

SEQ ID NO: 51776 - DNA, 249 bp, Neisseria meningitidis; identical to SEQ ID NO: 37411

SEQ ID NO: 51777 - DNA, 765 bp, Neisseria meningitidis; identical to SEQ ID NO: 47047

SEQ ID NO: 51778 - DNA, 294 bp, Neisseria meningitidis; identical to SEQ ID NO: 36355

SEQ ID NO: 51779 - DNA, 1269 bp, Neisseria meningitidis
ttgactaacagggggggagcgaaattaaaaaccaattccaagagtagtgaacgaatgagtgaagttgaatatttctcacactttatatcggacggaaaagggaagcttttagaaattccgcagcgaagaggtaagcaagacggggtttttgttgattggatttcattcacattccatgaagatactttactgaaagtttccggttgccctttattttctgatgctgaatacatgtatgtattaagcagaaagctggaagaaattctaggttttggcataacgcgcaaatgcaaatcaaggggcaacaaattctatgaatccatgtataggttaggttcggatgatgttgattatggagaggtgcatttcggaggtcagcgcaatactgttttagttgagttgaaaggtactggttgcagcgttgcaagtccgggttgggagttgaggctaaagcagtttctcgatgattcgataaggacaagaataacgcgaattgacctagcacttgatttttttgatggagagtacacgccggatcaggcgttgttagatcacgataatggtttttttgataacagcaatcaaaggccgaaatctgaaacgatcggtacggcttggcggaatgaggacgggagcggcaagacattttatgtaggtcgcaagaaaaattctcgttttgttcgtgtttatgagaaaggcaggcagcttggagataaagaaagcaaatgggtaaggttcgagatccagtttaattatggagatatagaaatacccttggatattttaataaatcagggttcgtatttctgtggagcttttccaatttgtagaaaatttaaaaatatgccggttcccgaaaggtttgatcagagaaagaaaacgcttaatttaactttcgagcataaattgcattacgcgaaaaacgcggttggaaaactggtcaatttcatgattgaaatgggttttgataatagcgaaattgtggaatctttaaaggcagattcgggatttcccaaaggattagaacctgaaaaatatgctctggaaatgttaagggacggtttgaaacacggttttattcatgaacagccggatattgatttggaaattgaacttgatgaattgggggttattgcttttaaaaattctgacaaattcgatagggaaaaaaggctttttagtcctgattatgatgtcgagaaagaaaggaaatatcaggaatatttaagtaaagtttatcatcaaaatgtagattatgattatttttaa

SEQ ID NO: 51780 - DNA, 210 bp, Neisseria meningitidis; identical to SEQ ID NO: 39235

SEQ ID NO: 51781 - DNA, 1170 bp, Neisseria meningitidis; identical to SEQ ID NO: 38006

SEQ ID NO: 51782 - DNA, 126 bp, Neisseria meningitidis; identical to SEQ ID NO: 41141

SEQ ID NO: 51783 - DNA, 1350 bp, Neisseria meningitidis
atgaaattaccggtgatgtcgcccgaacattcggcgcaacttcaggcgtttgaggcaaaaatcctgtccaatcacgccaaaatcgaggcgtggttccgcacgcagtggagcgtacaccgcccgccgttttacggttcggtcgatatacgcaatgccggttacaaaatttcgtctatcgatatgaatttgttccccggcggcttcaataatctgaatcccaactttatcccgctggcggcggttgccgcgcaagatgcggtgcaacgcgcctgcgaaacggcgaaatccgtattgattattcccgaaaaccacacgcgcaatacgttttacctgcaaaacatttacgccctcggcgagattttgcgttcggcagggtatgaagtgcgcttgggcagcctgaatccggaagtaaccgaaccgaccgaatttgaaactgcattgggcgacaaaatcctgttggaacctttattgcgtacccgcgaccgtgtccatcttgcagacggcttttcgccttgcgtggttttgttgaacaacgatttgtctgccggcattcccgacatcctcaaaggcatcagccaaaccgttttgccgccgttgcacggcggttggacgacgcgccgcaaaacaaatcatttcggcgcgtacaaccaagttaccgccgaatttgccaagttaatcggcatcgacgaatggcaaattaacccttattttgaaaaaatcggcggtttggacttccaagggcgtgaaggcgaagacgcgttggcggaagcggtagaacgtgtgctggcgaaaattcaagccaaatacgacgaatcgggcattaccgacaaacctttcgtcatcgtcaaagccgatgccggcacttacggcatgggcgtgatgagcgtcaaatccgccgacgaagtgcgcggattgaaccgtaaaaaccgcaataaaatggcgaaagtcaaagaaggcttggaagtcagcgaagtgattgtccaagaagggatttatacttatgaaaccttaaacggcgcggtgtgcgaacccgtcgtctatatgatggaccgcttcgtcatcggcggctttttccgcgtacacgaagggcgcggtgcggacgaaaacctcaacgccggcggtatggtgtttgttccgctgtccaacagcatccccaccggcaacggcgacaactcccaagaagctcccgaagcctgcaagcgcgtattcgaacaatgggactcgctgggtatgccgcgctctgaaaaagactgcgacgtggacaacgaacacaaccgcctctacgtttacggcgtaatggcacgcctgtcgcttctggcggcgtccatcgagttggaagaaacggcgtaa

SEQ ID NO: 51784 - DNA, 657 bp, Neisseria meningitidis
atgaccattaaaattattctgatagacgaccacaccctcttccgcagcggcattaaagcccttttgtcgcgccaacacggttttgaagtcatcggcgaagccgcagacggcctctcgggcatcaaaatgattagtcggctgcaacccgatgtcgtcctgctcgatttggatatgcccggcatgaacggacgcgaagcactctcccaaatcatcagcatcaatccgcagcaggcagtgattatgctgaccgtttccgaagacagcgacgacttgaccgaatgtattcgcatcggcgcgcgcggttacctgctgaaaaacatcaacgctgactttctgctcgaaagcatacgcaaagccgccgaaggcgataatgtattctcgcccgagatgaccgccaaactcgttaaaagcctgatttctccccagtccacacaagggacgcaggcactctcctcacttacccctcgtgaactggaaatcttgggctatctcgccgcaggacacagcaacaaaatcatcgcccgccacctcgatcttgccgaatccaccgtcaaagtccacgttcaaaacctgctccgcaaactcaacctcagcagccgggtgcaggccgccgtttacgccatccggcacaacgtcccccaacccgtgctggaataa

SEQ ID NO: 51785 - DNA, 1341 bp, Neisseria meningitidis
atgttgaatccatcccgaaaactggttgagctgatccgtattttggacgaaggcggttttattttcagcggcgatcccgtgcaggcgacggaggctttgcgccgcgtggacggcagtacggaggaaaaaatcatccgtcgggcggagatgatcgacaggaaccgtatgctgcgggagacgttggaacgtgtgcgtgcggggtcgttctggttgtgggtggcggcggcgacgtttgcgttttttaccggtttttcaggcacttatcttctaatggacaatcagggtctgaatttctttttggttttggcgggcgtgttgggcatgaatacgctgatgctggcagtatggttggcaatgttgttcctgcgcgtgaaagtggggcgttttttcagcagtccggcgacgtggtttcggggcaaagaccctgtaaatcaggcggtgttgcggctgtatgcggacgagtggcggcaaccttcggtacgttggaaaataggcgcaacgtcgcacagcctgtggctctgcacgctgctcggaatgctggtgtcggtattgttgctgcttttggtgcggcaatatacgttcaactgggaaagcacgctgttgggcgattcgtcttcggtacggctggtggaaatgttggcatggctgcctgcgaaactgggttttcccgtgcctgatgcgcgggcggtcatcgaaggccgtctgaacggcaatattgccgatgcgcgggcttggtcggggctgctggtcggcagtatcgcctgctacggcatcctgccgcgcctcttggcttgggcggtatgcaaaatccttttgaaaacaagcgaaaacggattggatttggaaaaaccctattatcaggcggtcatccgccgctggcagaacaaaatcaccgatgcggatacgcgtcgggaaaccgtgtccgccgtttcgccgaaaatcgtcttgaacgatgcgccgaaatgggcggtcatgctggagaccgaatggcaggacggcgaatggttcgagggcaggctggcgcaggaatggctggataagggcgttgccgccaatcgggaacaggttgccgcgctggagacagagctgaagcagaaaccggcgcaactgcttatcggcgtgcgcgcccaaactgtgcccgaccgcggcgtgttgcggcagatcgtccgactttcggaagcggcgcagggcggcgcggtggtgcagcttttggcggaacaggggctttcagacgacctttcggaaaagctggaacattggcgtaacgcgctgaccgaatgcggcgcggcgtggcttgagcctgacagggcggcgcaggaaggccgtttgaaagaccaataa

SEQ ID NO: 51786 - DNA, 186 bp, Neisseria meningitidis; identical to SEQ ID NO: 42933

SEQ ID NO: 51787 - DNA, 120 bp, Neisseria meningitidis; identical to SEQ ID NO: 43584

SEQ ID NO: 51788 - DNA, 816 bp, Neisseria meningitidis
atgactactctcaaacccgccctgcccgcttatctggacaacatccgcatcatcctcacgcgcaccagccatcccgccaacatcggctctgccgcgcgcgcgatgaaaacaatgggtctgcacaaactgaccatcgtcgccccaaatctgatggcaacgccgatgacggaaaacccgcccgtgtttgacccggagcatcctcaatcgtttaaattaccggaagaaagcttcatcctcgcttccggcgcggcagacgttttggaaaatgccaccattgccgcttctttggacgaagcccttgccgacaccaccatcgcctgcgccctgaccagccgccgccgcgaaattactgcgccgctgcaaaccccgcgcgatttggtatccgaattactgcagaccgcaaaccgaggcgagaaagtggcactggttttcggcaacgagactttcggcttgagcatcgaagaagtccaagcctgcaaccgactgatgaccatcaacggcaatcccgactatttctcgctcaacctcgcccaagccgtgcaggtcgtgtgctacgaaatcttcagccaaaccggttcgcccatgacccatcttcaacaagaagaccacgctgcgacccacgagcaaatcaaaggcatggtcgcccacatggaaagcgtgatgaacgacatcggctttttcaaccgccgcaacggcgagcgtctgatgcgccgtatgcagagcctgttcggccgcgccaatacgcaaaccgaagacatcgatatcctgcgcggttttttcaataccgtcagccaccgtatccataaaaaagactga

SEQ ID NO: 51789 - DNA, 507 bp, Neisseria meningitidis
atgttcagacggcattttcctgtaagggagaaagcattgaacatcaccgttttggcagtcggcaccaaaatgccgcgctgggttgatgaggccgtcgccgaatacgccaaacgcttcggacgcgacgtcgcctacgcactcaaagaaatcaaacccgaaaaacgcggcgcgggcgtgaatgccgcccaaggtatggcggcggaagaaaaacgcatccttgaagccattccgcaaggcgcgttcctcgtcgttcttgacgaacgcggcaaagcaccgacctccgtcgagctggcggaacacctcaaaagctggcagcaaaacggcgaacacgtctgcttcgtcatcggcggcgcggacggtatgaccgaccgcctcaaacagcaggcacgcatgatgatgcgcctgtccagcctgaccctgccgcacgggatggtgcgcgtccttctgaccgagcagctctaccgcgccgcctccatcctgcacaaccatccctatcatcgggaataa

SEQ ID NO: 51790 - DNA, 897 bp, Neisseria meningitidis
atggagtctgaaaacattatttccgccgccgacaaggcgcgtatccttgccgaagcgctgccttacatccgccggttttccggttcggtcgccgtcatcaaatacggcggcaacgcgatgaccgaacctgccttgaaagaagggtttgcccgcgatgtcgtgctgctgaagctggtcggcattcatcccgtcatcgttcacggcggcgggccgcagatcaatgcgatgcttgaaaaagtcggcaaaaagggtgagtttgtccaaggaatgcgcgttaccgacaaagaggcgatggatattgtcgaaatggtgttgggcgggcatgtcaataaagaaatcgtgtcgatgattaacacatatggcggacacgcggtcggcgtgagcggacgcgacgatcatttcattaaggcgaagaaacttttgatcgatacgcccgaacagaatggcgtggacatcggacaggtcggtacggtggaaagcatcgataccggtttggttaaagggctgatagaacgcggctacattcccgtcgtcgcccccgtcggcgtaggtgaaaaaggcgaagcgttcaacatcaacgccgatttggtagcaggcaaattggcggaagaattgaacgctgaaaaactcttgatgatgacgaatatcgccggtgtgatggacaaaacgggcaatctgctgatcaaactcacgccgaaacggattgatgaactgattgccgacggcacgctgtatggcggtatgctgccgaaaatcgcttccgcggtcgaagccgccgtcaacggcgtgaaagccacgcacatcatcgacggcaggatgcccaacgcgcttttgctggaaatctttaccgatgccggtatcggttcgatgattttgggcggtggggaagatgcctga

SEQ ID NO: 51791 - DNA, 2178 bp, Neisseria meningitidis
atgacacgcttcaaatattccctgctgtttgccgccctgttgcccgtgtacgcgcaggccgatgtttctgtttcagacgaccccaaaccgcaggaaagcactgaattgccgaccatcaccgttaccgccgaccgcaccgcgagttccaacgacggctacactgtttccggcacgcacaccccgctcgggctgcccatgaccctgcgcgaaatcccgcagagcgtcagcgtcatcacatcgcaacaaatgcgcgaccaaaacatcaaaacgctcgaccgcgccctgttgcaggcgaccggcaccagccgccagatttacggctccgaccgcgcgggctacaactacctgttcgcgcgcggcagccgcatcgccaactaccaaatcaacggcatccccgttgccgacgcgctggccgatacgggcaatgccaacaccgccgcctatgagcgcgtagaagtcgtgcgcggcgtggcggggctgctggacggcacgggcgagccttccgccaccgtcaatctggtgcgcaaacgcccgacccgcaagccattgtttgaagtccgcgccgaagcgggcaaccgcaaacatttcgggctgggcgcggacgtatcgggcagcctgaacaccgaaggcacgctgcgcggccgcctggtttccaccttcggacgcggcgactcgtggcggcagcgcgaacgtagccgcaatgccgaactctacggcattttggaatacgacatcgcaccgcaaacccgcgtccacgcaggcatggactaccagcaggcgaaagaaaccgccgacgcgccgctcagctacgccgtgtacgacagccaaggttatgccaccgccttcggcccgaaagacaaccccgccacaaattgggcgaacagccgccaccgtgcgctcaacctgttcgccggcatcgaacaccgcttcaaccaagactggaaactcaaagccgaatacgactacacccgcagccgcttccgccagccctacggcgtagcaggcgtgctttccatcgaccacaacaccgccgccaccgacctgattcccggttattggcacgccgacccgcgcacccacagcgccagcgtgtcattgatcggcaaataccgcctgttcggccgcgaacacgatttaatcgcgggtatcaacggttacaaatacgccagcaacaaatacggcgaacgcagcatcatccccaacgccattcccaacgcctacgaattttcccgcacgggtgcctacccgcagcctgcatcgtttgcccaaaccatcccgcaatacggcaccaggcggcaaatcggcggctatctcgccacccgtttccgcgccgccgacaacctttcgctgatactcggcggcagatacagccgttaccgcaccggcagctacgacagccgcacacaaggcatgacctatgtgtccgccaaccgtttcaccccctacacaggcatcgtgttcgacctgaccggcaacctgtctctttacggctcgtacagcagcctgttcgtcccgcaatcgcaaaaagacgaacacggcagctacctgaaacccgtaaccggcaacaatctggaagccggcatcaaaggcgaatggcttgaaggccgtctgaacgcatccgccgccgtgtaccgcgcccgtaaaaacaacctcgccaccgcagcaggacgcgacccgagcggcaacacctactaccgcgccgccaaccaagccaaaacccacggctgggaaatcgaagtcggcggccgcatcacgcccgaatggcagatacaggcaggttacagccaaagcaaaacccgcgaccaagacggcagccgcctgaaccccgacagcgtacccgaacgcagcttcaaactcttcactgcctaccactttgcccccgaagcccccagcggctggaccatcggcgcaggcgtgcgctggcagagcgaaacccacaccgaccctgccacgctccgcatccccaaccccgccgccaaagcccgcgccgccgacaacagccgccaaaaagcctacgccgtcgccgacatcatggcgcgttaccgcttcaatccgcgcgccgaactgtcgctgaacgtggacaatctgttcaacaaacactaccgcacccagcccgaccgccacagctacggcgcactgcggacagtgaacgcggcgtttacctatcggtttaaataa

SEQ ID NO: 51792 - DNA, 1335 bp, Neisseria meningitidis
atgactgacctgaacaccctttttgccaacctcaaacaacgcaatcccaatcaggagccgttccatcaggcggttgaagaagtcttcatgagtctcgatccgtttttggcaaaaaatccgaaatacacccagcaaagcctgctggaacgcatcgtcgaacccgaacgcgtcgtcatgttccgcgtaacctggcaggacgataaagggcaagtccaagtcaaccggggctaccgcgtgcaaatgagttccgccatcggtccttacaaaggcggcctgcgcttccatccgaccgtcgatttaggcgtattgaaattcctcgcttttgaacaagtgttcaaaaacgccttgaccaccctgcctatgggcggcggcaaaggcggttccgacttcgaccccaaaggcaaatccgatgccgaagtaatgcgcttctgccaagcctttatgaccgaactctaccgccacatcggcgcggacaccgatgttccggccggcgacatcggtgtaggcgggcgcgaaatcggctacctgttcggacaatacaaaaaaatccgcaacgagttttcttccgtcctgaccggcaaaggtttggaatggggcggcagcctcatccgtcccgaagcgaccggctacggctgcgtctatttcgcccaagcgatgctgcaaacccgcaacgatagttttgaaggcaaacgcgtcctgatttccggctccggcaacgtggcgcaatacgccgccgaaaaagccatccaactgggcgcgaaagtgctgaccgtttccgactccaacggcttcgtcctcttccccgacagcggtatgaccgaagcgcaactcgccgccttgatcgaattgaaagaagtccgccgcgaacgcgttgccacctacgccaaagagcaaggtctgcaatactttgaaaaacaaaaaccgtggggcgtcgccgccgaaatcgccctgccctgcgcgacccagaacgaattggacgaagaagccgccaaaaccctgttggcaaacggctgctacgtcgttgccgaaggtgcgaatatgccgtcgactttgggcgcggtcgagcaatttatcaaagccggcatcctctacgccccgggaaaagcctccaatgccggcggcgtagcaacttcaggtttggaaatgagccaaaacgccatccgcctgtcttggactcgtgaagaagtcgaccaacgcctgttcggcatcatgcaaagcatccacgaatcctgtctgaaatacggcaaagtcggcgacacagtaaactacgtcaatggtgcgaacattgccggtttcgtcaaagttgccgatgccatgctggcgcaaggcttctaa

SEQ ID NO: 51793 - DNA, 657 bp, Neisseria meningitidis
atggattttgaaaaagcgcggttcaatatggtcgaacagcaaatccgtccttgggatgtattggattttgacgttttggacgctttggcggagattccgcgcgagctttttgtcgatgaggacttgcagggtttggcgtatgcggatatggcgctgccgcttgccaacgggcataagatgctggagccgaaagtcgtggcgcggctggcgcagggcttgaagctgacgaaaaacgatacggttttggaaatcggcacgggttcgggctatgcgaccgcgcttttggcaaaattggcgggcaaagtggtttcggacgatatcgatgccgaacagcaaaagcgcgccaaagcggttttggacggcttgtctttggaaaacatcgattatgtgcaaaataacgggttgaccgaactttccgcaggtgcgccgtttgatgcggtttatgtcggcggtgcggtaaaccttgtgcctgaagtgttgaaagaacagttgaaagatggcggacgcatggtggttatcgtaggccgcaagcctgttcagcgcgcgcttttgattacgcgcaagggcgatgtgtttgaagagaaggtgctgttcgataccttggtggcgcatttggatgataaggatgccgatccgtttggcggttttcagttttga

SEQ ID NO: 51794 - DNA, 1032 bp, Neisseria meningitidis; identical to SEQ ID NO: 43767

SEQ ID NO: 51795 - DNA, 402 bp, Neisseria meningitidis; identical to SEQ ID NO: 36186

SEQ ID NO: 51796 - DNA, 531 bp, Neisseria meningitidis; identical to SEQ ID NO: 43484

SEQ ID NO: 51797 - DNA, 831 bp, Neisseria meningitidis
ttgaacgccgcccgacggcagcgttacaatcgcccacaactgttttttccgaacatcatcatgaccacgaccgaacacgacaacgacgatgcattcctgctgcggtacagccgccacatcctcttggacgaaattggcatcgaagggcagcagaaactttccgccgcgcatattttggtcgtcggctgcggcggtttgggtgccgccgccctgccctatctcgccgcttccggcatcggcacgctgaccatagccgattccgacacggtcgagctgcacaacctgcaacgccaagtcgcatttgacgagggcgatgtcggcaagcccaaagccgaagccttggcagaccgcctgaaacgcatcaaccataacgtcgatgtccgcaccgtcaacgaaaaactcgacggctgccgcctgaccggtttggttcaaaccgccgacatcgttttagactgctgcgacaactacgccacgcgccaagccgtcaaccgtgtctgcgtacaaacgaaaacaccgctggtttcaggagcagcggtgcgctttgaagggcaacttgccgtgtaccgtcccgacttgcccgactcgccgtgttacgcctgcctgtttgacggcggatcggcttcagacggcatctgttccctcttcggcgtgttctcgccgctggtcggcatcatcggcagtacccaagcggcggaggctctgaaaatcctgctggatgcgggcgaaccgtcgcacggcaggctggcggtttaccgtgccttggaagggggctggcaatatttcgacctgccgcgcaaccccgaatgcccggtttgcggcgcggaacggtaa

SEQ ID NO: 51798 - DNA, 852 bp, Neisseria meningitidis
atgcacatcctgttgaccgccctgctcaaatgcctctccctgctgccactttcctgtctgcacacgctgggaaaccggctcggacatctggcgttttaccttttaaaggaagaccgcgcgcgcatcgtcgccaatatgcgtcaggcaggcatgaatcccgaccccaaaacggtcaaagccgtttttgcggaaacggcaaaaggcggtttggaacttgcccccgcgtttttcagaaaaccggaagacatagaaacaatgttcaaagcggtacacggctgggaacatgtgcagcaggctttggacaaacacgaagggctgctattcatcacgccgcacatcggcagctacgatttgggcggacgctacatcagccagcagcttccgttcccgctgaccgccatgtacaaaccgccgaaaatcaaagcgatagacaaaatcatgcaggcgggcagggttcgcggcaaaggaaaaaccgcgcctaccagcatacaaggggtcaaacaaatcatcaaagccctgcgttcgggcgaagcaaccatcgtcctgcccgaccacgtcccctcccctcaagaaggtggggaaggcgtatgggtggatttcttcggcaaacctgcctataccatgacgctggcggcaaaactggcaaacgtcaaaggcgtgaaaaccctgtttttctgctgcgaacgcctgcctgacgggcagggtttcgatttgcacatccgccccgtccaaggggaattgaacggcgacaaagcccatgatgccgccgtgttcaaccgcaatgccgaatattggatacgccgttttccgacgcagtatctgtttatgtacaaccgctacaaaatgccgtaa

SEQ ID NO: 51799 - DNA, 360 bp, Neisseria meningitidis; identical to SEQ ID NO: 38354

SEQ ID NO: 51800 - DNA, 876 bp, Neisseria meningitidis; identical to SEQ ID NO: 41604

SEQ ID NO: 51801 - DNA, 939 bp, Neisseria meningitidis
atgtccatccatactctgaaacgcctgccctcatcgctgctgctcggtctctgcctttccctgccgtcagcccacctttttgccgacaacgacattttagggcaatttttagaacagaacatgcttacctcctccgatccgatagaaatattcgccgaaagcacgatacaccccaccaacacccaagccattacaggcggtctgattctctcctcacaatctgccctggtcgtcaacaacaaaaccggacagatactgtatcagaaaaacgccgacaggattatgcccatcgcctccatttccaaactgatgagcgcgatggtcgttttggatgcaaacttggacatgaacgaaaccgttaccattacgcccgacgaaatcgaccgcatcaaagggaccggcagccgtcttgccataggtacggcacttacacgcaaagaactgctgcacctgagcctgatgagcagcgaaaaccgcgccacccatgcattgggcagaacctaccccggcggcatgggcgcatttgtcgccgccatgaaccgcaaagcccaaagcctcggtatgtacggcagccgcttttacgaaccgaccggactcaacttccaaaacgtttctaccgccaaagacttgagccttatggtcaacgccgccgcccaatatccgcaaatccgcaccaactcgacttccaactacgcctcggtacagaccaaaaacgggcagcagaactacaaaaactccaatgccctggtcagagaaggcatgtggaacatcgaattgcagaaaaccggctacatacgcgaagcaggcaggtctatggttgtcaaagccaacattcaaaatcaacccgttaccatcgtattgctgaactcgcccacatccgccacacgcgtcaacgacgcccgcaaaatcgaatcgtggatgctgcagcaacgctcctga

SEQ ID NO: 51802 - DNA, 525 bp, Neisseria meningitidis
atgcaaacccgcatcctctccgccgtactgctggctttttcaaccgctgcctttgccgggggcgcattcacgctgcaattcgacaacccgtccgaagacggcggcttcacgcaaaaccagattttgagcgcgccttacggctttggctgttcgggcggcaatgcttcgcccgcgctgtcgtggaaaaatccgcccgccgggacaaaaagtttcgtcctgaccgtttacgataaagacgcgccgaccggactgggctggatgcactgggtggtcgccgacattcccgccgatgtccaccgccgcaacgcgacctcgctgcaattaagccgctgcgccaacatcgccgacgacccgtccgcagccatatcggcggtaatcagtttgcggatttgccgcatcaggttgacgccttcgtacacggcaaaaccgatgccgtcatgctgcaaccacgccaacacgccgcaaagcgcgacctccgccgcattgtgcggcacttcttcatccgtcagcaccgccgccgcataa

SEQ ID NO: 51803 - DNA, 153 bp, Neisseria meningitidis
atgtctggtatctacctaccccgcctattcccgccccatatcgccgaacgcggcctgttgtattttcagcagggcaaggttctcgatgtccgaaaaacttccgccgggcattatcggacggaggtgtgcggttcggaaaactattgggtatag

SEQ ID NO: 51804 - DNA, 504 bp, Neisseria meningitidis
atgtcagaccctaatttgattgacccggaaattttcgccgccgaagggcagaatctgcaaggcagttttctgctggaagaattggatgaacgcgtcagttcgcacgattatcccgccgacaggcagaccaaaatatcgtttacactgaccggcggtcgcgatcggctgcaacgcctgttcctcgacctgaacgtcaaagccgatatgcccctgatttgccagagatgtatcaaacccatgccgttcatgcttgatgaaagcagccgtatcgtcctgttttccaacgaagagtccttggacgaatccatgcttgccgacgaagaactcgaaggcatactgattgaaaaagaactcgacgtgcgcacattggtagaagaccaaatcctgatgtccctgcccttttcgccgcgacacgaagactgcggcgacaatgggacactggaagaagtcaatcgggacaaacccaacccctttgctgttttggcaggtttgaaaagcagttaa

SEQ ID NO: 51805 - DNA, 384 bp, Neisseria meningitidis
atgacttttgcctattggtgcatcctgattgcctgcttattgccgcttttttgtgcggcatatgccaaaaaaacgggcggattccggtttaaagacaaccacaatccgcgcgattttctggcgcgcacgcaaggcacagccgcccgtgcccacgccgcgcagcaaaacggttttgaagcctttgcaccgtttgccgccgccgttttgacggcacacgcaaccggcaatgccggacaagcaaccgtcaacacgcttgccggcctgttcatcctgttccgcctcgcctttatctggtgctacatcgcagacaaagcagcattgcgctcgctgatgtgggcgggcggatttgcctgcaccgtcgggctgtttgtcgcggctgcttga

SEQ ID NO: 51806 - DNA, 678 bp, Neisseria meningitidis
  misc_feature 678: 'n' is a, c, g or t
atggtcaaaggcaaatcgatggtcagcgaggaaatcgagctgaaccattatcttgaagcaaaaggcattaaagcggtagaaagcgacttgggcgagttcatcgtccaaatggcaggcgaaaaaccgacccatatcgtgatgcctgctatccacaaaaccaaagaacaggttagcgaactgttccaccaaaacctcggtacgccgctgacagacgatgtagaccaactgaccggcttcgcccgtaaagcactgcgcgatatttacagcactgccgatgtcggtttgagtggcgtaaactttgccgttgctgaaacaggtacgctgtgtctggtggaaaacgaaggcaacggtcgcttgagtaccaccgtaccgcccgtgcatatcgctattaccggcattgaaaaagtggtggcgaaattgtccgacatcccacccttgtacagcctgctgccgcgttctgccattggtcagaacattaccacttatttcaatatgattaccggcccgcgccgcagtgaagaattagacggtccgcaagaaatgcacttggttctgctcgacaacggccgcagccaggcttatgccgaagaccaaatgcgccgcaccctgcaatgtatccgttgcggcgcgtgtatgaaccattgcccggtttatacccgcatcggcggcgcggcatan

SEQ ID NO: 51807 - DNA, 225 bp, Neisseria meningitidis
atggaaaaacctttgaatttcaagcctattccctatccgcaaacgcgcgagagcgcggccgggtggtttaagcgcaacggggtgtgcaaggcgcattgggcgaaatatttcaatctggagcgcaccacggtggagcacctcttgcgcggcaagctgaaaggcaattttggcaaaagccacgaagcggcggttttgctggggatgaaggagaaaagcgatgattaa

SEQ ID NO: 51808 - DNA, 144 bp, Neisseria meningitidis; identical to SEQ ID NO: 43244

SEQ ID NO: 51809 - DNA, 906 bp, Neisseria meningitidis
atgaatcaaaccgccatcaaccgcgccgatgtgcgtacccgctttatcttcgacgatatgcccgtgcgcgggctgcacgtccgtctggaaaacgtgtggcagcacattgtaaaacagaaaaactatcccgccgccatccgccgcgccttgggcgagctgttggctgccggtgttctgctgtcgggcaacctcaaaaacgaaggcacgctgattgtgcaggttcaggggcaggggcggctgaaaatgctggttgcggaagcgacttccgaccgtaccgtccgtgcgaccgcgcggtgggacgaggcggcagaaatagccgatgacgaaagcctcggcgaccttttgggcggcaacggcgtgttcgtattgacgctgcagcccaaagacggcgaaccctggcagggcgtagtgcctttggaaggcgacggtatcgcgcaaatgttgatgaactatatgaaacgttccgaacagcttgatacgcacatcgtcctgtctgcaagcgatgaagcggcgggcggtctgctggtgcagcgtctgcctgaagcggtgttggatgaagaggcatgggaacacgtcagtacgctggcgcgcacgctgacggcggaggagctggcagaattggatgcgcaacacgttttataccgcctgttccacgaaacgccgccgcgcgtgttcgagccggaaacgtttgaattttcatgcacctgttcgcgcggcaaagtcagcgatatgctgatgctgggcggggaagaagtcggcggcgtggtggcggaacaaggcagcatcgaagtcgattgcgacttctgccacagcaaatacgtgtttgacgaaaccgatgtcaatgcgctgttcggggaggatgtggtcggcgttgcccgagagcagacccgacatactgtccaataa

SEQ ID NO: 51810 - DNA, 1305 bp, Neisseria meningitidis
atggctatggctaaaaatgttgtagtaatcggcgcacagtggggcgacgagggtaaaggtaaaatcgttgactggctggcggaagaagccggcggcgtggtgcgcttccaaggcggccacaatgcgggtcataccttggttgtcggcggcaaaaaaaccattttgcgcctgattccgagcggcatcctgcatgaaagtctggactgcttcatcggttcgggcgttgtcgtctcccccgaagccctgttgggcgaaatcgacgagttgaacgcggcaggcgtgaaaaacgtcgaaggccgtctgaaaatcgcgccgacctgcccgctgatcctgccttatcacatcgcgctcgaccaagcccgagaagcatcgcgcggcaaaggcaaaatcggcacgaccggccgcggcatcggccctgcctacgaagacaaagtggcacgccgcgccattcgcgccgccgatttgctgcatcctgaaaaactgcgtgaaaaactggatgccgtccttgcttattacaacgtccaactgcaacatctgcacaatgccgagccggttaaagcggaagacgtgatggcggttatcgaaaaagtcgcgccgcgcattgcgccgatgattaccgacgtgtcccgcgtgttgaacgagaaaaacaaaaacggcgaaaaactgctgtttgaaggcgcgcaaggtgcgttgttggacatcgactacggcacttatcccttcgttacctcgtccaactgtctggcgggcgcagcttcggcaggcgcgggcgtaggtcctcaaatgctggattatgttttgggcatcgtcaaagcctataccacgcgcgtcggttcgggcccgttcccgaccgaattgttcgacgaagtaggcgtaggtttggcagaacgcggacacgaattcggttcggtaaccggacgcgcacgccgctgcggctggtttgatgccgccgccctgaaacgctccatccaaatcaacggcatttccggtatgtgtattactaaactcgatgtaatggacggcgttgaaaccatcaatatctgcgtcggctatgaattgcccgacggcggcaaaaccgacatcctgccttgcggttccgatgcggtggaaacctgcaagccgatttacgaaaccatgcccggctggcgcaaatccactttcggcgtgaaggactacggcgcattgcccgaaaacgccaaagcatatttgaaacggattgaagaagtctgcggcgcgccggtcgccatcgtctccaccggccccgaccgagaagaaacgattgtgctgcatcatccgttcgcataa

SEQ ID NO: 51811 - DNA, 408 bp, Neisseria meningitidis
atggcttataccactgccaaagccgccgaaaaaataggcatctccgcccacaccctacgtttttacgacaaagaaggcttgttgcctaatatcggacgtgatgaatacggtaaccgctgttttaccgataacgatttgcaatggttgggcttattgcaatgcttgaaaaatacggggatgagcttaaaagacatcaaacgctttgcggaatgtaccgtcattggcgacgataccattgaagaacgcctttccttgtttgaaaatcaaatagaaaatgtgaagtgtcaaattgccgaattaaaacgctatttagatttgcttgaatacaaattggcgttttaccaaaaagcgaaagcattaggctcggtaaaagctgtaaatttgccgcaaattcctgaaacggcttag

SEQ ID NO: 51812 - DNA, 249 bp, Neisseria meningitidis; identical to SEQ ID NO: 39195

SEQ ID NO: 51813 - DNA, 753 bp, Neisseria meningitidis
atggcaaaccaaagacctatctacggcttccatgccgtcaacgcccgattgtggcaaaaccccaaatccatcgtcgaactctatgtccaagaaggcaaaaacgatgtacgcacgcgcgaagtgttggaaaaggcggcaaacgaaaacatccgcgtatattttgccgatgccgaccgcctcaacgccatcagcaaaggtgcgcgccatcagggcgtggtcggatttatcgatgcctccaaaaaccacgtccacctcgaagacgtattggaaaacttaagcgaaccgccgctgctgctgatactcgacggcatcaccgatccgcacaacctcggcgcgtgcctgcgtaccgccgacgcaatgggcgtacatgccgtcatcgcaccgaaagacaaaagcgcggggctgaacgccaccgtcagcaaagtcgccagcggcgcggcggaaaccgtcccctacatcaccgtaaccaacctcgcccgcaccctgcgcgaattgaaagaatacggcatttggattatcggcaccgatatgagcggcgagtccgacctttaccattgcaatctgcccgacagcgcggcgtgggtaatgggcaacgaaggcgacggtatgcgccgcctcacgcgcgaacattgcgacatgctggtgtccatacccatgttcggcacagtcgaaagcatgaacgtctccgtgtctgccggaatggtattaagtgaaacacgccgacaacgcgtattaaaaaacgaaaaagtataa

SEQ ID NO: 51814 - DNA, 669 bp, Neisseria meningitidis
atgaaccacgacatcactttcctcaccctgttcctgctcggcttcttcggcggaacgcactgcatcggcatgtgcggcggattaagcagcgcgtttgcgctccaactccccccgcatatcaaccgcttttggctgatcctgctgcttaacacaggacgggtaagcagctatacggcaatcggcctgatactcggattaatcggacaggtcggcgtttcactcgaccaaacccgcgtcctgcagaatattttatacacggccgccaacctcctgctgctctttttaggcttatacttgagcggtatttcttccttggcggcaaaaatcgagaaaatcggcaaaccgatatggcgaaacctgaacccgatactcaaccggctgttacccataaaatccatacccgcctgccttgcggtcggaatattatggggttggctgccgtgcggactggtttacagcgcgtcgctttacgcgctgggaagcggtagtgcggcaacgggcgggttatatatgcttgcctttgcactgggtacgctgcccaatcttttggcaatcggcattttttccctgcaactgaaaaaaatcatgcaaaaccgatatatccgcctgtgtacgggattatccgtatcattatgggcattatggaaacttgccgtcctgtggctgtaa

SEQ ID NO: 51815 - DNA, 645 bp, Neisseria meningitidis; identical to SEQ ID NO: 43086

SEQ ID NO: 51816 - DNA, 774 bp, Neisseria meningitidis
atgagtgcgaacatccttgccatcgccaatcagaagggcggtgtgggcaaaacgacgacgacggtaaatttggcggcttcgctggcatcgcgcggcaaacgcgtgctggtggtcgatttggatccgcagggcaatgcgacgacgggcagcggcatcgacaaggcgggtttgcagtccggcgtttatcaggtcttattgggcgatgcggacgtgcagtcggcggcggtacgcagcaaagagggcggatacgctgtgttgggtgcgaaccgcgcgctggccggcgcggaaatcgaactggtgcaggaaatcgcccgggaagtgcgtttgaaaaacgcgctcaaggcagtggaagaagattacgactttatcctgatcgactgcccgccttcgctgacgctgttgacgcttaacgggctggtggcggcgggcggcgtgattgtgccgatgttgtgcgaatattacgcgctggaagggatttccgatttgattgcgaccgtgcgcaaaatccgtcaggcggtcaatcccgatttggacatcacgggcatcgtgcgcacgatgtacgacagccgcagcaggctggttgccgaagtcagcgaacagttgcgcagccatttcggggatttgctttttgaaaccgtcatcccgcgcaatatccgccttgcggaagcgccgagccacggtatgccggtgatggcttacgacgcgcaggcaaagggtaccaaggcgtatcttgccttggcggacgagctggcggcgagggtgtcggggaaatag

SEQ ID NO: 51817 - DNA, 1098 bp, Neisseria meningitidis
ttgcgatataattcaaaccatttgccaaaaccgtcaaacactatgccgtctgaaacacgcctgccgaactttatccgcaccttgatatttgccctgagttttatcttcctgaacgcctgttcggaacaaaccgcgcaaaccgttaccctgcaaggtgaaacgatgggcacgacctataccgtcaaatacctttcaaacaatcgggacaaactcccctcccctgccgaaatacaaaagcgcatcgatgacgcgcttaaagaagtcaaccggcagatgtccacctatcagcccgactccgaaatcagccggttcaaccaacacacagccggcaagcccctccgcatttcaagcgacttcgcatacgttactgccgaagccgtccgcctaaaccgcctgacacacggcgcgctggacgtaaccgtcggccctttggtcaacctttggggattcggccccgacaaatccgttacccgtgaaccgtcgccggaacaaatcaaacaagcagcatcttatacgggcatagacaaaatcattttgaaacaaggcaaagattacgcctccttgagcaaaacccaccccaaagcctatttggatttatcttcgattgccaaaggcttcggcgttgataaagttgcgggcgaactggaaaaatacggcattcaaaattatctggtcgaaatcggcggcgagttgcacggcaaaggcaaaaacgcgcgcggcgaaccgtggcgcatcggtatcgagcagcccaatatcgtccaaggcggcaatacgcagattatcgtcccgctgaacaaccgttcgcttgccacttccggcgattaccgtattttccacgtcgataaaaacggcaaacgcctctcccatatcattaatccgaacaacaaacgacccatcagccacaacctcgcctccatcagcgtggtcgcagatagcgcgatgacggcggacggcttgtccacaggattatttgttttaggcgaaaccgaagccttaaagctggcagaacaagaaaaactctctgttttcctgattgtcagggataaaggcggctaccgcaccgccatgtcttccgaatttgaaaaactgctccgctaa

SEQ ID NO: 51818 - DNA, 516 bp, Neisseria meningitidis
atgaaatcaaaactccccttaatcctaatcaacttttccctgatttcaagcccattgggtgcgaatgcggccaaaatctacacctgcacaatcaacggagaaaccgtttacaccaccaagccgtccaaaagctgccactcaaccgatttgcccccaatcggcaactacagcagcgaacgctatatcccgccccaaacgcccgaaccggtatcatcaccgtcaaacggcagacaggttgtcaaatataaagccccggtcaaaacagtatccaagccggcaaaatccaatacgccgccgccgcaacaagcaccctcaaacaacagcagacgctccattctcgaaacagaattgagcaacgaacgcaaagcattggttgaagcccaaaaaatgttatcacaagcacgtctggcaaagggcggcaacatcaaccatcaagaaataaatgcattacaaagcaatgtattggacaggcagcaaaatattcaagccctgcaaagggaactggggcgtatgtaa

SEQ ID NO: 51819 - DNA, 138 bp, Neisseria meningitidis; identical to SEQ ID NO: 36823

SEQ ID NO: 51820 - DNA, 927 bp, Neisseria meningitidis
atgtcttttgcattcttctttcccggacaaggttctcaaagcctcggcatgatgaacggctttacagggcaggccgtcgtcaaaaacacatttgacgaagcatccgccatattggatcaagacttgtgggcgatgattaacggtagcgatgccgaaatcatcggtcaaaccgtcaatacccaacccatcatgctcgccgccggcgttgccgtttaccgcgcctatttggaagcgggtggcaaaacgcctgccgccgttgccggacacagcctcggcgaatataccgcgcttgtcgccgccggcgcattggattttgccaacgcggtcaaactcgtgcgcctacgcgcagaactgatgcagtccgccgtaccgcaaggcgtaggcgcaatggcggcgattctcggcttggaagatgggcaggttaaagccatttgtgccgaatccgcacagggcgaagtggtcgaagccgtcaacttcaactcgcccggacaagtcgtaattgcaggcaatgccgccgccgtcggacgcgccatgaccgccgccaaagaagccggtgccaaacgcgccctgccgctgcccgtgtccgtaccttcccattgcagcctcatgaaacccaccgccgacaaactcgccgaagccctgaaaaccgttgaaatcaagcagccgcaaatccgcgtcatccacaacgccgacgttgccgcctacgatgatgccgacaaaatcaaagacgcgctcgtccgccagctttacagccccgtacgctggacagaaaccgtcaacgcccttgtttcagacggcattgccgaatccgccgaatgcggcccgggcaaagtgttggcaggtctggcaaaacgcatcaacaaggccgccgcgtgcagcgcgctgaccgatgccggacaggttgccgcctttatcgaagcacactga

SEQ ID NO: 51821 - DNA, 651 bp, Neisseria meningitidis; identical to SEQ ID NO: 46222

SEQ ID NO: 51822 - DNA, 372 bp, Neisseria meningitidis; identical to SEQ ID NO: 36794

SEQ ID NO: 51823 - DNA, 693 bp, Neisseria meningitidis
atgaaactcatcaaatacctgcaatatcaaggcataggaagccgcaagcagtgccaatggctgattgccggcggttatgttttcatcaacggaacctgcatggacgacaccgatgcagacatcgattcctcatccgtcgaaacgttggatattgacggggaagcagtaaccgtcgttcccgaaccctatttctacatcatgctcaacaagcctgaagattacgaaacttcgcacaaacccaagcactaccgcagcgtattcagcctgttccccgacaatatgcggaacatcgatatgcaggcggtcggcaggctggatgcggatacgaccggcgtattgctgattaccaacgacggcaaactgaaccacaacctgacttcgccgagcagaaaaattcccaagctatacgaagtaacgctcaaacaccccacaggagaaacgctctgcgaaaccttgaaaaacggcgtgctgctccacgacgaaaacgaaaccgtttgtgccgccgatgccgttttgaaaaacccgaccaccctgctgctgaccattaccgaaggaaaataccaccaagtcaaacgcatgatcgccgccgccggcaaccgcgtgcaacaccttcatcgccggcgattcgcacatctggaaacagaaaacctcaaacccggggaatggaaatttatcgattgtccgaaattctga

SEQ ID NO: 51824 - DNA, 330 bp, Neisseria meningitidis
atgggcagcctgattattgaagatttgcaggaaggcttcggaaaagaagcagttaaaggcaaagagattaccgtgcattacacaggttggctggaaaacggaaccaaattcgactccagcctcgaccgccgccagccgctgaccatcacgctcggcgtcggacaagtcatcaaaggctgggacgaaggcttcggcggcatgaaggaaggcggcaaacgcaagctgaccatcccttcggaaatgggctacggcgcacgcggcgcgggcggcgtgattcctccgcacgccactttgatatttgaagtcgagctgctgaaagtgtacgaataa

SEQ ID NO: 51825 - DNA, 345 bp, Neisseria meningitidis; identical to SEQ ID NO: 43851

SEQ ID NO: 51826 - DNA, 597 bp, Neisseria meningitidis; identical to SEQ ID NO: 38176

SEQ ID NO: 51827 - DNA, 483 bp, Neisseria meningitidis
  misc_feature 4, 5, 6, 7, 8, 468, 469, 470, 471, 472: 'n' is a, c, g or t
gtgnnnnngggcgcgtcgggcaatttcgagctgaacgtctatatgcccgttatcgcctacaacctcttgcaatccatccgcctcttgggcgacgcgtgcaacagcttcaacgaacactgcgccgtcggcatcgaacccgtaccggaaaaaatcgactatttcctgcaccattccctgatgctcgttaccgcgttaaaccgcaaaatcggttacgaaaacgccgccaaagtcgccaaaaccgcctacaaaaacaacaaatcgttgcgcgaaaccgccgacgaagtatgggacgaaatcgaagcccgttttgaagacattttcgccgccgaacttgccgactggtgcgaagacgaacgcgagtggcctgcgctcgatgccgacattttcaacgaatggttcgacatccagctttctaccgtcatcaccgacctcgaacacgaaccgcttgcccgcgaagccttccaaccnnnnncacacacttaa

SEQ ID NO: 51828 - DNA, 957 bp, Neisseria meningitidis
atgaacaccgccgccatctaccgccagtaccaaacctatgtccgctccgataaatccggctgggcgttggacggctgttccgacagcgcgctcattgcgcaggcaaaacagcccggtttgcatctggaaatgtgcatcaaccgcttcgactcgggcatcaccttgtcgcggatgcgcggcggcggaacgggcgcgtttcccaccgaaatccacaatttcagccacaactgcgccttgttcgtcatggtgtcggggcagaaccggttacaaatgggcggcagggaataccgcccgtctgccggcgaaatctggctggtacgcggcgagttggcggacgtatccgaaaccctgctgcccgacaacagcggcatgtgcgcgctgcatttggatttttcgctggaaaaactgcgccgctggcacgacgaaggcttgctggacgaacgcctgttttcgccgcaaacgataggccgattcgccctgcaacggctggcgcaaaacgcagcggcactgacggcggcggcctgcccactgctgcaacgctcgttcgaatcggacggcttcggcctgcttgccgacgaagccgccgcgctggaactctccgcccgattattgcgcttcaccttccgccgccacgacaacggttaccgccgtcggcgcatagacgaagccgccgacatcctgcaatacgaattcgcccgtccgctgaccatcgccgaaatcgcccgccgcgtcggactgaacgaatgctacctgaaacgctatttcaaagcgcaaaccggcgaaaccgtcgccggatgcctgcgccgcctgcggctggaacacgcgctcgccctcatcgaatccggcagcaccgtccaagccgccatgcacttttgcggctaccgccacgcgggacggttcaacgaagcgttcagacggcattacggatttttgccttcggatgtgaagaagtgctga

SEQ ID NO: 51829 - DNA, 1473 bp, Neisseria meningitidis
atgaaccagacaagccgcgatctgacccgcatcagccacaacactaaaatcgtcgccacccttgggccgggcagcaacaacgtcgaactgttggaagacatgatccgcgtcggcggtctgaacgtcgtccgcttcaacttcagccacggcacgcccgaattccatcaggaaaacgccctcatcgtgcgcgaggcggcaaaacgcgccggacaggaaatcgccatcattgccgacctgcagggcccgaaaatccgcgtgggcaaaatcgccggcggcggcatcgaattgaacaaaggcgaaacgctggtactggatgccgcgctcgaaggcgaaggcacgcgcgaggcggtcggtttggactaccgcgacctgcccgacgacgttgccgcaggcgatgtcttgtggctggacgacggcctgctgaccctgaccgtggaatccgtcgaaggcagcaggattatcacaagggtggaaaacagccacgtcctgaaaagcaacaagggcatcaacaaacgcggtggcggtctgtccgcaggcgcgttgaccgaaaaagacttccgcgacctgaaaaccgcgattgccatcggttgcgactacctcgccatcagctttgtgaaatccgccgaagatttgcatatcgcgcgcgccaaagtcgaagaagaaatgaagggcagcacggccgtgcgccccggtttggtttccaaaatcgaacgcgtagaagcgattgaaaacttggacgaaatcatcctcgccggcgacggcattatggttgcgcgcggcgacttggcggtcgaagtcggacacgccgccgtccccgccctgcaaaaacggatgatccgccgcgcccgcgagttgcgccgcttcagcattacggcgacgcaaatgatggaatcgatgattaccaaccccgtaccgacccgcgcggaagtcagcgatgtggcaaacgcggtattggacggtaccgatgcggtgatgtgttccgccgaaaccgccgtcggcgcgtatccgtttgaaaccgtcagccaaatggcgattatctgcgcggctgcggaaaaagagcaggattcgctcaacggcgttgccgaacaggtcgagtatcccgaagcggtcagcaccaacctggcggttgccggcggtgcggtcagcgtggcgcgcgcggttcacgccaaagccatcgtcgccctgaccgaaagcggttcgaccgcctttgaaatcagccgccacaacatcaccctgccgattttcgcgctgaccccgagcgtttccgcccaacgccgtatggcgatgtaccggggcgtgcgcccgctgattttggcaaccagcaccgaccacgacacggcgttaaacgaagtcgaaaccatgctggtggaacacaacatcctgcattccggcgaccaatacatcattaccagcggctcgcaaatgcgcgaatccggttcgaccaatacgctggaagtgctgcgcgtcaaataa

SEQ ID NO: 51830 - DNA, 966 bp, Neisseria meningitidis
atgagccacacgcaactgacccaaggcgaacgataccacatccaatacctgtcccgccactgcaccgtcaccgaaatcgccaaacagcttaaccgccacaaaagcaccatcagccgcgaaatcagacggcaccgcacccaagggcagcaatacagcgccgaaaaagcccagcggcaaagccagactatcaaacagcgtaagcgacaaccctataagctcgattcgcagctgattcagcacatcgacacccttatccgccgcaaactcagtcccgaacaagtatgcgcctacctgtgcaaacaccaccagatcacgctccaccacagcaccatttaccgctaccttcgccaagacaaaagcaacggcagcacgttgtggcaacatctcagaatatgcagcaaaccctaccgcaaacgctacggcagcacatggaccagaggcaaagtacccaaccgtgtcggcatagaaaaccgacccgctatcgtcgaccagaaatcccgtatcggcgattgggaagccgacaccattgtcggcaaaggacagaaaagcgcattattgaccttggtcgaacgcgttacccgctacaccatcatctgcaaattggatagcctcaaagccgaagacactgcccgggcagctgttaggacattaaaggcacataaagacagggtgcacaccatcaccatggataacggcaaagagttctaccaacacaccaaaataaccaaagcattgaaagcggagacttatttttgtcgcccttaccattcttgggagaaagggctgaatgagaacaccaacggactcatccggcaatacttccccaaacaaaccgatttccgtaacatcagtgatcgggagatacgcagggttcaagatgagttgaaccaccgaccaagaaaaacacttggctacgaaacgccaagtgttttattcttgaatctgttccaaccactaatacactag

SEQ ID NO: 51831 - DNA, 1446 bp, Neisseria meningitidis
atggcgcattttttcaatattaattatccgacttacaaaggtaaaaacatgactgtccgtatcgaacacgatttattgggcgaccgcgagattcccgccgaagtatattggggcatccacaccctgcgcgccattgaaaactttaaaatttccacacaaaaaatttctgacgtgccgcagtttgtccgcagtatggtgatggtgaaaaaggcgacggcacaggcaaacggtaagttgggcgcggtcaagcccgaaatcgccgccgccattgaaaaggcttgcgacgaagttctgctgaacaaccgctgcctcgaccaattcccgtccgatgtgtatcagggcggtgcgggaacttcggttaatatgaacaccaacgaagtcatcgccaacctcgcattggaagccttgggatacgaaaaaggccgctacgacatcgtcaatccgatggatcacgtcaatgccagccaatcgaccaacgatgcctatcccacgggcttccgccttgccgtgtattacagcatcggcgaattgctcgacaaactggccgtcctgaaaaacgcctttgccgccaaagccgaagcgtttaaagacgttttgaaaatgggccgcacccagcttcaagatgccgtgccaatgactacaggacaagaattccaatctttccaagtgttgttggaagaggaaatcctcaacctcgaccgcacgcgccaactgcttttagaagtcaatttgggcgcaacggcaatcggcacgggcgtgaacacgcccaaaggctacgccgaactggtggtcaaaaaactctccgaagtcagcggcttgccttgcaaactgaccgaaaacctgattgaggcgacctccgactgcggcgcatatgtgatggtacacggcgcattgaagcgcacggcggtcaaactctccaaaatctgcaacgacttgcgcctgctctcttccggcccgcgtgccggcttgaaagaaatcaacctgcccgaattacaggccggttcttccattatgcctgccaaagtcaatcccgtgattcccgaagtggtcaaccaagtctgcttcaaagtcatcggcaacgatacgacgattaccttcgccgccgaagccgggcaactgcaattaaacgtgatggagccggtcatcgcccaatgtatgtttgaaacgatttccctcttgggcaatgctgcggtcaacctcgccgaaaaatgcgtcaaaggcattacggtcaaccgcgaaatctgcgagcgttacgttttcaactccatcggtttggtcacttatctgaatccgtacatcggccaccacaacggcgacttggtcggcaaaatctgcgcccagaccggcaaaggcgtacgcgaggttgttttggaacgcggcctgttgagcgaagaagaactcaaccgcatcctctctcctgaaaacctgatgaacccccatctgtaa

SEQ ID NO: 51832 - DNA, 696 bp, Neisseria meningitidis
atgaaactgaaaaccttagctttgacttcattgaccctgttggcattggccgcttgtagcaaacaggctgaaaccagcgttccggcagacagcgtccaaagcagctcatctgctccggcagccccagccccattgaccgaaggcgtgaactacactgtattgtccacgcctatcccgcaacagcaggccggcaaagtcgaagtcttggaatttttcggctacttctgtccgcattgcgcacatttggaaccggttttgagcgaacacaccaaaacgtttaaagacgatacctacctgcgtcgcgagcatgtgatttggggtgacgaaatgaaacctttggcacgtttggcggccgcagtggaaatggccggtgaatcagataaagccaacagccatattttcgatgcgatggttaatcaaaaaatcaatctggccgataccgataccctgaaaaaatggctgtccgagcaaacagcgtttgacggcaaaaaagtattggctgcatttgatgctcctgaaagccaagcgcgtgcggctcaaatggaagagttgaccaataaattccaaatcagcggcacaccgactgtgatcgtcggcggcaaataccaagttgaatttaaagactggcagtccggtatgaccacgattgaccagttggtggataaagtacgcgaagagcagaaaaagccgcaataa

SEQ ID NO: 51833 - DNA, 453 bp, Neisseria meningitidis
atgtttatggctattgcgaacaataaaaaagcatttcacgattttttcattgaagaccggattgaagccggtttggtcttggaaggctgggaagtcaaagcaatccgcgccgcgcgcgtacagcttaaagagagttatatctattggaaaaaagacgcgttttatctggtcggctgccatattacggctttgcccacagcctcgacacacattaaaccagatgccgtacgtccgcgcaagctcttgttgaaccagtcggaaatcaacaaattaatcggcaaaaccgaacgtgccggctacaccatcgtgccgctggatttgcatttttcgcgcggaaaaatcaagatggaaatcggtttggcaaaaggtaagaaacagcacgacaaacgccagagtatgaaagaggcggattggaaacgcgagaaacagcggttgattaagcatacgcgctga

SEQ ID NO: 51834 - DNA, 282 bp, Neisseria meningitidis
gtggattggatgggcagtctgttcctgccgggtggcgcactgttgtttctgagcgtggtttcgaccactttgtccgcatgtttgggaatgcctttgctgctggtttctcccgccggcgtgttggacggggcggcggaagccttggcgattgcggcgttcctgatgttggtcgcgcgtccgccggcagtgttcggcggtttgtggaaattcaattacagcctgcgtgaaaaggcgtatatcagttggttgggtttggcggagccgtgccgatttcgccggtga

SEQ ID NO: 51835 - DNA, 1620 bp, Neisseria meningitidis
atggacaatctcgtatgggacggcgttcccgacatccgcacactcgaccaaaccatccgcaaacacgcacacccgctcaacctgattgtctgcctccccgataatcagattcccgattttcaaaccgcacaagatgcttcggacgcggaatgccgtctgaagcaccgtttggatcaggcaacgcagtgcctccagttcgacagcatcaacctcatcgaacacatcctgcccgatgtccgcttctggctggttcccccttcacgcacccgccgcctgcacgaacacttccaccacatttcctggcagaccgaagccatcccgcaaaccgaaagcaaacccgacaaaccctggtttgcacttccacaaacatccgaacggcaaaaaccggaacacatcctcgttatcggagcgggcatatccggcgcggcaaccgcccacgccttagcatcacacggcatttccgttaccgtattggaagcccgaaaagccgcccaagccgccagcggcaaccgccaagggctgctctacgccaaaatctcgccgcacgacaccgaacaaaccgaactgctgcttgccggctacggctacaccaaacgcctgctcggacatatcctgcccgaatccgaaacctggggcggcaacggcatcatccacctcaattacagccgcaccgaacaacaacgcaatcacgaattgggtttgcaaaaacaccataaccacctctaccgcagcatcacgcaggcagaagccgaaaaaatcgccggtatcccactgtccgtcccatacgaccacccttcatgcggactctactggcaacacggcgtatggctcaatcctcccacattcgtccgcgccctcctcagccatccgctgatcggactgcacgaagacacacccttgaccgacatttcccacgacggggaaaagtggattgcaagcacgccaaacggcacatttaccgccacacacatcatctactgcaccggcgcgcacagctcctgcctgcccgaaaccaacctcgccgccctgcctctcaggcaaatacgcggacaaaccggcctcacaccatccaccccgttttccgaacaactgcgttgcgccgtttcaggcgaaagctacatcagcccgtcgtggcacggactgcactgctacggcgcgagttttattcccaacagcagccataccggatggaacgaagccgaagaagcctcaaaccgccaagcattggcacagcttagccccgccctcgccgaatcattgtttgccgccaacccaaacccccaaaaataccaagggcacgccgccatacgctgcgacagccccgaccaccttcccctagtcggcgcactcggcgacattgccgccatgcggcagacctacaccaaactcgcgctggacaaaaactaccgcatcgacaccccatgcccatacctgcctaatgcctacgtcaacaccgcccacggcacacgcgggcttgccaccgcccccatctgcgccgccgccgttgcagccgaaatcctaggcttgccccatcccctctcaaaacgcctgcgccacgccctacaccccaaccgcaccatcatccgcgccatcgtcagaaggaaggatctaaccccttaa

SEQ ID NO: 51836 - DNA, 537 bp, Neisseria meningitidis; identical to SEQ ID NO: 37832

SEQ ID NO: 51837 - DNA, 255 bp, Neisseria meningitidis
atggattctttatccattttagatatattaattggggagtcagaacaagtttcttctaattttattattgagccatatcaagtaccatttttcgaaagatttagtgaatattttatttgttttgataggcgaaatttagataagcctaaacaacctgtttattggatatgggatatggaaaatccgttagctgattcaataaagagttttatttataagttatttgaaaatcctaattttttgaatgaaatttag

SEQ ID NO: 51838 - DNA, 1077 bp, Neisseria meningitidis
atgaaatacaaagccctctccttactgccgcttgctgccgcccttgccgcctgtgccgggggggggggggtagccgaaccgcacgtccccgtgtccatccccaccgccacgccgctgaccggtgaggtaaagttatcaagcgataacagcaaaatcgaaaacatcaacaccgccaacactgaaacacatccgccgcgccgcaccagacgctccctctatgcctccccgcaaaacacatcctccggtatttccattcagcagcgggaagtagaaaaaatctatttcggtgttaaatcaccagaaaaatcattcatcttccaaacacccggcggcgcgcaatacgccctttcatcctacgccgaccccatcgtccccagctactcctcccccgacttcaaaattcccgaccgccacgcagggcagcggcttgccgacggcagccgcatctttatctgctgcagcgactccggggctacttcgtatgcggaaattaccaaacaagattatatgaaattcggggcgtggataggtcccaacggcgaaatcgacctcttcgccggcggcttccccgtcggcaaaacgccacctcctgcgttctcctacggcagcagcacacccgaaaccaaaggcacaggcaaaatcacttatcaggtttggggcatccgcgtcagaaacgggcaatttgttacttcctcttatacgccgccgaaaaacagtggttatacgttcaatcctaccaatacccccgtcctttcctttatcaccgccaatttcaacagtaacaaactggcaggcaaaatcatcggcaacagcgattacgggccggatgtgaaaattgaaaatgcaacgatcaacggtctgaccttttccggcgatgccacctccggcggcaaaaccggcaacttggaaggcaagttttttggaaaattcaacggctcccgcgacagcgaaaccagcataggcggcaaaatcacctttgacggcgaccgctccctcgataccgtattcggcggtgtgagttataaaaaagaacttgaaaacaacactgatatgagtaccacccatctcacaaaataa

SEQ ID NO: 51839 - DNA, 405 bp, Neisseria meningitidis; identical to SEQ ID NO: 42218

SEQ ID NO: 51840 - DNA, 807 bp, Neisseria meningitidis
atgtggcattgggacattatcttaatcctgcttgccgtaggcagtgcggcaggttttatcgccggcctgttcggcgtaggcggcggcacgctgattgtccctgtcgttttatgggtgcttgatttgcagggtttggcacaacatccttacgcgcaacacctcgccgtcggcacatccttcgccatcatggtcttcaccgccttttccagtatgttggggcagcacaaaaaacgagcggtcgactggaaaaccgtatttgcgatgatgccgggtatgatattcggcgtattcgcgggcgcactctccgcaaaatatatccccgcattcgggcttcaaatcttcttcatcctgtttttaactgtcgtcgcattcaaaacactgcataccggccctcagacggcatcccgcccgctgcccaagctgcccggactgactgcggtttccacactgttcggcgcaatgtcgagctgggtcggcataggcggcggttcactttccgtccccttcttaatccactgcggcttccccgcccataaagccatcggcacatcatccggccttgcctggccgattgcactctccggcgcaatatcgtatctgctcaacggcctgaatattgcaggattgcccgaagggtcgctgggcttcctttacctgcccgccgtcgccgtcctcagcgcggcaaccattgcctttgccccgctcggtgtcaaaaccgcccacaaactttcttctgccaaactcaaaaaatccttcggcattatgttgcttttgattgccggaaaaatgctgtacaacctgctttaa

SEQ ID NO: 51841 - DNA, 402 bp, Neisseria meningitidis
gtgaagattaaaccattacaattttctaacaataatcacagattttacgtagacaaaatttgtgttaccgaacaagatgtgaacattttggcatccgaccgaaattatgaattaaatattgaaatatttattgacaatataattcattttcaaataacagatgaatcttataaagtaaaattttcagaatatttatttgaaaataaagaaaaaaatgattgggatagaaatcctgctataaattattttttcgagataatagatgacagttatatggactggttgaaagaagaaagttttgatttttttgaaaagaaatattataaggcttatattttcttttttagcgattctgtaatagaagttatcagctcgacagaacctgtattttattcaaaataa

SEQ ID NO: 51842 - DNA, 516 bp, Neisseria meningitidis
atgaaacgcaccaaaaaataccctttcttaacgttgcagcggcaacgtttccatttgaactttgaaaacgcctcttccgccgccggcatcccagccgaacgcgatttctaccgctgggcgtggtctgccttgaaaaatgaataccgccgcgccgacatcagcctgattcttctggacgaagaagaagcccgagcctacaaccgcgactaccgcggcaaagattacgccaccaatgtattgagtttcgcgctcaacgaaggcgaaatcctgccctgccaagtttcggaaaaactgtacggcgatttgattatctgcccgcaagtcgttttaaaagaagccgccgaacagggcaaaacgcccgaacggcattttgcccacctgaccatacacggtactttacacctgatgggctacgaccacatcgaagacgacgaagccgaaataatggaagccgaagaaatccgcctgatgctggcggcaggcttccccaacccctaccaagaggacgaatattaa

SEQ ID NO: 51843 - DNA, 204 bp, Neisseria meningitidis; identical to SEQ ID NO: 43658

SEQ ID NO: 51844 - DNA, 2007 bp, Neisseria meningitidis
atggctgatatgaagaaaattacccctcaaaacctgcgccccctgctttcggaaagcttgggacataccgattttgtcaacgtcctcaacgcactgattaaatttttgcgccgtggcggcaaaaaatgtgcgggggaacgtttcgacctgattatcgacacattcaaacaagacagggaattgctgtcccgcttcagccggtgtttttacatctggctcgcgcaaatacacatttatccggcactcatcaaactcggcatcttctcgcgccacagctttgcccgggaaatgggcatacgcatctacgaacgcttcagcccgtcatataaagattttgccaacttgggcgaagtcttcctttatcttttccattccgaaaacgacgacaaatggctgcaaacgctcaatatccgccaatggctggttttatacgaactcatccggagccacgccgagccgtccaaattgcagacggcgggcatccgccttgccgatgcgcgtttgcgcgccatcgaaatgctgtctgtctggacggcatccgaagccatcgaacccgacctcatccgcatcgccccgcgcctgctggaagccgattcttccttcgtcgccctccaacgcgaaaccgccaaactggtcgaacactaccgcaacggcaccacgccttacgacaccgcccacctcgaagtgatgttcgaccaatgtttcagccagattgactatttgcgccgcaaagggacgggcgccggctccggttcgtcggtcaaagtcgcccacctgctcgaacggctccggcagaccgtagaccgtctgaagctgctcaccgacatccaaaccggcgccggcaacagcaaccgcctgaccatcgcgctgatgaactccctcatctacgcggcggtcgaacaatacagcacccgccacctgcgccgcagcagcatccgtatgctcgcccgcagcattaccgaaaacaaaagccaccacggcgaacactacattacccgcaaccgcaaagaatatttcaaaatgttctactcggcggcaggcggcggcatcatcatcgccctgatggcgctgctcaaaatccgcatcagcacactcggcctcagccccttcctgacttccttgtcggctgggttcaactacggcatcggctttatgatcatccatatgctgcactgcaccgtcgccaccaaacagcccgcgatgactgccgccagctttgccgaacaggtcgatctcaacgaaggcggcaaagcggtggacaacaaactcgccaagctcctcatcgacgtatgccgttcccaaagtgtcgccgttttcggcaacgtttccatcgccatccttttggcgtgcgccatatcgttcggctatgcccatctgtaccggcagcccatactcgatgcccacaccgccgcctaccagttcaaatccatagacatcatcgcttacccgacgctgtggtatgccgccattgcaggtctgtggctgttctgctccggcatcatcgcaggttttttcgacaaccgcgccgactacctcaacctgcgccaacgcctgcccttcaaccccttgctgcgtaaaatcatgcgccccgggccccgccgcgtcctcgccgcctacatccacaaacactacggctcgttggcaggcaacttcatcttcgggatgctcttgggtatgaccggctatttcggacacctcctcgggctgccgctggacatccgccacgtcgccttttcctccgccaacctcggctatgccgccgtcagcggcaacgtcggtttgggcacgttcgtactcggcattttcagcgtcctcgccatcggcctggtcaacctctgcgtcagcttcagcctcgccctcttcgtcgccctgcgctcgcgcggcacgaaaatcggcagcatccgcaatctgattaagagtttttggaatcagattaaaagcaatccctgcatacttttcctcccgcccgccaaagaacagggacatcctccttcggacaagccttga

SEQ ID NO: 51845 - DNA, 1512 bp, Neisseria meningitidis
atgagcgaacaaaaccatccgcaaaccgagccgcagttggacgaaaaccaaatcatcgccctgcgccgcgaaaaactgcacaacatccgccaacagcgcaacgcctatcccaacgacttcaaacgcgacagcttcgccgccgatttgcacgcccaatacggcgaaatcggcaaagaagaactcgatccgcaaggcattcccgtcaaagtggccggccgcatgatgctgaagcgtcaaatgggcaaggcgagttttgccaccattcaagacgtgtccgggcaaatccagctttatctgaacaacaaaggcgtgagccaagaaattttggacgacttcaaccattgggacttgggcgacatcgtcggtgcggaaggcactttgttcaaaaccaaccacggcgaactgaccgtacgcgtgtccgacatccgcctgctgtctaaatccctgcgcccgctgcccgacaaacacaaaggcttgagcgatcaggaaaccaaataccgccaacgctacgtcgatttgattgccaacgaagaatcgcgcaataccttcatcaaacgcagccaaatcatccaatctgtgcgcaattttatggtgaacgagcgttatctcgaagtcgaaaccccgatgatgcacccgattcccggcggcgcgacggcgaaaccgttcgtgacccaccacaatgctttggacatcccgctctacctgcgcatcgcgcccgagctgtatctgaaacgcttggtggtcggcggtttggagcgcgtgtttgaaatcaatcgcagcttccgcaacgaaggcatgtcggtgcgccacaatcccgaatttacgatgattgaattttacgaagccttctccgactacgaacgtatgatgcagatggcggaagacatcatccgaaacgcatcgcgcacggtaaacggcacggcgaaaatcagctacaacggcaaagaagtcgatttggaaagcccgtttgagcgtctgaccatcctcgaagccatcaaaaaatacaatccgcactacaccgacgagcagttgaacgatgcggaatggctgaaaaaagaaatcgtcaaacacggcgaaagcctgccgccgtccccgggcatcggcagcctgcaactcgcgctgtttgaaggttgcgccgagggcaagctgtggaatccgaccttcatcgtcgattacccggtcgaagtttccccattggcgcgcgcttcggataccaaacaaggtctgaccgaacgtttcgaattgttcgttgtcggccgcgaactggcaaacggctattccgagttgaacgaccccgaagaccaagccgaacgcttcaaagcgcaagtggcgcaaaaagacgcgggcgacgacgaagcgatgcactacgatgccgactacatccgcgcgatggaattcggtttgccgccgaccggcggttgcggcatcggcatcgaccgcttagtgatgctgctgaccgattcgcaaaccatccgcgatgtgattctgtttccgcagatgcgccccgagtaa

SEQ ID NO: 51846 - DNA, 1659 bp, Neisseria meningitidis; identical to SEQ ID NO: 42207

SEQ ID NO: 51847 - DNA, 255 bp, Neisseria meningitidis
atgaaacatatgaccgaacaagaaatctaccggttgttgcgcgataccctgaccgagttgtttgaaatcgaaccggaacggattacgcctgataccaatctttacgaagatttggaaatcgacagcatcgatgccatcgacctgattgaccgcatcaagcgcgaaaccggccgcaagctgcaggctgaagatttccgcaatatccgcaccgtcaacgacgtggtacaggcggtattgaagattcaggcgggctaa

SEQ ID NO: 51848 - DNA, 600 bp, Neisseria meningitidis
ttgctgctttcatgccgtctgaagcacgtttcagatggcatcggtttacatcagataaggataaaaatgggtatttacgattttcaaatgaaagatgcagaaggcaatgcggttgatttgtcaggctatcgcgacaaggttctgctgattgtcaacacggcaacgcgttgcggtctgaccccgcaatacgaggctttgcagaagctgtatgcacaatataccgcagaaggcttggagattttggattttccgtgcaaccagttccgcgaacaggctcccgaaagcagcggagaaattgcccaagtgtgtatgatgaagtttggcacgaagtttaagattttcgacaaaatcgaagtcaatggagcaaataccgcgcccttgtatgcctacctgaaatccgtcaaaccgcaagataaaggcaatcatctgtttaaagatttcgtgttgaagctcgcagctttgggagagaagcgcgacgaaggcgacatcaaatggaactttaccaaattcctcgtcaaccgcgacggcgaagtggtcgagcgttttgcgcctagtgttacgcccgaagaaatcgaagccgatattcgggcattgctgtaa

SEQ ID NO: 51849 - DNA, 1362 bp, Neisseria meningitidis
atgctgaaaaaatggttgaataagatgctgccttccggtcggagcagtaaaaaagcggaaagtaaaacggtcattcctgccgaaagacacaacatccgtgccgaaatgttgagctttgccgccgaaaacgtcatacgccgcctgaaaggggcggggtttcaggcttatgtggtcggcggcgcggtcagggacctgctgctcggcatcgaacccaaggatttcgatgtcgcaaccgatgccacgcccgaacaggtgcacaaactcttccgccgcagccgcatcatcggcaggcgttttcaaatcgtccacgttatgaacggcgcggaaaccatagaggtaacgactttccggggcggtgcgaaggttcatcagaacgcgcgcggcagaatcatgaaggataacacctacggcagcatcgaagaagatgcgatgcggcgcgattttacctgcaatgccttgtattacgatcctgaaaaagaagaaattttggatttccacaacggtatggacgatattgccgaacggaagctggtaatgatcggtaatgccgccgaacggtatcaggaagaccctgtcaggattttaagggcaatccgcctgtcggggaaattgggattcgaattgtcgcaagcgaccgccggacctattgccgaatcaatatgccgtctgaagcacgaaccggtagcgaggctgtttgacgaaatcatgaaactgctgttttcagggcacgcgcgcgagtgtctgaaacgtttgaacggatttgacataccggacgacatccatccgctgctcaatgccttgcgcgtttcagacggcatcgccggaaaaatgacggtgcttgccctgaaaaataccgatgagcggctgcgtgccgacaaatcggtttcggtcggttttgtactggcggctctgatgtggcccgagttggaacgccattggaaaagcaatctgcaacagggtttgaaacccgcgcccgccctgtccgatgcaatcaatacgatgcgtgaaaccgtcgaacgcggttggggcgtgccgcaacgcttttccgccacgatgcgcgaaatttggatgtttcagccgcagtttgaaaaccgcaaaggcgcacgtccgcacaaactgtttgcacaggcgcgtttccgtgccgcctatgatttcctgctcttgcgcgccgaaaccggcaatgcggaccgcgcccttgccgagtggtggacggcgtttcagacggcatcgacggaacagcggacggaaatgaccaaaaacgaggctgccgcccggcacgaaaaaaacgaaggacaggcgaaaaaacgccgccgtcgcaggcgcaaacccaagccgaaggttgtgggaacggattgggaataa

SEQ ID NO: 51850 - DNA, 183 bp, Neisseria meningitidis
atgggtgtcttacgggaaatggcggaaaaattgggacataaggtattgcctcttgcaccttatttacctgagctcaacccgattgagaaagtgtgggcgaatattaagcggtatctgagaaccgttttgtctgattacgcccgatttgacgatgcactactgtcctattttgattttaattga

SEQ ID NO: 51851 - DNA, 624 bp, Neisseria meningitidis; identical to SEQ ID NO: 37310

SEQ ID NO: 51852 - DNA, 174 bp, Neisseria meningitidis; identical to SEQ ID NO: 36913

SEQ ID NO: 51853 - DNA, 849 bp, Neisseria meningitidis; identical to SEQ ID NO: 40571

SEQ ID NO: 51854 - DNA, 3921 bp, Neisseria meningitidis
ttgaactacattatcgccttttcaaactcgcctgaaaccgacttttcagacggcattcaaataaaaactgccaaacacggacacaccatgaccacgactaccgccccgcagcgtattcgggaaattccctataactatacttcttataccgaccgcgaaatcgtcatccgactgttgggcaacgaagcgtggcagattctgcaagacttgcgcggacagcgtaaaactggacgttcggcgcggatgctgtttgaagtgttgggcgatatttgggtggtcgtgcgcaatccgtatctggtcgatgatttgctggagcatccgaaacgccgcgccgcgttgatacgcgaaatgcgccaccgcctgaacgaaatccgcaaacgccgcgacgataatcggcaagtggatgtcttggttgccgcagcagaaaaagcagtcgagcgttttgatagcagttttgatgaaaccagccaaaagcggcggcagattttggagcgtttgagcaaaatcaccaagccgcacaatattatgtttgacggattggcgcgggtaacgcacgttaccgatgcaaccgactggcgcgtcgaatatccgtttgtcgtcgtcaatcctgataccgaggcagagatcgcgcctttggtgcgcgccttaatcgagctggatttggttattatcccgcgcggcggcggtacgggttataccggcggcgcgattcctttggacgcgatgagcgcggtcatcaatacggaaaagctggataaacataatggcgtggagtttgtcgaactggcgggcttggatggcaaacatccgattatccattgcggcgcgggcgtggtaacgcggcgggtggaagaaaccgcgcatcaggcaggtttggtgttcgccgtcgatccgacttccgccgatgcgtcctgtgtgggcggtaatgtggcgatgaacgcgggcggtaaaaaagccgtgctgtgggggacggcgttggacaacctcgcctactggcagatggtcaacccgcagggcgaatggctgcgcatcgagcgcgtgcgccacaatttcggcaaaatccacgacgaagaaaccgccgtgttcgacgttcacacgctggattcagacggcctcaatatcgttaaaaccgaacgtttggaaattcccggccacaaatttcgcaaagtcggtttgggcaaagacgttaccgacaaattcttgagcggcctgcccggcgtacagaaagaaggcacggacggcatcatcaccggcgttgctttcgtgttgcacaaaatgccgaaatacacgcgcactgtgtgtatggagtttttcggcacggtcgccaccgctacgccttctatcgtcgaaatccgcgatttcctgctcgcccacgacagcgttcggctggcaggtttggaacatttggactggcgttacgtccgcgccgtcggctacgcaaccaaagcggcgggcaagggacggccgaaaatggtcttgctggcggacgtggtttccgacgacgaagccgccgtagaggcagccgccgaacacatttgcgaacttgcccgcgcccgcgatggcgaaggctttatcgccgtgtctcccgaagcgcgcaaaaccttttggctcgaccgcagccgcaccgccgccatcgccaagcacaccaacgcctttaaaattaacgaagacgtggtcatcccgctcgaaaggctcggcgagtattcggacggcatcgaacgcatcaacattgagctttccatccaaaacaagctcaaactctgtgccgccttggagcaatatctttcgggcaaactccccatcgacaaaatgggcactgacctgccgaccgccgaactgttgggcgaacgcggcaaacacgccctagcccacgtttccgccgtcaaaacgcgttgggaatggctgctcgccaatctcgacacgccgcttgccgactacaaagcccgctacggcgcagccgtccacgccgcacccgaagccaaaaacaatgaaagctgctttattgccttccgcgatttccgcctgcgcgtgtctgtcaaagcggacgtaatgaagccgcttgccgaaatcttcagcggcaaaactgacaccaaaattatccaaggcttaggcaaaatccatgccaaaaccgtacgcagccgcgtcttcgtcgccctgcacatgcacgccggcgacggcaacgttcacaccaatattccggtcaattcagacgatgccgacatgcttcagactgcctatcgttcggtcgaacgcattatgaaaatcgcccgttcgctcggcggcgtgatttccggcgaacacggcatcggcattaccaagctcgaatttttgaccgatgaagatttgcaaccgttttggaactacaaaaaccaagtcgatccgaaacacaccttcaaccgtcacaaactgatgaaaggctcggacttaagcaacgcctatacgccatccttcgagcttttaggtgcggaatcgttgattatggaaaaatcagacctcggtaccatcgccgattccgtcaaagactgcctgcgctgcggcaaatgcaaacccgtctgctctactcacgttccgcgtgccaacctgctgtacagtccgcgcaacaaaatcctcggcgtgggcttgctgaccgaagccttcttatacgaagaacaaacccgccgaggcgtttccgtcaaacactttgaagaactcatggacatcggcgaccactgcaccgtgtgccaccgctgcgtcaaaccctgccctgtcaacatcgacttcggcgacgttaccgtagccgtccgcaactaccttgccgattccggccacaaacgctttgcgccggcggcttcaatgggtatggcattcctaaacgcgaccggtcctaaaaccatcaaagccctgcgcgccgcgatgatacagaccggcttccccgcgcagaactttgcctacaaaatcggcaagcttcttccgatcggcactaaaaagcaaaaagccgaacccaaagccactgtcggcaaagccccgattaaagaacaggttatccatttcatcaaccgccccctgcccaaaaacgtacccgccaaaacaccgcgctccttattgggcatcgaagacggcaaaagcatccccatcatccgtaatccggcttctccggaagatgccgaagccgtgttctacttccccggctgcggttcggaacgcctgttcagccaaatcgggcttgccgtccaagctatgctctggcacgtcggcgtacaaaccgttctgccgcccggctatatgtgttgcggctatccgcaagacgcgggcggcaataaggcaaaagccgaagaaatgagcaccaacaaccgcgtggctttccaccgtatggcgaacaccctcaactacctcgacatcaaaaccgtcgtcgtcagttgcggcacttgttatgaccagctcgaaaaataccgcttcgaggaaatcttccctggctgccgcatcatcgacatccacgaatacctgctcgaaaaaggcgtgaaactcgacggcgtgaaaggtcagcaatacctctaccacgacccctgccacacgcccatcaaaaccatgaacgccacccaaatggccagcagcctgatggggcagaaagtcgttttaagcgaccgctgctgcggcgaatccggtatgtttgcagtcaaacgaccagacatcgccactcaggtcaagttccgcaaacaagaggaaatcgagaaaaacctcaaagagctgccgcagggcgaacccgtcaaaatgctgacctcctgccccgcctgcctgcaaggcttgagccgctacgccgacgacaacaatatgcctgccgactacatcgtcatcgaaatggcgaaatacatcctcggcgaaaactggctggatgagtttgtaaaaaaagccaacaacggcggtgtagagaaagtgttgctgtaa

SEQ ID NO: 51855 - DNA, 915 bp, Neisseria meningitidis
atggatgccgtacaattaaaatcatttgtcgccgtcgcgcacgagggcaaccttacccaagccgccaaacgacttttcctttcccagcctgccgtttccgcccaaattaaagcccttgaagaatatgtcggcacgccgctgttcaggcgcacggggaaaggcatggtattgacgcgggcgggcgaaatactgttgcccgaagcggaatccctgctgcaatacaaacacaagctggagcattttgccaaaacgctggcaggcgattattcggaagagaccagtttgggcattatccaccccatcgattcggcaaaactcgtcgcgctgacggacaatatcggtcaaacagcccccaaaacgcgcctgcacatccaatacggaatgagcggcgaaatcctctcgcgcatccaacacaaaaccctgcacggcggctttatactcggcaacgccgcccaacgcggcatccgcagcgtattcctgcaaaacctgacctacgcgctgatttgcccgcaaagccaatatccccatctgacccgctcccttccgcagagcctgcaagaatgcgtatggatagaaatgtcgggcgtgtccggaagtaggaagcacctgcaccagttttggcgcagcaaccggctctcacccaaaaaacagatcttgtgcgactacccccaaaccattatcgatttggttgcaggcggtataggtgtggcaatggtgccgggaaacaaagccgaagcggcggcaaaagaaggcgcgggcgtggctattatcgaatcgtgccgccacagtatgccgctcaatttcatttatgcggaagaatacgaggataatccccacgtctcactcctgctcgagtgcattgaaaaagtatggggagtgcaggcggtgcagccgcccgttgtctcggacaactga

SEQ ID NO: 51856 - DNA, 171 bp, Neisseria meningitidis; identical to SEQ ID NO: 36504

SEQ ID NO: 51857 - DNA, 1014 bp, Neisseria meningitidis; identical to SEQ ID NO: 43060

SEQ ID NO: 51858 - DNA, 1773 bp, Neisseria meningitidis
atgattccatccgacttcattgacgaacttctggccaaaaccgatattgtcgacatcatcgacgaacaggttccgctgaaaaaaggcggggcgaactatatggcgtgttgcccgttccacaaggaaaaaacgccgtcgttttcggtcagtccgaccaagcagttttaccactgtttcagttgcggggcgcacggttcggcgattggttttgtgatggaacatcaggggctgtcgtttccggaggcagtgcagttccttgccgaccgcgtgggtatgattgtgcctaaagtgcgcgggcagaacgataatcccgaagtccgtgccgaacgtaagaaaaagcagcagacgctggaagaaacgacagcggcggcggctgatttttatgcgcaacagttgaaattcaatccgacggcgaaggcttatttggacaagcgcggcttgagcgcggaagtcatcgcgcattatggtttgggctacgcgcccgacggctggcagcctttggcgcaagtattccaaccgtacccgaataccgcgttggtggatacgggtatggtgattgacaatgaggggcggtattacgaccgattccgtcatcggattatgttccccatccgcaatccgcgcgggcaggtcatcggtttcggcggcagggtgctggacgactccaaacccaaatatctaaactctcccgatacgcctttgtttgataaggggaaaaacctttacggattgtatgaagggcgtgctgctgtcaaggaagtggggcggattctggtggtcgaaggctatatggacgtggtcgcgctggcacagttcggcgtgggctacggcgtggcggccttgggcacggcaacaacagcggaacacgtcaaaatcctaatgcgtcaggcggacagtatttatttctgtttcgacggcgacagcgcggggcgcaaagcggcttggcgcgcgctggaaaacgcgttgccgcagttgaaagacgacaaatcgctgcattttttgttcctgcccgaggaacacgaccccgacagttacatccgtgcctacggcaaagcgcaatttgaagacgcgcttctgaatcaaagcaagcctttgtcggagtatttctgggaacacctttcagacggcattcatctcaatacgcaggaaggcaaggcggaattggtgaaaaccagttcgccgcttttggcgcagattaccgcgccggcattggcttatttgttaaaacaacggcttagcgaactggtcggcatcgaccccgacaacctcgcgcaactgctaggacaggaagcgccgaagcggcacgtcaaacaaaaaaactacaaactgccgccgatttccgtcaaacagcccgtcatgctgacgctggtacagcggcaaatccgcagcctcttgataaatccggattgggctgcatatatagacctgcccgattatctggcgttggacggtgatttcgcctgccttgccaatcttgccgaatcgattaaaaaccatgccgccgtacccgaaaccgctcaggttttagagtatatgcgcggctcgccttacgaagaaacgataacccgaatcttccattcaacgcaccaatcggaagaaatgaacagcagcagtgaagaagattgcgagaatttccaaatcggcatgaaaaaactgctcaatgagttaaaatacagccaaatcgaagcattgaaacaaaaaagcctgcaatccggcttaaatgaaagcgagaaaaaacttttgctgtcgttgctgaccgcaaaacaaaattga

SEQ ID NO: 51859 - DNA, 240 bp, Neisseria meningitidis; identical to SEQ ID NO: 42143

SEQ ID NO: 51860 - DNA, 1254 bp, Neisseria meningitidis
gtggacaaactgaaaatctccgcaaacggcccgctcaacggggaaataacggtctcgggcgcgaaaaacgcggcattgccgctgatgtgcgcgggtttgctgacatcgggtacgttgcgcctgaaaaacgtccctatgctggcagatgtgaaaaccacgcaaaagctgcttcaggggatgggcgcgcgcgtcctgactgacaatatcagcgaatttgaaatcaacggcggcacggtaaacaatacctgcgccccttacgaattggttcggacgatgcgtgcttcgattttggtgcttggtccgacgctggcgcgtttcggcgaggcgcaagtcagcctgccgggcggctgcgccatcggttcgcgccccgtcgatcagcatttgaaaggcttggaagcgatgggtgcggaaatcgtcatcgaacacggttacgtcaaggccaaaggcaaactcaaaggtacgcgcgtggcgatggatgtcgttaccgtcggcggcacggaaaacctgctgatggcggcgacgctggcggaaggtacgacggttttggaaaactgcgccatcgagcctgaagtggtcgatttggcggaatgcctggtcaaaatgggcgcgaaaatcagcggcatcggtacgtccacgatggttgtggaaggctcggacgagctgcacggctgcgaacacagcgtcgtccccgaccggattgaagcagggacgttcctgtgcgcggtggcgataaccggcggcagggtggttttgcggaatgccgcgccgaaaacgatggaagtggtgttggacaaactggttgaggcaggtgcggtgattgaggcgggcgacgattggatcgccatcgatatgcggcagcgtccgaaggcggtggacatccgtacggtcgtccaccccggcttccccacggatatgcaggcgcagtttatggcattgaatgccgtggcggagggaagctgccgcgtggtggaaacgatttttgaaaaccgctttatgcacgtccccgagttgaaccggatgggggcgaacatcacaaccgagggcaatacggcatttgtgcagggtgtggaacagctttccggcgcggtcgtcaaggcgacggatttgcgtgcgtccgcaagcctcgttatcgccggtttggcggcgcgaggcgaaaccgtggtcgaacagatttaccacttggatcgcggttatgaacatattgaaaaaaaactcggcagcgtcggcgcgaaaatcgagcgcgtatccggctga

SEQ ID NO: 51861 - DNA, 1407 bp, Neisseria meningitidis
atgaacgattacacagctatgccgtctgaagaccgtgaggtcggcgcattgtcgctgcctccacattcgatggaggcggaacaatccgttttgggcggtttgatgctggaaaatccggcttgggacaggattgccgatgtggtttccggtgaagacttctaccgccacgaacaccgcctgattttccgatccattgctaaattaatcaatgagagccgtcccgccgatgtgattacggttcaggaagatttgcagcggaacgaagaattggaagcggcaggcggattcgaatacctgattacgctggcgcaaaacaccccgtctgccgccaacatccgccgctacgccgaaatcgtgcgcgagcgttccatcatgcgccaactcgccgaagtgggaacggaaatcgcacgcagcgcatacaatccgcaaggcagggacgcgggtcagcttttggacgaggcggaaaacaaagtattccaaatcgccgaaagcacggccaaatccaagcagggctttttggagatgcccgatttgctgaaagaagtcgtacagcgcatcgatatgctttattcgcgcgacaatcccgatgaagttaccggtgtgccgacggggttcattgacctcgacaaaaaaacctcgggtcttcagcccggcgacctgattatcgttgccggccgtccgtctatgggtaagaccgccttttccatcaatatcgccgaacacgttgccgtagaaggcaagctgcccgttgccgtcttctcaatggagatgggcggtgcgcaactggtcatgcgtatgctcggctcggtcggacgcttggatcaaagcgtcctgaaaaccggcaggctcgaagacgaacactggggtcgtctgaacgaagcagtcgtcaaactctccgacgcgcccgtgtacatcgacgagaccccgggtctgactgcgctcgaactgcgcgcccgtgcccgccgtctcgcccgtcaatttaacaataagctgggattaatcgtcatcgactacctgcaactgatggcgggatccggccgttccgacaaccgagcttcagagctgggagagatttcacgttcgctcaaagccctggcaaaagagttgcaagtccccatcatcgccctgtcgcaattgagccgtaccgtcgaacagcgtacggacaaacgccccatgatgtccgacttgagggagtccggtgctatcgagcaagatgccgacctgattatgttcatgtaccgcgacgaatactacaaccaggactcacccatgaaaggccttgccgaatgtatcatcggcaaacaccgcaacggtcccgtcggtaaaatcttcctcacatggacgggacaattcaccaaattcgacaatgctgcctatattcccgaggaggcaaagatagaggattaa

SEQ ID NO: 51862 - DNA, 330 bp, Neisseria meningitidis; identical to SEQ ID NO: 37077

SEQ ID NO: 51863 - DNA, 1170 bp, Neisseria meningitidis
atgccgcaaattaaaattcccgccgtttactaccgtggcggtacatcaaaaggcgtgtttttcaaacgttccgacctgcccgaggcggcgcgggaagcgggaagcgcacgcgacaaaatcctcttgcgcgtactcggcagcccggatccctacggcaagcagatagacggtttgggcaacgccagctcgtccaccagcaaggcggtgattttggacaagtccgaacgcgccgatcacgatgtcgattaccttttcgggcaagtttccatcgacaaaccttttgtcgattggagtggcaactgcggcaacctcaccgccgccgtgggcgcatttgccatcgagcaaggcttggtcgataaaggcaagattccttcagacggcatctgcacagtcaaaatctggcagaaaaacatcggcaaaaccattattgcccatgtaccgatgcaaaacggcgcagttttggaaacaggcgattttgagctcgacggcgtaacgttcccggcagccgaagtacaaatcgaatttcttgatccagccgacggcgaaggcagtatgttcccaaccggcaatttggtcgatgaaattgatgtgccgaatataggccgtttgaaagccacgctcatcaacgcgggcattccgaccgttttcctgaatgccgccgacttgggctacacgggcaaagagttgcaagacgacatcaacaacgatgccgcagctttggaaaaattcgagaaaatccgcgcttacggtgcgctgaaaatgggtctaatcagcgacgtatccgaagctgccgcccgcgcgcacacgccgaaagtcgccttcgtcgcgcccgccgccgattacaccgcctccagtggcaaaaccgtgaatgccgccgacatcgatttgctggtacgcgccctgagcatgggcaaattgcaccacgcgatgatgggtaccgcctctgttgccattgcgaccgccgccgccgtgcccggtacgctggtcaaccttgccgcaggcggcggaacgcgtaaagaagtgcgcttcgggcatccttccggcacattgcgcgtcggtgcagccgccgaatgtcaggacggacaatggacggccaccaaagcggttatgagccgcagcgcacgcgtgatgatggaaggttgggtcagggtgccggaagattgtttttaa

SEQ ID NO: 51864 - DNA, 501 bp, Neisseria meningitidis
atggcggatttgcagaaaaattttcaaacttcgttccgtgatgcgatggcatcctgtgcggcaggcgttcatgtcatcacgacagacggtgcggcagggcgttacggcattacaatgacggcggtcgcgccggttaccgacgagccgccgaccgtgatgctgtgcatcaaccggagtgcgcgaatcattccgatcctgtcggaaaacggcagcctgtgcatcaatacgctggcggacgaacatcaggatgttgccgaacattttgccgggctgaccggcctgtcgcccgaagagcgatttgcctaccacatctggcatcgcggcaaaacgggacaacttgaaatagagggcgcgttggtgcacctgcacgggcatattgtcggcaaacatgaaatcggcacgcattttgtgttttacgtcaggctcgacgaaatcaaaaactgcgggtgcaaacgccccgcgctgctgtatttcagacggcagtttagatttttagactga

SEQ ID NO: 51865 - DNA, 291 bp, Neisseria meningitidis; identical to SEQ ID NO: 42317

SEQ ID NO: 51866 - DNA, 1743 bp, Neisseria meningitidis
atgaaattttttcctgctccatgtttgttggttatcctggctgtcataccccttaaaaccttagctgccgatgaaaacgatgcagaacttatccgttccatgcagcgtcagcagcacatagatgctgaattgttaactgatgcaaatgtccgtttcgagcaaccattggagaagaacaattatgtcctgagtgaagatgaaacaccgtgtactcgggtaaattacattagtttagatgataagacggcgcgcaaattttcttttcttccttctgtgctcatgaaagaaacagcttttaaaactgggatgtgtttaggttccaataatttgagcaggctacaaaaagccgcgcaacagatactgattgtgcgtggctacctcacttcccaagctattatccaaccacagaatatggattcgggaattctgaaattacgggtatcagcaggcgaaataggggatatccgctatgaagaaaaacgggatgggaagtctgccgaaggcagtattagtgcattcaataacaaatttcccttatataggaacaaaattctcaatcttcgcgatgtagagcagggcttggaaaacctgcgtcgtttgtcgagtgttaaaacagatattcagattataccgtccgaagaagaaggcaaaagcgatttacagatcaaatggcagcagaataaacccatacggttcagtatcggtatagatgatgcgggcggcaaaacgaccggcaaatatcaaggaaatgtcgctttatcgttcgataaccctttgggcttaagcgatttgttttatgtttcatatggacgcggtttggtgcacaaaacggacttgactgatgccaccggtacggaaactgaaagcggatccagaagttacagcgtgcattattcggtgcccgtaaaaaaatggctgttttcttttaatcacaatggacatcgttaccacgaagcaaccgaaggctattccgtcaattacgattacaacggcaaacaatatcagagcagcctggccgccgagcgcatgctttggcgtaacagacttcataaaacttcagtcggaatgaaattatggacacgccaaacctataaatacatcgacgatgccgaaatcgaagtgcaacgccgccgctctgcaggctgggaagccgaattgcgccaccgtgcttacctcaaccgttggcagcttgacggcaagttgtcttacaaacgcgggaccggcatgcgccaaagtatgcctgcaccggaagaaaacggcggcgatattcttccaggtacatctcgtatgaaaatcattactgccggtttggacgcagccgccccatttattttaggcaaacagcagtttttctacgcaaccgccattcaagctcaatggaacaaaacgccgttggttgcccaagataaattgtcaatcggcagccgctacaccgttcgcggatttgatggggagcagagtcttttcggagagcgaggtttctactggcagaatactttaacttggtattttcatccgaaccatcagttctatctcggtgcggactatggccgcgtatctggcgaaagtgcacaatatgtatcgggcaagcagctgatgggtgcagtggtcggcttcagaggagggcataaagtaggcggtatgtttgcttatgatctgtttgccggcaagccgcttcataaacccaaaggctttcagacgaccaacaccgtttacggcttcaacttgaattacagtttctaa

SEQ ID NO: 51867 - DNA, 279 bp, Neisseria meningitidis; identical to SEQ ID NO: 36597

SEQ ID NO: 51868 - DNA, 1446 bp, Neisseria meningitidis
atgaactggtctgatttgaatttaatgcccgccatgcccgaaatcgtgctgctgtcgctgctggtgttattgttgctggcggacttgtgggtcagtgatgacaaacgccggtggacgcattacggcgcgttggcaacggtggcggttacggctgtggtgcagttggcggtgtgggaacagggcagcacgtcttcgttcaacgggatgtatattgcagacggtatgtcgcgtttggcaaaaatggttttatatgccttgacctttgccctgtttgtctatgccaggccctacaaccaagtgcgcggtattttcaaaggcgagttttacaccctgtcgctgtttgccctcttgggtatgggcgtgatggtgagcgcggggcattttttaactgcctatatcggtttggaactcttgtcgcttgccctttacgccctgattgccctgcgccgcgattccggctttgccgccgaagccgccttgaaatattttgttctgggcgcgctggcatccggcctgctgctctacggtatttctatggtttacggcgcaaccggttcgctggaatttgccggcgtgctcgcctcttccttcaatgaagaagcaaacgaatggctgttgaaactgggtctggtgtttatcgtcgtcgccgttgcgttcaaactcggcgcggtgccgttccatatgtgggtgcccgacgtgtatcacggcgcgcccacttctgttaccgccctggtcggcactgccccgaaaatcgccgccgttgttttcgctttccgcatcctcgttaccgggttgggaaccgtgcatcatgactggtctctgatgtttgccctgcttgccgccgcctcgctgctggtcggcaaccttgccgccatcatgcagaccaatatcaaacgtatgctcgcctattccaccgtatcgcatatggggtttatcctgctggcgtttatggcgggcgcggtcggctttgcggcgggtctctattacgccattacctacgcgctgatggcggcggcagggttcggtgtgttgatggtgttgtcggacggggacaacgagtgcgaaaacatcagcgatttggcagggttgaaccaacaccgcgtatggcttgcctttttgatgctgctggttatgttctctatggcgggcattccgccgctgatgggcttttacgccaaattcggcgtgattatggcgctcttgaaacaaggccatgtttggttgtccgtatttgccgtcgtgatgtcgctgattggtgcgttctactacctgcgcgtggtcaaagtcatgtattttgacgaatccggccgcgcccgtcccaccgtcggcggcaacaatgccgcaaaattccttttgagcgtcaacgcgctgctgttggtgctgtggggcattatgccgcaaaccgttatcgactggtgcgccaaggcgttggaaaacacgctgtaa

SEQ ID NO: 51869 - DNA, 819 bp, Neisseria meningitidis; identical to SEQ ID NO: 37573

SEQ ID NO: 51870 - DNA, 399 bp, Neisseria meningitidis; identical to SEQ ID NO: 49537

SEQ ID NO: 51871 - DNA, 651 bp, Neisseria meningitidis; identical to SEQ ID NO: 41065

SEQ ID NO: 51872 - DNA, 2391 bp, Neisseria meningitidis
atgactgaacaaaaacacgaagaatacggcgccgacagcattcaggtgctcgaaggcttggaagcggtacgcaaacgccccggtatgtacatcggcgacacgcaggacggcagcggcctgcaccacatggtgttcgaagtattggacaacgccattgacgaagcactcgctggacattgcgacaaaatcaccgttaccatccacgccgaccattccgtcagcgtcgccgacaacgggcgcggtatgcccaccggcatccacccgaaagaaggacgctccgccgccgaagtcatcatgaccgtattgcacgcgggcggtaaattcgacaacaacagctacaaaatctccggcggcctgcacggcgtgggcgtgtccgtcgtcaacgcgctgtccgactgggtaacgctgaccatctaccgcgacggcaaagaacacttcgtccgcttcgtgcgcggcgaaaccgaagagccgttgaaggttgtcggcgattccgataaaaaaggcacgaccgtgcgcttcctcgccagtgcggaaaccttcggcaacgtcgaatacagcttcgacatcctcgccaaacgcatccgcgaactttcgttcctgaacaacggcgtggacatcgaattgaccgacgagcgcgacggcaaacacgaaagcttcgccctttccggcggcgtggctggattcgtgcaatacatgaaccgcaaaaaaacgcccttgcacgaaaaaatcttctacgcgttcggcgagaaagacggcatgagcgtcgaatgcgcaatgcaatggaacgacagctatcaggaaagcgtgcagtgcttcaccaacaacatccctcagcgcgacggcggtacgcacctgaccgcgttgcgccaagtgatgacgcgcaccatcaacagctacatcgaagccaacgaagtcgccaaaaaagccaaagtggaaaccgccggcgacgatatgcgcgaaggtttgacctgcgttttgtccgtcaaactgcccgaccccaaattttcgtcccaaaccaaagacaaactggtttccggcgaaatcggtcccgtcgtcaacgaagtcatcagccaagccctgaccgacttcctcgaagaaaaccctgccgaagccaaaatcatcaccggcaaaatcgtcgatgccgcccgcgcgcgcgaagccgcccgcaaagcccgcgaaatcacccgccgcaaaggcgtaatggacggcttggggctacccggcaaactcgccgactgccaagaaaaagaccccgcattgtcagaactttatctggtcgagggcgattctgcaggcggttccgccatgcaggggcgcgaccgcaaattccaagcgattttgccgcttaagggcaagattttgaacgtcgaaaaagcgcgctttgaaaaaatgctcgccagtcaggaagtagccgctttgattaccgcgttgggcgcgggcatcggcaaagaagaattcaatgccgagaagctgcgttaccaccgcatcattatcatgaccgatgccgatgtggacggcgcgcacatccgcaccttgcttttgaccttcttctaccgccaaatgcccgaactggtcgagcgcggctacatctatatcgcccagccgcctttgtataaagcgaaatacggcaaacaggaacgttacctcaaggacgagttggaaaaagaccaatggctgctcggtcttgccttggaaaaagccaaaatcatttcagacggccgcaccatcgaaggcgcagaacttgccgacaccgccaaacaattcctgttggcaaaaaccgtcatcgaacaggaaagccgcttcgtagacgaactcgtcctgcgcgccatgctacacgcgtcgcccattgatttgacgtcgtctgaaaacgccgataaagccgttgccgaactttccggtctgcttgacgaaaaagaagtcgccctcgaacgcatcgaaggtcatgaaggacaccggttcatcaaaatcacgcgcaagctgcacggcaacgtcatggtcagctacatcgaacccaagttcctcaacagcaaagcctaccaaaccctcacccaaaccgccgccgcgctcaaaggcatggtcggcgagggtgccaagctttacaaaggcgaaaacgggtacgacgcggacagctttgaaaccgctttggacatcttgatgagcgttgcccaaaaaggtatgtccatccaacgatacaaaggcttgggcgagatgaaccccgagcagctgtgggaaaccacgatggatcccgccgtgcgccgcctgttgaaagtgcgcatcgaagatgccattgccgccgacgaagtattcgttaccctgatgggcgacgaggtcgaaccgcgccgcgcctttatcgaaaacaacgcgctgattgcccaaaatatcgacgcataa

SEQ ID NO: 51873 - DNA, 534 bp, Neisseria meningitidis
atggcagacttcaaccaaatcctgacccccggcgatgtggacggcggcatcatcaacgtcgtcaacgaaatccccgccggcagcaaccacaaaatcgagtggaaccgcaaactcgccgcattccaactcgaccgcgtcgaacccgccatcttcgccaaaccgaccaactacggcttcattccccaaactttggacgaagacggcgacgaattggacgtgctgctcgttaccgaacagcctctggcaaccggcgtattcttggaagcgcgcgttatcggcgtgatgaaattcgttgacgacggcgaagtggacgacaaaatcgtctgcgttcctgccgacgaccgcaacaacggcaacgcctacaaaactttgtccgatttgccgcaacagctcatcaaacaaatcgagttccacttcaaccattacaaagacctgaaaaaagcaggtacgaccaaagtcgaatcctggggcgatgtggaagaagcgaaaaaagtcatcaaagaatccatcgaacgctggaacaaacaggcataa

SEQ ID NO: 51874 - DNA, 1434 bp, Neisseria meningitidis
atgcctgcacgaaacagatggatgctgctgctgcctttattggcaagtgcggcatatgccgaagaaacaccgcgcgaaccggatttgagaagccgtcccgagttcaggcttcatgaagcggaggtcaaaccaatcgacagggagaaggtaccggggcaggtgcgggaaaaaggaaaagttttgcagattgacggagaaaccctgctgaaaagtcccgaattgttgtcccgcgcgatgtattccgcagtggtctcaaacaatattgccggtatccgcgttattttgccgatttacctacaacaggcgcagcaggataagatgttggcactttatgcacaagggattttggcgcaggcagacggtagggtgaaggaggcgatttcccattaccgggaattgattgccgcccaacccgacgcgcccgccgtccgtatgcgtttggcggcagcattgtttgaagacaggcagaacgaggcggcggcagaccagttcgaccgcctgaaggcggaaaacctgccgccgcagctgatggagcaggtcgagctgtaccgcaaggcattgcgcgaacgcgatgcgtggaaggtaaacggcggcttcagcgttacccgcgaacacaatatcaaccaagccccgaaacggcagcagtacggcaaatggactttcccgaaacaggtggacggcacggcggtcaattaccggctcggcgcggagaaaaaatggtcgctgaaaaacggctggtacacgacggcgggcggcgacgtgtccggcagggtttatccggggaataagaaattcaacgatatgacggcaggcgtttccggcggcatcggttttgccgaccggcgcaaagatgccgggctggcagtgttccacgaacgccgcacctacggcaacgacgcttattcttacaccaacggcgcacgcctttatttcaaccgttggcaaaccccgaaatggcaaacgttgtcttcggcggagtgggggcgtttgaagaatacgcgccgggcgcgttccgacaatacccatttgcaaatttccaattcgctggtgttttaccggaatgcgcgccaatattggatgggcggtttggatttttaccgcgagcgcaaccccgccgaccggggcgacaatttcaaccgttacggcctgcgctttgcctgggggcaggaatggggcggcagcggcctgtcttcgctgttgcgcctcggcgcggcgaaacggcattatgaaaaacccggctttttcagcggttttaaaggggaaaggcgcagggataaagaattgaacacatccttgagcctttggcaccgggcattgcatttcaaaggcatcacgccgcgcctgacgctgtcgcaccgcgaaacgtggagtaacgatgtgttcaacgaatatgagaaaaatcgggcgtttgtcgagtttaataaaacgttctga

SEQ ID NO: 51875 - DNA, 513 bp, Neisseria meningitidis; identical to SEQ ID NO: 37445

SEQ ID NO: 51876 - DNA, 198 bp, Neisseria meningitidis
atgagcaaaatcaaagtaacggcgacagacggcctgcgtgtgccgaccgaacacaacccgcacgaatatatcggccaagagccggtggaggtggacggcaacagcctgtattaccgccgcatgattgatgacggcgatttggtggtggttgaggatgccgccctaaataccaaaacccgcaatactaagggagagtaa

SEQ ID NO: 51877 - DNA, 570 bp, Neisseria meningitidis; identical to SEQ ID NO: 48149

SEQ ID NO: 51878 - DNA, 1167 bp, Neisseria meningitidis
atgaatttacacgagtatcaggctaaagaactgctggctagctacggtttgcccgtacaaggcggtattttggcacacaacggcgaagaagccgctgcagcttacgacaaattgggcggcaaattcgctgttgtcaaagcacaagtacacgccggcggccgcggtaaagcgggcggcgtaaaagtcgttaaaagccgcgaagaagctaaagaagtggctgaaagcctgattggcaccaacttggtaacttaccaaaccgatgccaacggccaacctgtcaacagcgttttggtttgcgaagatatgtatccggttcaaaccgagctgtacttgggcgcagtggttgaccgttctacccgccgcgttacattcatggcttctaccgaaggcggtgtggaaatcgaaaaagttgctgccgaaactccagaaaaaatcttcaaagtaaccgttgatccgctggtcggcctgcaaccttgccaagctcgcgaagttgccttccaactgggcttgaaagacaaacaaatcaacgagttcgtcaaactgatgaccggtgcgtacaaagcgtttgtcgaaaatgacttcgccctgtttgaagtcaacccgctggcagttcgcgaaaacggcgcgctcgcctgcgtggacggcaaaatcggcatcgacagcaacgcgctctaccgcctgccgaaaatcgccgaattgcgcgacaaatctcaagaaaacgaacgcgagttgaaagcttctgaatttgacctgaactatgttgccctggaaggcaacatcggctgtatggtgaacggtgccggtttggcgatggccactatggacatcatcaaactgaaaggcggccaacctgccaacttcttggacgttggcggcggcgcaaccaaagaccgcgtggttgaagcgttcaaactgattctggaagacaaatccgttcaaggcgtattgatcaacatcttcggcggtatcgtacgttgcgacatgattgcggaagccatcgtggcagccgttaaagaaatcaacgtcaacgttcctgtcgttgttcgtttggaaggcaacaacgccgaactcggcgcgaaaatcctgaacgaatcaggtctgaaactgacttctgcagacggcctgaatgacgcagccgaaaaaattgttgcagccgtaaacgcctaa

SEQ ID NO: 51879 - DNA, 987 bp, Neisseria meningitidis; identical to SEQ ID NO: 38696

SEQ ID NO: 51880 - DNA, 2853 bp, Neisseria meningitidis
atgaaactgtccgaactgttcaaccccgacgaatttgccgcgcggcatttgagtttcggcgacgaagcggcgttgcttgccgctgtcggcgagaaaagtatggacgattttgtcggcaacaccgtgccgcaaagcatccgtatgccgtctgaactcgatttgcccgatgccctgaccgaagcggacgcgttggcaaaattgaaaggcattgcgtcgaaaaacgtgatcaacaagtcctatatcggtttaggctattacccgacccgcgtgccgaatgtgattttgcgcaacgtattggaaaatccgggctggtataccgcctacacgccgtatcaggcggaaattgcccagggtcgtttggaagctttgttgaacttccaacaagtgtgtatcgatttgaccggtttccctgtggcgggcgcgtctttgctggacgaagcgaccgccgccgccgaagcgatggcgatggcgcaccgcgtgggcaaggtaaaatccgagcgtttctttgtggacgagcgcgtgtatccgcaaactttggacgtgatgaaaacccgtgccaagtatttcggcttcgagctggtggtcggcgattttgccaaagcggatgaaggcgaatacttcggcgcgctgttccaatacgtcggcaaagacggcgatgtgcaagacttgcaggacgttatcggccgtctgaaagccaaaggcacaatcgtggccgttgccgccgacattatgagcttggttttgctgaagtctccggctgaattgggcgcggatattgctttgggcaacacccaacgcttcggcgtaccgatgggcttcggcggtccgcatgctgcttatttcgcgtttaaagacgagttcaaacgttccgccccgggccgtatcatcggcgtatccaaagacgcatcgggcaaacctgccttgcgcatggcgttgtccacccgcgagcaacacatccgccgcgaaaaagcgacatccaatatttgtaccgcgcaggcattgctggcgaacttggcgggtatgtacgccgtttaccacggccctgaaggtgtgaaacgcatcgccaaccgcattcacgcgctggcttctgcctttgccgatgcgctggtttcagacggcctgaatgtggttcataaggtcttcttcgataccgttaccgtcgatttcggcaacaaagagaaagcagaccaagtgtttgccgctgctttggaatcgggctataacctgcgccgcgttaacgatactcaagttgcggctgcattccacgaaacatcggcatgcgaagatttggttgatttgtaccgcgcgtttaccggcaaggatacgttcgcatttgccgatgatgtcaaaggccgtctgaatgcagaattgctgcgtcaggacgatattctgcaacatcctgtgttcaaccgttaccacaccgaacacgaaatgttgcgctatctgaaaaaactcgaagaccgcgatttggcgatgaaccgcagcatgatttcgctcggtagctgcaccatgaaactcaacgcgactgcggaaatgctgccgattacttgggcggagttctccgacatccacccttacgctcccgaagcgcaaaccgtcggctaccgcgaattgcttgccgatatggaaaacagcctgaaagccatcaccggctttgacgcaatttccttccagcccaactccggcgcgcagggcgaatacagcggtatgcttgccatccgccgctatcaggaagcgcaaggcgaagcgcagcgcaacatctgcctgattcccaaatccgcccacggcaccaaccccgccaccgccgccatgctcggtttgaaagtcgtcgtcgtcgataccgacgaacacggcaacgtcaacatcgacgatttgaaagccaaagccgagcaacaccgcgacgctttgtccgccatcatgattacctatccgtccacccacggcgtgtacgaagaaggcatccgcgacatctgccgcatcatccatgaaaacggcggacaggtttatatggacggcgccaacctcaacgctcaaatcggcatcatgcagcctgccgaagtcggcgcggacgtgttgcacatgaacctgcacaaaaccttctgtatccctcacggcggcggcggcccgggcatgggtccgattggcttgaaagcccatctggctccgttcgcaccgggacacgctttgaccgacacccacagcgccagtgccgaccaaaccgccgttgctgctgcggccttcggttctgcgtccatactgccgattacttggatgtatctgaccatgatgggcaaacaaggcatggaacaggcgacacgctgggcattgctcaacgccaactacgttgccaaacggctgggcgaagactatccgatcctgtatacaggcaaaaacggccgcgtcgcgcacgaatgtatcgtcgatttgcgtccgctcaaagccgaaagcggcattaccgaaaccgacatcgccaaacgcctgatggactacggcttccacgcgccgacggtttccttccccgttgccggtacgctgatgatcgagccgaccgagagcgaaagcaaagccgaactcgaccgcttcatcgccgccctgaaacaaatcaaacaggaagtgctgaaagtcgggcgcggcgaatggccgaaagacgacaacccactggtcaacgcgccgcacaccgccgcagatataaccggcgactgggcgcgcccgtattcccgcgaagaagccgtcttcccgctgcccttcgtgcgcgaacacaagttttggcccttcgtcaaccgcgtggacgacgtgtacggcgaccgcaatctcgtgtgcagctgcccaccgatggaaaattatgaagactga

SEQ ID NO: 51881 - DNA, 672 bp, Neisseria meningitidis
atgaaaaccgtttccaccgccgttgtccttgccgccgctgccgtttcactgaccggctgtgcgaccgaatcctcacgcagtctcgaggtagagaaagtcgcctcctacaatacgcaatatcacggtgttcgtaccccgatttccgtcggaacattcgacaaccgctccagcttccaaaaaggcattttctccgacggggaagaccgtttgggcagccaggcaaaaaccattctggtaacgcacctgcaacagaccaaccgcttcaacgtactgaaccgcaccaatttgaacgcattaaaacaggaatccggcatttccggcaaagcgcataacctgaaaggcgcagattatgtcgttaccggcgatgtaaccgaattcggacgcagagatgtcggcgatcatcagctcttcggcattttgggtcgcggcaaatcgcaaatcgcctatgcaaaagtggctctgaatatcgtcaacgtcaatacttccgaaatcatctattccgcacagggcgcgggcgaatacgcactttccaaccgtgaaatcatcggtttcggcggcacttccggctacgatgcgactttgaacggcaaagttttagacttggcaatccgcgaagccgtcaacagcctggttcaggctgttgacaacggcgcatggcaacccaaccgttaa

SEQ ID NO: 51882 - DNA, 756 bp, Neisseria meningitidis
atgattaaaatccgcaatatccataagaccttcggcgaaaacactattttgcgcggcatcgatttggatgtgggcaaagggcaggtggtcgttatcctcgggccttccggctcaggcaaaacgacgtttctgcgatgcctaaacgcgttggaaatgcccgaagacggacaaatcgagttcgacaacgagcgaccgctgaaaatcgatttttctaaaaaaccaagcaaacacgatattttggcactgcgccgcaaatcaggcatggtgtttcaacaatacaacctctttccgcacaaaaccgccttggaaaacgtaatggaaggaccggttgccgtacagggcaagcctgccgcccaagcgcgcgaagaggctctgaaactgctggaaaaagtcggcttgggcgacaaagtggatttgtatccctaccagctttccggcggtcagcagcagcgcgtcggcattgcccgcgcattggcgattcagcccgagctgatgttgtttgacgaacccacttccgcactcgaccctgaattggtgcaagacgtgttgaacgccatgaaggaattggcgcgggaaggttggacgatggtcgtcgttacccacgaaatcaagttcgcgctggaagttgccacgaccgttgtcgtgatggacggcggcgttatcgtagagcagggcagcccgaaagagttgttcgaccaccccaaacacgaacggacgcggagatttttaagccaaatccaatctaccaagatttga

SEQ ID NO: 51883 - DNA, 2703 bp, Neisseria meningitidis
atgcaactgcatattctgaacaatccgaaggacgcggctttggcggcggacgcggaatttctgaaacaatccctgttcaacctcctgcacgaagaagcctcgccattggttgtcgaaacggtcaaactcttgtccacttccgacgacagcgcggcattgattgaaaaagtattgccgcaattggacgaacaacaaacccacgatttaaccttggcctgcggcctgttcgcccagattttgaatatcgccgaagacgtgcaccacgaacgccgccgccaaatccacgaagaagccggacgcggcggcgcggaaggcagcctgacggaaaccgtccgcaggctcaaagcggggaaagccgacggcaaatcggtgcagcggcagttggacaatacgtccgttaccgccgttttgaccgcgcacccgaccgaagtgcaacgccaaaccgtcttaagcttcaaccgccgcatccgcgcactgttgccgcaacgcgaacgctgcaccaatgccgacgcgctggcacggctgcgccgcgaaatcgacactatcctgctgggcttgtggcagaccagcgaaacgcgccgccacaaactcagcgtcaacgacgaaatcaacaacggcgtgtccatcttcccgatgagctttttcgaagccctgcccaagctctaccgcaatatggaacacgactttcagatggtctatcccgatgtctgcgttccgaatatcctcaaaatcggcggctggatcggtggcgaccgcgacggcaatccgttcgtttctgccgaaaccttgcgttttgccttccgccgccacgccgatgccgtgttccgtttttaccgtggcgaactcgacaaactttaccgcgaactgccgctctccatccgccgcgtcaaagtcaacgacgacgtaatggcactggcagccctctcgcctgacgaagaacttgcccgcacggaagaaccctaccgccgcgccattgcttacatcatggcgcgcgctatgggcaaagcgcgcgcgctcggtttgggcatgggctgcaaattcggctttctcgagccgtatgcttcggcacaagaatttctcgatgatttgaaaaaattgcaacgttcccttatcgacaacggcagccgcctgcttgccgaaggccgtttggcagacctcatccgttccgtgtccgtgttcggcttccacatgatgccgctcgacctgcgccaacacgcaggcaaacacgccgatgtggttgccgagcttttccaacacgcaggcttggaagactacaacagcctgaacgaagaacaaaaacaagccgtcctgttgcgagaattgagccatcaacgtccgctgtacagcccgttcatcacatacagcgaccatacccgccacgaactggcaattttcaacgaagcgcgcaaaatcaaagacgaatttggcgaagatgccgtaacacaaagcattatttccaactgcgaacaacccagcgacctgctcgccttggcattgctgctgaaagaaagcggcctgttggcggtggaaaacggcaaaccgcacagccgcatcaatatcgtgccgctgtttgaaaccatcgaagcactcgaaaacgcctgtccggtcatggaaaccatgttccgcctcgattggtacgatgccctgctcgaaagccgcggcaacatccaagaaattatgctcggctactccgactccaacaaagacggcggctatgttaccagctcatggtgtctgtatcaggcggaattgggcttggtcgaactcttcaaaaaatacgatgtccgcatgcgcctgttccacggtcgcggcggcagcgtcggacgcggcggcggcccttcttaccaagccattctcgcccaaccggccggcagcgtggcgggacaaatccgcatcaccgaacaaggcgaagtcattaccgccaaatacgccgacccgggcaatgcacagcgcaacttggaaaccttggttgccgcgactttggaagccagcatcctgccggataaaaaagaccctgatgccaaactgatgcaggatttgtcggacgtatcgttcaaatactaccgcgaactgattacccatcccgacttcatcgactactttctgcaaaccagcccgattcaggaaatcgctaccctcaacctcggcagccgtcctgccagccgcaagaccttagcacggattcaagacttgcgcgcgattccgtgggtattttcctggatgcaaaaccgcctcatgctgccggcttggtacggtttcggcagcgcggtggaaaccttgtgcgaaggcaatcccgaaaccctcgccgccctgcgcgaacacgcccaaagcaacccgttcttccaagccatgctctctaatatggaacaagtgatggcgaaaaccgacatcaccctcgcggaaaactatgccggcttgagcgaatcgcccgataaggcaaaaatcatcttcgggatgattaaggaagaataccgacgcagccgcaaagcactgctcgacctgctgcaaaccgaagagcttttgcgcgacaaccgcagcctcgcccgttcgctcgctttgaggattccttacctgaacgccctcaacggcctgcaggtcgccatgctcaaacgcctgcgtaaagaacccgataatccgcacgccctgctgatggtgcacctgaccatcaacggtgtggcgcaaggtttgcgcaatacaggctga

SEQ ID NO: 51884 - DNA, 447 bp, Neisseria meningitidis
atgacgggatttaatgatgccgccggcgtggcatcctcctccgacatcaaaggcaaatatgttgagaaagttgaagtcaaaaacggcgtcgttaccgccacaatgctttcaagcggcgtaaacaacgaaatcaaaggcaaaaaactctccctgtgggccaagcgtcaaaacggttcggtcaaatggttctgcggacagccggttacgcgcaacgacaccgccaccgccaccgacgtcgccgccgccaacggcaagaccgacgacaaaatcaacaccaagcacctgccgtcaacctgccgcgatgattcatctaccggttgcatagaaacaccacgcgccgatttcaaacactttcaaaaaatcagccgttaccgagtattgcccgaatcacggcaaatggcagaaaaacttcgtcattcccgcaaaagtgggaatctagttcgttga

SEQ ID NO: 51885 - DNA, 267 bp, Neisseria meningitidis; identical to SEQ ID NO: 38160

SEQ ID NO: 51886 - DNA, 135 bp, Neisseria meningitidis
atgaaacgcacttatcaaccttccgttaccaaacgcaaacgcacccacggcttcctcgtgcgctccaaaacacgcggcggccgcgcagtattggcggcgcggcgcgccaaaggccgcaaacgcctggcggtataa

SEQ ID NO: 51887 - DNA, 783 bp, Neisseria meningitidis
atggaatcactgactgccataaataaatcgcgcattcggcaggctttccaaaaagcattaaacgattatgaccggcacgccttaatccaacaaaaaatgacgattaatctaatggcgcatttgcaagattatttgccggatatgccattggaaaacgtgttggaattgggctgcggctcaggaatgttgagtgccttgctgcaaaaacagatttcagcgaattattggttatttaatgatttgtgcgatgtgcagccccaactggctgaaaaactgccgcaatcctttgatttttattgcggcgatgcggaaaactttccttttcaacgacaatttgacttaatcgcaagcgcatctgccgtgcaatggtttcatcaacccgacgcttttatcgctcattgcaaaacaggcttgaaagcaaacggattattggcggttgcaacctttggcaaagacaatttaaaagaagtccgccaaattacaaatataggcttaaattacccgactttatcccaatggcagacttggttagccaaagattttgagcttttatggtgtgaggattttaaggtaatactagactttgatacgccgttagatgtactcaaacaccttaaatatacaggcgtaacagccacgaaccaaaaaaattggacaagaaaaaatctcaatggatttattggcgattacttgtcggcgttcagtatgccgtcgggcaaagtgcacctgacttatcatccgttattttttatcgcgcgctactctgcggcgggcaggcaataa

SEQ ID NO: 51888 - DNA, 1284 bp, Neisseria meningitidis; identical to SEQ ID NO: 43586

SEQ ID NO: 51889 - DNA, 312 bp, Neisseria meningitidis; identical to SEQ ID NO: 37456

SEQ ID NO: 51890 - DNA, 957 bp, Neisseria meningitidis
atgaaagaatttgacttcatcaaacggtatttgcaaacaggcacggataaggatgtcgtattgggcataggcgacgatgcggcgattgtccgcccgcgtgaaggcttcgatttgtgtttcagtgcggatatgcttttgaaggacaggcatttttttgcagatgtcaaacctgaagacttggcttggaaggttttggtcgtcaatgtttcggatatggcggcgatgggtgcgataccgcgttgggtgttgctgagcgcggcgttgcccgaattggatgaggtatggctgaaacggttttgcggcagctttttcggtttggcaaaaaagtttggcgtaacgttaatcggcggcgatacgaccaagggcgatatggcgttcaatgtaaccattatcggcgaattgccgaagggtagggcgttgcggcgtgatgcggcggttgcgggcgacgatatttgggtgtcggggcgtgtcggtatggcggcggcggctttgaactgccgtctgaaacggtgtgtgttgccggatgaagtgtttgccgaatgcgaacaaaagctgctccgccccgagccaagggttgggctggggcttgcgctgttgccatttgcccgggcggcgcaggatgtttcagacggcctcgcgcaagatttggggcatatcctgaccgcttccggcgtgggggcggaaatttgggccgattcgctgccgtctttatccgtattgaaagatattttgccccgagcgcaatggctgtcttatactttggcgggcggcgacgattacgagctggtgtttaccgcgccggaaagttgccgcagccgcgtgcttgatgcggcagaacggtgcggcgtgccggtaacgcgcatcggcaaaatcaacggaggatgccgtctgaaggttttagatgccgacggcagggaattggaactacattctttaggattcgatcattttggctga

SEQ ID NO: 51891 - DNA, 354 bp, Neisseria meningitidis; identical to SEQ ID NO: 42253

SEQ ID NO: 51892 - DNA, 444 bp, Neisseria meningitidis
ttggtgatgcccgtgaaaaaagttgaaaaaaacatcttggtgctgcacggcgcggacaaaatgttcgagctggtcgataaggttgaggattacccgaactttctgccgtggtacagcaaaaccgaggtcatcggacgcaacggcaacgaactgaaggcgcggctgtttatggactatatgcacgttcgccaatcattcgccacgcacaaccgcaacattccgggcagggaaatccgtatggaactgctcgaaggtccgttcaaaaccttacgtggaacgtggaaatttatcgatttgggcgacgatatgtgcaaaatcgaattcaatttggaatacgatttttccaatgccgttttgtccgccttaatttcccccgtcttcaaccacctttccgccacgctggtcgaagcgttcgtcaaagaggcagaccgccgttatgcttga

SEQ ID NO: 51893 - DNA, 1407 bp, Neisseria meningitidis
atgaaactgttccaacgcatcttcgccacattttgcgcggttatcgtctgtgcaatctttgtggcgagtttttctttctggctggtgcagaacacccttgccgaaaaccagttcaaccaacgccgcaccatcgaaaccactttgatgggcagcatcatttccgcattccgggcacgcggggacgcgggtgcgcgcgaaatcctgacggaatggaaagacagccccgtctcatcgggcgtgtacgttatacagggcgacgagaaaaaagatatcctgaaccggtatatcgacagctataccatcgaacgcgcccggcttttcgccgccggacacccgcattccaacctcgtccatatcgaatacgaccgcttcggcgaagaatacctgttcttcaccaaagactgggacaaactccaagcccgccgcctgcccagccccctgttgatccccggcctgccgctcgccccgatttggcacgaactcatcatattgtccttcatcatcgtcgtcggactgctgatggcgtacatcctcgccggcaacattgccaaacccatcagaatcttaggcaacggcatggacagggtggcaaacggagaacttgaaacccgcatctcccaacaggtcgacgaccgcgacgacgaattgtcccatcttgccatccaattcgacaaaatggcggaaaaactcgaaaaactcgttgccaaagaacgccacctgctccaccacgtttcccacgaaatgcgctccccgcttgcccgtatgcaggcaattgtcggactgattcaggcgcagccccaaaaacaggagcaatatctcaaacggctggaaggcgaactgacccgcatggatacgctggccggggaactgttaaccctgtcccgtctcgaaacttccaatatggctttggaaaaagaaagcctgaaactcctgcccttcctgggcaacctggtagaagacaatcaaagcattgcccagaaaaacggacaaacggttaccctgtctgccgacggaaaaatccccgaaaacacaaccatccttgccaacgaaagctacctgtaccgcgccttcgacaacgtcatccgcaacgccgtcaactacagtcccgaaggcagcaccatcctgatcaacatcggacaagaccacaaacactggataatcgacgttaccgacaacggccccggcgtggacgaaatgcagctcccgcacatcttcaccgctttctaccgtgcagactccagtgccaacaaacccggaacaggactggggcttgcattgacccaacatattattgaacagcactgcggcaaaatcatcgccgaaaacatcaaaccgaacgggctgcggatgcgcttcatcctacccaagaaaaaaaccggttccaaaacagaaaaaagtgcgaactga

SEQ ID NO: 51894 - DNA, 747 bp, Neisseria meningitidis
atgacctcatgtgaacctgtgaatgaaaagacagatcaaaaagcagtaagtgcgcaacaggctaaagaacaaaccagtttcaacaatcccgagccaatgacaggatttgaacatacggttacatttgattttcagggcaccaaaatggttatcccttatggctatcttgcacggtatacgcaagacaatgccacaaaatggctttccgacacgcccgggcaggatgcttactccattaatttgatagagattagcgtctattacaaaaaaaccgaccaaggctgggtgctcgaaccatacaaccagcaaaacaaagcacactttatccaatttctacgcgacggtttggatagcgtggacgatattgttatccgaaaagatgcgtgtagtttaagcacgactatgggagaaagattgcttacttacggggttaaaaaaatgccatctgcctatcctgaatatgaagcttatgaagataaaagacatattcctgaaaatccatattttcatgaattttactatattaaaaaaggagaaaatccggcgattattactcatcggaactatcataggtatggagagaacgattacagcactagcgtaggttcctgtattaacggtttcacggtacggtattacccgtttattcgggaaaagcagcagctcacacagcaggagttggtaggttatcaccaacaagtagagcaattggtacagagttttgtaaacaatccaagtaaaaaataa

SEQ ID NO: 51895 - DNA, 516 bp, Neisseria meningitidis
atgaaaatcaaacaaatcgtcaaaccgggcttggcagtattggcggcgggcgttctgtctgcctgcgcaaccaaaagcaacgtcaaagccgacggcacgaccgacaatccggttttcccgaaaccctattccgtaacgctcgacaacaatcgcggtacattcccgatctatgacgaattggacttgatgcgccccggcctgaccaaagacgacatctacaaaatcctgggccgcccgcattacgacgaaggtatgtacggcgtgcgcgaatgggattacctgttccacttccacacccccggcgtaggtaccgatcctgaaaacacttctggcgtggaagatgttactacttgccaatacaaagtgattttcgataaagacaaatttgcccgcagcttctactggaaccccgtcttcccgaaagatgccgcctgtccgccgcccgcacccaaagccgagcctcaagtcatcatccgcgaaatcgtgccggcaacgcctaaacgtatccgccaataa

SEQ ID NO: 51896 - DNA, 432 bp, Neisseria meningitidis; identical to SEQ ID NO: 38797

SEQ ID NO: 51897 - DNA, 288 bp, Neisseria meningitidis; identical to SEQ ID NO: 43621

SEQ ID NO: 51898 - DNA, 291 bp, Neisseria meningitidis; identical to SEQ ID NO: 42317

SEQ ID NO: 51899 - DNA, 2286 bp, Neisseria meningitidis
atgcaactgctggcagccgaaggcattcacaagcacgagttggatgtccaaaaaagccgccgctttatcggcatcaaggtaggtaagagcaattacagtaaaaacgaactgaacgaaaccaaattgcctgtccgcgtcgtcgcccaaactgcagccacccgttcaggctgggataccgtgctcgaaggtaccgaattcaaaaccacgctggccggtgccgacattcaggcaggtgtaggcgaaaaagcccgtgtcgatgcgaaaattatcctcaaaggcattgtgaaccgtatccagtcggaagaaaaattagaaaccaactcaaccgtatggcagaaacaggccggacgcggcagcactatcgaaacgctaaaactgcccagcttcgaaagccctactccgcccaaattgtccgcacccggcggttacattgtcgatattcccaaaggcaatctgaaaaccgaaatcgaaaagctggccaaacagcccgagtatgcctatctgaaacagctccaagtagcgaaaaacatcaactggaatcaggtgcagcttgcttacgacagatgggactacaaacaggagggcttaaccgaagcaggtgcggcgattatcgcactggccgttaccgtggtcacctcaggcgcaggaaccggagccgtattgggattaaacggtgcggccgccgccgcaaccgatgcagcattcgcctctttggccagccaggcttccgtatcgttcatcaacaacaaaggcgatgtcggcaaaaccctgaaagagctgggcagaagcagcacggtgaaaaatctggtggttgccgccgctaccgcaggcgtagccgacaaaatcggcgcttcggcactgaacaatgtcagcgataagcagtggatcaacaacctgaccgtcaacctagccaatgcgggcagtgccgcactgattaataccgctgtcaacggcggcagcctgaaagacaatctggaagcgaatatccttgcggctttggtcaataccgcgcatggagaagcagccagtaaaatcaaacagttggatcagcactacatagtccacaagattgcccatgccatagcgggctgtgcggcagcggcggcgaataagggcaagtgtcaggatggtgcgataggtgcggctgtgggcgagatagtcggggaggctttgacaaacggcaaaaatcctgacactttgacagctaaagaacgcgaacagattttggcatacagcaaactggttgccggtacggtaagcggtgtggtcggcggcgatgtaaatgcggcggcgaatgcggctgaggtagcggtgaaaaataatcagcttagcgacaaagagggtagagaatttgataacgaaatgactgcatgcgccaaacagaataatcctcaactgtgcagaaaaaatactgtaaaaaagtatcaaaatgttgctgataaaagacttgctgcttcgattgcaatatgtacggatatatcccgtagtactgaatgtagaacaatcagaaaacaacatttgatcgatagtagaagccttcattcatcttgggaagcaggtctaattggtaaagatgatgaatggtataaattattcagcaaatcttacacccaagcagatttggctttacagtcttatcatttgaatactgctgctaaatcttggcttcaatcgggcaatacaaagcctttatccgaatggatgtccgaccaaggttatacacttatttcaggagttaatcctagattcattccaataccaagagggtttgtaaaacaaaatacacctattactaatgtcaaatacccggaaggcatcagtttcgatacaaacctaaaaagacatctggcaaatgctgatggttttagtcaaaaacagggcattaaaggagcccataaccgcaccaattttatggcagaactaaattcacgaggaggacgcgtaaaatctgaaacccaaactgatattgaaggcattacccgaattaaatatgagattcctacactagacaggacaggtaaacctgatggtggatttaaggaaatttcaagtataaaaactgtttataatcctaaaaaattttctgatgataaaatacttcaaatggctcaaaatgctgcttcacaaggatattcaaaagcctctaaaattgctcaaaatgaaagaactaaatcaatatcggaaagaaaaaatgtcattcaattctcagaaacctttgacggaatcaaatttagatcatattttgatgtaaatacaggaagaattacaaacattcacccagaataa

SEQ ID NO: 51900 - DNA, 819 bp, Neisseria meningitidis
atgcggatattttcgacaggaggaaaaatggatacgcaggcagttatcacacatatcgcccgatggttggacgaatacgccgcccgggcaaatgcaaaagggtttgtcgtgggcgtttccggcggcatcgattccgccgtcgtctccgcactcgccgcccgcaccggccgccccacgctgcttctggatatgccgatacgccaacaccccggccagcttgagcgggcaaggctgcacatccgcaatctgcaacggcaatatgccaatgtaagcgcgcaaacggtcgatctgaccgacaccttccagacctttgaacaaaccgtcggcactcatcagacggcatttgccaatcagccgctttccctcgccaacgccagaagccgcctgcgtatgctgaccctgtactactacgggcagatacacggactgctggttacggggacaggtaataagattgaagatttcggcgtgggcttttttactaaatacggcgacggcggcgtggacatcagcccgattgccgacctgaccaaaacgcaggtttaccggcttgccgaagcattgggcgtggacgaggcgattcaaaaagccccgccgaccgacggcctgtgggatacggaacgcaccgacgaagaacagatgggcgcaagctatcccgaactggagtgggcaatgggcgtgtacggcacgcgcaaacccgaagattttgaagggcggcagcgcgaagttctggaaatctatacgcggctgcaccgcgcgatgcagcacaaaatcaacccgattcccgtgtgccgcattccgcccgaattgttgggctga

SEQ ID NO: 51901 - DNA, 780 bp, Neisseria meningitidis
atgcatatcatcgattcgcactgccacctcaattttgaaggtttgaaagaacgcctgcccgaagttttgtccaacatggaagcaaacggcgtggggcaggcgctcgccatcagcgtcagcagggaaagttttgccgaagtatccgctatcgccgaagtttatgaacatatttactgcacaataggcgtacatcccgacagcaaggaagccgaagaattttctattgcggaaatggttgctgcagccgcccatccgaaagtggtcggcatcggcgagacgggcttggattattactggtgcaaaggcgatttgtcctggcagcacaaacgctttgcagaccacatcgaagcagccaatcaaaccggactgcccgttatcgtccatacgcgtgatgcggcggcggacaccttgtctatcctgaaagaatgccgggttaattcgggcgttatccactgtttttccgaagacatcggttttgcccgtgcagcaatggatttggggctttatatttctttctcgggaatcgttacctttaaaaacgcacccttggttcaggaggcggcgaaatacgttccggacgaccgcattttagtggaaaccgatgcgccgttcctcgcccccgtacccaagcgcggcaggcagaacgaaccggctttcgtgcgttatactgccgaacatatcgccaaattgcggaaccaaacattggaacaggttgcggcatatacgacggaaaacttttaccagctgtttaaaaaagtacccgatatgcgggccgtctga

SEQ ID NO: 51902 - DNA, 510 bp, Neisseria meningitidis
atgaaaaagaaactgctttcgggcatcaaatttgccgttcagacggcattggtgtttttattggtgtcgctgtttttggattggatacgcaagcccgacgaacctgccggtgcggcagggcggcctttgaccctgctgtcggggcagcggctgactttgggacagtttagccgggataggacggtgctggtgtatttttgggggagctggtgcggcgtgtgccgttatcagtcgccgataatcgatgatttggcggcggacggcgtgccggtcgtcggcgtggcggtacgttccggcagttcggcggaagtggcggcgtatatggcaaaacgcggcttgggctttccgactgtcaacgatgaggacgggggtttggcaaggtcttggcggattgtcgcaacgcctgccgtcgttttggtcaaaaatgggaaaatggttcactatacgacgggaatcagcagttattggggcttgcgcgcacgaatttttcaggcggatgttttcggttaa

SEQ ID NO: 51903 - DNA, 1041 bp, Neisseria meningitidis
atgcaacccatccgataccgaaccgacctcaccccctacaacaccttcggtcttcgcgcccaagcccgagcctttattgcgcttgaacacgccgacgggttgtgcgacatcgtccgactgcccgagttcgaccgcgatactgttttatggctgggcggcggcagcaacatccttttgatgcaggattacgccggactggtcgtacacatggaaaacaaaggcatacgcgagattgcgcgttcagacggcatggttctgattgaagcgcaggcgggcgaaatttggcacgattttgtcctgcacaccgttgcgctgggtttgagcggtttggaaaacctgagcctgattccgggtacggtcggcgcatcgcccgtgcagaacatcggcgcatacggcgtggaggcgaaagacgtgattcacagcgtgcgctgctttgatttggatacggagacctttgtcgagcttgccaatgccgactgccgcttcgcctaccgcgaaagcctgttcaagcaggagggtaaagggcgttatgtgattgtttcggtcgtatttgcattaaaaacgcattttgtgccgaacttgggttacggcgatttggcggccgccgttgccgaactgagcgcgggcagggtgccgacggcgaaagatgtttccgatgcagtgtgtgcaatccgcaacagtaaacttcctaatcctaacgtgcttggtaatgtcggcagtttctttaaaaatcccgtcatcggcgcggaaaaagctgccgccctgttggagcagcatcccgatatgccgcattatccgcagccggacggttcggtcaaactcgccgccggctggctaatcgagcaatgtcgtctgaaaggcttccaaatcggcggcgcggcggtacatgacaggcaggctttggtcttagtgaacaaaaacaacgcctcggcaaacgatgtccggcagttggcgcaacacatcaaatttacagtatttgctcggtttcaggtagaattgcacgccgaacccaattggctgcctgcttcgttcagcctgtaa

SEQ ID NO: 51904 - DNA, 1455 bp, Neisseria meningitidis
atgagcatcgaaccaacccctccgaaccttgaaaacgacggtatcgaaaacgatgtagaacgcgtttccgccgatttcgaccgtgtccactccctctgcgaaatcctcgaacctgcttttgaacaaatcgaaaacggcacaccgctcgaagacgcgtcgctgcgcgacaagctgaccgagctgaccgtcctcttgagcgagctgcaccctgccgacgtggcggcggtattggaatcgctgccgccgcgcgaacgcaatatcgtctggattctggtcaaaccggaagacgacggcgaagtcttgctggaagtgtccgacgcggtgcgcgaaacgctgatcgagtcgatggacaaagacgaattgttggcggcagttgacgatttggacgcggacgaattggcggaactggcagacgatttgccgcaccaagtggtttacgaagcgctacaaacccgcgatgaggaagaacgcgcccaagtcaaagcggcaatgtcctacgaagacaaccaagtcggtgcgattatggacttcgagttggtcagcatccgcgccgatgtcgcctgcgaagtggtgctgcgttacctgcgccgcttcgacagcctgcccgaccataccgacaagatttttgtcgtcgatgaaaacgacgtgctgcaaggcgtgctgcccatccgcaaacttttggtcgccgaccccgaagacttggtggaaaacgtgatggcgaaagatgtcgtgcgtttccgcgccgaagacgacgtggaagaagcggcgcaggcgtttgaacgctacgacttggttaccgcgcccgtcgtcgatgaaaacaaaaagctcatcggcaggattaccatcgacgagatggtggacgtgatccgcgaagaatccgaagcggatatgttgaacatggcaggtttgcaggaagaggaagacctgttcgcccccgtcttggattccgtcaaaaaccgctggatgtggctcgccatcaacctctgcaccgccttccttgccagccgcgtcatcggcgcgtttgaaggcagcatcgaaaaaatcgtcgcactcgccgcgctgatgcccatcgtcgccggcataggcggcaactcgggcaaccagacgattaccatgattgtccgcgcgatggcgatggggcagctgacggatatgcaggcggggcgtttgctgaaaaaagaagtcggcgtcgccttggtcaacggcatcatttggggaacggtcatgggcgcagtatcttggctgctttacggcagcctcggcatcggtttggtcatggttgccgcgatgacgctcaacctgctgctggcggcaaccgtcggcgtattaattcccgtggtaatggaaaagttcggacgcgatcccgcgctgggcagctcggtgctgattaccgccgttaccgactccggcggcttcctgattttcttgggtctcgccaccctgttcctgctttaa

SEQ ID NO: 51905 - DNA, 987 bp, Neisseria meningitidis; identical to SEQ ID NO: 42422

SEQ ID NO: 51906 - DNA, 483 bp, Neisseria meningitidis
atgacgaacatccgtatcggacagggctacgatgtccaccaactgaccgaaggcagaaagctgatacttggcggagttgaaatcccatttgaaaaagggctgctcggacactccgatgccgatgcgctgctgcacgccgttaccgacgcgctgctcggtgcggcaggtttgggcgatatcggcagccatttccccgacaccgccgcagagttcaaagatgcggacagccgcgtccttttgcgtgcggcgtatcaaagcgttcaggcgcagggttggcaggcggtcaatgtcgatacgaccgtgattgcacagaaacccaaactcgcgccgcatattccgcaaatgcgtgccaacatcgccgccgatttgggcatagacatttcgtgcgtcaacatcaaaggcaaaaccaacgaaaaactcggttatctcgggcgcatggaaggcatagaggcgcaggcggcggtattgctggtaaggatttga

SEQ ID NO: 51907 - DNA, 210 bp, Neisseria meningitidis
atgactgaatcgcggcaaacacgccttcaagtcaaatgtccgacctgtcaaacagcagtagtatgggaacccgaaaacgcattccgccccttctgttcgcaacgctgcaaactgatcgacttgggcggatgggcagacgggaaatatacggtttccggccaaacggaaagtttgccggaaatatccgaacccgacatggcataccgctga

SEQ ID NO: 51908 - DNA, 246 bp, Neisseria meningitidis
atggtagttatccgtttggcacgcggcggctcgaaacaccgccccttctacaacgtcatcgttaccgattcgcgcagccgccgcgacggccgcttcatcgaacgcgtaggcttctacaaccccgtagccaacgaaaaacaagagcgcgtccgcctcaatgcagaccgcctgaaccactggattgcacaaggcgcgcaagtcagcgactccgttgcaaaactgattaaagaacaaaaagccgcctaa

SEQ ID NO: 51909 - DNA, 543 bp, Neisseria meningitidis
atgattaatcatattgaaaaatatacaggcactatttctcatggctcgaaaagtgattcgggaagtcagtacaaattaaatatcgcagctattccctcttcccctaacagggatttaaaaacttatattactttagggttaagcaaatataatctgaattataaaagcaggtttgaaatactttttgtatgttctttaaaatatgatgaaaatcagatttttccatttttaagatggttggcagaaaccatcattgagaacaaaaaaattcttcttcgaggacaggttatttatttgcctagaagcattgttgattcaacaaaaatggatgcactgtatgtttccgccccattttatttcgatgatgattttcaggtctgttatggcgaacactacaatatcgttttccctttgcttgtccccttgtataaacaggaagccgaattggtggaaaagaaaggttggaatgcttttgagcagttcttgttggataatgaagttggcaacctttcggatatgaatcggaaaccgtttacttggtaa

SEQ ID NO: 51910 - DNA, 615 bp, Neisseria meningitidis
atgaggataaccgttataatcacaactttacagtctgcacagagaaaaccgatgccttggaatctccctatcttcctcacatggttgagggtcttgctcattcctgtcatgacagcccttttttacctgccttttccgtggttcgcggaggaaacgattaatctcaccgccgccgtcatttttgccgttgccgccttaaccgactggtttgacggatttttggcaagactgtggaaacagacttccgatttcggcgccttcctcgatcccgtcgccgacaagctgatggttgccgtatcgctacttttactggtcaaactcgaccggacctatgttttgtttgccatgatcattatcggcagggaaattaccatttccgcattgcgcgaatggatggcgcaaatgggcaaaaggaacagcgttgccgtcgccaccgtcggtaagttcaaaaccgccgcgcaaatgctggcaattttcctgctgctgctgaatattcccgatttttacggatttaatcttgttgttatcggcaatgtattgatgtttatcgcatctttgctgacagtctggtcgatgctgtattatctgaaaatggcgtggaaagaaatcgcctga

SEQ ID NO: 51911 - DNA, 492 bp, Neisseria meningitidis; identical to SEQ ID NO: 42417

SEQ ID NO: 51912 - DNA, 2106 bp, Neisseria meningitidis
atggctcgtaagaccccgatcagcctgtaccgtaacatcggtatttccgcccatatcgatgcgggtaaaaccacgacgacagaacgtattttgttctataccggtttgacccacaagctgggcgaagtgcatgacggtgcggctactaccgactacatggaacaagagcaagagcgcggtattaccattacctccgctgccgttacttcctactggtccggtatggcgaaacaattccccgagcaccgcttcaacatcatcgacaccccgggacacgttgactttaccgtagaggtagagcgttctatgcgtgtattggacggcgcggtaatggtttactgcgcggtgggcggtgttcaaccccaatctgaaaccgtatggcggcaagccaacaaataccaagtgccgcgcttggcgtttgtcaataaaatggaccgtcagggtgccaacttcttccgtgttgtcgagcaaatgaaaacccgtttgcgcgccaatcctgtacctatcgtcattccggttggtgcggaagacaacttcagcggtgtggttgatttgttgaaaatgaaatccatcatttggaatgaagtcgataaaggtacaacctttacctatggcgatattcctgccgaattggtcgaaactgccgaagaatggcgtcaaaatatgattgaagccgcagccgaagccagcgaagaactgatggacaaatacttaggcggcgacgagctgaccgaagaagaaatcgtaggcgcgttgcgtcaacgtactttggcaggcgaaattcagcctatgctgtgtggttctgcatttaaaaacaaaggtgttcaacgtatgttggacgcagttgtagaattgctgccagctcctaccgatattcctccggttcaaggtgtcaacccgaataccgaggaagccgacagccgtcaagccagcgatgaagagaaattctctgcattggcgttcaaaatgttgaacgacaaatacgtcggtcagctgacctttatccgcgtttactcaggcgtagtaaaatccggcgataccgtattgaactccgtaaaaggcactcgcgaacgtatcggtcgtttggtacaaatgactgccgcagaccgtactgaaatcgaagaagtacgcgccggcgacatcgcagccgctattggtctgaaagacgttactaccggtgaaaccttgtgtgcggaaagcgcgccgattatcttggaacgtatggaattccccgagccggtaatccatattgccgttgagccgaaaaccaaagccgaccaagagaaaatgggtatcgccctgaaccgcttggctaaagaagacccttctttccgtgtccgtacagacgaagaatccggtcaaaccattatttccggtatgggtgagctgcacttggaaattattgttgaccgtatgaaacgcgaattcggtgtggaagcaaatatcggtgcgcctcaagtggcttaccgtgaaactatccgcaaagccgttaaagccgaatacaaacatgcaaaacaatccggtggtaaaggtcaatacggtcacgttgtgattgaaatggaacctatggaaccgggtggtgaaggttacgagtttatcgatgaaattaaaggtggtgtgattcctcgcgaatttattccgtctgtcgataaaggtatccgcgatacgttgcctaacggtatcgttgccggctatcctgtagttgacgtacgtatccgtctggtattcggttcttaccatgatgtcgactcttcccaattggcatttgaattggctgcttctcaagcgtttaaagaaggtatgcgtcaagcatctcctgccctgcttgagccaatcatggcagttgaagtggaaaccccggaagaatacatgggcgacgtaatgggcgacttgaaccgccgtcgcggtgttgtattgggtatggatgatgacggtatcggcggtaaaaaagtccgtgccgaagtacctttggcagaaatgttcggttactcgaccgacctgcgttctgcaacccaaggccgcgctacttactctatggagttcaagaaatattctgaagctcctgcccacatagctgctgctgtaactgaagcccgtaaaggctaa

SEQ ID NO: 51913 - DNA, 1314 bp, Neisseria meningitidis
atgctgacgtttatcggactgctgattatcggggtcatcgtatggttgctgctgacggaaaaagtgtcgcccatcatcgcattaatcttggtgccgctgtttggggcgttgctggcggggtttgatgtatcccaattaaaagaattttattcgggcggcaccaaatcggtgatgcagattgtgattatgtttatgttttccattttgttttttggaatcatgaacgatgtggggctgttccgtccgatgataggcggtttgattaagctgactcggggtaatatcgtggcagtgagtgtggggacggtcttggtgtcggtggtggcgcagttggacggggcgggtgcgacgacgtttttattggtcgtccccgcccttttgccgctttacaagcgtctgcatatgaatccttacctgctgtttttgctgctgacttccagtgcgggattgattaaccttctgccgtggggcgggccgaccgggcgggttgcaagcgtgttgggcgcagatgtgggcgaattgtataagcctttgttgacggtgcaaattatcggtgtggtgtttatccttgcgctgtccctgcttttgggtgtgcgtgaaaaaaggcggattgtccgggagttgggcgcgttgcccgccgtggcggatttgataaagccggtgcctttgtcggaagaagaacaaaaattggcgcgtccgaaactgttttggtggaatgtcctgctgtttttggcggcgatgagcctgcttttttcgggcatcttcccaccgggttatgtatttatgctggctgcaacggcggcgttgcttttgaattaccgcagcccgcaggaacagatggagcggatttatgcccacgccggcggcgcggtgatgatggcgtccattattttggcggcaggtacgtttttggggattttgaagggtgcggggatgttggacgcgatttccaaagacattgtgcatatcctgccggacgcgctgctgccttatctgcatattgccatcggtgtgttgggcattccgcttgagttggttttgagtacggacgcttattatttcggactgtttccgattgtggagcagattacctcgcaggcgggcgtggcgcccgaagcagcaggttatgcgatgttgatcggcagtatcgtcggcacttttgttacgccgctttcgccggctttgtggatgggcttgggtttggcgaaattgtcgatgggcaaacacatccgttattcgtttttctgggcgtggggtttgtcgctggcgatattggccagttcgatagcggcaggaatcgtgcctctgccgtaa

SEQ ID NO: 51914 - DNA, 465 bp, Neisseria meningitidis
atgaaagaactagataaaatcgatttccgcattcttaagatcctccaacagaatgcccgcatcccgatgacggagcttgccgagaaggtaggcttgtccaccacgcccgttacagagagggtgcgccgtttggagcgggaacattatatttccggctatcacgcccacctcaatccccatctgttgggcaaaccgctattggtttttgtcgagctgaagctgcaatccaaatcgggcaatattttcgaagatttcaaaaaagaagtgctgaaaattccgcaaattatggaatgccacttggtgtcgggcgaatacgactatctgattaaagtacgtttgcccgatatgtctgcctatcgggatatgctaggcaatatcctattgcaactgcctgtcgcttcggagagtaggagttatgttgtgatggaggaggtcaaagaaaatccagttttggatttggattga

SEQ ID NO: 51915 - DNA, 2607 bp, Neisseria meningitidis
atggctgccaaccaacgttaccgcaaaccgctgcccggtacggatttggaatactacgacgcgcgtgcggcgtgtgaggacatcaagcccggctcttacgacaagctgccttacacgagccgcattttggcggagaatttggtcaaccgcgcggacaaagtcgatttgccgacgctgcaaagctggctggggcagttgatagaagggaagcaggaaatcgactttccgtggtatccggcgcgggtggtgtgccacgatattctggggcagaccgcgttggtggatttggcaggcctgcgcgatgcgattgccgaaaaaggcggcgatcctgccaaagtgaatccggtggtgcaaacccagctcatcgtcgaccactctctggcggtggagtgcggcggttacgatcctgatgccttccgcaaaaaccgcgaaatcgaagaccgccgtaacgaagaccgtttccacttcatcaactggacaaaaaccgcgtttgaaaatgtggacgtgattccggcgggcaacggcatcatgcaccaaatcaatctagaaaaaatgtcgcccgtcgtccaagtcaaaaacggcgtggctttccccgatacctgcgtcggtactgactcacatacgccgcacgtcgattcattgggcgtgatttccgtgggcgtgggcggattggaagcggaaaccgtaatgctgggacgcgcgtccatgatgcgcctgcccgatattgtcggcgttgagctgaacggcaaacggcaggcgggcattacggcgacggatattgtgttggcactgaccgagtttctgcgcaaagaacgcgtggtcggggcgtttgtcgaattcttcggcgagggcgcgagaagcctgtctatcggcgaccgcgcgaccatttccaacatgacgccggagttcggcgcgactgccgcgatgttcgctattgatgagcaaaccattgattatttgaaactgaccggacgcgacgacgcgcaggtgaaattggtggaaacctacgccaaaaccgcaggcttgtgggcagatgccttgaaaaccgccgtttatcctcgcgttttgaaatttgatttgagcagcgtaacgcgcaatatggcaggcccaagtaacccgcatgcccgttttgcgaccgccgatttggcggcgaaagggctggcgaagccttacgaagagccttcggacggccaaatgcccgacggctcggtcatcatcgccgcgattaccagttgcaccaacacttccaacccgcgcaacgttgttgccgccgcgctcttggcacgcaatgccaaccgtctcggcttgaaacgcaaaccttgggtgaaatcttcgtttgccccgggttcaaaagtagccgaaatctatttgaaagaagcgggcctgttgcccgaaatggaaaaactcggcttcggtatcgtcgccttcgcctgcaccacctgcaacggcatgagtggcgcgctggatccgaaaatccagaaagaaatcatcgaccgcgatttgtacgccaccgccgtattatcaggcaaccgcaacttcgacggccgtatccacccgtatgcgaaacaggctttcctcgcttcgcctccgttggtcgttgcctacgcgctggcaggcagtatccgtttcgatattgaaaacgacgtactcggcgttgcagacggcaaggaaatccgcctgaaagacatttggcctgccgatgaagaaatcgatgccgtcgttgccgaatatgtgaaaccgcagcagttccgcgatgtgtatgtaccgatgttcgacaccggcacagcgcaaaaagcacccagtccgctgtacgattggcgtccgatgtccacctacatccgccgtccgccttactgggaaggcgcgctggcaggggaacgcacattaagaggtatgcgtccgctggcgattttgcccgacaacatcaccaccgaccacctctcgccgtccaatgcgattttggccgtcagtgccgcaggcgagtatttggcgaaaatgggtttgcctgaagaagacttcaactcttacgcaacccaccgcggcgaccacttgaccgcccaacgcgctaccttcgccaatccgaaactgtttaacgaaatggtgaaaaacgaagacggcagcgtgcgccaaggctcgttcgcccgcgtcgaacccgaaggcgaaaccatgcgcatgtgggaagccatcgaaacctatatgaaccgcaaacagccgctcatcatcattgccggtgcggactatggtcaaggctcaagccgcgactgggctgcaaaaggcgtacgcctcgccggcgtagaagcgattgttgccgaaggcttcgagcgtatccaccgcaccaaccttatcggcatgggcgtgttgccgctgcagttcaaacccgacaccaaccgccataccctgcaactggacggtacggaaacctacgacgtggtcggcgaacgcacaccgcgctgcgacctgaccctcgtgattcaccgtaaaaacggcgaaaccgttgaagttcccgttacctgccgcctcgatactgcagaagaagtattggtatatgaagccggcggcgtgttgcaacggtttgcacaggattttttggaagggaacgcggcttag

SEQ ID NO: 51916 - DNA, 270 bp, Neisseria meningitidis; identical to SEQ ID NO: 40667

SEQ ID NO: 51917 - DNA, 1143 bp, Neisseria meningitidis
atgaatactttatatacacttttcgccacctgcccgcgcggcttggagaccgttttatctcaagaactcgaaagcctcggctgtaccgatgtacaagtgtttgacggcggcgtttcctgccggggcggattggaacaggtttacgccgccaacctgcattcgcgtactgccagccgtatcctgctgcgcctgaccaaagggacataccgcaatgagcgcgacatctacaaactcgccaaaaatatcaactggtttaattggtttactttacagcagacgttcaaagtcaaagtcgaggcaaagcgtgccaacgttaagagcatccaatttgtcggactgaccgtcaaagatgccgtctgcgacgctttccgcgacatttacgacgcacgtccgagcgtggacaaagccgcgcccgatgttcgcatccacgcctttttggacgaacgcaatgtcgaaatcttcatcgacacttcgggcgaagccctgttcaaacgcggctaccgtctcgataccggcgaagccccgctgcgcgaaaaccttgccgccggattgctgctctcggcaggctacgacggcacgcagccgtttcaagacccgttttgcggcagcggcacgattgctatcgaagccgcttggattgccgcccgccgcgcgccgggtatgatgcgccgtttcggttttgaaaaactgcaaaatttcgataaaacgctgtggtcggatttgcgccgccgtgccgaagcgcaggttaaaccggcttttgcaccgatttcgggcagcgacagcgaccgccgcatcattcagacggcattggccaacgcacgcagtgccggggtggacgacatcgtttccttcagcgttgccgacgcgcaatccgtccgtccgaacggcgaaaacggcattatggtgtccaatccgccctacggcgtgcgccttgaggaagtccgcgccttgcaggcgctttatccgcagttggggacgtggttgaagaaatattacgcaggctggttggcggcaatgtttaccggagatcgggaaatgcccaaattcatgcgcctgtcgccaaaacgcaaaattccgctttataacggcaacctcgattgccgcctgttcctgattgatatggtgcagggatcgaaccgttga

SEQ ID NO: 51918 - DNA, 645 bp, Neisseria meningitidis
atgaagctcaaacatctgttgccgctgctgctgtcggcagtgttgtccgcgcaggcatatgccctgacggaaggggaagactatcttgtgttggataaacccattcctcaaaaacagtcgggcaaaattgaggttttggaatttttcggctatttctgcgtacattgccatcatttcgatcctttgttattgaaattgggcaaggcattgccgtctgatgcctatttaaggacggagcacgtggtctggcagcctgaaatgctcggtctggccaggatggcggctgccgtcaatttgtcgggtttgaaatatcaggcaaaccctgctgtgtttaaagcagtttacgaacaaaaaatccgcttggaaaacagggctgttgccggaaaatgggctttgtcccaaaagcagtttgacggcaaaaaactgatgcgcgcctatgattctcccgaggccgcagcagcagcatcaaaaatgcagaaactgacggaacaatacggtattgacagcacgccgaccgttgtcgtcggcggaaaataccgcgttatcttcaataatggctttgacggcggtgttcatacgattaaagaattggttgccaaagtcagggaagaacgcaagcgtcagacccctgctgtacagaaatag

SEQ ID NO: 51919 - DNA, 216 bp, Neisseria meningitidis; identical to SEQ ID NO: 38246

SEQ ID NO: 51920 - DNA, 639 bp, Neisseria meningitidis
atgcaaatcgccattatcgattacggtatgggcaacctgcattccgtattgaaatccgtccggacggcggggcagcttgccggaaaaaataccgaaatctttttaagcggcgaccccgaacgcgtgtcccgcgccgacaaagtcatttttcccgggcagggcgcgatgcccgactgtatggcggcactgacgcgcggcggcctggacgaggcagtcaaagatgccttaaaaaacaaaccctttttcggaatctgcgtcggcgcgcaacttttattcgaccacagtgaagaaggaaacaccgacggcttgggctggttcggcggcaaagtcagacgctttgagcgcgacctccgcgacccgcagggatgccgtctgaaagtcccgcatatgggctggaacaccgtgcgccaaacccaaaaccacccgctgtttaaagatattccccaagacacgcgtttttacttcgtccacagctactatttcgcccccgaaaatcccgaaaccatattgggcgaaagcgactacccgtccccgtttgcctgcatcgtcggcaaagacaacgtattcgccacgcaatttcacaccgaaaaaagccacgatgccgggctgacgatgttgaaaaactttttaaactggtaa

SEQ ID NO: 51921 - DNA, 1065 bp, Neisseria meningitidis
atgatctctttgaaaaacgacactttcctccgcgccctgctcaaacaacctgtcgaatacacgccgatttggatgatgcgccaggcggggcgttatctgcccgaatacaaagccacacgcgcgaaagcgggcagcttcctcgatttgtgcaaaaacaccgaattggcgaccgaagttaccatccaacctttggaacgcttcgatttggacgcggcgattttgttttccgacatcctgaccgtccccgacgcaatgggcttgggactgtattttgccgaaggcgaaggcccgaaattcaaacgcgccctgcaacacgaggccgacatcgccaagctgcacgttcccgatatggaaaaactgcaatacgttttcgacgcggtaacttccatccgtaaagcattggacggccgcgtaccgcttatcggcttttccggcagcccgttcacactcgcctgttatatggtcgaaggcggcggcagcaaagaattccgcaccatcaaaaccatgatgtactcgcgccccgatttgctgcacaaaatcctcgataccaacgcccaagccgttaccgcctacctcaacgcccaaatcgacgcgggcgcgcaggcggtgcaaattttcgacacttggggcggcgtgttgagcgacgcggcgtttaaagaattcagcctcaaatacatccgccagatcgtcgccggactcaaacgcgaaagcgaaggccgccgcgtgcctgttatcgtatttgccaaaggcggcgggctgtggctggaaagtatggcccaaatcggcgcagacgcattgggcttggactggacgtgtaacatcggcgaagcacgccgccgcgtcggcaagcaagtcgccctgcaaggcaacttcgacccgttcgccctcttcggtacgccggaatccatccgcaccgaggtcgcacgtatcctagccgactacggacacggcagcggccatgtcttcaacctcggacacggcatcaaccaacacgccgaccccgaacacgccaaaatcttagtcgataccgtacacgagctgtctcggcagtatcacggcgggtaa

SEQ ID NO: 51922 - DNA, 645 bp, Neisseria meningitidis; identical to SEQ ID NO: 42084

SEQ ID NO: 51923 - DNA, 1410 bp, Neisseria meningitidis
atgccccatattaattttgacacgattccgggcagcatccgcgtgcccgggcagtatattgaatttaacacccgcaatgccgtgcaaggtttgccgcaaaatccgcaaaaggtattgatggttgcacccatgctgaccgcgggcatacagcccgccttagagccggtgcaactatttagcgatgccgaggcggccgatttgttcggacaaggctcgctggcgcatttgatggtgcgccaagcatttgccaacaacccttatttggatttgaccgttatcggtattgccgaccacagcgcaggcgtgcaggcaaccgcaaccgttaccctttccggcacggccaccgcgccgggcgtggtggaaatcacgattggcggcaagcaggtaagcacggccgttaacaccggcgagaccgccgccacagtggcagaccgtctgaaaaccgccatcactgccgccgatgtaaccgttaccgcatccggcagcggcgcagccgttacgctgacggccaaacacaaaggcgagatcggcaacgagagcggcttaaccgtgagcaccggcaataccggcctaacttatcaagccaatgcctttaccggcggtgccaaaaatgcggacattgccacggccttgtccaaagtggcgggcaagcattatcacattatttgcagcccgtttagcgatgacgccaacgccaaagccttgagcaaccatattaccaacgtatccaacgccatcgagcagcgcggctgtatcggcgtattgggtatgagtgcggccttgagcacggccaccaccgctaccggcgaaatcaacgacggccgtatgacctgtgcttggtacaaaggtgcggtagagccaaacggcatcatcgccgcaggttatgcggcggtgttggcctttgaagaagaccctgccaagccgctgaacacgctggaaatcaaagggctggccgttacacctgatgcgcaatggccgctgtttgcagaatgcaacaatgcgctgtacaacggcttgaccccgctcacagtggtcaacaaccgcgtgcagattatgcgtgccgtatccacctataccaagtcggccaacaacaccgacgacccggcactactcgacattaccaccatccgcacgctggattatgtgcgccgcagcgttaaagagcgcattgccctgcgttttccgcgcgacaaattgagcgaccgcctgctgcccaaggttaagagcgagattttggacgtgctgattaagctcgaccaagccgaaatcatcgaaaacgccgaggccaacaaaggcaagctggtggtggcgcgtgcgcaaaacgaccccaaccgtgttaatgccattatccccgccgatgtggtcaacggcctgcacgtctttgccgggcgcattgatttgattttgtaa

SEQ ID NO: 51924 - DNA, 1995 bp, Neisseria meningitidis
atgaaacgacattttatgcctaaaattttacaacaaacaaccttacatcgcttttttcgcgcaaacacgcaccatccgatcagcccgtccgttttgcagcaggctggcgatttgataagatggttatgtttttcagacggcatttcagatttccgtccatgccgtctgaagccgcaaaacccgattggaggaactgttatgaataccgtatcgaattacctgtccgcattgcgcgaagccatgaaggcgcaaggcttggacgcgctcgtcatcccttccgccgacccccacctgtccgaatacctgcccgagcattggcaggcgcgccgcgaattatcgggctttaccggctcggtcggcacgtttgtcctgaccaccgatgaagcgggcgtatgggtggacagccgctattgggaacaagccgccaagcagcttgcgggcagcggcatcgaactgcaaaaaagcggtcaagtgccgccgtacaacgaatggctcgcggcaaacctgcccgaaaacgccgccgtcggcatcccttccgatatggtctcgctcaccggcaaacgcactttggcgcaatccctgaccgccaaaaacatccgcatcgaacacccaaacgatctgcttgaccaagtgtggacaagccgcccggccattcctgccgaaaccgtgttcatccacgaccccgcctacgtctccgaaaccgccgccgaaaaactcgcccgcgtgcgcgccgtcatggcggaaaaaggcgcggattaccacttggtttcctcgcttgacgacatcgcctggctgaccaacctgcgcggcagcgacgtgcctttcaatcccgttttcgtgtccttcctgctgattggcaaagacaacgccgtcctgtttaccgaccgatgccgtctgaatgccgaagccgccgccgcgctgcaaaccgcaggcatcacggtcgagccttacgcccaagttgccggcaaactcgcgcaaatcggcggcgcgttgcttatcgaaccgaacaaaaccgccgtcagcacgcttgtgcgcctgcccgaaagcgtgcgccttatcgagggaatcaacccgtccacgctgttcaaatcctgcaaatccgaagccgacatcgcccgcatccgcgaagcgatggaacacgacggcgcggcgttgtgcggtttcttcgccgagtttgaagacatcatcggcaacggcggcagcctgaccgaaatcgacgtggacaccatgctttaccgccaccgcagcgtgcgcccgggttttgtgtcattgagtttcgacaccatcgcaggcttcaacgccaacggcgccctgccgcattacagcgcaacgcccgaaagccacagcaccatcagcggcaacgggctgctgctcatcgactccggcgcgcaatacaaaggcggcacgaccgacatcacccgcgtcgtccctgtcggcacacccaccgccgaacaaaaacgcgacaacaccctcgttctcaaagcccatatcgcgcttgccgaagccgtgttcccagaaaacatcccctcgccgctgatcgacgcgatttgtcgcaaacccctgtggcaggcgcaatgcgactacggacacggcaccggccacggcgtaggctatttcctcaacgtccacgaaggcccgcagcgcatcgccttcgccgcccccgccacgcccgaaaccgccatgaaaaaaggcatggttacctccatcgaacccggactctaccgcccgggaaaatggggcatccgcattgaaaaccttgccgccaaccaagccgtcgccgcccctcaagaaaccgaattcggcagcttcctctgttttgaaaccctgaccctctgccccatcgacacccgcctgatggacaccgccctcatgaccgacggcgaaatcgactgggtcaaccgctaccacgccgaagtccgccgccgcctcgagccgctgaccgaaggcgcggcaaaagcgtggctgatcaaacgcaccgaaccgctggcgcgttaa

SEQ ID NO: 51925 - DNA, 126 bp, Neisseria meningitidis
atggtgtacagggaaaatatccgcaacgacaaaattatgaaggcaatccattgccaaataatcgtcatcattctggatattttatcaaatgaaaaaaaatatttttcacaatgtaagcctttatga

SEQ ID NO: 51926 - DNA, 1161 bp, Neisseria meningitidis
atgcgaaaaaaacttactgccctcgtattgtccgcactgccgcttgcggccgttgccgatgtcagcctgtacggcgaaatcaaagccggcgtggaaggcaggaactaccagctgcaattgaccgagcagccctcaaaggctcaaggtcaaacgaacaatcaggtaaaagttactaaggcaaaaagccgcatcaggacgaaaatcagcgatttcggctcgtttatcggctttaaggggagcgaggatttgggcgaagggctgaaggctgtttggcagcttgagcaagacgtatccgttgccggcggcggcgcgacccagtggggcaacagggaatcctttgtcggcttggcaggcgaattcggtacgctgcgcgccggtcgcgttgcaaatcagtttgacgatgccagccaagccattgatccttgggacagcaacaatgatgtggcttcgcaattgggtattttcaaacgccacgacgatatgccggtttccgtacgctacgactctccggacttttccggtttcagcggcagcgtccaattcgttccggctcaaaacagcaagtccgcctatacgccggcttatgtggatgagcagagtaagtatcatgcggctgttgtcggcaagcccggatcggatgtgtattatgccggtctgaattataaaaatggcggttttgccgggaactatgcctttaaatatgcgagacacgccaatgtcggacgtgatgcttttgagttgttcttgctcggcagcgggagtgatcaagccaaaggtaccgatcccttgaaaaaccatcaggtacaccgcctgacgggcggctatgaggaaggcggcttgaatctcgccttggcggcccagttggatttgtctgaaaatgccgacaaaaccaaaaacagtacgaccgaaattgccgccactgcttcctaccgcttcggtaatgcagttccgcgcatcagctatgcccatggtttcgactttatcgaacgcggtaaaaaaggcgaaaataccagctacgatcaaatcatcgccggcgttgattatgatttttccaaacgcacttccgccatcgtgtctggcgcttggctgaaacgcaataccggcatcggcaactacactcaaattaatgccgcctccgtcggtttgcgccacaaattctaa

SEQ ID NO: 51927 - DNA, 456 bp, Neisseria meningitidis
atggtcgacgcggtcgttaaaactcccgaatttttaccttttacttctgtaggaatattccgttttggtgctgatataacacagtacaaaaacatactggaaacttttatgtatgaacctcctgatgagtttggaacagaatattatgaatctcccgactcaaatttactcatttccgtcgaaaaaaacaaaattatttcgatattttgttatcaggagttatattttatgggcgttaatataataggtctaaattttgaaatttttaaacaacttttccattaccccaagttaaacgatattgataaatgttatttatcgaatgaatcttatccgacatatgtctatgagtttgatgaaataggagtacaagcttgggaagcaaaagggaaaattgttactatcattgccgggggcaaagacaattattcgatagaaccttactacgatgaataa

SEQ ID NO: 51928 - DNA, 768 bp, Neisseria meningitidis; identical to SEQ ID NO: 43124

SEQ ID NO: 51929 - DNA, 1407 bp, Neisseria meningitidis
gtgaaatttagcacaaaagccgaaactttgcaggctcaacagacaggtgcgcaattatttgtctgcgccgaagcatcgcaactgagcaacccgactgccctcgccctctttgcttcccttgaagaaggtcaaaatttcgccgacaccaaaatcccgacggacaacggtttgcaagccattgccgtcgcccgcctcgctaaaaccgaccgtgccgcgctgaacaaagctgctgccgaagccgccaaatgggcgcaaaatcaggaaacggtcaatgtggacgttcacgtctttgaagaagcgcaggctgcagccgttgccgaagcgtttgcgattgcgttcggcaatgccgcctaccgtttcgaccgctacaaaaaagaagccaagcccgccaaatttgaaactgccgtgttccacagcgcacacgaagccgccgttaaagaagccttgcgcgtcgccgaagcgcaggtttacggacaaagcctctgccgcgacttgggcaacgccgcgcccaacgaatgcacgcccgaatttttagcgcgcaccgccaaagccgaagccgaaaaactgggcgcacacgccaaaatcatcgaaaaagactacattaaagaaaacatgggttcattctggtcggtcgccaaaggcagcgcggaagccccctatttggtcgagctgagctattttggtgcggccgacaaagaagccgcgcctgtggtattggtcggcaaaggcattaccttcgacaccggcggcatctccctcaaacccggcctgaacatggacgaaatgaagtttgatatgtgcggcgcggcaaccgtcatcagcaccttctgcgccgccgtcaaactgcaactgccgattaacctgattgccgtcgtcgccacttgtgaaaatatgccttccggcgcggccaacaaaccgggcgatgtcgtgaaaagtatgaaaggtctgaccatcgaagtgttgaacaccgatgccgaaggccgtctgattttgtgcgacgcgctcacttacgccgagcagttcaaacccaaagccgtcatcgacgtcgccaccctgaccggtgcatgcatcgtcgccttggggcacgatgtcagcggcgtgatgggcaacaatcaagatttggtcgacagcctgcttgtcgcttcctacaacgtggacgacaaagcgtggcaactgccgctctttgaaacctacaaagaccagctcaaatccaactttgccgacatccccaatatcggcacgcccggcgcgggcacgattaccgccgcaacattcctatcctactttaccgaagactatccatgggcacaccttgacatcgcgggtacggcgtggaaatccggtgcggaaaaaggtgcgaccggccgtcccgttcccttgctgctgaactatctgcggaatctttaa

SEQ ID NO: 51930 - DNA, 1431 bp, Neisseria meningitidis
atgacctgggaaaccgtaatcggcttggaaatccacgtccaattgaacaccaaatccaaaatcttcagcggcgcatcgaccgcattcggcgcagaacccaacgcgcacgccggcgtggtggaatgtgctttgccgggcgtactgccggtaatgaaccgagaagtcgttgaaaaagccatcaaattgggtttggctttggatgcgaaaatcaaccggaaaaacgtgttcgaccgtaaaaactacttctatcccgacttaccaaaaggctatcaaatcagccagttggacttaccgattgtcgaacacggcaaattggaaatcgtagtcggcgacgatgtgaaaaccatcaacgtaacccgcgcccatatggaagaagacgcgggcaagtccgtacatgaaggcttgaacggcgcgaccggtatcgatttgaaccgcgccggcacgcctttattggaagtcgtatccgaacccgaaatgcgctccgccgccgaagccgttgcctacgccaaagccttgcacagcttggtaacctggctgaacatttgcgacggcaatatggcggaaggttcgttccgcgtcgatgccaacgtatccgttcgcccgaaaggtcaagcggaattcggcacgcgccgcgagattaaaaacctcaattccttccgtttcttggagcaggcgattaattacgaagcagaagcgcaaatcgagattttggaagacggcggcaaagtacagcaggcaacgatgctgtttgatcccgaaaaaggcgaaacccgcgtaatgcgcctgaaagaagacgcgcacgactaccgctacttccctgaccccgatttgctgcccgtcatcatttcagacgaccggttgcaaaaagcaaaagcagaaatgcccgagctgccaaaagaaatggcggcgcgtttcgtggcggattatggcgtgagcgactacgacgcgcgcctgctcactgccagccgcgtgcaggctgcctattttgaagaagccgctaaagagagcggacaaggcaagctgactgccaactggatgaacggcgaacttgccgccacgctgaacaaagaaggcatggaacttgccgacagcccgattaccgccccacgcctcgccgctctggtaggcaaaatcgccgacggcacattaagcagcaaattggcgaaaaaagcctttgaagccatgtgggctgaacccgaagcctccattgccgaaatcattgaaaaacacggtttgcaacagatgaccgacaccggcgagattgaagccatggtggacgaagtgctggcaaacaacgccaaagccgtggaacagtttaaatccggcaacgaaaaagccctgaatgcgattgtgggacaagtgatgaaggccagcaaaggcaaagccaaccccgcgcaggttcaagagctgattaaagccaaactggcttaa

SEQ ID NO: 51931 - DNA, 651 bp, Neisseria meningitidis; identical to SEQ ID NO: 49015

SEQ ID NO: 51932 - DNA, 435 bp, Neisseria meningitidis
atggaaaaattcaacaatattgcacaactgaaagacagcggtctgaaggttaccggcccgcgtttgaagattttggatttgttcgagacgcatgcggaagagcatttgagtgcggaagatgtgtaccgcattttgttggaagagggtgtggaaatcggtgtggcgacgatttaccgcgtgctgacgcaatttgagcaggcgggcattctgcaacgccaccattttgaaacgggcaaggcggtttatgagttggacaagggcgaccaccacgaccatatcgtctgcgtgaagtgcggcgaggttacggagttccacaatcctgaaatcgaagccctgcaagacaaaatcgccgaggaaaacggctaccgcatcgtcgatcacgcgctttatatgtacggcgtgtgcagcgactgtcaggccaagggcaaacgttaa

SEQ ID NO: 51933 - DNA, 429 bp, Neisseria meningitidis; identical to SEQ ID NO: 41701

SEQ ID NO: 51934 - DNA, 312 bp, Neisseria meningitidis; identical to SEQ ID NO: 39965

SEQ ID NO: 51935 - DNA, 924 bp, Neisseria meningitidis
atgctgcaaagaactttggcgaaatccatcagcgttaccggagtcgggctgcattccggcgaacgggtcgcactgaccctgcaccccgcgcctgaaaacagcgggatttccttccgccgtaccgatttggacggcgagatgggcgaacaaatcaaactgaccccttatttgatcaacgatacccgcctttcctccaccatcgttaccgacaaaggcgtgcgcgtcggcacgatcgaacacattatgtccgcgctgtccgcctacggtatcgacaacgcactgattgagctgaacgcgcccgaaatcccgattatggacggctccagcctgccgtttatttaccttttgcaagatgcgggcgtggtcgatcaaaaggcgcaaaagcgttttttgaaaatcctcaagcctgtcgaaatcaaagaagcgggcaaatgggtgcgctttacgccgtatgacggctttaaggtaacgctgaccatcgaattcgaccatccggttttcaaccgcagctcgcccacttttgaaattgatttcgccggcaaatcctacatcgacgaaatcgcgcgcgcgcgcactttcggctttatgcacgaagtggaaatgatgcgcgcccacaatctgggtttgggcggcaatttgaacaacgccatcgtgattgacgacacggatgtcctgaatcctgaaggcttgcgctatcccgatgagtttgtgcgccacaaaatccttgatgccatcggtgatttgtatatcgtcggacatccgattgtcggcgcatttgaaggctacaaatcgggacacgccatcaacaacgcactcttgcgcgcggttttggcagacgaaacggcttacgaccgggtggaatttgccgacagcgatgatttgcccgacgcatttcacgagctgaacatcagaacttgtggataa

SEQ ID NO: 51936 - DNA, 876 bp, Neisseria meningitidis
atgccgaccgtccgttttaccgaatccgtcagcaaacacgaccttgatgccctgttcgagtgggcaaaagcaagttacggtgcagaaagttgctggaaaacgctgtatctgaaccgtctgcctttgggcaatctgtcgccggaatgggcggaacgcgtcaaaaaagactgggaggcaggctgctcggagtcttcagacggcattttcctgaatgcggacggctggtcagatatgggcggccgcttgcagcacctcgcccgcacatggaacaaggcggggctgcttcacggatggcgcaacgagtgtttcgacctgaccgacggcggcggcaatatcttgttctcactcgaacgcgccgctttccgtccgttcggactgctcagccgcgccgtccatctcaacggtctgactgaatcggatggcagatggcatttttggataggcaggcgcagtccgcacaaagcagtcgatcccgacaaactcgacaatattgccgccggcggtgtttccagcggtgaattgccgtctgaagccgtgtgtcgcgaaagcagcgaagaagcgggtttggatcaaacgctgtttccgctcatccgcccggtatcccggctgcacagcctgcgccccgtcagccggggtgtgcacaatgaaatcctgtatgtattcgatgccgtcctacccgaaaccttcctgcctgaaaatcaggacggcgaggttgcgtgttttgaaaaaatggacatcggcagcttggttgccaccatgttgtcgggaaacatgatgcacgacgcgcaactggttacgctggacgcgttttgccgttacggtctgattgatgccgcccatccgctgtccgagtggctggacggcatacgtttatag

SEQ ID NO: 51937 - DNA, 897 bp, Neisseria meningitidis
ttgaatccgacgaatgatttgaaagcgtggcaacagagggcgcaggcacagacagagctgctgctggaacgctttttgccgtctgaaaacgaaatcccgcacacgctgcacgaagcgatgcgctatgcggctttggacggcggcaagcgtctgcgtccgatgctggtgctggcggcttcggaattgggcggggtcgtggcggatgcggtcggacaggcaatggcggcaatcgaaatgatccacgtctattctttggttcacgacgatatgccggcgatggacaacgacagcctgcggcgcggcaaaccgacttgccatgtgcaatacgacgaagccaccgcgctactggtcggcgacgctttgcaaacccaagccttcgacgtgttaagccgtccgacagaactgcccgcagcacgccagttggcaatgttgtcggtgttggcgaaagcgggcggcagcgcgggcatggcgggcggtcaggcaatcgatttggcgaatgtcggcaaacaaatggttcaagccgatttggaacagatgcacagcctgaaaacgggtgcgctaatccgtgcggcggttttattgggggcgatgtcctgcccgaatctgtctgaagacagtctggcggtattggacgattatgcggcaaaactggggctggcgttccaagtcattgacgatgtgttggattgtgaagcggacacggcgactttgggcaaaacggcgggcaaagacgcagacaacgacaagccgacttatgtgaaactgatgggcttggaagcggcgcgctcatacgcacacaaactggttgccgaagcggtcgcgctgctcgaacccttcggcgacaaagccctgcgcctgcggcagttggcagaatttgcagtcgcccgcaaatattaa

SEQ ID NO: 51938 - DNA, 912 bp, Neisseria meningitidis; identical to SEQ ID NO: 44117

SEQ ID NO: 51939 - DNA, 216 bp, Neisseria meningitidis; identical to SEQ ID NO: 43890

SEQ ID NO: 51940 - DNA, 258 bp, Neisseria meningitidis; identical to SEQ ID NO: 39854

SEQ ID NO: 51941 - DNA, 4170 bp, Neisseria meningitidis
atgaccgataccgcaccgacagataccgatccgaccgaaaacggcacgcgcaaaatgccgtctgaacaccgccctgccccgccggcaaaaaaacgccgcccgctgctgaagctgtcggcggcactgctgtctgtcctgattttggcagtatgtttcctcggctggctcgccggtacggaatccggtttgcgcttcgggctgtaccaaatcccgtcttggttcggcgtaaacatttcctcccaaaacctcaaaggcacgctgctcgacggcttcgacggcgacaactggtcgatagaaaccgagggggcagaccttaaaatcagccgcttccgcttcgcgtggaaaccgtccgaactgatgcgccgcagcctgcacattaccgaaatttccgccggcgacatcgccatcgttaccaaaccgactccgcctaaagaagaacgcccgccgctcagccttcccgacagcatagacctgcctgccgccgtctatctcgaccgcttcgagacgggcaaaatcagcatgggcaaagcctttgacaaacaaaccgtctatctcgaacggctggatgcttcataccgttacgaccgcaaaggacaccgcctcgacctgaaggccgccgacacgccgtggagcagttcgtcggggtcagcctcggtcggcttgaaaaaaccgtttgccctcgataccgccatttacaccaaaggcggactcgaaggcaaaaccatacacagtacggcgcggctgagcggcagcctgaaggatgtgcgcgccgaactggcgatcgacggcggcaatatccgcctctcgggaaaatccgtcatccacccgtttgccgaatcattggataaaacattggaagaagtactggtcaaagggttcaacatcaatccggccgccttcgtgccttccctgcccgatgccggactgaatttcgacctgaccgccatcccgtcgttttcagacggcatcgcgctggaaggttcgctcgatttggaaaacaccaaagccggctttgccgaccgcaacggcatccccgtccgtcaggttttgggcagctttgtcatccggcaggacggcacggtgcatatcggcaatacgtccgccgccctgctcggacggggcggcatcaggctgtcgggcaaaatcgacaccgaaaaagacatcctcgatttaaatataggcatcaactccgtcggcgcggaagacgtgctgcaaaccgcgttcaaaggcaggttggacggcagcatcggcatcggcggcacgaccgcctcgcccaaaatctcttggcaactcggcatcggcacggcgcgcacggacggcagcctcgccattgcaagcgaccccgcaaacggacagcggaaactggtgctcgacaccgtcaacatcgccgccgggcaaggcagcctgaccgcgcaaggctatctcgagctgtttaaagaccgcctgctcaagctggacatccgttcccgcgcattcgacccttcgcgcatcgatccgcaacttccggcaggcaatatcaacggctcaataaaccttgccggcgaactggcaaaagagaaattcacaggcaaaatgcggtttttacccggcacgttcaacggcgtaccgattgccggcagtgccgacattgtttacgagtcccgccaccttccgcgtgccgccgtcgatttgcggctggggcggaacatcatcaaaacagacggcggcttcggcaaaaaaggcgaccggcttaacctcaatatcaccgcacccgatttatcccgtttcggtttcggactcgcggggtctttaaatgtacgcggacacctttccggtgatttggacggcggcatccgaacctttgaaaccgatctttccggcgcggcgcgcaacctgcacatcggcaaggcggcagacatccgttcgctcgatttcacgctcaaaggttcgcccgacacaagccgcccgatacgcgccgacatcaaaggcagccgcctttcgctgtcgggcggagcggcggttgtcgataccgccgacctgatgctggacggcacgggcgtgcagcaccgcatccgcacacacgccgccatgacgctggatggcaaaccgttcaaattcgatttggacgcttcaggcggcatcaacagggaacttaccctatggaagggcagcatcggcattctcgacatcggcggcgcattcaacctcaagctgcaaaaccgtatgacgctcgaagccggtgcggaacgcgtggcggcaagtgcggcaaattggcaggcaatgggcggcagcctcaacctgcaacacttttcttgggataaaaaaaccggcatatcggcaaaaggcggcgcacacggtctgcatatcgccgagttgcacaatttcttcaaaccgcccttcgaacacaatctggttttaaacggcgactgggatgtcgcctacgggcgcaacgcgcgcggctacctcaatatcagccggcaaagcggcgatgccgtattgcccggcgggcaggctttgggtttgaacgcattttccctgaaaacgcgctttcaaaacgaccgtatcggaatcctgcttgacggcggcgcgcgtttcgggcggattaacgccgatttgggcatcgccaacgccttcggcggcaatatggcaaatgcaccgctcggcggcaggattaccgcctcccttcccgacttgggcgcattgaagccctttctgcccgccgccgcgcaaaacattaccggcagcctgaatgccgccgcgcaaatcggcggacgggtaggctctccgtccgtcaatgccgccgtcaacggcagcagcaactacgggaaaatcaacggcaacatcaccgtcgggcaaagccgctctttcgataccgcgcctttgggcggcaggctcaacctgaccgttgccgatgccgaagtattccgcaacttcctaccggtcggacaaaccgtcaaaggcagcctgaatgccgccgtaaccctcggcggcagcatcgccgatccgcacttgggcggcagcatcaacggcgacaaactctattaccgcaaccaaacccaaggcatcatcttggacaacggctcgctgcgttcgcatatcgcgggcaggaaatgggtaatcgacagcctgaaattccggcacgaagggacggcggaactctccggtacggtcggtatggaaaacagcggacccgatgtcgatatcggcgcggtgttcgacaaataccgcatcctgtcccgccccaaccgccgcctgacggtttccggcaacacccgcctgcgctattcgccgcaaaaaggcatatccgttaccgggatgattaaaacggatcaggggctgttcggttcgcaaaaatcctcgatgccgtccgtcggcgacgatgtcgtcgtattaggcgaagtcaaaaaagaggcggcggcaccgctccccgtcaatatgaacctgactttagacctcaatgacggcatccgcttcgccggctacggcgcggacgttaccataggcggcaaactgaccctgaccgcccaatcgggcggaagcgtgcggggcgtgggcacggtccgcgtcatcaaagggcgttataaggcatacgggcaggatttggacattaccaaaggcacggtctcctttgtcggcccgctcaacgaccccaacctcaacatccgcgccgaacgccgcctttcccccgtcggtgcgggcgtggaaatattgggcagcctcaacagtccgcgcattacgctgacggcaaacgaaccgatgagtgaaaaagacaagctctcctggctcatcctcaaccgcgccggcagcggcagcagcggcgacaatgccgccctgtccgcagccgccggcgcgctgcttgccgggcaaatcaacgaccgcatcgggctggtggatgatttgggctttaccagcaagcgcagccgcaacgcgcaaaccggcgaactcaaccccgccgaacaggtgctgaccgtcggcaaacaactgaccggcaaactctacatcggctacgaatacagcatctccagcgcggaacagtccgtcaaactgatttaccggctgacccgcgccatacaggcggttgcccgtatcggcagccgttcgtcgggcggcgagctgacatacaccatacgtttcgaccgcttctccggttcggacaaaaaagactccgccggaaacagcaaaggaaaataa

SEQ ID NO: 51942 - DNA, 285 bp, Neisseria meningitidis; identical to SEQ ID NO: 38872

SEQ ID NO: 51943 - DNA, 321 bp, Neisseria meningitidis
atgattacccttaccgagaatgccgcaaaacacatcaatgactatctcgccaaacgcggcaaaggcttgggcgtacgcttgggtgtgaaaaccagcggctgctcggggatggcgtacaaccttgaatttgtcgatgaagccgatggcgacgacctgattttcgaaggacacggcgcacgcatttatatcgacccgaaaagcctggtttatctggacggcacacaagtcgattacaccaaagaaggtttacaggaaggtttcaaatttgaaaaccccaatgtcaaagactcctgcggctgcggcgaaagcttccatgtttaa

SEQ ID NO: 51944 - DNA, 324 bp, Neisseria meningitidis
atgggagattccgtactatccgccatccaacaaaccatcacccagcgaaaatctgccaatccgtccgaatcttacgtcgcacagctcttgcacaagggcgaggacaaaatcctaaaaaaagtgattgaagaggcgggcgaagtgttgatggcatccaaagacaaaaacccgtcccacctggtttacgaagttgccgacttatggtttcacaccatgattcttctgacacaccacgacctgaaggcggaagacgtattggacgaacttgcgcgccgccaaggtttgtcgggcttggccgaaaaagccgctcgcacagaatcttga

SEQ ID NO: 51945 - DNA, 339 bp, Neisseria meningitidis; identical to SEQ ID NO: 39659

SEQ ID NO: 51946 - DNA, 396 bp, Neisseria meningitidis; identical to SEQ ID NO: 45813

SEQ ID NO: 51947 - DNA, 393 bp, Neisseria meningitidis
atgtattcgtttgaagcgaatgcaaatgcagtaaaaatatctgaaactgtttcagttgataccggacaaggtgcgaaaattcataagtttgtacctaaaaatagtaaaacttattcatctgatttaataaaaacggtagatttaacacacatccctacgggcgcaaaagcccgaatcaacgccaaaataaccgccagcgtatcccgcgccggcgtattggcggggggcggcaaacttgcccgcttaggcgcgaaattcagcacaagggcggttccctatgtcggaacagcccttttagcccacgacgtatacgaaactttcaaagaagacatacaggcacgaggctaccaatacgaccccgaaaccgacaaatttgcaaaggtctcaggctaa

SEQ ID NO: 51948 - DNA, 393 bp, Neisseria meningitidis
atgtattcgtttgaagcgaatgcaaatgcagtaaaaatatctgaaactgtttcagttgataccggacaaggtgcgaaaattcataagtttgtacctaaaaatagtaaaacttattcatctgatttaataaaaacggtagatttaacacacatccctacgggcgcaaaagcccgaatcaacgccaaaataaccgccagcgtatcccgcgccggcgtattggcggggggcggcaaacttgcccgcttaggcgcgaaattcagcacaagggcggttccctatgtcggaacagcccttttagcccatgacgtatacgaaactttcaaagaagacatacaggcacgaggctaccaatacgaccccgaaaccgacaaatttgcaaaggtctcaggctaa

SEQ ID NO: 51949 - DNA, 1272 bp, Neisseria meningitidis
atgttccaatggctttatgatgcattgtggctgcttgcgccgatatggatacggcgttatttggacaaacgctccggaagtgccccggcatatcgggcgcatcgggacgagcgtttcggcaagccgtatccgaatcccgttaccggcgcggtttggatacacgccgtttcggtcggagaaacgcgtgccgcccagcccttgatacgcgagttgcggcagcgttttcccgatgcgccgctgctgatgacgcagatgaccccgacgggacgggaaaccgcgcaagttctgtttcctgatgcacaatgccgctatcttccgtatgacaaaaaaacgtgggtacggcagtttttgcgcgaacaccgcccgatgttcggcgtattgatggaaacggaaatctggcccaacctaatgaaggaatgccggcgcgcgggtgtgccgctgtttttggcgaatgcgcggctgtcggaaaaatcgttgaacggttatctgaaagtccgccgcctgatccgtcctgccgccgcttcgctgacgggttgtctggcgcagacggaggcggatgcggcgcggttggcgaaattgggcgcggcatccgtgcaggtgtgcggcaataccaaatacgacctgatgccgtcggaacagatgaaaacgctggcggggcagtttgaaaaacgcatcggaggccggccggttgccgtgtgcggcagcacgcgcgtttatcggggcgaagacgaggcggaaaaactgctggcggcgtggcaacaatatcgcggcgatgcgctgctggtcgtcgtgccgcgccatcccgagcattttcagacggtatttgaaacggcaaaacgcttcgggtttaaggttcagcggcgcagcgacggtttgccggtcgaacctgatacgcaggtgtggataggcgacagtatgggcgagctgtatgcgtattacctgtgcgccgatgtcacttttgtcggcggcagtctggtcgattcgggctgtcagaacattatcgaaccgctttcctgcggcgttccgacgatattcggcttttcaacctacaatttttccgaagcctgccggcacgccttggcatcgggggcggcggttcgggttgagtcggcggacgcgtggcgggaagccgttgaaaaaaccttatcgtccgaggggggcggaatgcagatgcaggcgcacgtggacggctttatcgcacaacatcgcggagcgggcgcgagaatcgccgaggcggtacgggaagcggtatgcggacatcggggacgatag

SEQ ID NO: 51950 - DNA, 2058 bp, Neisseria meningitidis
atgacacgcaaaatcttagttacctccgccctgccctatgccaacggcagcatccacctcggccacatggtcgaacacatccaaaccgacgtttgggtacgcttccaaaaactgcgcggcaacgaatgccactactgctgcgccgacgacacccacggcacgcccgtgatgcttgccgcgcaaaaacaaggtatcgcccccgaagacatgattgccaaagtgcgcgaagagcacctcgccgactttactggctttttcatcggttacgacaattattacagcacccattcccctgaaaacaaacagttttcccaagacatttaccgcgcgctgaaagccaacggcaagattgagagccgcgtcatcgagcagcttttcgaccccgaaaaacaaatgttcctgcccgaccgcttcgtcaaaggcgaatgcccgaaatgccacgcccaagaccaatacggcgacaactgcgaagtctgcggcacgacctattccccgaccgaactgattaatccgtattccgccgtttccggtgccaaacccgaattgcgcgaatccgaacacttcttcttcaaactggacgaatgcgccgacttcctcaaagcatggacttccggcaacaatccgcacgacggcaagccccatctgcaacccgaagccctcaacaaaatgaaagaatggctgggcgaaggcgaagaaaccaccctgtccgactgggacatttcccgcgacgcgccgtatttcggttttgaaatccccgacgcgccgggcaaatacttctacgtctggctggacgcgcccgtcggctacatggcatcgtttaaaaacctgtgcgaccgcatcggcatcgattttgacgaatacttcaaagccggcagccaaaccgagatgtaccacttcatcggcaaagacatcctctatttccacgccctgttctggcccgctatgctgcatttctccggccaccgcgccccgaccggcgtgtacgcacacggctttttgaccgtcgacggacaaaaaatgtccaaatcgcgcggcaccttcatcaccgcaaaatcctatctggaacaaggcctaaaccccgagtggatgcgctactacatcgccgccaaactcaacagcaaaatcgaagacatcgatttgaacctgcaagactttatctcgcgcgtcaacagcgacctcgtcggcaaatacgtcaacatcgccgcccgcgcgtcaggtttcattgccaaacgctttgaaggccgtttgaaagacgtcgccgacagcgcattattggcaaaactgaccgcacaaagcgaagccattgccgaatgctacgaaagccgcgaatacgccaaagccctgcgcgacatcatggccttggcagacattgtcaacgaatacgttgatgccaacaaaccttgggaactcgccaaacaagaaggccaagacgaacgcctgcacgaagtatgcagcgaactcatcaacgcctttaccatgctgaccgcctacctcgcccccgtgttgccgaaagtggccgaaaatgccgccaaattcctgaatttggaagccatcacttgggcaaatacacgcgaaaccttgggcaaacacgccatcaacaaatacgaacatttaatgcaacgagtggagcaaaaacaagtggacgatttaatcgaagccaacaaacaaagcatcgccgccgcagccgtgcctgccgccgaagagggcaaatacgaaaaagttgccgaacaggcgagtttcgacgactttatgaaaatcgacatgcgcgtcgccaaagtattgaactgcgaagccgtcgaaggcagcaccaaactcttaaaattcgacctcgatttcggttttgaaaaacgtatcatcttctccggcatcgccgcgttttaccccaaccctgccgagttaaacggaagaatggtcatcgccgtcgccaacttcgccccgcgcaaaatggcaaaattcggcgtatccgaaggcatgattttgagtgccgccacggcagacgggaaactgaagctcttggatgtggatgcaggcgcgcaaccgggcgacaaagtcggttaa

SEQ ID NO: 51951 - DNA, 525 bp, Neisseria meningitidis
atggaaatgaaacaaatgcttttagccgtcggcgtggtggcggtgttggcgggctgcggcaaggatgccggcggttacgagggttattggcgcgaaaaatcggacaaaaaagagggcgtgattgccgtcaaaaaagaaaaaggcaattacttccttaataaaatcaacgtatttacaggcaaggaggagtctttgcttttgtctgaaaaagacggcgcgctttcgataaacacggggataggggaaatcccgatcaaactttccgatgacgggaaagagctgtatgtcgaacgcaggcagtatgtcaaaaccgatgcggcgatgaaggacaaaatcatcgcccatcagaaaaagtgcggacaaacggcacaggcatacctcgacgcgcgaaaggcgttgccgtcaaaccaaacgtatcagcagcgtcaggcggcgatcgagcaattaaaacggcggtttgaagccgagtttgacgaattggaaaaagaaatcaaatgcaacggcagaccgacattgttgttttag

SEQ ID NO: 51952 - DNA, 504 bp, Neisseria meningitidis; identical to SEQ ID NO: 42700

SEQ ID NO: 51953 - DNA, 318 bp, Neisseria meningitidis; identical to SEQ ID NO: 41968

SEQ ID NO: 51954 - DNA, 624 bp, Neisseria meningitidis
atggaacgcaaagaacgcctgcgtgcaggcattgccgcgatggggctggatatttcggaaacggcgcaggacaggcttttggtctatgtggatttgttgaaaaagtggaacaaaacctacaatctgaccgccctgcgcgacgaggaaaaaatgattgtccatcatcttttggacagcctgacgctgctgccccatatcgagggtgtgcaaacgatgctggatgtcggttcgggcggcggtcagcccggcattccggcggcggtgtgccgtccggatgtgcaaataacccttttggatgcgaatacgaagaaaacggcttttttacagcaggcggttatcgagttggggttggacaatgtgcgcgtggtatccggacgcgtggaggcggtttcggacgtgcgtgccgatgtggttaccagccgtgcgtttgcagaactggcggattttgtgtcgtggacggtgcatctgttgaaagacggcggctactgggcggcgatgaagggcgtgtatccgcaggaagaaatcggccgcctgccgcaggatgtgtgcgttgaaaaagtccaaaggctcgacgtgccgggcttggatgcggaacgccatatcgtcatcctgagcaagcgttga

SEQ ID NO: 51955 - DNA, 744 bp, Neisseria meningitidis
atgcctgatgccgtcaaaaaagtttacctgatacacggttggggggcgaaccgccacgtgttcgacgatttgatgccgcgcctgcctgcaacgtggccggtgtccgccgtcgatttgcccggacacggcgacgcgcccttcgcgcaacccttcgatattgaggcagccgccgacgctgttgccgcacaaatcgatacgcccgccgacattctcggctggtcgctcggcggattggtcgcgctgtatctggcggcgcgccatcccgacaaagtccgttcgctctgcctgacggcgagtttcgcacggctgacggctgacgaagactatcccgaagggcttgccgcgcctgcattgggcaaaatggtcggcgcgttccgaacggattatgccaaacatatcaaacagtttctacaactccagcttctgcacacgcctgatgcggacggaatcataggcagaatcctgcccgatttggcgcgctgcggcacgccctccgccttacaggaagctttggacgcggcggaaagggcggatgcgcggcatttgttggacaagatagatgttccggtactgctggtgttcggtagcaaagacgcgattacgccgccgcgcatgggcgagtatctgcaccgccgtttgaaaggcagcaggctggttgtgatggaaaaggcggcgcatgcgccgtttttgagccatgcggaagcgtttgccgcgctgtaccgcgactttgtcgaaggggtttga

SEQ ID NO: 51956 - DNA, 981 bp, Neisseria meningitidis
atggcaatggcagaaaacggaaaatatctcgactgggcacgcgaagtgttgcacgccgaagcggaaggcttgcgcgaaattgcagcggaattggacaaaaacttcgtccttgcggcagacgcgttgttgcactgcaagggcagggtcgttatcacgggcatgggcaagtcgggacatatcgggcgcaaaatggcggcaactatggcctcgaccggcacgcctgcgtttttcgtccaccctgcggaagcggcacacggcgatttgggtatgattgtggacaacgacgtggtcgtcgcgatttccaattccggcgaaagcgacgaaatcgccgccatcatccccgcgctcaaacgcaaagacatcacgcttgtctgcatcaccgcccgccccgattcaaccatggcgcgccatgccgacatccacatcacggcgtcggtttccaaagaagcctgcccgctggggcttgccccgaccaccagcaccaccgccgtcatggctttgggcgatgcgttggcggtcgttctgttgcgcgcgcgcgcgttcacgcccgacgacttcgccttgagccaccctgccggcagcctcggcaaacgcctacttttgcgcgttgccgacattatgcacaaaggcggcggcctgcctgccgtccgactcggcacgcccttgaaagaagccatcgtcagcatgagtgaaaaagggctggggatgctggcggtaacggacgggcaaggccgtctgaaaggcgtattcaccgacggcgatttgcgccgcctgtttcaagaatgcgacaattttaccggtctttcgatagacgaagtcatgcatacacaccctaaaaccatcgccgccgaacgcctcgccaccgaagccctgaaagtcatgcaggcaaaccatgtgaacgggcttctggttaccgatgcagacggcgtgctgatcggtgcgctgaatatgcacgaccttttggcggcgcggattgtataa

SEQ ID NO: 51957 - DNA, 495 bp, Neisseria meningitidis; identical to SEQ ID NO: 43908

SEQ ID NO: 51958 - DNA, 624 bp, Neisseria meningitidis; identical to SEQ ID NO: 38279

SEQ ID NO: 51959 - DNA, 909 bp, Neisseria meningitidis; identical to SEQ ID NO: 37968

SEQ ID NO: 51960 - DNA, 840 bp, Neisseria meningitidis; identical to SEQ ID NO: 43911

SEQ ID NO: 51961 - DNA, 303 bp, Neisseria meningitidis
atgaccgcgcaacaccaatccgacacgctcttgcaccgtctgaacaccctgccgccgaaacgttacggcgttttcctattgaacgacgattacaccacgatggaatttgtcgtcgaaatcctgaccgaaatctttatgctcggacaagaacaggcggtagcggtgatgctcttggttcatcacgaaggcaaaggcctgtgcggcacttacacgcgcgatattgcccaaaccaaacaacaacaagtcatgcagcgggcaaaagccgaagggcatccgctgcaatgtattgtcgaggagatttaa

SEQ ID NO: 51962 - DNA, 732 bp, Neisseria meningitidis
atgataaaacttactgcacaacaaatatttgataagttgctggatgaagaaaaaatcttatcggccaatggtcaaattagatttttcttaggcgatgtggatattatcgtcaaacaaaaagatgttgtcggcaacatcattcaggaatggctcggcggatgattgagaaaaagggaaattgaatttgatgtttcaaccaatacccaaatgcctcccgatttctttttaaataaaaaagaccgcagcagagaattgttggaagtaaaggcgttcaaccgaaatgccggcccgggttttgatattgcagattttaaaatgtattctgataaaatcattcataagccctatatgctggatgtagactatttaatattcggttacgatatggacgacaacggcaatgtaaccatcaaggatttatggcttaaaaaagtatggcaaattacgagaagcatggatgggtgggcaattaatcttcaagtcaaaaaaggcgtggtgcataaaatccgcctgggtgtttggtacagcataaataaaaagaatatgcctatgtttgaatgcttggaagattttgtttccgcaattgaagaaaccgtttatcaaaacccggcaacacggcataacgcatccttatggaaaaagaaatttgaggaagcctataaaaaacactacaaccgatcgatttccatacctcgttggcacgaaattgcacacaaatacaaaaagaaataa

SEQ ID NO: 51963 - DNA, 339 bp, Neisseria meningitidis; identical to SEQ ID NO: 43914

SEQ ID NO: 51964 - DNA, 1332 bp, Neisseria meningitidis
atgaacacaacatcccaatttaccagtaatttctggaatatatatattgcagttattgtcttactgagctttatcgctttggcttggctgctgctgtctcaaaatgttgtcaaacgtccgaagaagggcgaagaagtacaaactacgggtcatgagtgggacggcattgccgaatacgacaatccgctgccccgctggtggttttggctgtgtgttttgacgtggctgttcggtatcggttatttggttatgtatccgggtgtcggcgactacaaaggtctgctgaaatggaccagccataaccaatatgaaaaagaggtcaaaaaagccgatgagcaatacggcaaactgtatgccaagtttgcggatatgccgattgaaaaagtggcaaaagaccctcaagccaagcaaatcgcccaaaacctgtttaacacttattgtatccagtgccacggctctgatgctaaaggctctaaaggttttccgaatctgaccgatagcgattggttgtggggcggtgatcccgataaaatccacgagaccatcgaaaaaggccgtgttgcgactatgcctgcctggggccctgctttgggcgaagaaggcgtgaaagacgttgcccattatgtgatgtccctttcaaaacccgaaggtcagtatgatgaggaacgtgccgcgcgcggacaagccttgttcagcggtccgcctgccaactgtttcacttgccacggcgataagggacaaggtatccaaggtttgggtccgaacctgactgatgacgtgtggttgtggggcggtacgcaaaaatccattatcgaaaccattaccaacggtcgcagcagccaaatgcccgcttggggacatttcttggataaagacaaactgcatattatgactgcttatgtatggggtctttccgataaagacggtaaagctccggtgaaaaaagccgagcctgcaccgactcccgcaccggcggcagaacccgcagcctctgctcctgcagaagcagcacaagccgcgtccgaagccaaacctgccgcagcagaacctaaagccgaggaaaaagctgcacctgctgccaaagcggacggcaaataggtttatgaaaccgtttgtgccgcctgccatggcaatgcgattccgggtattccccatgtaggcatcaaagccgattgggccgaccgcatcaaaaaaggcaaggacacgttgcacaaacacgcgatcgaaggtttcaatacgatgcccgcaaaaggcggtcgcggcgatttgagcgatgatgaggttaaagctgcggttgactatatggtcaaccagtcaggcggcaaattctaa

SEQ ID NO: 51965 - DNA, 318 bp, Neisseria meningitidis; identical to SEQ ID NO: 43917

SEQ ID NO: 51966 - DNA, 375 bp, Neisseria meningitidis
atgaaacttctgaccaccgcaatcctgtcttccgcaatcgcgctcagcagtatggctgctgctgccggcacgaacaaccccaccgttgccaaaaaaaccgtcagctacgtctgccagcaaggtaaaaaagtcaaagtaacctacggctttaacaaacagggcctgaccacatacgcttccgccgtcatcaacggcaaacgtgtgcaaatgcctgtcaatttggacaaatccgacaatgtggaaacattctacggcaaagaaggcggttatgttttgggtaccggcgtgatggatggcaaatcctaccgcaaacagcccattatgattaccgcacctgacaaccaaatcgtcttcaaagactgttccccacgttaa

SEQ ID NO: 51967 - DNA, 300 bp, Neisseria meningitidis
atgaagaaaatgttcgtgctgttctgtatgctgttctcctgcgccttctcccttgcggcggtaaacatcaatgcggcttcgcagcaggagttggaggcgctgccgggcataggcccggcgaaggcgaaggccattgcggaataccgtgcgcaaaacggtgcgttcaagtctgtggacgatttgaccaaggtaaagggcatcggccctgcggtgctggcgaagctgaaggaccaggcttcggtcggcgcgcccgcaccaaaaggcccagccaaaccagtgctgcccgcggataaaaaataa

SEQ ID NO: 51968 - DNA, 540 bp, Neisseria meningitidis
atgaacatcattgataccgccattcctgacgtaaaactgcttgagccccaagtcttcggcgacgcgcgcggcttttttatggaaaccttccgcgacgagtggtttaaaacccaagtctgcgaacgcaccttcgtgcaggaaaaccactccaaatccggcaaaggcgtattgcgcggcctgcactaccaaaccgaaaacacacaaggcaaactcgtacgcgtagttgtcggcgaagtattcgacgtggccgtcgatatgcgtaaagactcccccactttcggcaaatgggtaggcgagattctgtccgcagaaaacaaacgccaactgtgggtacccgaaggtttcgcacacggtttttacgttttgagcgacacggccgaacttacctacaaatgcacagactattacaagccagaagccgaacaggttttaatatggaacgacccggcaataggcatagactggccgctacaaggcgagccgaacctgtcgcctaaagacttggccggcaaagtattggccgaagcagtcacgttttaa

SEQ ID NO: 51969 - DNA, 867 bp, Neisseria meningitidis
atgaaaggcatcatactggcaggcggcagcggcacgcgcctctaccccatcacgcgcggcgtatccaaacagctcctgcccgtgtacgacaaaccgatgatttattaccccttgtcggttttgatgctggcgggaatccgcgatattttggtgattaccgcgcctgaagacaacgcctctttcaaacgcctgcttggcgacggcagcgatttcggcatttccatcagttatgccgtgcaacccagtccggacggcttggcacaggcatttatcatcggcgaagaatttatcggcaacgacaatgtttgcttggttttgggcgacaatattttttacggtcagtcgtttacgcaaacattgaaacaggcggcagcgcaaacgcacggcgcaaccgtgtttgcttatcaggtcaaaaaccccgaacgtttcggcgtggttgaatttaacgaaaacttccgcgccgtttccatcgaagaaaaaccgcaacggcccaaatccgattgggcggtaaccggcttgtacttctacgacaaccgtgccgtcgagttcgccaaacagctcaaaccgtccgcacgcggcgaattggaaatttccgacctcaaccaaatgtatttggaagacggttcattgtccgtccaaatattaggacgcggtttcgcatggttggacaccggcacccacgagagcctgcacgaagccgcttcattcgtccaaaccgtgcaaaacatccaaaacctgcacatcgcctgcctggaagaaatcgcttggcgcaacggttggctttccgatgaaaaactggaagaattggcgcgcccgatggcgaaaaaccaatacggccaatatttgctgcgcctgttgaaaaaataa

SEQ ID NO: 51970 - DNA, 954 bp, Neisseria meningitidis
atgcatcaatattatgacgcagtaattttatcggttggaaatgggttgttaaaaaggttctttaagcagaatgcgcaattaaatattgcttcaaggccattgattattaccttgtttccaggtgtagtattcggtgatcaggcaagtattctatctcgtatgggggctgatattgttttatataataataagcatgattttagaattgcagagacatataaaaaacaatataaattaagttgtcaaaatatactttatggttatccaaattttcgccatgcttcgaaaggttgtcatggagagagaatttattttattgaccaagtcaaaattccatttaaaaaagaagaaagaatttacacattaaaaaaattgattaccttggctgaaaaataccctgagaaagaatttactattttgctaagggttgcagataaagatattactgtgcatcaggataaacattcgtatatagagctggcaaagcagtttcagttgccgagtaatttgacaatagagcgaaaaagtaccgcgcaagccttccaagaaatggggtattgtttatcttattcatctactatgctttttgaagctgaatgtaagggtatccctgttggtgttgttgcagacttaggcttttctaaatcctatgcaaatcagcattttttaggtagtggggttttagtttattttgatcaaatagatttcacttccccaaaaatagcagatccggattggcttgattgctatgctactaaaaaggtgattacaactgatgagtttaataagctattaaagcaggttgtgccattgcaacatgattaccaagaatatttatctgcggtgaatagtatagaatcaactaaaactatttttttaagaaaatttaaaaagttaattagggatcctaaaaagtttttttatgattctaaatggttgagaaaggtgatttaa

SEQ ID NO: 51971 - DNA, 954 bp, Neisseria meningitidis; identical to SEQ ID NO: 51970

SEQ ID NO: 51972 - DNA, 618 bp, Neisseria meningitidis; identical to SEQ ID NO: 47964

SEQ ID NO: 51973 - DNA, 618 bp, Neisseria meningitidis; identical to SEQ ID NO: 47964

SEQ ID NO: 51974 - DNA, 552 bp, Neisseria meningitidis; identical to SEQ ID NO: 43927

SEQ ID NO: 51975 - DNA, 558 bp, Neisseria meningitidis; identical to SEQ ID NO: 43928

SEQ ID NO: 51976 - DNA, 666 bp, Neisseria meningitidis; identical to SEQ ID NO: 43929

SEQ ID NO: 51977 - DNA, 1218 bp, Neisseria meningitidis; identical to SEQ ID NO: 43930

SEQ ID NO: 51978 - DNA, 570 bp, Neisseria meningitidis; identical to SEQ ID NO: 45138

SEQ ID NO: 51979 - DNA, 372 bp, Neisseria meningitidis; identical to SEQ ID NO: 36308

SEQ ID NO: 51980 - DNA, 321 bp, Neisseria meningitidis; identical to SEQ ID NO: 43935

SEQ ID NO: 51981 - DNA, 714 bp, Neisseria meningitidis; identical to SEQ ID NO: 43936

SEQ ID NO: 51982 - DNA, 501 bp, Neisseria meningitidis; identical to SEQ ID NO: 37165

SEQ ID NO: 51983 - DNA, 1185 bp, Neisseria meningitidis
atgacaccacaagtcctgaccatattaggcagtaccggcagcataggtgaaagcacgctggacgttgtctcccgccaccccgaaaaattccgcgtattcgcgctggcagggcataagcaggtcgagaaactggcggctcaatgtcaaacgttccaacccgaatatgccgtcgttgccgatgccgaatacgccgcccggcttgaagccctgttgaaacgcgacggcacggcgacgcaggttttacacggcgcgcaggcattggttgacgttgcctctgccgacgaagtcagcggtgtcatgtgcgccatcgtcggggcggtggggctgccttccgcgctcgcagcggcgcaaaaaggcaaaaccatttatctggcgaacaaagagacgctggtggtttccggcgcgttgtttatggaaaccgcccgtgcaaacggcgcggcagtgctgcccgtcgacagcgaacacaacgccgttttccaagttttgccgcgcgattacacaggtcgtctgaacgaacacggcatccgttcgattatcctgaccgcttccggcggcccgtttttaacgaccgatttaggcacgttcgacagcattacgcccgcccaagcggtcaaacaccccaattggagcatggggcgcaaaatctccgtcgattccgccaccatgatgaacaaaggtttggagctgattgaagcgcattggctgttcaactgtccgcccgacaaactcgaagtcgtcatccatccgcaatccgtgatacacagcatggtgcgctaccgcgacggctccgtgttggcgcaactgggcaatcccgatatgcgaacgcctatcgcttattgtttgggtttgcccgagcgcatcgattcgggtgtcggcgacctggatttcgacgcattgtccgcgctgaccttccaaaagcccgactttgaccgcttcccctgcctgaagctcgcctatgaagccatgaacgcgggcggggtcgcgccctgcgtattgaacgccgccaacgaagccgccgtcgccgcctttttggacggacagattaagtttaccgacattgccaaaaccgtcgcccattgtctttcacaagacttttcagacggcataggcgacataggggggctcttggcgcaagatgcccggacacgcgcacaagcgcgggcatttatcggcacactgcgctga

SEQ ID NO: 51984 - DNA, 747 bp, Neisseria meningitidis; identical to SEQ ID NO: 44728

SEQ ID NO: 51985 - DNA, 1128 bp, Neisseria meningitidis
atgaacacctcgcaacgcaaccgcctcgtcagccgctggctcaactcctacgaacgctaccgctaccgccgcctcatccacgccgtccggctcggcggggccgtcctgttcgccaccgcctccgcccggctgctccacctccaacacggcgagtggatagggatgaccgtcttcgtcgtcctcggcatgctccagtttcaaggggcgatttactccaaggcggtggaacgtatgctcggcacggtcatcgggctgggcgcgggtttgggcgttttatggctgaaccagcattatttccacggcaacctcctcttctacctcaccgtcggcacggcaagcgcactggccggctgggcggcggtcggcaaaaacggctacgtccctatgctggcagggctgacgatgtgtatgctcatcggcgacaacggcagcgaatggctcgacagcggactcatgcgcgccatgaacgtcctcatcggcgcggccatcgccatcgccgccgccaaactgctgccgctgaaatccacactgatgtggcgtttcatgcttgccgacaacctggccgactgcagcaaaatgattgccgaaatcagcaacggcaggcgcatgacccgcgaacgcctcgaggagaacatggcgaaaatgcgccaaatcaacgcacgcatggtcaaaagccgcagccatctcgccgccacatcgggcgaaagccgcatcagccccgccatgatggaagccatgcagcacgcccaccgtaaaatcgtcaacaccaccgagctgctcctgaccaccgccgccaagctgcaatctcccaaactcaacggcagcgaaatccggctgcttgaccgccacttcacactgctccaaaccgacctgcaacaaaccgtcgcccttatcaacggcagacacgcccgccgcatccgcatcgacaccgccatcaaccccgaactggaagccctcgccgaacacctccactaccaatggcagggcttcctctggctcagcaccaatatgcgtcaggaaatttccgccctcgtcatcctgctgcaacgcacccgccgcaaatggctggatgcccacgaacgccaacacctgcgccaaagcctgcttgaaacacgggaacacggctga

SEQ ID NO: 51986 - DNA, 558 bp, Neisseria meningitidis
atgatcaacgatattcaaaaaacagccgaaggcaagatgcagcgttcggtcgaagtactgaaagaaaatctggcgaaagtgcgtaccggccgcgcgcataccggcctgctcgaccaagtggaagtcgaatactggggcagcatggtccccgtcagccaagttgccaacgtaacgcttctggacgcgcgcaccatcggcgtgaaaccgtttgagggcaatatggcggccaaagtcgagaaagccatccgcgattcaaacttgggactgaacccggcagctgtcggcgacctgatccgcgtaccgatgcccatgctgaccgaggaacgccgcaaagacctgattaaagtcgtacgcggcgaagcggaagaaggccgcgtctctatccgcaacgtgcgccgcgatgccaacgaccacatcaaaaaactcctcaaagacaaagaaatttccgaagacgaggcacgtcgcggcgaagaagcggttcaaaaactgaccgacaaatacattaccgaagccgacaaactcctgactgccaaagaagaagatttgatggcaatttaa

SEQ ID NO: 51987 - DNA, 585 bp, Neisseria meningitidis
atgcacatactgaccgccggcgtggacgaggcagggcgcgggcctttagtcggcagcgtgtttgccgccgccgtcatccttccggaaatattcgacctgcccggactgaccgactccaaaaaactcagcgagaaaaaacgcgacgcgcttgccgaaatgataaaaaatcaggcggttgcgtggcacgttgccgccgcctcgcccgaagaaatcgccagcctcaacatcctgcacgccaccatgctcgcgatgaaacgcgccgttgacggtttggctgtgcgtcccgaaagaatattcatcgacggcaaccgcattcctgaacatttgaacatccctgccgaagccgtcgtcaaaggcgacagcaaaatcatcgaaatctccgccgcatccgttttggcaaagaccgcacgcgatgcggaaatgtacgcactggcgcaacgccatccccaatacggtttcgacaaacacaaaggttacggcacgaagcagcatctggaagccctcaaacaatacggcgtgctgcccgaacatcgccgcgacttcgcccccgtcagaaacctgctcgcgcagcagacgctgttttaa

SEQ ID NO: 51988 - DNA, 1887 bp, Neisseria meningitidis
atgatttaccccaaaacctacgacgttatcgtcgtcggcggcggacacgccggcacggaagccgcgcttgccgccgcacgcatgggcgcgcagacgcttttgctctcacacaatatcgaaacgctcggacaaatgtcgtgcaacccttccatcggcggcatcggcaaagggcatttggtgcgcgaactcgacgcgctcggcggcgcgatggcgttggcaaccgacaaatccggcatccagttccgccgtctgaacgccagcaaaggcgcggcagtacgggccacgcgcgcgcaggcggatcgtatcctatataaagccgccatccgcgaaatgttggaaaaccaagaaaacctcgaccttttccaacaagccgtcgaagacgtaacgctcgatggcgaccgcatttcaggcgtaatcaccgcgatgggcgtggagtttaaagcacgcgccgtggtgttgaccgcaggcacgtttttgtccggcaaaatccacatcggtttggaaaactacgagggcggacgcgccggcgaccccgccgccaaatcgctgggcggacgtttgcgcgaattgaacctgccgcaaggccgtctgaaaaccggcacgccgccgcgcatcgacggacgcacgattgacttctcccaactgaccgaacagcccggcgacacgcccgttcccgtcatgtccgtacgcggcaacgccgaaatgcacccgcgccaagtgtcctgctggattacgcataccaacacgcaaacccacgacatcatccgctcaggcttcgaccgcagcccgatgtttaccggcaaaatcgaaggcgtgggcccgcgttattgtccgtctatcgaagacaaaatcaaccgcttcgccgacaaagacagccaccagattttcctagaacccgaaggcctgactacgcacgaatactaccccaacggtatctccaccagcctgccgttcgacatccaaatcgcgctcgtccgcagtatgaaaggtttggaaaacgcccatatcctgcgccccggctacgccatcgaatacgactacttcgatccgcgcaacctcaaagcaagcctcgaaaccaaaaccattgccggattgtttttcgccgggcaaatcaacggtacgacaggttatgaagaagccgccgcgcaaggactgctggcaggcgcgaacgccgtgcaatacgtccgcgaacaagacccgctcctgctgcgccgcgaacaagcctatctcggcgtattggtggacgacctcatcaccaaaggcgtgaacgaaccctaccgaatgttcaccagccgtgccgaataccgcctgcaactcagggaagacaacgccgatatgcgcctgaccgaagacggctacaaaatcggcttggtgggtgaagcgcaatggcgcatgttcaacgaaaaacgcgaagccatcgaacgcgaaatccaacgtttgaaaacaacgtggtacacgccgcaaaaactcgccgaagacgaacaaatccgcgtattcgggcaaaagctcagccgcgaagccaacctgcacgacctcctgcgccgcccgaacctcgactacgccgcgctgatgacgctcgaaggcgcgatgccgtctgaacgcctctccgccgaagtggtcgaacaagtcgaaatccaagtcaaataccaaggctatatcgaccgccaaaacgaagaaatcgacagccgccgcgacatcgaaaccttaaagctgcccgaggatatcgattacagcaaagttaaaggtttgtcggcagaagtgcagcaaaagctcaaccagcacaaacccgaaaccgtcgggcaggcaagccgcatttccggcgtaacccctgcggcagtggcattgctgatggtgcatttgaagcgcgggtttaaagacgcgaaataa

SEQ ID NO: 51989 - DNA, 2760 bp, Neisseria meningitidis
atgaaaagaatgttattcaacgcaacgcaggccgaagagctgcgcgttgccatcgtcgacggacaaaacctgctggatttggacatcgaaacgctgggcaaagaacagcgcaaaggcaatatctacaaaggcatcattacccgcatcgagccgtcgctggaagcgtgtttcgtggattacggaaccgaccgccacggcttcttgccgtttaaagaagtatcgcgttcgtatttccgcgactacgaaggcggcagggcgcgtattcaggacgtgctcaaagaaggcatggaagtcatcgtccaagtcgaaaaagacgagcgcggcaacaaaggcgcggcgctgaccaccttcatcagcctcgccggacgctatctggtattgatgccgaacaacccgcgcggcggcggcgtatcccgccgtatcgaaggcgaagaacgtcaagaactcaaagccgctatggcgcaactcgacattccgaacggcatgagcatcatcgcccgtaccgccggcatcggccgcagcgcggaagagttggaatgggatttgaactatctcaaacaactctggcaggcgattgaagaagcaggaaaagcgcatcacgacccttacctgctctttatggaaagctcgctgctcatccgcgccatccgcgactatttccgccccgacatcggcgaaattctggtggacaatcaagaagtttacgaccaagttgccgagttcatgagctacgtcatgccgggcaatataggccgtctgaaactctacgaagaccacacgccgctgttttcccgcttccaaatcgaacaccaaatcgaaagcgcgttttcgcgcagcgtcagcctgccctccggcggcgcgatcgtcatcgaccataccgaagccctcgtctccatcgacgtgaactccgcacgcgccactcgcggcgcagacattgaagacaccgcgttcaaaaccaatatggaagccgccgaagaagtcgcccgacaaatgcgcctgcgcgacttgggcggcttggtcgtcatcgacttcatcgacatggaaaaccccaaacaccagcgcgatgtggaaaacgtcctgcgcgacgcgctcaaaaaagaccgcgcccgcgtacagatgggcaaactctcccgtttcggacttttagaattgagccgccaacgtttgaaaccggctttgggcgaaagcagccacgtcgcctgtccgcgctgcgctggcactggtgtcatccgcggcatcgaatccaccgccctgcacgttttgcgcatcattcaagaagaagcgatgaaggacaacaccggagaagtgcgcgcccaagtgcccgtcgatgtcgccaccttcctgctgaacgaaaaacgcgccgagctgtttgcgatggaagagcgtttggatgtcaacgtcgtcctgattccgaacatccacctcgaaaatccgcactacgaaatcaaccgcatccgcaccgacgacgtagaagaagacggcgaaccgagctacaaacgcgtcgccgagcctgaagaagacgaatccgccaaaccgttcggcggcgaaaaagccaaagccgcccgtcccgaacccgccgtcaaaggcgtgcgccacaccagccccgccccgactgccgcccccgagaaaaaaacctcctggtgggacagcttcaaagcttggctcaaacgcattttcggcggcagcgaaacccaagccgcgcccgctgccgaaacctccgaaaaacgcagcacggcaaaccgcagcggcagccgcgccaacaaccgccgccaaaacccgcgccgcagcaaacgcgaaggcagcaaagtagaagtccgcgaagtggcaggcaaaactgccggacaggaagcgcgcgccgacaaagccgaaacgcgcaacaacggcaaccgccgccgcaacgaacgcggcgaccgtgccgccggacgcgccgacgaagcggaaatccaagaccgcaacatacagcctgccgcaaccgttgcagatgccgcaccgtccgaaaccgaagtgcaaaccggaaaacgccgccgcaacggcagccgcagcgaacgcggccaaaccgcgccggaaaccgccaccgttgccgaaacaaccgttcagacagcggaaaacacgccgtccgaaccgcataccgcagaagacaaaggcagcaagcccaaatccgaacgcaaccgccgcgaacgcgacagccgagatgccaaagaacgccgcgagcgcaacaatcagcgcgaccgccgtcaaaacggcaaaaaacgcaatattccgtctgccgccaaaatcgagcagtacctgaatattcacgacaccgccgacaaagtccgttccgccgccgcgcacgttttcggcgaaaccgacgcaaacgcgccgattactgtcagcattgccgatccggttgcagaaagggatcttccgacagcatctcccgccgtttcaaacggcgacgcaccggtttatgatgcggcggaaaaaatccgccgtgccaccgccgccatcctgcccgaaggcgcgacaccgaaagccgaagcacaggaaatgccgtctgaaaccgcaacctttacggctgcggcggaacaggcacgggaaaccgcacaaaccggcggactcgtcctgatcgaaaccgaccctgccgcattgaaggcatgggcggcacaacccgaagtccaagccggacgcggtttgcgccgttccgaacagcccaagccgtctgaagtcgcaaccgtccctgccgaagaaatgatccaagtcgaaacccggcaaggctga

SEQ ID NO: 51990 - DNA, 1977 bp, Neisseria meningitidis
atgaacgaattttcgcttgcccctattgtggttgttttgctggtgtcggtcattacggtgatcctgtgccgcaagttcaacattccctccatgctgggctacctgctggtgggctttttggcggggcccggtatgctcagcctgattccgaaaagccatgcgacggattatttgggcgaaatcgggattgtgttcctgatgttcagcatcggtttggagttctcgctgcccaagttgagggcgatgaggcggctggtgttcgggctgggcggtttgcaggtcggcgttacgatgctgtcggtaatgggcatactgatgctgacgggcgtgccgttcaattgggcgtttgccgtgtcgggcgcgttggcgatgtcgtccacggcgattgtgagccggattttgtcggaaaagacggaattggggcagccgcacggtcagatggcgatgggcgtgctgctgatgcaggacatcgccgtcgtgccgctgatgattctgattcccgcgctggcgggcggaggggacggaaatatttgggcggccttgggtttggcgtttgcaaaaatgctgctgacgctggggctgctgtttttcgtcggcagcaaaattatgtcgcgatggttcaggatggtggcaaaacgcaaatcgtccgaactctttatgatcaatgtgctgctggtaaccttgggtgtggcttatctgactgagctggaaggtttgtctatggcgttgggcgcgtttgtggcggggatgctgctttcggaaacggaataccgtttccaagtcgaagacgacatccgcccgttccgcgatattttgctcggctttttctttatcacggtcggcatgaagctggacattcaggcattgatcggcggctggcggcaggtattgatgctgttggcaatgctgctggtgttgaaggcactggttgtgtttgccattgccttcaaaatgaaacattcggtcggcgacagcctcaaaacggctttgtatctcgcgcagggcggcgagttcggcttcgtgatgctggccattgccgggcagcttgatatggtttcgccagaatgggaacaggcggcgacggcggcggttctgctgtcgatgattatcgcgcccttcctcttgggcggcagcgatgcgctggtcgggcgtttggtcaagtcaagctgggacatgaagtcgctcgatctgcacagtatgctggtagaaaccatgagcaagtccgaccatgtgctgattgtcggcttcggcaggggcgggcagacggtcggacgcgtccttgcccaagaggatattccgtatttcgcgctcgacttggacattgcgcgggtgcaggttgccagaagtgcgggcgaaccggtgtcgttcggcgatgcgaaacgcagggaagtattggaagccgccggtctgggacgggcgaaaatggtggtggttacgctcaacaatatgcacgaaacgcaacacgttttagacaatgtgctgtccatgtatcccaatatgcccgtatatgtgcgcgccaccaacgacgattatgtgaaaacgtttaccgatataggtgcggaagaagccgtgtcggacaccaaagaaaccggactcgtgctggcaggctatgcaatgttaggcaacggcgcgtcgtatcggcacgtctatcagacgatggcaaatatccgccacagccgttatgccgcgttggagggactgtttgtcggtagtgatgatgaggcaggattcggcgaaaatggcgaaaccgtccgccacgcctttcctttggctgcagaagcatacgccgtcggcaaaacagtcggcacgcttccgatggcggcttacggcatcaaactcttgttcgtccgccgccgcaccggccggattgaaaacccggatgcctcgtttacattgaaaggcggtgacgtgttggtggtcgcaggcaaaaaagaagaaattatctcttttgaaaactggagtttgcagggaatataa

SEQ ID NO: 51991 - DNA, 1365 bp, Neisseria meningitidis
ttcaaaatcggtatcggcccttctagttcgcatacggtcggcccgatgaaggtagccgccgcctttgcgacaggtttggatgcacaggctgttcgcatcgtcatcgacatttacggctcgctcgcactgaccggatacggacacggtacatttgacgcgctgatgctcggtttggaaggcagcctgccgcacgacatcccgcttgccggcattcccgaacgcctcgaacgcatccgcacgcagcacatcctccggctcaacgggcaagaaatccgcttcatccccgaccgcgacctgaacatacgcggcaatcaagtgctgcccaaacaccccaacggcctgcgatttaccgcctatgcttcagacggcatcgtcttgaaagaacaggtttattactcgaccggcggcgggtttgtcgttaccggagaagatttcgagcggcagtcggaaacggaaaaaactgttccttatccttacaacagttgtgccgagctgcttgaccgatgccgtctgaaccggctcgacatctccgaagtcgtgttggcaaacgaagccgcgcttgccggatgcagtgcaaacgaaatccgccgccgcgttgccggcgttgccgatgtgatggaaggctgcatcaaacgcggtttggcggcagacggcgagctgcccggcggattgaacgtccgccgccgcgccccgcatcttgccaccaagctcaaagtcctgcgcgaaaccgaaatcgtcaacacccagctctggccgatggtgtacgccatggcggtcaacgaagaaaacgccgccggcggacgcgtcgttaccgccccgaccaacggggcggcaggcatcattcccgccgtattgcactatttccgcaagttcaacccccacgccacacaggagcgcgtcgaaaacttcctgctcaccgccggcgcaatcggcatcctctacaaaaccaacgcctccatttccggtgcggatgtcggctgtcagggcgaagtcggcgtagcgtgttcgatggcggcgggcgcatacgccgaagtcatcggcggcacgcccaaacaagtggaaaacgccgctgaaatggcgatggaacaccatttggggctgacttgcgaccccgtcggcgggctggtgcaaatcccctgtatcgaacgcaacggcatcgccgccgaaaaagccctcaaactcggcacgctcgcgcttttggaagacggcacggacaaaaaagtctcgctcgacgaagtcatccgaaccatgctgcaaaccggccgggatatgaaggcgacctacaaagaaacctcgcttgccggactcgccgccacgctccggaaaagagccgtccccgtatccgtgcgcgtggtcgagtgctga

SEQ ID NO: 51992 - DNA, 873 bp, Neisseria meningitidis
atggaaatatggaatatgttggacacttggctcggtgccgtcccgatacgtgcggaggcggtcgaatccgtggcggtggtcgcggctttgctgctggcgcgcgcccttctgttgaatatccacttcaaacggcatccggatttcggcatcgaaagcaagcggcggtttttggttgccagccgcaatataacgctgcttttggtgctgttttcgctggcatttatctggtcggcgcaaatccaaacgctggctttgtcgatgtttgcggtggcggcggcggtcgtcgtggcgacaaaggaactgattatgtgtctgtcgggcagtattttaaggtctgccacccagcaatactcggtcggcgactatatcgaaatcaacggcctgcgcgggcgcgtggtcgacatcaacctgttgaacacgctgatgatgcaggtcggtccgaaccccctggtcggacagcttgcgggaaccaccgtttctttccccaacagcctgttgttgagccatcccgtgcgccgcgacaatattttgggcgactacgtcatccatacggtcgaaatccccgtccccatccatttggattcggatgaagccgtatgccgtctgaaagccgtactcgagcccttgtgcgcgccctacatccccgccatccaacggcatttggaaaacgtgcaggcggaaaaactgtttatcacgcccgccgccagaccgcgcgttacccgcgtgccgtacgatgacaaggcataccgcatcatcgtccgcttcgcctcccccgtttcaaagcggctggaaatccaacaggcggttatggacgaatttttgcgcgtacaataccgcctgttaaattaccccgccggctccgaaacactttaa

SEQ ID NO: 51993 - DNA, 360 bp, Neisseria meningitidis; identical to SEQ ID NO: 51146

SEQ ID NO: 51994 - DNA, 621 bp, Neisseria meningitidis; identical to SEQ ID NO: 37903

SEQ ID NO: 51995 - DNA, 1452 bp, Neisseria meningitidis
atgctttctttccttagcggcttattgagcttgggtatagaagtcttgtgggtaaggatgttttcgttcgcagcacagtccgtgcctcaggcattttcatttactcttgcctgttttctgaccggtatcgccgtcggcgcgtattttggcaaacggatttgccgcagccgctttgttgatattccctttatcgggcagtgcttcttgtgggcgggtattgccgactttttgattttgggtgctgcgtggttgttgacgggtttttccggcttcgtccaccacgccggtatcttcattaccctgtctgccgtcgtcagagggttgattttcccgctcgtacaccatgtgggtacggatggcaacaaatccggacgacaggtttccaatgtttatttcgccaacgttgccggcagtgcattgggtccggtccttatcggctttgtgatacttgatttcttgtccacccaacagatttacctgctcatctgtttgatttctgctgctgtccctttgttttgtacactgttccaaaaaagtctccgactgaatgcagtgtcggtagcagtttccctaatgttcggcatcctcatgttcctactgccggattctgtctttcaaaatattgctgaccgtccggatcggctgattgaaaacaaacacggcattgttgcggtttaccatagagatggtgataaggttgtttatggggcgaatgtatacgacggcgcatacaataccgatgtattcaatagtgtcaacggcatcgaacgtgcctatctgctaccctccctgaagtctggcatacgccgcattttcgtcgttggattgagtacaggttcgtgggcgcgcgtcttgtctgccattccggaaatgcagtcgatgattgttgcggaaatcaatccggcataccgtagccttatcgcggacgagccgcaaatcgccccgcttttgcaggacaaacgtgttgaaattgtattggatgacggtaggaaatggctgcgtcgccatcctgatgaaaaattcgacctgattttgatgaatacgacttggtactggcgtgcctattccaccaacctgttgagtgcggaatttttaaaacaggtgcaaagccaccttaccccggatggtattgtaatgtttaataccacgcacagcccgcatgcttttgctaccgccgtacacagtattccctatgcataccgctatgggcatatggtagtcggctcggcaaccccggtagttttccctaataaagaactgctcaagcaacgtctctcccggttgatttggccggaaagcggcaggcacgtatttgacagcagcaccgtggatgctgcagcacaaaaggttgtctctcgtatgctgattcagatgacggaaccttcggctggggcggaagtcattaccgacgataatatgattgtagaatacaaatacggcagagggatttaa

SEQ ID NO: 51996 - DNA, 1077 bp, Neisseria meningitidis; identical to SEQ ID NO: 43947

SEQ ID NO: 51997 - DNA, 1077 bp, Neisseria meningitidis; identical to SEQ ID NO: 43947

SEQ ID NO: 51998 - DNA, 342 bp, Neisseria meningitidis; identical to SEQ ID NO: 37907

SEQ ID NO: 51999 - DNA, 342 bp, Neisseria meningitidis; identical to SEQ ID NO: 37907

SEQ ID NO: 52000 - DNA, 1857 bp, Neisseria meningitidis
atgttgaacaaaatattttcctggttcgagtcccgaatcgacccttatcccgaagccgccccgaaaacgcctgaaaaaggactgtggcggtttatctggagcagcatgaccggcgtgcggaaatggatagccgccctggctgcgctgaccgccggcatcggcattatggaagccctggtttttcaatttatgggcaaaatcgtggagtggctcggcaaatacgcgcccgccgaactgtttgccgaaaaaggttgggaactggcggcaatggcggcgatgatggtgttttcggtcgtgtgggcgtttgccgcgtccaacgtgcgcctgcaaacccttcagggcgtgttccccatgcgcctgcgctggaacttccaccgcctgatgctgaaccaaagcctcggtttttatcaggacgaatttgccggacgcgtgtccgccaaagtcatgcagaccgcgctggcgttgcgcgacgcggtgatgacggttgccgatatggtcgtttatgtgtcggtgtatttcattacctccggcgtgattctcgcctcgctcgactcatggctgctgctgccctttatcggctggattgtcggtttcgcttcggtgatgcgcctgctgattcccaaattggggcaaaccgccgcatggcaggcggatgcccgctcgctgatgaccggccgcattaccgatgcctattccaatatcgccaccgtcaaactcttctcccacggcgcgcgtgaagccgcctatgccaagcagtcgatggaagaatttatggttacggtgcgcgcccaaatgcggctggcgacgctgctgcattcgtgcagcttcatcgtcaacacctccctgaccctctccaccgccgcactgggcatctggctctggcacaacgggcaggtcggcgtgggcgcggtcgccaccgccaccgccatggcgttgcgcgtcaacggtttgtcgcaatacattatgtgggaatccgcgcggctgtttgaaaacatcggcaccgtcggcgacggcatggcaaccctgtccaaaccgcacaccatcctcgacaagccgaacgccctgccgctgaaagtgtcgcaaggcgaaatcaagttcgaacacgtcgatttctcctacgaagcgggcaaaccgctgctcaacggcttcaacctcaccatccgacccggcgaaaaggtcggcttgatcggacgcagcggcgcgggcaaatccaccatcgtcaacctgcttttgcgcttctacgaaccgcaaagcggcacggtttcgatcgacgggcaggacataagcggcgttacccaagaatctttacgcgcccaaatcggtttggtcacgcaagatacctcgctgctgcaccgttccgtgcgcgacaacattatttacggccgccccgacgcgaccgatgccgaaatggtttctgccgccgaacgcgccgaagccgccggcttcatccccgaactttccgatgccaaagggcggcgcggctatgacgcgcacgtcggcgaacgcggcgtgaaactctccggcgggcaacgccagcgcatcgccattgcccgcgtgatgctcaaagacgcgccgattcttcttttggacgaagccaccagcgcgctcgattccgaagtcgaagccgccatccaggaaagcctcgacaaaatgatggacggcaaaaccgtcatcgccatcgcccaccgcctctccaccatcgccgcaatggacaggctcgtcgtcctcgacaaaggccgcatcatcgaagaaggcacacacgccgaactcctcgaaaaacgcgggctttacgccaaactctgggcgcaccagagcggcggcttcctcaacgaacacgtcgagtggcagcacgactga

SEQ ID NO: 52001 - DNA, 726 bp, Neisseria meningitidis
atggattttctctcttgttggcggcgcatcgcagacgcgcccactatcaggcgttgcgtattatgccacggttcgtccggcgtttcagacggcatctgcgccggctgccgcaacgatttggcggcataccgcaccgacgcggcaaacagctgccccctgtgtttcaggcacgttcaaggcggcgcggtgtgcggcggctgtcagaaaaaaccgcccgcattcgaccggatgtgggcttcgctgcattacgaaccgcccgtcagcaatatgatacacgcgctgaagcacttggctgatttgagcatggtgcagccgctggcagacctgatgatgcagaatccgcccgaccggcttgcagacgaatgcttcgatttcgtcctgcccgttccgctaagcagggagcggctgctgcaacgcgggttcaaccaaagtgaaagcatcgtcgggttgttggcacaacgctacggctggcagatactgccccgacacaccgtattccgacaccaccgcccgccgcaaagcacgctcaaaggcggcgaacggcggcgaaacatcaaaaacgcctttgaaatccgcacaccgataccggaaaactgtaatattctgttaatcgacgatgtctttaccaccggcgcgacgctggacgaattggcaaagacgctgaaaaaatcgggcgcaaaccgaatctgctgctggacgctggcacgcacgccaatgaaaaaataa

SEQ ID NO: 52002 - DNA, 1110 bp, Neisseria meningitidis
atgatgaaaatcaaagccctgatgattgccgccgcattgctggcagcagccgatgtccacgccgcaccgcaaaaggcaaaaaccgcatccgccaaagctgccaaagctgccaaagctgccaaagttgccaaagttgccaaagttgccaaagttgccaaagttgccaaagttgccaaagttgccaaagttgccaaagttgccaaagttgccaaagttgccgccacggcgcaaaaagaagccgcacccgcacaacagcagggcggtatccgcttttcagacggcattgccgccgttgccgacaacgaagtcatcacgcgccgccggcttgccgaagccgttgccgaagccaaagccaacctgcccaaagacgcgcagataagcgaatccgagctgtcccgacaggtgctgatgcagcttgtcaaccaatccctgattgtacaggcgggcaaacgccgcaacattcaagcaagcgaagcggaaatcgatgccgtcgtcgcaaaaaatcccgccctcaaaaacctcagccccgcccaacgccgcgattttgccgacaacatcattgccgaaaaagtccgccagcaggcagtgatgcagaacagccgcgtgagcgaagctgaaatcgatgccttcctcgagcaggcgcaaaaacaaggcatcaccctgcccgaaggcgcaccgttgcgccaataccgcgcccaacacatcctgattaaagccgacagcgaaaacgccgccgtcggcgcggaaagcaccatccgcaaaatctacggagaggcccgcagcggcacagacttttccagcctggcgcgccaatattcgcaagacgcgagcgcgggcaacggcggagatttgggctggtttgccgacggcgtgatggttcccgcctttgaagaagccgtccacgcgctcaaacccggacaggtcggcgcgcccgtccgcacccaattcggctggcatatcatcaaattgaacgaagtgcgcgatgccggcacacctcaggaacgtatccgcaattccgtgcggcaatacatcttccaacaaaaagccgaacaggcaaccgtcaacctgttgcgtgacctgcattccggcgcgtatgtcgacatccgctaa

SEQ ID NO: 52003 - DNA, 645 bp, Neisseria meningitidis; identical to SEQ ID NO: 37921

SEQ ID NO: 52004 - DNA, 249 bp, Neisseria meningitidis; identical to SEQ ID NO: 43952

SEQ ID NO: 52005 - DNA, 195 bp, Neisseria meningitidis; identical to SEQ ID NO: 40091

SEQ ID NO: 52006 - DNA, 2094 bp, Neisseria meningitidis
atgctgccaacccaacccaacccaacccaacccaacccaacccaacccaacccaacccaacccaacccaacccaacccaacccaacccaacccaacccaagccctgatctaagcgacacagccggggcgaacactgaggcaatctacacttcagacggcattaccgccaactctacccaactcgaacagctcaaaaaactgtttcccgcctgttttgacgcagacggaaatttccttatcgacagattacaagccgaaatcgcgccgcagaccgacatcggacgcgaattttacgaaatgaactggctgggcaaatcatatgctcgcctgcttcgcaacctgccgcccgaaaccctgataagtgaagacaagacgcacaacgccaagcccgaaaatgcaggcagccaaaacctgctgattcgtggcgacaatctagaagtgttgaaacacttaaaaaacgcctacacaaacagcgtgaagatgatttacatcgacccgccctaaaacaccggatcagacggctttgtctatcaggacgaccgcaaattcacacccgctgaacttgcccgcctagccaatattgatgaagacgaagccgcgcggattttagatttcaccgacaaaggctcaaactcgcacagcgcatggctcacctttatgtatccgcgcctgtatgtcgcccgcgaactgttaaaggacgacggtgtgatttttatctcgattgacgataacgaagcggcgcagttgaaattgttgtgtgatgaagtgtttggggaagggaattttgttgcacaattgccttggcgaaaaagaacagctaaatcagatgtgccttttggtatttcgcaggattatgaatggatatttgtattcgcaaaatcttgccaatttattgcagcaactaaaggcaaggaacgacgctattatgagactgatgatttccccgatcgtccttggcgtacccacgacttaacgaaacaaacaactgcggcggaaaggccaaatagttttttcacaatggttgatcccaagacaggaaaaaaatatccagcaaatccaaatgcaacttggcgtgtaaccaaagatacatttcaagattattataataaaggaaaaatcgttttccctgatgattatgatttcttaaatatcagcaatccagttatgcgttactttaaagatgacgacatgaaaaaagctggcgaggattttggcaaagtagctgtaagcagtagattacctgaaaatgttggtacattagccgatgcagtagccgaatatttggctatttttagtaggacgctacctgaaaatatcggaatgactaaagaaggcacaaaagaaatcacagatttatttggtagcaaaatatttaccttccccaagcctagtcaattgattaaatttttagtttcaataagttcaaagagtaatgacctaatcctagacttcttcgcaggcagcggcacaaccgcccacgccgtgatgcagcttaacgccgaaggacaaaacggtaaccgccgctatatctgtgtacagcttcccgaaaaaaccgctgaaaaatccgaagcccgtaaagcaggctacccgaccatcttcgacatcaccaaagcccgcatagaaaaagccgccgccaaaatccgcgtcgaacatcccgattacacgggcgattcgggcttcaaaatctttcaaacggcagacaatttcaggcagcatccggacaaggatttttcgcccgaacaaccggatttgccgcttaacgatgaattaagcgaagaacagctgcaaacgcttctgaccacctggacgctgtatgacggggcggcactgaccacgccggttgagcctgtgcggttaggggcttacacggcgtatctgtgcgaaaaacggctgtatctgatgaatgccggttttacttccgccgatttgttggcgtttatccgcaagctggacgacgatgcggatttcaatcccaaccgcgtgattgtattcggcagcaatatggcaagcgccatgcagcacgaacttgaccaggcggttcgcggttatgccaataaaaaagagattgagttgaatgtggttatcagggtttga

SEQ ID NO: 52007 - DNA, 1422 bp, Neisseria meningitidis
atgaccaccatctacaacacccttacccgccaaaaagaaccctttgcccccatcgaccctaaaaacgtgcgtatgtacgtttgcggcatgactgtttacgactattgccacttaggccatgcccgtgtgatggtggtgtttgacatgattgcccgctggttgcgcgagtgcggttatccgctcacttatgtgcgcaacatcaccgacatcgacgacaaaatcattgcccgcgcggctgaaaacggcgagactatcggcgaactgaccgcgcgtttcattcaggctatgcacgaagatgccgatgctttgggtgtgttgcgtcccgatatcgagccgaaggcgacggaaaacatcccgcaaatgattgccatgattgaaaccctgattcaaaacggcaaggcatatcctgccgcaaatggcgacgtttactacgccgtgcgcgagtttgccgcttacggacaactgtcgggcaaatcgttggacgacctgcgcgcgggcgaacgcgtggaagtggacggtttcaaacgcgatccgcttgattttgtattgtggaaagcggcgaaagcaggcgaaccggcgtgggaaagcccgtggggcaacggccgtccgggttggcacattgaatgctctgccatgagtgaaaacctgttcggcgatacgttcgacattcacggcggcggcgcggatttgcagttccctcatcatgaaaatgaaatcgcccaaagcgtcggcgcgacggggcatacctgcggtcatcatcacgcgcaaacccaccacgggcaaagcatcgccagccacgtcaaatattggctgcacaacggctttatccgcgtggacggcgaaaaaatgtccaaatcactgggcaacttcttcaccatccgcgaagtgttgaaacaatacgaccccgaagtcgtgcgcttcttcatcctgcgcgcccactaccgcagcccgttgaactattccgacgcgcatttggacgacgcgaaaggcgcgttgacccgtctatacaccaccttgaaaaacacgcctgccgccgcgtttgatttgtctgaaaacgccaacgactacacccgccgcttctacgccgccatgaatgacgatttcggcacggtcgaagcggttgccgtgctgttcgaactggcaggagaagtgaacaaaaccaatgacgcacagctcgccggctgcctgaaagccttgggcggcatcatcggcctgctgcaacgcgacccgaccgagttcctgcaaggcagcgcagcttcagacggcctctccaacgaagaaatcgaagacttgatcgcccggcggaaacaggcgcgcgccgataaaaactgggcggaatccgaccgcatccgcgaccttctgaacgaacacaaaatcattttggaagacaacgccggcggcacgacttggcggcgcggttaa

SEQ ID NO: 52008 - DNA, 1395 bp, Neisseria meningitidis
atgaccgtcaaaacccgtttcgcccccagcccaaccggctacctgcacatcggcggcgtacgcaccgccctgttttcttgggcgtttgcccgccatcataaaggcgaattcttattgcgcatcgaagacaccgacttggcgcgctctactgccgaatccgtcaacatcatcctcgacggcatgaaatgggtcggactcgattacgacaacgccggcaacgtcgtgtaccaaacccgccgtttcgaccgctataaagaagtcatcgccgaacttttagaaaaaggcgatgcctactactgctattgcagcaaagaagagttggaagccatgcgcgagaaagccgaaaaagaaggcacggcgacttacgaccgccgctggcggccggaagcaggcaaaaccctgcccgaaatccctgccggcgtgcaacccgtcgtccgcttcaaaacgcctttggatggcgtaaccaagtggacggacttggtcaaaggcgaaatctccatccccaacgaagcactcgacgacctgattatcgcccgcgccgacggcacgccgacctacaacttctgcgttgtcgtggacgactacgacatgggcgttacccacgttatccggggcgacgaccatgtgaacaacaccccgaaacaaatcaacatcttaaaagccatcggcgctaccctgcctgaatacggccacctgccgatgattcttaacgaacaaggcaaaaaaatctccaaacgcagcggcgataccgttgccattaccgatttcggcgcgatgggcatcctgcccgaagccatgctcaactatctggcacgtttgggctgggcgcacggcgacgatgagttcttcacgatggaacaatttatcgaatggtttgatttgaaagacgtttctccatctccaagccgcatggatttgaagaaactctactggatcaacggcgaacacatcaaaatcacgcccaacggcaaactcgccgaactcgtcaaaccgcgtctcgctctgcgcgatatccatgaaactgaaaaacctgcattggaagacgtgttggcactggtcaaagaccgcgcccaagacctgaacacacttgccgacgagtgcctctacttctacgtcaaacaaacgcctactgaagcggacgtgcagaaacactgggacgatgaagccgccgcccgtatgctgcgctttgccgaacgcctcgaagggctggaagactggaatgccgaagccatccacgacctcttcaaacccttctgcgacgaagaaggcattaaaatgggcaaactcggcatgcccctgcgccttgccgtctgcggtacggcgaaaacccccagcgtcgatgctgtgttggcattaatcggcaaagaagaagtgttgaaacgcatccgcgcttaa

SEQ ID NO: 52009 - DNA, 1326 bp, Neisseria meningitidis
atgaaaaaatacctattccgcgccgccctgtacggcatcgccgccgccatcctcgccgcctgccaaagcaagagcatccaaacctttccgcaacccgacacatccgtcatcaacggcccggaccggccggtcggcatccccgaccccgccggaacgacggtcggcggcggcggggccgtctataccgttgtaccgcacctgtccctgccccactgggcggcgcaggatttcgccaaaagcctgcaatccttccgcctcggctgcgccaatttgaaaaaccgccaaggctggcaggatgtgtgcgcccaagcctttcaaacccccgtccattcctttcaggcaaaacagttttttgaacgctatttcacgccgtggcaggttgcaggcaacggaagccttgccggtacggttaccggctattacgaaccggtgctgaagggcgacgacaggcggacggcacaagcccgcttcccgatttacggtattcccgacgattttatctccgtccccctgcctgccggtttgcggagcggaaaagcccttgtccgcatcaggcagacggggaaaaacagcggcacaatcgacaataccggcggcacacataccgccgacctctcccgattccccatcaccgcgcgcacaacggcaatcaaaggcaggtttgaaggaagccgcttcctcccctaccacacgcgcaaccaaatcaacggcggcgcgcttgacggcaaagccccgatactcggttacgccgaagaccctgtcgaacttttttttatgcacatccaaggctcgggccgtctgaaaaccccgtccggcaaatacatccgcatcggctatgccgacaaaaacgagcatccgtatgtttccatcggaaaatacatggcggataagggctacctcaaactcggacaaacctccatgcagggcattaagtcttatatgcggcaaaatccgcaacgcctcgccgaagttttgggtcaaaaccccagctatatctttttccgcgagcttgccggaagcagcaatgacggtcccgtcggcgcactgggcacgccgttgatgggggaatatgccggcgcagtcgaccggcactacattaccttgggcgcgcccttatttgtcgccaccgcccatccggttacccgcaaagccctcaaccgcctgattatggcgcaggataccggcagcgcgattaaaggcgcggtgcgcgtggattatttttggggatacggcgacgaagccggcgaacttgccggcaaacagaaaaccacgggttacgtctggcagctcctacccaacggtatgaagcccgaataccgcccgtaa

SEQ ID NO: 52010 - DNA, 1371 bp, Neisseria meningitidis
atgccgcaaaacactttaaacatcgtcatcctcgccgccggcaaaggcacgcgcatgtattccaaaatgcccaaggttttgcacgaaatcggcggcgaaacaatgctcgggcgcgttatcgacaccgccgccgcgctgaatccgcaaaacatctgcgtcgtcgtcggccacggcaaagagcaagttttggacaccgtcaaacgcgatgtcgtctgggttgaacaaaccgaacagctcggcaccggccacgccgtcaaaaccgccctgccccaccttgccgccgaaggccgcacgctggtgttgtacggcgacgttcctttaattgacgttgaaaccctcgaaaccctgctcgaagccgcaggcaacgaagtcgggctgttgaccgacgtgcccgccgacccgtcaggtttggggcgcatcatccgcgacggcagcggcagcgtaaccgccattgtcgaagaaaaagacgcaagtgccgcccaaaaagccgtgaaagaaaccaacacaggcattctcgtcctgcccaacgccaaactggaaaactggctgaacagcctttccagcaacaatgcccaaggcgaatattatttaaccgacctcatcgccaaagccgttgccgacggtattaaagttcatcccgtccgagtgcgcgcctcccacctcgccgccggcgtgaacaacaaacgccagctcgccgaactcgaacgcatcttccaaaccgaacaggcacaagaattgctcaaagcaggcgtaaccctgcacgatccggcacgtttcgatttacgaggccgtctgaaacacggacaggatgtcgtaattgatgtgaactgtatctttgaaggcgaagtcgaaatcggcgacaacgtcgaaatcggcgcaaactgcgtcatcaaaaacgccaaaatcggcgcaaacagcaaaatcgcccccttctcccacctcgaagactgcgaagtcggcgaaaacaaccaaatcggcccatacgcccgtttgcgtccgcaagccaaactagctaacgacgtacacgtcggcaacttcgtcgaaatcaaaaacgccgccatcggcaaaggcaccaaagccaaccacctcacctacatcggcgatgccgaagtcggcagcaaaaccaacttcggcgcaggtacgattattgccaactacgacggcgtgcacaaacacaaaaccgtcatcggcgacgaagtgcgcatcggttcaaactgcgtcttggtctcccccgtcaaaatcggcaacaaagtaaccaccggcgcgggcagcacgattacccgcaatgtcgaagacggcaaactcgccctcgcccgctcccgccaaaccgtcatcgaaggctgggtgagaccggaaaaagacaaacaataa

SEQ ID NO: 52011 - DNA, 300 bp, Neisseria meningitidis
atgaagaaaatgttcgtgctgttctgtatgctgttctcctgcgccttctcccttgcggcggtaaacatcaatgcggcttcgcagcaggagttggaggcgctgccgggcataggcccggcgaaggcgaaggccattgcggaataccgtgcgcaaaacggtgcgttcaagtctgtggacgatttgaccaaggtaaagggcatcggccctgcggtgctggcgaagctgaaggatcaggcttcggtcggcgcgcccgcaccaaaaggcccagccaaaccggctataccggccgctaaaaaatag

SEQ ID NO: 52012 - DNA, 1401 bp, Neisseria meningitidis
atgaccccttccgcactgaaaaaaaccgtcctactgctcggcactgcctttgccgccgcatccgcacaagcctccggctaccacttcggcacacagtcggtcaacgcgcaaagcacggcaaatgccgccgccgcagaagccgccgacgcatcgaccatcttctacaaccctgccggcctgaccaaactcgacagcagccagatttccgtcaacgccaacatcgtgctgcccagcattcattatgaggcggattccgccaccgactttaccgggcttcccgtccaaggttcgaaaagcggcaaaatcaccaaaaccacggtcgcgccccacatctacggcgcatacaaagtcaacgacaatctgaccgtgggcttgggcgtgtacgtccccttcggctctgccaccgaatacgaaaaagattccgtgttgcgccacaacatcaacaaactcggtctgaccagcatcgccgtcgaacctgtcgccgcatggaaactcaacgaccgccattccttcggcgcaggcatcatcgcccaacatacttccgccgaactgcgcaaatatgccgactgggggattaagagtaaagcagagatattgacggcaaaaccgcccaaacctaacggtgtagccgaagctgcaaaaattcaggccgacggacacgccgatgtcaaaggcagcgattggggcttcggctaccaactggcgtggatgtgggacatcaacgaccgcgcgcgcgtgggcgtgaactaccgttccaaagtctcgcacacgctcaaaggcgatgccgaatgggcggcagacggcgcggcggcgaaagcaatgtggagtacgatgcttgcagcaaacggctacacggcgaatgaaaaagcccgcgttaaaatcgttacgcctgagtctttgtccgtacacggtatgtacaaagtgtccgataaagccgacctgttcggcgacgtaacttggacgcgccacagccgcttcgataaggcggaactggtttttgaaaaagaaaaaaccgtcgtcaaaggcaaatccgaccgcaccaccatcacccccaactggcgcaacacctacaaagtcggcttcggcggttcttatcaaatcagcgaaccgctgcaactgcgcgccggcatcgcttttgacaaatcgcccgtccgcaacgccgactaccgcatgaacagcctgcccgacggcaaccgcatctggttctccgccggtatgaaataccatatcggcaaaaaccacgtcgtcgatgccgcctacacccacatccacatcaacgacaccacctaccacacggcgaaggcaagcggcaacgatgtggacagcaaaggcgcgtcttccgcacgtttcaaaaaccacgccgacatcatcggcctgcaatacacctacaaattcaaataa

SEQ ID NO: 52013 - DNA, 1449 bp, Neisseria meningitidis
atgtcccacttattccgaaaagaagtctttgtagcccaacaaaataagtggacaggtcaggttatcttgacccgtccattctcttttttatttctgactttttgcgcttttctcattgctctgtgtatcattatctttttgatttttggtagctataccaataaaacaaccgttgaaggtcaattacttccaactatgggggtggttcgtgtttactcttccgatatcggcacgattacgcataaatttgttgaagatggtaactttgtcaaagctggcgaaccattgttcaaactttccacatcgcgttttggcgaaaaaggaaacgtacaagccaaattggcagcagaagccaaccttaaaaaaactttggcattacaagaattggaacgtttaaagcgcattcatcaaaatgagcaaaaaaatgttcataacaacattcatcgtttaaacaatcaattagagaatattaaacagcaaattacagggcaaaatcgtcaaattcgtttagcggaaaaaacccttaacaagaacaagtttttagccagtcaaggcgcagtatcccaacaagataagatgaccgccgaaagccatttattggaacaacgctcacgtttggagagcctaaaacgtgaacaaaataatgcaatcagggaacttgatgaacagaaaatcacattaagcagcctgcctgaacgccataaaaccgaattgagccaactcaaccgtgcgattacggaaatgaaccaagaaattttggattttgatttgaaatccgaacaaaccatacgagctagtaaatcaggttgagacctttgcaaaaataatctgttaacgaaatttgacgcataaaaatgcgccaaaaaattttcaattgcctaaaaccttcctaatattgagcaaaaagtaggaaaaatcagaaaagttttgcattttgaaaatgagattgagcataaaattttagtaacctatgttattgcaaaggtctcaggttatatatcaacaattaatgttgatatagggcaacaagttgaaccgtctaaattgctgttaagcattgtccctgaacaaactgaattggtcgccaatctttacatacccagtaaagctgttggttttattaaaccgaaagataaagttgttttacgttaccaagcgtacccttaccaaaaatttggacatgccacaggagaaattatttcagttgccagaactgctctcggtaaacaaaagctatcaggtttaggtatcattttcactaacccaaccttattaaatgaacctgcctatcttgtgaaagttaaattggaaaaacaaacgattaaagcatacggagaaaacaagccgcttcaaattggcatgattttagaagcagatattctccatgaacgaaaaaaattgtacgaatgggtacttgacccactttacagcatttcaggaaaaatcaat

SEQ ID NO: 52014 - DNA, 927 bp, Neisseria meningitidis
atgaaagtcatctttgccggcacgcccgattttgccgccgccgccttaaaagccgttgccgccgccggttttgaaattccgctggtgctgacccagcccgaccgtccgaaagggcgcggtatgcaactgactgccccgcccgtcaaacaagccgcgctggaactcggtttgcgcgtcgaacagcccgaaaagctgcgcaacaacgccgaagccctgcaaatgctcaaagaggtcgaggcagacgtaatggtggttgccgcctacggtttgattctgccgcaagacgtgttggatgtgccgaaacacggctgcctcaatatccacgcctcgctgctgccccgttggcgcggcgcggcgccgattcagcgcgcgattgaggcaggcgatgccgaaaccggcgtgtgcattatgcagatggacatcggtttggacaccggcgatgtggtcagcgaacaccgctacgccatccaaccgaccgataccgccaacgaagtccacgacgcgctgatggaaatcggtgcggcggcggttgttgccgatttgcaacagcttcaaagcaaaggccgtctgaacgcggtcaaacagcccgaagaaggcgtaacttacgcccaaaaattaagcaaagaagaggcgcgtatcgattggagcgaaagcgcggcggttatcgaacgcaaaatccgcgccttcaaccccgtgcctgccgcgtgggttgagtatcagggcaagccgatgaaaatccggcgtgccgaagtggtggcgcaacaaggcgcggcaggcgaagtgttgtcctgttcggcggacggtttggtcgttgcctgcggcgaaaacgcgctgaagattaccgaattgcagcctgccggcggcaggcggatgaatatcgcggcgtttgcagcaggacggcatatcgaagcagggacgaagctgtaa

SEQ ID NO: 52015 - DNA, 291 bp, Neisseria meningitidis; identical to SEQ ID NO: 37933

SEQ ID NO: 52016 - DNA, 207 bp, Neisseria meningitidis; identical to SEQ ID NO: 41992

SEQ ID NO: 52017 - DNA, 1107 bp, Neisseria meningitidis
atgtccttgacccgcctaatcttgaaattctatgcactgttgcgcctttttttgggcaaaaacgcccgcaccgcatggatttcgcatcccgcctgtgccgggcacgaacccggcgcaaaccatcccgattcgcccgaccgcatcctctgcatcgagcaggcattgcgccgcgccggtatttggcagcacctccaaaccatagaggcggaagaaatcagcgatacgcgcctcgcacttgtccactcgagcaaatatctgaaccgtttggaatcttgccagccccaaaaaggcaagattttccgcctggatgacgacactgcaatcagcacaggctcgctgtctgccgcacgctttgccgccggttcggcagttcaggcagtcgacatggtcatgaaccgcaaagcatggcatgccttttgcgccgcccgcccgcccggacaccatgcgggcagcggcaaagccggcggattctgcctgctgaacaacgttgccgccggcgtcatgcatgccattgccgaataccgcctgaaacgcattgccgtcatcgatttcgatgtccactacggcgacggtacggcagaaatattcaaagacgatccgcgcatcctgtttttcaacctgtttgaaaccgaccttttccccttccccgaaaacaacgatatgcccgacggcggcaatatggtgcacctgcccttgccgccgggaacgggcagccgcacattccgcgaagccgtccgcaggcagtggctgccccgacttgccgcattcaaacccgaactggtgctgctatcggcaggattcgacgcacaccgtctagacgaatcgggcaggctcaacctgcacgaggcggattttgcctggctgacacacaaaatcattcagacggcatcgggctgccccggcaaaatcgtatccgtactcgaaggcggctacacccttgaacctctggcacaatctgctgccgagcatatccgcgtgctggcagggctgggcaaatccgatgccgcaaccgcctatcagaaaacactggacccaacaaaaaaacggtttgccaaaccgaaaaccggacaggtgcgccaacctacccaatccgaccgttacgacata

SEQ ID NO: 52018 - DNA, 543 bp, Neisseria meningitidis
atgaggacacaccgcaagacctgctctgcggtgtgttttgcttttcagacggcatcgaaacccgccgtctccatccgacatcccagcgaggacattatgagcctgaaaatccgccttaccgaagacatgaaaaccgcgatgcgcgccaaagaccaagtttccctcggcaccatccgcctcatcaacgccgccgtcaaacagtttgaagtggacgaacgcaccgaagccgacgatgccaaaatcaccgccatcctgaccaaaatggtcaaacagcgcaaagacagcgcgaaaatctacactgaagccggccgtcaggatttggcagacaaagaaaacgccgaaatcgaggtactgcaccgctacctgccgcaaatgctctccgccggcgaaatccgtactgcggtcgatgccgccgttgccgaaaccggcgcggcaggtatggcggatatgggcaaagtgatgggcgtattgaaaacccgcctcgccggcaaagccgatatgggcgaagtcaacaaaattctgaaagccgtactgaccgcctga

SEQ ID NO: 52019 - DNA, 432 bp, Neisseria meningitidis; identical to SEQ ID NO: 43974

SEQ ID NO: 52020 - DNA, 714 bp, Neisseria meningitidis
ttgttaatccactatactttatgccgctaccgcaactggctggcgcaagacgacaccctgtccgaattgctcaaactgattaactgccaactgaccgaaaaaggcttaaaagtagagaaagcatccgccgccgtcgttgacgccaccattattcagaccgccggcagcaaacagcgccaggccatagaagtcgatgaagaaggacaagtcagcggccaaaccacaccgagtaaggacagcgatgcccgttggataaagaaaaacggcctctacaaactcggttacaaacaacatacccgcaccgatgcggaaggctatatcgagaaactgcacatcacccccgccaatgcccatgagtgcaaacacctgccgccgttgttggaagggttacccgaaggtacgaccgtctatgccgacaaaggctatgacagtgcggaaaaccggcaacatctggaagaacatcagttgcaggacggcattatgcgcaaagcctgccgcaaccgtccgctgacggaagtgcaaaccaaacgcaaccgatatttgtcgaagatccgttatgtggtcgaacaaagcttcggtacgctgcaccgtaaattccgctatgcgcggtcaacctatttcggactgattaaagtgagtgcgcaaagccatctgaaggcgatgtgtttgaacctgttgaaagccgccaacaggctaagtgcgcccgctgccgcc

SEQ ID NO: 52021 - DNA, 393 bp, Neisseria meningitidis; identical to SEQ ID NO: 43975

SEQ ID NO: 52022 - DNA, 561 bp, Neisseria meningitidis; identical to SEQ ID NO: 43976

SEQ ID NO: 52023 - DNA, 321 bp, Neisseria meningitidis
ttgttgatgtgtgtactattgcataggcggttaagccatgcaggagatgaaagtgtatatgtcgcgcaaagcccattagccgcaagcgaggggcggggtgcgcgagagagaggggggcaggtgctaagtcattggttatctccttactatctatctaactacgggtgcattatgcgcctatgcctgttgtttgtcaaacactatacagttaaaatgtgtaaatatttagtaaggacatatacccttttctttacatttagctccatcggataccagtgcgttcagagaaaatttgaaaatttctatattttggttgtataa

SEQ ID NO: 52024 - DNA, 1197 bp, Neisseria meningitidis
ttgtccacttttccgaaccacaccatgcacgccatttcctttccaaaccgcacccggctcaccgccctgccgcccctgtcgctctatatccacatcccgtggtgcatcaaaaaatgcccgtattgcgacttcaattcccacagcctgaaaaacggattgcccgaagccgcctatatcgacgcgctgctgaccgacttgcagcttgaattgcccaatatttggggcaggccggtggaaacggtatttttcggcggcggtacgcccagcctgtttcaggcggaatcgatcgaccgtttgttgagcggcgtgcgttcgctgttgcgcttacagccggaagcggaaattacgttggaagctaatccggggacatttgaaatcgagaagtttcaaggatttaaagacgcaggcatcacgcggctttctattggtgtacaaagcttcaacgacgatatgctctcaaggctggggcgcgtccacaacggtaaagaagccttaaccgccatagctactgccttgaaattatttgataaaatcaatatcgacttgatgtacgccctgccgaaccaaaccgttcggacggcattggatgacgtacaaaccgccatcgccacgggcgcaacccacatcagcgcgtatcacctgacgatggaaccgaacacgccgttcggacacacgccgccgaaaggtttgccgcaagacgaagccgccctcgacatcgaagacgcggtacacagtgcattagaaaacggcggctttatccactacgaaacatcggcttttgcaaaacccgccatgcagtgccgccacaatttgaactactggcagttcggcgattatttgggcatcggcgcgggcgcgcacggcaaaatctcctatcccgaccgcatcgaacgcaccgtccgccgccgccaccccaacgactacctcgccttaatgcaaaaccgaccgagcgaagccgtcgaacgcaaaaccgtcgccgccgaagatttgccgtttgagttcatgatgaacgccctgcgcctgaccgacggcgtacccgccgcgatgttgcaggaacgcacgggcgtaccgagtgccaaaatcatggcgcaaatcgaaacagcaaggcaaaaaggcctgctggaaaccgaccccgccgtattccgcccgaccgaaaaaggacgcttgtttttaaacgatttgctgcaatgtttttta

SEQ ID NO: 52025 - DNA, 261 bp, Neisseria meningitidis
ttgctccttccacggcagcaccttggtcaaaacggcagacggctgaaaagcaaacaccgtccgtcgtgttgccgtttgcggatgagtacgggtcaaccccaatgccgccgaaaccgtcgaagccgccttcaacattgccgccgccaaagccgcgaagttggcaaaaacggtaaaaccggggagataaaagccgatggcaggaaagtaaatgtgaggatagacagtacggaggcagacctgctttatccggcagggcaataa

SEQ ID NO: 52026 - DNA, 390 bp, Neisseria meningitidis; identical to SEQ ID NO: 47854

SEQ ID NO: 52027 - DNA, 1536 bp, Neisseria meningitidis
gtgtctgattccaagacgaaagaacgcgctacattcggcacgcgccgcgcgtttatgattgccgccatcgggtccgccgtcggcttgggcaatatttggcgtttcccctatattgcttttgaaaacggcggcggcgcgttcatcctgccctatctggtcgcgcttctgacggcgggcatcccgctgctgctgctcgattatgccatcggccaccgttaccgtggttctgcgcccttggctttccgccgcctcggacgatggtttgagccggtcggctggtggaacgtgatgaccaatatcgtcatctgcatctattacgcggtaattatcggttgggcggcaagctatacctattattcggtcaacgccgcctggggtgcggatccgcagggttttttctttaaagacttcctgcaaatggcgggcccggaagccttgggtttggattttgtcggcaaagtggccggtcctttggcgggcgtgtgggtttttaccgccgccattatggctttgggcgtgcaaaagggcgtggcgcgcgcctcgtcgttctttatgccgctgcttttggtgatgtttttgattatggtcggcatttcgctgacgttgccgggcgcggcaaagggcttggacgcattgtttacgcccgactggtcgaaactcgccgattccaaggtctgggtggcggcatacgggcagattttcttttcgctttccatctgcttcggcattatggttacctattcttcttatttgaagaaaaaaaccgacttgggcggaacggggctggtggtcggttttgccaacagcagctttgaactgctcgcgggcatcggcgtgtttgccgcattgggctttatggcgcaggcgggcggtaaggcggtcaacgaggttgcctcaggcggcatcggtttggcgtttatcgcctttccgaccattatcaaccaggcaccgatgggctggctgatcggcatattgtttttcggttcgctggtgttcgccggcgttacgtcgatgatttccatccttgaagtgattgtggcggcgattcaggacaagctgaacatcgggcgcgtcaacgccacgctgctggtctgcattccgatgggcattgtttccacgctgctgttcggtacggcgacggggctgccagttttggacgtgatggacaaattcgtcaacacctacggcattgttgccgccggctttgtttatgttgccgccatcatcatcagcggcaggctgccggaattacgcaagcacctgaacgctttgtcctccatccgcatcggcggcttgtggacggtctgcgtcgtggttaccgtcgtgatgctcggctatatgctgtttaaagataccagcggcctgatggagaaaaattacgaaggttatccggatggtttcctcagtattttcggctgggggatgtcggcggcgttggtcgtgttcgggctgctgctgtcgttgctgccttggaaacacggtcaggatttcaacgtcaaagacgaacacgaacatgaacaaggagaagaaaaatga

SEQ ID NO: 52028 - DNA, 264 bp, Neisseria meningitidis; identical to SEQ ID NO: 36553

SEQ ID NO: 52029 - DNA, 864 bp, Neisseria meningitidis
atgagtgagattggtttggtaaagatctattctggaaaagtgcgcgatttatatgaaatcgacgataaacgtatgctgatggtcgcttccgaccgcctgtccgcgtttgatgtgattttggacgacccgattccgagcaaaggggagattctgacgcagatttccaatttttggtttaaaaaactggcgcatattatgcccaaccactttaccggtcaaacggtttacgatgttttgcctgaaaacgaagccaaagttttagaaaaacgcgccgtcgtggctaaaaagctcactccggtgaaagtagaggcgattgtgcgcggttatctggcaggcagcggttggaaagattatcaaaaaaccggctcggtttgcggtattcggctgcccgaaggtatgcaggaagcgcaacaactgcctgaagtgatttttacgccctcaaccaaagccgcagtcggcgatcacgatgaaaacatcagctttgaagaatgcgaacgcagtatcggaaaagaattggcggcggaagtgcgcgccaaagcgattcagctttatacagaagcggcggaatatgctaaatcgcgcggcatcatcatttgcgataccaaatttgaattcggtttggatgagaacggtaggctgacgctgatggatgaggtattgactcccgattcgagccgcttctggccggcggatcaatatgaagtcggcaccaatccgccgtcttttgacaaacaattcgtccgcgactggctggaacaaagcggttggaacaaaaaagcccctgcgccgaaagtgcctgccgatgtgattcagaaaactgtcgagaagtatcgggaagcattgactttgctgactcaggattga

SEQ ID NO: 52030 - DNA, 366 bp, Neisseria meningitidis; identical to SEQ ID NO: 43983

SEQ ID NO: 52031 - DNA, 822 bp, Neisseria meningitidis
atgacgtttgataaatggttgggcttgtcaaaactgcctaaaaatgaagcaagaatgctgctgcaatatgtttcggaatatacgcgcgtgcagttgttgacgcggggcggggaagaaatgccggacgaagtccgacagcgggcggacaggctggcgcaacgccgtctgaacggcgagccggttgcctatattttaggtgtgcgcgaattttatggcagacgctttacagtcaatccgagcgtgctgattccgcgccccgaaaccgaacatttggtcgaagccgtattggcgcgcctgcccgaaaacgggcgcgtgtgggatttggggacgggcagcggcgcggttgccgtaaccgtcgcactcgaacgccccgatgcgtttgtgcgcacatccgacatcagcacgcccgcccttgaaacggcgcggaaaaatgcggcggatttgggcgcgcgggtcgaatttgcacacggttcgtggttcgacaccgatatgccgtctgaagggaaatgggacattatcgcgtccaacccgccctatatcgaaaacggcgataaacatttgttgcaaggcgatttgcggtttgagccgcaaatcgcgctgaccgacttttcagacggcctaagctgcatccgcaccttggcgcaaggcgcgcccgaccgtttggcggaaggcggttttttgttgttggaacacggtttcgatcagggcgcggcggtgcgcggcgtgttggcggagaatggtttttcaggagtggaaaccctgccggacttggcgggtttggacagggttacgctggggaagtatatgaagcatttgaaataa

SEQ ID NO: 52032 - DNA, 1356 bp, Neisseria meningitidis
atgtctgatttttttcattctgacgtgttgtccgtttccgagttgaacgcatttgccaaaagtcttttggaaaaccaccttgccggtttgtggattgccggcgaagtatccaacctgacccgtgccgccagcgggcattattatttctcgctcaaagacagccgcgcacaggtgcgttgcgcgatgttcaagggtgcggcggtgcgtttggcgaagcctttgaaagaaggcgaccatatcgaggtatcaggaaaaatcagtatttatgaagcgcggggcgaatttcagattaccgtaaacgaagtacggctcaaaggtttggggcagctttacgaagcctatgagcggttgaaggcgcagttgcaggcggaaggcgcgtttgcggcggaacgcaagaaacctttgcccgtccgtccgcaatgtatcggcatcgtaaccagtctggcggcggcggctttgcgcgatgtcgttactaccttgaaacgccgcgcacccgaaatccccgttatcgtttatccgacacccgttcaaggcgcaggcagcgaattgcaaattgcccaagcgattaaaaccgcctcgcaacgcgccgaatgcgatgtgttgattgtctgtcgcggcggcggcagcattgaagacttgtgggcgtttaacgaagaaccggtcgtgcgcgccatcgaatcctgcacggttccggtcgtcagcggcgtaggccacgaaaccgatttcacgcttgccgatttcgtcgccgatatgcgcgcgcccacgccgaccggtgcggcggaactggtcagccccaaccgccaagaatcgctgcaccgcctcgcccaagcccaatgccgtctgaaaaccgttttggaacaacgctatttcgatgccagccaaaaactcgactggctggcgcggcaaatccgtcatccgcgccaaaaactcgacgaacagcgcgcttcaatcggcaagctggcgcaaacgctgtcttactcgatgacgcaaaacgtccgtacccacaccgcccgtttcgaacgccaaacccaagccctgaaacattgccgtcctgatgtttccgtttgcaaaaaaaacatcgaccgctttcagacggccctgtcgcacgccttccaccaactgcttacccaccgccgccaaagcctgactgcccaagccgcattgctcgaagccgtttcgccgcagcacattctggagcgcggcttttccgtcgtcaaaaacacacgcggacaagtcatccgcaacgccgatgttttgaagcaggggcagaagctgcacattatcttcgccgacggcgaaaccgacgtgcgcgtaagcaaagaacaagggcagcaggatttgttcgattgcatttaa

SEQ ID NO: 52033 - DNA, 354 bp, Neisseria meningitidis
gtgattacattgcgcatcgtgtgggcagttgccaaccgcgccaagcgtccgcaaagcgacagcaaggctgcggcggcaggccacggcattctgtatctgctcatgcttgctgttcccgttatcggcatgatccgccaatacggcagcggccgcggcccgttgaaagtgttcggcgttgaagtgatgcagggttcgccggaaaaaatcgagtggatggcaaacttgggcaacacgttccacggcaatttgggctggctgctgtttgccgccgtcgccggacacgtcgccatggtcgtcacccaccgtgttcagggtagagatgttctgtgccgcatgacggggcgtgtccgctga

SEQ ID NO: 52034 - DNA, 1185 bp, Neisseria meningitidis
atgagtttacacagcgacatcctcgtcgtcggcgcaggtccggcgggtttaagttttgcagccgaacttgccggcagcggtttgaaagttaccctgatcgaacgcagcccactgactgttctgcaaaatcctccatatgacggacgcgaaatcgccctgacccatttttcccgcgaaatcatgcagcgtctgggtatgtgggacaaaattcccgaaaatgaaatttaccctttgcgcgatgccaaagtgctgaacggacgttccgactaccagctccactttccccaaccgaccgaggcgcgcggcgaacctgccgactgtttgggctatcttatttccaaccacaatatccgacgcgctgcctacgaagtcgtatcccaactcgacaacattaccattctgaccgatacggttgtcaaagaagtcaaaacatctgacaacgaagcacaagtcattttggaaaacggcaaaatcctgactgcacgcctgcttttggcggcagacagccgcttctcgcaaacccgtcgacaactcggtatctcctccgatatgcacgattacagccgaaccatgttcgtctgccgtatgaaacataccctttccaaccaacataccgcttacgaatgcttccattacggacgcaccatcgcactgctgccgctggaagagcacctgaccaataccgtcattaccgtcgataccgataaaatcaacagcgttcaaaacctttcgcccgaagaattggcggcaagcgtaaaagaacagctcaaggccaggctcggcgatatggaactggtcagcagcatccaccattacccccttgtcggtatgattgccaaacgtttctacggcaaacgcagcgcgctgatcggcgatgcggctgtcggtatgcaccccgttaccgcacacggtttcaacttgggtctgtccagcgcagatattttggcaaaactgatactcgaagccgagcagcgcggtcaggacatcggcgcggcttccttgttggaaaaatacagcagcaaacatatgctgcacgcccatccgctttatcacgggaccaatatgatgctgaagctgtttaccaacgaaaccgcaccggcaaaactgctgcgcggcttggtattgcgtgccggcaacaatttcccgccgctgaaaaagctgattaccaaacaactgaccggttga

SEQ ID NO: 52035 - DNA, 884 bp, Neisseria meningitidis
atgagcaccttcttccggcaaaccgcacaagccatgattgccaaacacatcgaccgcttcccactattgaagttggaccaggtgattgattggcagccgatcgaacaatacctgaaccgtcaaagaacccgttacctcagagaccaccgcggtcgtcctgcctatcccctgctgtccatgttcaaagccgttctgctcggacaatggcacagcctctccgatcccgaactcgaacacagcctcatcacccgcatcgacttcaacctgttttgacgttttgacgaactgagcatccccgattacagcaccttatgccgctaccgcaaccggcgacgcaagacgacaccctgtccgaattgccggaactgatcaaccgccaactgaccgaaaaaaacctaaaaatagagaaagcatccgccgccgtcgttgacgccaccattattcagaccgccggcagcaaacagcgtcaggccatagaagtcgatgaagaaggacaagtcagcggccaaaccacaccgagtaaagacagcgatgcccgttggacaaagaaaaacggcctctacagactcggttacaaacaacatacccgtaccgatgcggaaggctatatcgagaaactgcacatcaccccagccaatacccatgagtgcaaccacctgttgcctttgctggaaggcattaccgaaggcacgaccatctatgccgacaaaggctatgacagtgcggaaaaccgaacatctggaagaacatcagttgttagacggcattatgcgcgggcagcctatttcggactgattaaagtgagtgcgcaaagccacctgaaggcgatgtgtttgaacctgttgaaagcggccaacaggctaagtgcgcccgctgccgcctaa

SEQ ID NO: 52036 - DNA, 273 bp, Neisseria meningitidis
gtgtttgctgttattttcttttcgacattgggctgtattttagcatggataagagatattcctaaaataaaatcaaaaaaaattttggcaagatacttatatattataggaataataaatgtaataatcagctatgtattaattaaaaatatattggtttctgtttcggatggaggtggaataaaatatgttgcaatatatttatcaaatctttttttttggacagtattgatgtatgttcttgtgaaaagattatctaaaaagccaagctga

SEQ ID NO: 52037 - DNA, 273 bp, Neisseria meningitidis; identical to SEQ ID NO: 43985

SEQ ID NO: 52038 - DNA, 2124 bp, Neisseria meningitidis
atgtgtaaaccgaattatggcggcattgtcttgttgcccttacttttggcatcttgtattggcggcaatttcggcgtgcagcctgttgtcgaatcaacgccgaccgcgtaccccgtcactttcaagtctaaggacgttcccacttcgccccctgccgggccttcggtagaaaccacgccggtcaaccggcccgccgtcggtgcggcaatgcggctgccaaggcggaatactgcttttcatcgtgaagatggcacggtaattcccgatagcaaacaagcagaagaacagctgtcgtttaaagaaggtgatgttctgtttttatacggttcaaaagaaaataaacttcaacaacttaaaagcgaaattcataaacgtgatcccgatgtagaaattaggacatcagaaaatgaaaataaaaaatatgattataaatttgtagatgcaggttatgtatatgtaaagggaaaagatgaaattaagtggacttcagatcacaagcagttttccaaccgcttaggttatgacggttttgtatattattccggagaacatccttcgcaatctttaccgagcgcgggaaaggtaaaatatttcggcaactggcaatatatgactgatgccaaacgtcatcgagcaggtcaggcggttggcattgacaatttgggttatatcacattttatggtaacgatgttggtgcaacttcttatgcggctaaggatgtcgacgaaagggaaaagcatcctgccaaatatacggttgattttgataacaaaaccatgaatggcaagctgattaaaaatcagtatgtgcgaaataaaaataatctagatgaacccaaaaaaccgctgaccatttacgacattactgcaaaattggacggcaaccgctttaccggcagtgccaaggtcaatcctgatttagcgaaaaaccttgccggtaatgagcgtttgtttttccatgccgatgccgatcagcggcttgagggcggttttttcggcgataacggagaagagcttgccggacggtttatcagcaacgacaacagcgtattcggcgtattcgcaggcaaacaaaaaacagacgcatcaggcacaaaacctgccctgccgtctggaaaacacaccaaaatcttggattctctgaaaatttccgttgacgaggcgactgatgaccatgcccgtaagtttgccatttccactatgcccgattttggtcatcccgacaaacttcttgtcgaagggcgtgaaattcctttggttagccaagagaaaaccatcgagcttgccgacggcaggaaaatgaccgtcagtgcttgttgcgactttttgacctatgtgaaactcggacggataaaaaccgaacgccccgccgccaaaccgaaggcgcaggacgaagaggattcggacattgataatggcgaagaaagcgaagacgaaatcggcgatgaagaagaaggcaccgaagatgcagccgcaggagatgaaggcagcgaagaagacgaagccacagaaaacgaagacggcgaagaagacgaagctgaagaacctgaagaagaatcgtcggcagaaggcaacggcagttcaaacgccatcctgcctgtcccggaagcctctaaaggcagggatatcgaccttttcctgaaaggtatccgcacggcggaagccgacattccgcaaaccggaacggcgcattataccggcacttgggaagcgcgtatcggtgtaccggataagaaagacgatcagttatatggcactacgttcattcaaaaggatagctatgcaaatcaaggggcaaaagcacaatttaccgttgatttcggcaagaaatcgatttccggaacgttgacagaaaaaaatgatacacaccccgctgtttatattgaaaaaggtgtgattgatggcaacggtttccacgcgacagcacgcactcgggataacggtattgacctttccgggcagggttcgaccaacccgcagcgcttcgaagccaacaatcttcttgtaacaggcggcttttatggaccgcaggcggcggaattgggcggtaatattatcgacagcgaccggaaattcggcgcggtattcggtgcgaagaaagatgacaaggaggcaacacgatga

SEQ ID NO: 52039 - DNA, 111 bp, Neisseria meningitidis; identical to SEQ ID NO: 40033

SEQ ID NO: 52040 - DNA, 462 bp, Neisseria meningitidis
ttgacagaagaaatgatgaaaaagcagcggcatatcctgtgtgtcggctgcctgtatattatattgaaggtcaacgtatttcccaataccggctggatggaagcgtcgaaagggatgcagggcatgtcgttcagtaccttcggatacgcggatgctccgggctatacattcagccgcattggccatactttaattttcctacttggaaagaccacagggacacgtacaactgtttccgatagttcgcataatgtatattatgttaaattatatatttgtgcaaataactccaaggcattaagctgttgtttgatgctttgccagtttgggagaaagttgtccatatgcgccataaaacgggcgttgcgatggcgttcgagcaaatgggttagttcgtggacacgacgtattaagcggtgcggacacccgaaccgcgatcccctaaatgtcttggtgggaatt

SEQ ID NO: 52041 - DNA, 2526 bp, Neisseria meningitidis
atgcatcactttgggcgggctgcgacgagttgcgcggcggtatggatgcgagcctttataaagaactatgtgcttacgctattgtttttaaaatatgtttctgataagcataagtacggcggcggcatgattgagctgcacgccggtacgacttttgacgacatcgtcaaactcaaaaacaccgccgacatcggcgaccgcctgaataagattatcgcccaaattgccgaagccaacgacttaaaaggcgtgatcgacgttaccgacttcaacgacgaagacaaactgggtaaaggtaaggagatgatcgaccgtttgagcaggcttgtcggcatttttaaaaagctcaacctttcttccaaccaagccgaagacgacgatttgttaggtgatgcctacgaatacctgatgcgccattttgcgaccgagtcaggcaaatccaaagggcagttttacacgcctgccgaagtctcgcgcattatggcgaagattatcggaatcagcgcagattgccgtccagcaccagcgtttatgacccgacctgcggctcgggttcgctgttgctcaaagccgccgcccaagccggcagccaaatcagcctttacggtcaggaaaaagatgtggcaaccgcgtcccttgcccgtatgaatatgattttgcacaacaacgaaaccgccgaaatcaacaccgggaacaccttgtccgattcgtctttccgtgatgaaaacgacgggcttaagaccttcgattttgccgttgccaatccgccttatcccgcccgaaaaaaacggcgattacgcctttttgctgcatctgctcaaaagcctgaaaccaagcggcaaaggtgcgattattcttccgcacggtgtgctgtttcgcggcaatgccgaagcgcgtattcgcacggaattgcttaaccttgaccttattaaaggcattatcgggctgcctgccaacctgttttacggcacgggcattcctgcctgcatcatcgtcatcgacaaagaacacgcccaaaccgcccaatttgccgaagagggaacaaaccaagttatcagtggcggcagcgtgtttatgattgacgcatcgcgcggcttcattaaagacggcaacaaaaaccgtctgcgtgagcaagacattcacaaaatcatcgacacttccacaaacctcgttacagccgtatggtgcatttaagcgaaatcgcagcacaagattacaaccttaatctgcctcgctatatcgacagcggagaagttgaagacctgcaaaatctcgccgcctatctttatggcggcatacctgcgcacgatatggacgcattggaagcctattggcaagttttaggccgtatgaaaaacgagttgtttgccgaacacgatggacgctttaccactatacaacggaatcgattgcaaatctttcccactgttcttgaaagaatgcgaatttcgatttaacttcggcacaccgtctcaacagcttaaaatcctgcgggattggtgtggaatttagggctaatctagtacagccccaaatttaatccactataaaatcgaaagcagccaaatcaaagcccatatattggcgcaccccgattacgccgccttcaaagccggacacctggcaaagtttgccgcgtggcacactcaaaacgaccttgccgccatccaaccgggcaggcttatccggaaatggagcgaaagcctgctggacgcgttcaaacccggcagcctgattgaagaatacgatttctaccaaatcctgacggactactgggcggaaaccctgcaagacgatgtttatctcatcgcccaagatggctggaaggcggttaaaaacctggccgaaatcaccaaagaaagcgatgaagacgcgaacctgaccgtcgtctttgaggaaaccgaaaccggcaaaaaaggcaaagccaaaaccaagcgcatcagcaaaaaataccgcagcgaagtcatcgcccccgagctggttgcccgccgctacttttcagacggcatcgccaagctggaagaaaaacaaagcgagctggaacgcctaagccaagaattggaaaaccacatagaagaacacggcggcgaagagggtgcgctgaacgacgtattggatgcaaaaggcaaactttccgccaaacttctgaaaaccgcattggaagaaagcggcatagaagaaggcgaacgggctgttttacaaaccacccaaacactgatgacgcaggaaaaagccgcgaaagacgcagtcaaaacccaaatcgaagccctgaaccttgccgtattcaaacaattcggccgactttccgaagccgaaatcaagcagcttgccgttcaagacaaatggcttgccgatttacaaagccgaatcgaaaatcgcttggaaaacagtattcagcagcttatcagccgcttgaacacgctggaagaccgctaccgcagcccgatggccgagcttgcccgagaagtggaaaagtggcaaagcaaagtcaatgcccaccttgaaaatatgggttttggaggctga

SEQ ID NO: 52042 - DNA, 306 bp, Neisseria meningitidis
atggaaacttgggttcaaaactacacggcaatcggcggcagcctgtatctgactgccgccgccgcactcttacccatcgtctttttctttgccgcgctgaccgtcctgaagctgaaaggctatcaggcggggctttatacgctgctgattgcgcttgccgttgccgtattcggcttcgggatgccggcggtatggcggtttcttccctgccgccgcagccgcactgacccaacgcccctacgccacgctggatttgaccgcgcattacaaaatcggcaaatccacccgcatcggtttggactttga

SEQ ID NO: 52043 - DNA, 369 bp, Neisseria meningitidis
ttgaataatattcctgttgaaatccgtttgttgaaaaaccgtaccgtgttggttttgacttatggggacgaacctaaaaatctgcctgccgaatttttacgcgtctattcgccgagtgcggaagtgcgcggacacggtgtgggacaggatgttttgcagaccggcaaggcggatgtccaaatcacggatttgcagcctgtcggacagtacgcgctgaaaatcagtttttcggacgggcacgacagcggtctttacgattgggcgtatctgcacagactggcatacggatacgatgcgatgtggcaggaatatttggacaaattggcggcggcgggtgcttcccgttttgaaaagcaatcagattgttaa

SEQ ID NO: 52044 - DNA, 822 bp, Neisseria meningitidis
gtgaaccgaactgccttctgctgcctttccctgaccgccgccctgattctgaccgcctgcagcagcggaggcggcggtgtcgccgccgacatcggcgcggggcttgccgatgcactaaccgcaccgctcgaccataaagacaaaagtttgcagtctttgacgctggatcagtccgtcaggaaaaacgagaaactgaagctggcggcacaaggtgcggaaaaaacttatggaaacggcgacagcctcaatacgggcaaattgaagaacgacaaggtcagccgcttcgactttatccgtcaaatcgaagtggacgggcagctcattaccttggagagcggagagttccaaatatacaaacaggaccactccgccgtcgttgccctacagattgaaaaaatcaacaaccccgacaaaatcgacagcctgataaaccaacgctccttccttgtcagcggtttgggtggagaacataccgccttcaaccaactgcccagcggcaaagccgagtatcacggcaaagcattcagctccgacgatgctggcggaaaactgacctataccatagatttcgccgccaaacagggacacggcaaaatcgaacacttgaaaacacccgagcaaaatgtcgagcttgcctccgccgaactcaaagcagatgaaaaatcacacgccgtcattttgggcgacacgcgctacggcggcgaagaaaaaggcacttaccacctcgcccttttcggcgaccgcgcccaagaaatcgccggctcggcaaccgtgaagataagggaaaaggttcacgaaatcggcatcgccggcaaacagtag

SEQ ID NO: 52045 - DNA, 408 bp, Neisseria meningitidis
atggaaattcgggcaataaaatatacggcaatggctgcgttgcttgcatttacggttgcaggctgccggttggcgggttggtatgagtgttcgtccctgtccggctggtgtaagccgagaaaaccggctgccatcgatttttgggatattggcggcgagagtccgccgtctttagaggactacgagataccgctttcagacggcaatcgttccgtcagggcaaacgaatatgaatccgcacaacaatcttacttttacaggaaaatagggaagtttgaagcctgcgggctggattggcgtacgcgtgacggcaaacctttgattgagacgttcaaacagggaggatttgactgcttggaaaagcaggggttgcggcgcaacggtctgtccgagcgcgtccgatggtaa

SEQ ID NO: 52046 - DNA, 2085 bp, Neisseria meningitidis
atggattatttatcaagactgtcctttggatttaacaaaaagctacctgtcattctgcaaacagaagttgctgaatgtggtttagcatgcctgacatccatcttgtcctattatggctttcacactgatttaagaacgttacgccaaaaatacaccctgtcattaaagggcgcaaatcttgcagacatcatgagatttggcaatgaaatgaatttaacgccacgagctttgcgtttagagttagatgagctgtcaaatttacaactaccctgcattctccattggaacttaaaccattttgttgtactttgttccatttccaaagacagtatcgtcattatggaccctgctgtcggtatgcgaaaaatcaaaatggacgaagtttcacaaaaattcacagggattgccctagaattattccccaatacccattttgaagagaaaaaagaaacaaagaaaatcaaaatattatctctattaaggggggcaggcttaaaacgctctttaattcaaatgcttatattagctatttctttggaagtctttgcattggttagtccattctttatgcaatgggtaatagaccatgtcattgtaactgctgataaaaatttattattgacccttactttgggatttggtttactgactatcctgcaacagttaattagcctgttacaagcatgggtaggtatgcacctatctacaactcttaatttacaatggaaagccaatatatttaaaaggttacttgacttacctaatggctatttcagtaaacgacatttaggagatgtgatttcaagatttggttcaatagatcatatccaagaaacactaacttctactttttttgttttagttttaaatagcttaatggctgtttttactttcgtgttaatgacaatttacagcactcaattatcgctgattgttcttttaacacttgttttgtacatactaattcgttggcttgcatattacccattaagaaatgcaacagaagaaaatattgttcatgaagccaaacaaaactcatatttcatggaaaccattcgtggtatccaatcagttaaattatttgataaacattatcaaagacatggcacttggatgagcctatttgtgaatacagtcaataccaagctgacaacagataaactctctgctttatttgaattttcaaataaactgttgtttagcatggaaaatgttatcataatttatcttggtgcaagcgcaattttagatggttcatttacagtcggtgttctgatggcttttttggcttataaagggcaatttgaaagcagaacagcttctctcgttgaccaatacatccaaatcaaaatgttagggcttcatgctgaacgtttggctgacattactttaaatgaaacagaaactgaaattattaagtataatcatatacctaaattagataatgaacaactggttcttaaagttgaaaacgtctcattcagatatgctgataatgagccatatctttttgaaaacattaatttggaatttaaagataatgaagcagttgttttaacaggacaatctggtcgggggaagtccactttgttaaacattttaacaggtagcctaaaacctgaaactggtacagttagtattaatgggcatgatatatatcaagtttctccatcctttattaggggattgagcgggattgttcgccaagatgatgtcctttttgcaggttctattggggaaaatatttcattttttgatgaaagcccaaatatggagctcattgaacaatgtgcaaaaatggcacaaatacatgacgatatacttaaaatgccaatgggctatgagaccttgattggcgatatgggaaatatcttatcaggtggacaaaagcagagagttatcttggctcgtgcattgtataaacgacccaaaattctatttttagacgaagcaagtagccatttagatgtagaaaatgaacaaaaaattaaccataacctaaaaagtcttggtattatgaaaataatggttgcacaccgccaagaaacaattcaatcggcagataaaattctgaatttaggttga

SEQ ID NO: 52047 - DNA, 1392 bp, Neisseria meningitidis; identical to SEQ ID NO: 44003

SEQ ID NO: 52048 - DNA, 1242 bp, Neisseria meningitidis
atgagtaaattcttcaaacgcctgtttgacattgttgcctccgcctcgggactgattttcctctcgccagtatttttgattttgatatacctcatccgcaagaatctagattcgcccgtcttcttctttcaggaacgccccggaaaggacggaaaaccttttaaaatggtcaaattccgttccatgcgcgacgcgcttgattcagacggcattccgctgcccgacggagaacgcctgacaccgttcggcaaaaaactgcgtgccgccagtttggacgaactgcctgaattatggaatatcttaaaaggcgagatgagcctggtcggcccccgcccgctgctgatgcaatatctgccgctgtacgacaacttccaaaaccgccgccacgaaatgaaacccggcattaccggctgggcgcaggtcaacgggcgcaacgcgctttcgtgggacgaaaaattcgcctgcgatgtttggtatatcgaccacttcagcctgtgcctcgacatcaaaatcctactgctgacggttaaaaaagtattaatcaaggaagggatttccgcacagggcgaagccaccatgccccctttcacaggaaaacgcaaactcgccgtcgtcggtgcgggcggacacggaaaagtcgttgccgaccttgccgccgcactcggccggtacagggaaatcgtttttctggacgaccgcgcacaaggcagcgtcaacggcttttccgtcatcggcacgacgctgctgcttgaaaacagtttatcgcccgaacaatacgacgtcgccgtcgccgtcggcaacaaccgcatccgccgccaaatcgccgaaaaagccgccgcgctcggcttcgccctgcccgttctggttcatccggacgcgaccgtctcgccttctgcaacagtcggacaaggcagcgtcgttatggcgaaagccgtcgtacaggcaggcagcgtattgaaagacggcgtgattgtgaacactgccgccaccgtcgatcacgactgcctgcttaacgctttcgtccacatcagcccaggcgcgcacctgtcgggcaacacgcatatcggcgaagaaagctggataggcacgggcgcgtgcagccgccagcagatccgtatcggcagccgcgcaaccattggagcgggcgcagtcgtcgtacgcgacgtttcagacggcatgaccgtcgcgggcaatccggcaaagccgctgccgcgcaaaaaccccgagacctcgacagcataa

SEQ ID NO: 52049 - DNA, 1059 bp, Neisseria meningitidis
atgtcttcacgcaaaattatccacatcgacatggacgcattctacgcatcggtagagctgcgcgaacagccgcatttgaaagggcggccggtggtcgtcgcgtgggagggcgcgcgttcggtgatttgcgccgcatcgtatgaggcacggcagttcgggctgcattccgcgatgtcggtggcaacggcgaaaaggctgtgtccgcaagcggtgtatgtgccgccgcatttcgatttgtaccgtcaggtttccgcgcagattcacgccgtattcaggcgttataccgatttaatcgaacccttgtcgctggacgaagcctatcttgacgttacccgtaatttcaaaaacatcccttacgccagtgaagttgccaaagaaatccgtgccgccatttttgcggaaacaggtttgactgcatccgcaggcatcgcgccgaacaaatttctggcgaaaatcgcgtcggactggcgcaagccgaacgggcagtttgtgttgccgccgcacaaagtcatggcatttttggaaaccctgcctttgggcaaaatccccggcgtgggcaaggtaacgctgaaaaaaatgcagtcgctgggtatgcggacggcgggcgacttgcgccgtttcgagcgcggcgaactcttaaaccatttcggacgctacggataccgcctctatgatttggtgcgcggtacggacgaacgccccgtcaaagccgaacgcgaacgcctccaaatctccacagaaattaccctgcccgaagacctgccgctcgagcaggctgccggacacctcccccatcttgccgaagacttgtggcggcaaatcacgcgcaaaaacgtcgaagcccaaagcgtaacgctcaagctgaagacctacgatttccgcatcatcacgcgcacactgacttattcctccgtattgcccgactgcgcagctctgctgcaggctgcgcaaatgttgatggcgcgcgtcccgccgcagacggaagacgcgttccgccttatcggtatcggcgtggggcatcttgtgccgaaaaaccagcagcaggatttgtgggcgtaa

SEQ ID NO: 52050 - DNA, 1269 bp, Neisseria meningitidis; identical to SEQ ID NO: 44008

SEQ ID NO: 52051 - DNA, 1002 bp, Neisseria meningitidis; identical to SEQ ID NO: 44009

SEQ ID NO: 52052 - DNA, 1002 bp, Neisseria meningitidis; identical to SEQ ID NO: 44009

SEQ ID NO: 52053 - DNA, 1371 bp, Neisseria meningitidis
atgtcttccccttcaaataccaatcgtcaaacctgatccagccgattaacctatatcctgaccgttgccggcgcgactgtcggcttcggcgcgacgtggcgtttcccgtatttggtcggtgaaaacggcggcggcgcgtatgtgtttttattctgtatcgccatgctcgttatcggtataccgatgattttggtggaaaacgtcatcggacggcgcaaaggcgtgaacgcgctggatgcgttcggcggctcgatgaacggcaaacccgtcgctaaaatttggaagctggtcggctgggcgggactgctcggcgcgttcggcattatggcttattatatggtgctcggcggctgggtaatcagctatatcgtcaacattatcggcggcaatctggacatttccagccccgtcgacggtatggttacaaaaagcttctttaccgaacacatcgaaaacagcccttgggaaattgcgttttatacgctgctttttgtcgccgtgaaccaatggattttggtcaaaggcgttatcggcggcattgaaaaagcggcaaaatagctgatgccgctgctgtttttgttcctaatcgcgatggtcgtccgcaacgttacccttccgggcgcaatggaaggggttgctttctatctgaaacctgatttcagcaagattaccgccgaactgttcgtcttcgttttggggcaggtattttttgccctgagcctgggtttcggcgtgatgattaccttgtccagctatttggataaaaacgaaaatctggttcagacggcagttatcacggcaattaccaataccatcatcgccatacttgcgggctttatgattttcccgtcgctcttcagcttcggcgttgcccccgattccggcccgactttggtgttccaaagcttgccgattgtgttctcacatatgtgggcgggatctgtgttcgccgtgattttcttctcgctgctcctgattgccgcgttgacaacttcgctgaccatttatgaagtgttgattacgaccattcaggaaaaaaccaaaatccgccgtaccgccgcgattacgattgtattggctgccatcttcattttcggcaacatcccgtccattctgagctatggtccgtggaaagacgtttccgtgttcggcaaaaatattttcgatgccttcgactacatcagcggcaacatcttgtttatgctgaccgcgctcggttccgcgctgtttgtcggttttgtgatgaaggacgaagcgaaggaagaattgctttataaaggcaaccatacgacggtcaatatttggtttgcctatgtgaaatacctcgtgccgttggtgattctgctgatttttatcagcaacctgttctaa

SEQ ID NO: 52054 - DNA, 993 bp, Neisseria meningitidis; identical to SEQ ID NO: 44011

SEQ ID NO: 52055 - DNA, 777 bp, Neisseria meningitidis
atgaatagacccaagcaacccttcttccgtcccgaagtcgccgttgcccgccaaaccagcctgacgggtaaagtgattctgacacgaccgttgtcattttccctatggacgacatttgcatcgatatctgcgttattgattatcctgtttttgatatttggtaactatacgcgaaagacaacagcggagggacaaattttacctgcatcaggcgtaatcagggtgtatgcaccggatacggggacaattacagcgaaattcgtggaagatggagaaaaggttaaggctggcgacaagctatttgcgctttcgacctcacgtttcggcgcaggaggtagcgtgcagcagcagttgaaaacggaggcagttttgaagaaaacgttggcagaacaggaactgggtcgtctgaagctgatacacgggaatgaaacgcgcagccttaaagcaactgtcgaacgtttggaaaaccagaaactccatatttcgcaacagatagacggtcagaaaaggcgcattagacttgcggaagcagtggcaaaaacggcactgggcagacaggaattgtcgggattgggcatggtatcctccgatttggcgaagagcaacgaacctgtttatctcgtgaaaataaaacccgacaaaccaaccatcactgcatacggtgaggaaaaaccgctgcaaatcggcatgacgttggaagcagacatcctgcacgagaaacggcggctgtacgaatgggtattggagctgatttatagtatgtcgggcaaactgtaa

SEQ ID NO: 52056 - DNA, 879 bp, Neisseria meningitidis
atggcaagaaggtcaaaaacatttgaagaagctgctgctgaggttgaggaacgtttcggtcatcgtggcattaagttggtcgagtttgagggtacagccaagccgtgtgtaatcaactgccctaaacatggaaaccaaacctgttcgaggtactccaatatgttcataggaagtagctggggttgcccctcttgtggtaatgagcaagctgcaaaagccggtatagcgacccttaggaagaatcacatagcgttagaaatgctgaaacaggctgtaacaggtatgaccaagcaagagcgcatcacgacgcaagcctacaatgagatgaccaaatccgtggcaggttcaaacagcatagtccttaacgatgtccaaggcgatacgaccatcaacaaccatcatacgcatacgcacaaccgcagcgttgccgacggcaaagcactgtcgatgaggctcacaccccgtcctttgttgtcagaccgtcaggcggcggctttcgcccgtacaggcaaactcacgggcagtttcgacttgtttgcatcggtggtcgccccttcacaatatacgtttgccgttgccatgcccgacacgtccatgtcgccggttatcgaaaaaggggatttgctggtggtcgagccgcgtatgcgccctgcggacgaagacatcgtgctgattgaactgtccgacaagcggctggtcgtcgcgcaccttgttatcgatattgcgggcaggatgctgatttatcagacgggcaggccgtctgaagcctttgacctgcccgaaggcagcgtgattttcggtgtggtgctggaggtcaaaaaacggtttatgtccgccgcacaggcgagaaggcgtgttgattcggattaccgcccctga

SEQ ID NO: 52057 - DNA, 903 bp, Neisseria meningitidis; identical to SEQ ID NO: 44013

SEQ ID NO: 52058 - DNA, 1410 bp, Neisseria meningitidis
atgaatttccccaaaacagcggcctttctgctgctgcttctcgcctccctcgccgcacacgcgctcgatacgggtcgcattccgcaaaacgaaatcgccgtatatgtccaagagcttgacagcggaaaagtcatcattgaccaccgctcggatgtccccgtcaaccccgcctccacaatgaaactcgttaccgcgtttgccgcctttaaaaccttcggcagcaattaccgctgggcgaccgagtttaaaagcaacggtacggtaaacgacggcacgcttgacggaaacctgtattgggcgggcagcggcgaccccgttttcaatcaggaaaacctgcttgccgtccaacgccagttgcgcgaacaaggcatacgcaatatcacgggacacctgatgctcgaccacagcctgtggggcgaagtcggcagtcccgaccattttgaagccgacagcggttcgccgtttatgaccccccccaatccgactatgctgtctgccggtatggttatggtgcgcgccgaacgcaatgccgccggcagtaccgacatcctcaccgatccgcctttgccgcatattttcgcccaaaacaacttgaaaattaccgcctcccaagccgcctgcctttcggtcaaaaaactgatgcgtgcatctttttcggacaatacgctgaaattgcgcggcaatattcccgagagctgtttgggcaagcctgtcggtgtccggatgttcgcgcttgacgaactgatccggcaaagttttaccaaccactggctgctcggcggcggacggatttcagacggcatcggcatagccgacacgccggaaggcgcgcagacgcttgccgttgcacactcaaagccgatgaaggaaattttgacggacatgaacaagcgttcggacaatctgattgcgcgttccgtcttcctcaaactcggcggcaacggcaaactgcccgccgtttccgaacaggcggcatctgccgtccggcgcgaacttgccgtgtcgggcatcgatgttgcggatttggttttggaaaacggttcaggtctgtctagaaaagaaagggtaacggcgagaatgatggcgcaaatgttggaaacggcttatttcagcccgtttgcacaagatttcatcgacacgctgcccatcgccggcacagacggaactttacgcaaccgcttcaaacaaagcggtgggcttctgcgcctgaaaaccggcacgctcaacaatgtccgcgcattggcaggctactggctgggcgacaaaccgatggtggtggtcgtcatcatcaacagcggtcgcgccgtttccctgctgcccgacttggacaacttcgttgccaacaacatcatctccggcggcgatggctggctggatgcgaaactgatgtgcaaagaacgccgagcctga

SEQ ID NO: 52059 - DNA, 3099 bp, Neisseria meningitidis
atgaacctcgaaactaaacccatcgctgaaacgccgaatttcatcgtgctcgaccaatatgaaaaaatcgaacagtcgggcagctaccaatcggaaaaccagttggaagcggagttaatcgccgatttgcagaatcagggttacgaataccgcaaagacttgaacagccaaagcaggctgctggaaaacctgcgcgcgcagttgcagcggctgaacgatgtggcgttttcagacggcgaatgggcgcggtttttaacggaatatctggacaggccgtctgaaaacattaccgacaaaacccgcaaaatccacgacgaccatatttacgatttcgcttttgatgacggccgtctgaaaaacatttatctgctggacaagaaaaaccttgcccgcaaccatgtgcagcttatcaactagtttgagcagacgggcacgcatgcaaaccgttatgacgttaccgtgttggtaaacggcctgccgctggtgcagattgaattgaaaaagcgcggtgtggcggtgcgtgaagcattcaatcaggtgcaccgttacagcaaagagagcttcaacagcgacaattcgttgttcaaattcctgcaaatcttcgtcatttccaacggcacggacacgcgctatttcgccaacaccaccaagcgcgacaaaaacagcttcgatttcacgatgaattgggcgcggtcggacaatcatccgattaaggatttgaaagactttaccgccacgttcctgcaaaaaagcgtattactgagcgttttgctgcattacagcgtgttcgatgcgaatgatacgctgctgattatgcggccgtaccagattgccgccgccgaacgcattctgtggaaaattaacagttcggcgcaggcgaagaattggagcaaaccggaaagcggcggctatgtttggcacaccacgggcagcggcaaaacgctgaccagctttaaggcggcgcgtctggcgacggaatcggcgtttatcgacaaggttttcttcgtggtggacaggaaggatttggactaccagacgatgaaggaataccagcgtttttcgcccgacagtgtgaacggttcggaaagtacggcgggcttgaaacgcaatttggaaaaagacgacaacaaaatcatcgttaccaccatccaaaagctgaacaacctgatgaagagtgaagataatctgccggtttaccatcagcgagttgtctttattttcgacgaatgccaccgctcgcaattcggcgaagcgcaaaaaaacctgaaaaagaaatttaaaaaattctgccagttcggctttaccggcacgccgatttttcccgaaaacgctttgggcgcggaaaccacggcgggcgtgttcgggcgggagttgcattcttatgtgattaccgatgccatccgcgatgaaaaagtattgaaattcaaagtggattacaacgatgtgcgcccgcagttcaaagccgtggaagcggaacaggacgagaagaaactgagtgccgccgaaaaccgccaagccctgctgcaccccgaacgcatccgcgaaatcacgcaatatatcctgaatcagttcaggcagaaaacgcaccgcctgaacgctggcggtaaaggatttaacgcgatgtttgccgtcagcagcgtggatgcggcgaagtgctattacgaagcgttcaaaacgcaacaggcaggcagcctgcacccgttgaaagtggctactattttttcctttgccgccaacgaagagcaaaacgccgtcggtgaaattgttgacgagacctttgaaccggaagcgatggacagcagcgcaaaagaatttttgcaggctgccatcaacgattacaacgcctgtttcaaaaccaatttcggcacggacagcaaagcctttcagaactactaccgcgatttggcaaaacgggtgaaaaatcaggaagtggatttgctgattgtggtcggtatgtttttgacgggttttgacgcgccgacgctgaacacgttgtttgtcgataaaaacctgcgctatcacggcctgatgcaggcgttttcgcgcaccaaccgcatttacgatgccaccaaaaccttcggcaatattgtctgcttccgtgatttggagcaggcaaccattgatgcgattaccctgtttggcgataaaaacaccaaaaacgtagtgctggaaaaaagttacgaagaatacatgaacggctataccgacagactgaccggagaagcgcggcgcggctatttggatgtggcaaaagagttgcgcgaacgtttccccgatccccacgaaatcgaaacggaaaaagacaaaaaagattttgccaaacttttcggtgaatacctgcgggcggaaaacgtattgcagaactacgatgaatttgccgcgctgcgcgagttgcagaatgtggatgcggcggacgaagatgctatgaaggcgtttcaggaaaaatactacctgagcgatgaagacgtgcaggaaatgcggcaagtgccgatgccgtctgaaagagccgtgcaggattaccgttccgcctataacgacatccgcgattggttgcgccgccaaaaagcaggcgaacagaaagaacagtcaaaaatcgactgggacgatgtggtttttgaggtggatttgctcaaatcgcaggaaatcaatctggattacatcctgcaactggttttcgagcatcacaaaaaaatcaaaggcaaagcggagctggtagaagaaatccgccgcatcatccgcgcaagtatcggacaccgcgccaaagaagggctgattgtggatttcatcaacgatacggatttggacaaagtgcccgacgttcccgccatactggaaaccttttacacctatgcgcaagaggtgatgcggcacgaagcggcaggattgattgccgccgaaggtttgaacgaaaccgccgccaaacgctatttaatcagctcgctcaaacgcggctatgccagcgaaaacggtacggaactgaccgaaaccctgccgaaaatgagtccgatcaacccgcaatatctgacgaagaaacaaagtgtttttcaaaagattgcggcgtttgtggagaagtttgccggaatagggaccgatatttga

SEQ ID NO: 52060 - DNA, 1197 bp, Neisseria meningitidis
atgtggacgggatttttttcaaaatcaggcactggcattgcagaggaaaggcatcaaaaccgccgtgcttgcaccgatgttccgctacttgcggaaagaaacagcaagcatcctgaccgaccttacggttttgcaaaatatcggcaaagcggtttggacatctatgcatggcacggcatgtatttcttcccccgctttccgttcatcgacatcgaccgcatccgctgggtgcgcgtgggtttgaaagccttcaaacactacatccgcgaaaacgggctgcccgacctgattcacgcccaccgcatgaactatgccggcatactcgcccaaaaaatttcccaaaaatacggcatcccctatgtcgtcacgaaacacagcagcaccatcacgcgcggtctgatccgtccccaccaatggcagcctatgaaaaatgcggcggcgcacgccgccgcacgtctcgccatcagccgccatttcgcacacgtcctgcaacacaaatacggctgcgaatggcagtacctccccaacatactgggcggaatattcaaccgaccgtttgaacaaagagaaaaaaacaacaaaccgcatttcgtgttctgcaccgtctcgcactttcgccgtctcaaaggacacgatgtcctactcactgcctttgcccgggcgttggcacaatgcccgcaactgcgcctgaacatcggcggcagcggacaggaagaacagcggctgaaacagcaggcggcagacttgggcattacccatgccgttacatttttgggcgcattgcagcccgaagcagtcttggatttgatgaggaacagcgacgcattcgtccttgccagccgcacagaaaccttcggcgtagtctatatcgaagcactgtcccaaggattgcccgtcattgcaacacgctgcggcggtgcggaatctattgtttcagacggcaacggatatttggttcctgttgacgacgacgatgcccttgccgacgcactcatcaaaatgtatgaacaccactctgattttgaatctgcccgacttagggaaaactgtctgaacgaatttggcgaaaatgccgttataggcaggttgatcggcattttccgacaggcaatcgcagaatacggtaagaaaataccggtgaaatatagtggattaacaaaaatcaggacaaggcgacgaagccgcagacagtacaaa

SEQ ID NO: 52061 - DNA, 984 bp, Neisseria meningitidis; identical to SEQ ID NO: 40053

SEQ ID NO: 52062 - DNA, 489 bp, Neisseria meningitidis
atgctcaaaataaccctaattgcggcgtgtgcggaaaacctgtgcatcggggcggacaatgctatgccttggcacatccccgaagatttcgcatttttcaaagcctataccttgggcaaacccgtcattatggggcggaaaacgtgggaatccctgcccgtcaaacccctgcccggacggaggaacatcgtcatcagccggcaggcggattattgcgcggcaggcgcggaaacggcggcaagtttggaggcggcattggcattgtgcgcaggcgcggaagaagccgtcattatgggcggcgcgcagatatacggacaagcgatgccattggcgaccgatttgcggataaccgaagtggatttgtctgtggaaggagatgcatttttccccgcaatagaccggacgcattggaaagaagcagagcggacggaacgccgtgtcagcagcaaaggcacgagctatgcttttgtgcattatttgagatattga

SEQ ID NO: 52063 - DNA, 687 bp, Neisseria meningitidis
atgtacgcatttaccgacgcacagcaacagaaggcactcttctggctggtgctttttcatatcctcatcatcgccgccagcaactatctggtgcagttccccttccaaattttcggcatccacaccacttggggcgcattttcctttcccttcatcttccttgccaccgacctgaccgtccgcattttcggttcgcacttggcacggcggattatcttttgggtgatgttccccgcccttttgctttcctacatcttttccgttttgttccacaacggcagttggacaggcttgggcgcactatccgaattcaacacctttgtcggacgcatcgccttggccagctttgccgcctacgcgctcggacaaatccttgatatttttgtgttcaacaaattacgtcgtctgaaagcgtggtggattgcaccgaccgcatcaaccgtcatcggcaatgcactggacacgttagtgttttttgccgttgccttttacgccagcagcgatgaatttatggcggcaaactggcagggcatcgcttttgtcgattacctgttcaaacttaccgtctgcggtctgtttttcctgcccgcctacggcgtgattctgaatctgctgacgaaaaaactgacgaccctgcaaaccaaacaggcgcaagaccgccccgcgccctcgctgcaaaatccgtaa

SEQ ID NO: 52064 - DNA, 1527 bp, Neisseria meningitidis
atggattatccaccgcttaagggtgcggcattggcgtgggttacgctgtctttggggcttgccgtatttatggaagttttagatacgactatcgccaatgtcgccgttcccgtcatcgccggcaacctcggtgcggcaaccacgcaggggacgtgggtcattacttcttttgctgtggcaaacgccgtttccgtgccgttaacgggctttttggcaaaacgtatcggcgaggtcaaattgtttaccgccgccgctgtcggtttcgtcatcacatcatggctgtgcggcatcgcgcccaaccttcaggctttggtgtttttccgcatcttgcagggttttatcgccgggccgctgattcccctgtcgcaaagcctgttaatggcatcctatccgcccgcaaaacggacgctggcactggcattgtgggcaatgaccgtcgttgttgcccctgttctcgggccgatactcggcggctggatttccggaaactggcattggggttggattttcttcattaatatccctatcggtatcatatcggcatggattacatggaaacatttgaaatatcgggaaacggaaaccgttaaaatgccgaccgactatgtcgggctgacattgatggtagtcggtatcggcgcgttacagatgatgctggacaggggtaaggaactcgactggttcgcctctggagaaatcattaccttgggcgtagtcgcactggtgtgcttgtcgtattttattgtttgggaattgggagaaaaatatccgattgtcgatttatcgctgtttaaagatcggaattttaccgtcggcatcattgccacatcattgggttttatggtgtatatggggacgctgaccctgctgccgttagtgttgcagaccaacctgggctatacctccacgtgggcggggcttgccgccgcgcccgtcggcatcctgcccgtcttcctgtctccgttaatcggcaggttcggcaacaaggccgatatgcgcctgctcgtaactgccagcttcctgacctttgcctttactttctattggcgcaccgatttttatgccgacatggatatcggcaacgtcatctggccgcagttttggcagggggcaggcgttgccatgttcttcctgccgctgaccaccatcacactgtcgcatatgaagggcgggcagattgccgccgccggcagcctgtcgaatttcttgcgcgtgctgatgggcggtgtcggcgtatcattcgtcagtaccctgtgggaacggcgtgaagcgttgcaccatacacgctttgccgaacacatcacgccctattccgcaacattgcacgaaacggccgctcatttgtcccagcacggcgtttccgacattcaaaccctaggcatcatcaacaataccattacccagcagggttttattatcggatcgaacgaaatctttatggcgggcagcctgctgttcatcattatgattcctgtcatatggctggcaaaaccgccgttccacagcggcggcgatggtggacattga

SEQ ID NO: 52065 - DNA, 1644 bp, Neisseria meningitidis
atgaatgcttttacccgtgcatggtatgcgctcgaacgccattatcaggatacgcgtcatgtccttttgcgcgaccgctttgcctgcgaacccgaccgttttgagcgtatgcatgagcgtttggacgggatgttgttcgattacagcaaaaaccgtttgggcgaagatacgctgcaactgctctgccgtcttgcggagacggcggatttggaagggaaaatgcgtgctttgcggacgggtgcgaaagtcaacggcagcgaggggcgtgccgcgctgcatacggctttgcgcctacccgacggtgcggatgccgtttatgcggacggcagggacgtgttgcccgaaatccgccgcgagttaaatcgtgcgttggagtttgcacacagtttggacgacggttcgtatcaggggacaaccggaaaacggattacggattttgtccacatcggcataggcggatccgacctcgggccggcaatgtgcgtgcaggcacttgagccgttcagacggcatatcaccgtccattttgccgccaacgccgatcctgcctgcctggatgcggttttatgccgtctgaaccccgaaacgacagtgttttgcgttgccagcaagtccttcaaaacaccggaaaccctgctcaatgcacaggcagtcaaggcgtggtatcgcggtgcggggttctcggaatccgaaacggcgtgccatttttgcgcggtgtctgccgacactgcggcagctgcggcttttggtatcgcggcggaacgcgtgtttgcgatgtacgactgggtgggcggacgctattccgtctggtcgcccgtcggtttgcccgtgatggttgcggtcggcggggcgcgtttccgcgagttgttggcgggggcgcacgcgatggacagccattttttccacacgccgccgcgccgcaacattcccgttctgatggcactgattgccgtgtggtataacaatttccaacacgcggacgggcagaccgccgttccgtacagccacaacctgcgcctgctgccggcgtggctgaaccagctcgatatggagagtttgggcaaaagccgcgcttcagacggcagtcccgccgcgtgcaaaacgggcggcatcgtgttcggcggtgaaggggtcaactgccagcacgcctatttccaactgctccaccaaggcacgcgcctgattccctgcgactttatcgtcccggtgacggcgcagggcgtggaggacggacgcagccgttttaccgttgccaacgcctttgcccaagcggaagccctgatgaagggcaaaaccttggacgaagcacgcgccgaactggcagatttgcccgaagcggaacgcgaacgcctcgcgccgcataaagagttccccggcaaccgccccagcaacagcatcctgctcgaccgcctcacgccctacaatctgggtatgctgatggcggcttacgaacacaaaaccttcgtccaaggcgcgatatggaacgtcaaccccttcgatcagtggggggttgagtacggcaaacagttggcgaaaaccatcatcggcgaactggaaggcggcacgtccgtacacgatgcctcgaccgaagggctgatggcgttttaccgcgaatgccgtctgaaaggcggcggcgcggcataa

SEQ ID NO: 52066 - DNA, 735 bp, Neisseria meningitidis
atggcttcgcataatactacacatcagatgaaaacgctgtgttcttcctgttctttgcgggaactctgcctgcctgtcgggctgctgcccaacgagctcagccaactcgatgccgtcatccgtcaaagccgccgcctgaaaaagggcgaatacctgttctgtgtcggcgaagcctttacctcgctctttgccatccgttcgggcttcttcaaaacaaccgtcgccagtcaggacggccgcgatcaggtaacgggtttctttatgtcgggtgaactcatcggcatggacggcatctgttcccatgtgcacagttgcgacgcggtcgccttggaagacagcgaagtgtgcgaactgccgtttacccacatcgaagaactggggcaaaacatccccagcctgcgtacgcacttcttccgcatgatgagccgtgaaatcgtgcgcgaccaaggtgttatgctgctgttgggcaatatgcgcgccgaagagcggattgccgccttcctgctgaacctttcccaacgcctttattcccgaggttttgctgccaacgacttcatcttaagaatgtcccgcgaagaaatcggcagttatctcgggctgaaacttgaaaccgtcagccgcacattatccaagttccatcaggaaggattgatttccgtcgaacacaaacacatcaagatcctcaatctgcaggtgttgaagaagatggtatccggttgttcgcacgccatttga

SEQ ID NO: 52067 - DNA, 630 bp, Neisseria meningitidis; identical to SEQ ID NO: 44026

SEQ ID NO: 52068 - DNA, 1143 bp, Neisseria meningitidis
atgaaaaaatccgtattagccgttttggccgcgctgtctctggcagcctgcggcggcagcgaaaaaaacgccgtgcaacctcaagcagacgctgcgtctgctgccaatgccgaagccgctgccaccgatactctgaacatctacaactggtcgaactatgttgatgagagtacggtcgaagactttaaaaaagccaacaatctgaagctcacttacgacttgtacgaaaacaatgaaacgctggaagccaaaatgctgaccggcaaatccggttacgatttggttgtgccgggcatcgccttcctaccgcgccaaatcgaggcgggcgcgtatcaaaaagtcaacaaagacctgattcccaactataaaaacatcgatcccgaactcttgaaaatgctggaaaccgccgacccgggcaaccagtatgccgtcccctatttctccggcgtgaacacgattgcgattacggcgaagggcaaagagcttttgggcggcaagctgcccgaaaacggctgggatttgctgttcaaacccgaatacacccacaagctgaaatcctgcggcatcgccctgtgggacaccccgagcgaaatgttcccgattttgctgaactacttgggcaaagaccccaaaggctcgaatcctgaagatttgaaggcggcggcggaagtgttgaagtctatccgtccgaatgtcaaacgtttcagcccgtccatcatcgacgagctggcgcgcggcgacatctgcctggcggcaggcaacggcggcgatttgaacttggcgaaagcacgttccgaagaagtgaaaaacaacgtcggcatcgaagtgctgaatccgaaaggcatgggcttctggattgagtcttggctgattcccgccgatgcgaaaaacgtcgccaatgcccacaaatacatcaactacacgctcgaccccgaaatcgcggcgaaaaacggcatcgccgtaaccttcgcccccgccagcaaaccggcgcgcgaaaaaatgcctgccgagctggtgaacacccgttccatcttcccgaacgagcaggatatgaaagacggttttgtgatgccgcaaatgagtacggatgcgaaaaaactgtctgtcagcctgtggcagaaaatcaaagtcggcaccaactga

SEQ ID NO: 52069 - DNA, 513 bp, Neisseria meningitidis; identical to SEQ ID NO: 44027

SEQ ID NO: 52070 - DNA, 978 bp, Neisseria meningitidis
atgcaagaaaacccgaccgtgtggctgttcgacctcgacaacacgctgcacaatgccgatgccggcatcttccacctcatcaaccgcgctatgacacgctatatggcacaccgcctcaaactctccgaatccgccgcgtccgacctgcgtcaggaatattggcaccgctacggcgcaacgcttgccggactgcaaatccaccatcccgaaatcgacatcgccgattttttgcgcgaaagccatccgatcgatgcaatcctgactaggctgcacggcatgcctgaaacacaaaacaccctgagccgcctaaaagggcgcaaggcagttttttccaacggcccgtcgttttacgtccgcgccgttgtcggcgcactcggtttggaaaaccgtttcgacgcactgttcggcacggatgatttcggactgctgtacaaacccaatccgcaagcgtatctcaatgtctgccgccttttggacgtaccgcccgaatgctgcattatggtggacgacagcgcggacaacctgcatcaggcaaaagcattgggcatgaaaaccgtctggttcggcgcaaaatcccacgcgctgccctttatcgatgcttccgtaagcgatatggcgcaactggctcggtatgcagaaactttgtcagaacaccgccaaaatcattacaatactccacaacccccgaaaatacgaaagaatgttatgcgtaaaaccttccttatcctgatgactgccgccgcccttttgtcgggctgcgcgtgggaaacttatcaagacggcaacggcaagaccgccgtccgtcaaaaatatcccgccggcacgcccgtttattaccaagacggcagctactcgaaaaatatgaactacaaccaataccgtcccgaacgccatgccgtgttacccaaccaaaccggcaacaacgccgacgaagagcatcgccaacactggcaaaagcccaaatttcaaaaccgataa

SEQ ID NO: 52071 - DNA, 459 bp, Neisseria meningitidis; identical to SEQ ID NO: 37616

SEQ ID NO: 52072 - DNA, 1677 bp, Neisseria meningitidis
atgtcccaacaatacgtctattctatgctgcgcgtgagcaaggttgtgccgccgcagaaaaccatcattaaagatatttccctttctttcttccccggcgcgaaaatcggcctgctcggtttgaacggcgcgggcaagtccaccgtgctgcggattatggcgggcgtggataaggaatttgagggcgaagccgtgccgatgggcggcatcaaaatcggctacctgccgcaagagcctgagcttgatccggaaaaaaccgtgcgcgaggaagtggaaagcggtttgggcgaagtggctgccgcgcagaaacgtttggaagaagtgtatgccgagtacgccaatcctgatgcggattttgacgcgttggcagaagagcagggccgcttggaagcgattattgcggcaggttcgtccacgggcggcggtgcggaacacgaattggaaatcgccgccgacgcgctgcgcctgccggaatgggatgccaaaatcgataatttgtccggcggtgaaaaacgccgcgttgccttgtgcaaactcttgttgagcaagcccgatatgcttttgctggacgagccgaccaaccacttggatgcggaatcggtcgagtggctggagcaatttctcgtgcgcttccccggcacagtcgttgcggtaacgcacgaccgctacttcctcgacaacgccgccgaatggattttggaactcgaccgcggccatggtattccgtggaaaggcaattactcgtcttggctggagcagaaagaaaaacgcttggaaaacgaggcaaaatccgaagccgcacgcgtgaaggcgatgaagcaggaattggaatgggtgcgccaaaatgccaaaggccgccaagccaagtccaaagcgcgtttggctcgttttgaagaaatgagcaactacgaataccaaaaacgcaatgaaacgcaggaaattttcattcccgtcgccgagcgtttgggtaacgaattgattgaatttgtgaacgtttccaaatcgttcggcgacaaagtgctgattgacgatttgagcttcaaagtgcctgcgggcgcgattgtcggcatcatcggtccgaacggcgcgggtaaatctacgctgtttaaaatgattgcgggcaaagagcagcccgattccggtgaagtgaaaatcgggcaaaccgtgaaaatgagcttgattgaccaaagccgcgaaggtttgcaaaacgacaaaaccgtgttcgacaacatcgccgaaggtcgcgacattttgcaggttggtcagtttgaaatccccgcccgccaatatttgggacgcttcaatttcaaaggcagcgaccaaagcaaaattgcaggtcaattgtctggcggcgaacgcggtcgtctgcacttggcgaaaaccttgttgggcggcggcaatgtattgctgttggacgaaccgtccaatgaccttgacgtagaaaccctgcgcgcgctggaagacgcattgctggaatttgccggtagcgtgatggtgatttcgcacgaccgttggttcctcgaccgtattgctacgcatatcttggcttgcgaaggcgactccaaatgggtgttcttcgacggcaactatcaggaatacgaagccgacaagaaacgccgactcggcgaagaaggcgcgaaaccgaaacgcatcaaatacaaaccggtaacgcgttaa

SEQ ID NO: 52073 - DNA, 879 bp, Neisseria meningitidis
atgtgtatcgagatgaaatttatattttttgtactgtatgttttgcagtttctgccgtttgcgctgctgcacaaacttgccgatctgacgggtttgcttgcctaccttttggtcaaaccccgccgccgtatcggcgaaatcaatttggcgaaatgttttcccgaatggagtgaggaaaagcgtaaaaccgtgttgaaacagcatttcaaacatatggcgaaactgatgctcgaatacggcttatattggtacgcgcccgccgggcgtttgaaatcgctggtgcgctaccgcaataagcattatttggacgacgcgctggcggcgggggaaaacatcatcctgtatccgcactttaccgcgttcgagatggcggtgtacgcgcttaatcaggatgtcccgctaattagtatgtattcccaccaaaaaaacaagatattggacgcacagattttgaaaggccgcaaccgctacgacaacgtcttcctcatcgggcgcaccgaagggctgcgcgccctcgtcaaacagttccgcaaaagcagcgcgccgtttctgtatctgcccgatcaggatttcggacgcaacgattcggtttttgtggatttcttcggtattcggacggcaacgattaccggattgagccgcattgccgcgcttgcaaatgcaaaagtgatacccgccatccctgtccgcgaggcggacaatacggttacattgcaattctacccggcttggaaatcctttccgggtgaagacgcgcaagccgatgcgcagcgtatgaaccgctttatcgaagagcgggtgcgcgaacatccagaacaatatttttggctgcacaagcgttttaaaacccgtccggaaggcagccccgatttttactga

SEQ ID NO: 52074 - DNA, 1305 bp, Neisseria meningitidis
atgaaaaaacacatatgggcggcatctttgctgccggcatccctatcggcagaacctttaaactggtggaagccttattccgccgtcaattcgggcgataccgcctgggtgatgactgcggctgccttggtactgttgatgacgcttcccgggctggctttattctacggcggtatggtgcggaaaaaaaacctgctctcgacgatgatgcacagcttttccatcgcgacattggtgggcatcctttgggtcgccgtcggctattctttagcgttcacgccgggaaatgcctttatcggcggtttggggcgcgtatttttaagcgggatgcagatagacgctaccgcacagatgctgaccgtgtcgcccaatgcgccgactgttcccgaaccggtatttatgttttttcagatgacgtttgccattatttcgaccgccattattaccggcgcgtttgccgaacggatgaaatattcggcaatgatgctgttttcgggcatatggtttttattggtttatgtgccgggcgcgcattgggtgtggggcggcggctttatgagcaagggcggcgtattggattatgccggcggtacggtggtgcacatcaatgccggtatcgcgggactcgtcgccgccttggttttgggcaggcgcataggctacgggcgcgaggcgatgcctccgcacaatatggcgatgacactgatcggcgcggcaatgttgtggttcggctggttcggctttaacgccggatcggcgcttgcggcagacgcggcggcgggtatggcgatggcggtaacgcaggtgtcggccgtattcggcgcggcaggctggcttgcctgcgaaaaaatagcgggacacaaaccttccgctttggggctggcttccggcgcggtttccggtctggtcggcatcacccctgccgccggctttaccggcccgtcgggcgcagccgccatcggtatattgactgccgccgcgtgctttgtgtccgtcaccgtcgtcaaacacaaattgcgttacgatgattctttggacgctttcggcatacacggattcggcgggctggtgggcggaatattgaccggcatctttttcgacaaccgcattttcggcggggatgcggcagtttggcagcagttgtggatacaggtaaaagacggggtcgttatggcggcatacagcgggctaatgagttgggcgattttgaaggtcgtggggaaaatctgcggcggcctgcgcgtcggcaaggatgtcgaacgcgaaggtttggatctgaatatccacggcgaacgcgtggaataa

SEQ ID NO: 52075 - DNA, 1041 bp, Neisseria meningitidis
atgaaagcaatggtttatcacggcgcaaacgacatccgttttgaggaaaaaccccgtccgcagattatcgatccgaccgatgcggtggtgaaaatcgtcaaaaccacgatttgcggtaccgatttgggtatttggaaaggcaaaaaacccgaagtcgccgacggtcgtattctcggtcatgaaagcatcggtattgtagaagaagtcggcgaggctgtaaaaaacatcaaagtcggcgataaagtcattatttcatgcgtcagcaaatgctgtacttgcgacaactgcaaaatccaactttattcgcattgccgcaacggcggctggattttgggctacatgattgacggcacgcaggcagaatacgtccgcacgccttatgccgacaacagcctcgtgccgctgcccgacaacgtcaacgaagaagtcgccctgttgttgagcgacgctttgccgaccgcacacgaaatcggcgtgcaatacggcgatgtcaaacccggcgacaccgtattcatcgcaggtgccgctcctgtcggtatgtccgccttgttgaccgcccaactgtatagccccgccgccattatcgtgtgcgatatggacgaaaaccgtttgaaactggcgaaagagttgggcgcgacccataccatcagccccgcctcaggcgatgtctccaaacaagtttttgccattgtcggcgaagacggcgtagattgtgccatcgaagccgtcggtattcctgcgacttggaatatgtgccaagacatcgtgaaaccgggcggtcatatcgccgttgtcggcgtacacggccaatccgttgatttcaaactggaaaaactctggattaaaaacctcgccatcacaaccggtctggtcaatgccaacaccaccgaaatgctgatgaaggcaatttccagcagctcagtcgattacaccaaaatgatgacccaccatttcaaattcagcgaattggaaaaagcctacgacgtgttcaaacacgccgccgaaaaccaagtgatgaaagtggttttggaagcggattaa

SEQ ID NO: 52076 - DNA, 1155 bp, Neisseria meningitidis; identical to SEQ ID NO: 44038

SEQ ID NO: 52077 - DNA, 249 bp, Neisseria meningitidis
ttgtactgtctgcggcttcgccgccttgtcctgatttttgttaatccactatatgctgatgccggagacgtatattgcgtctataacatcagactgaagcagtacactgcctgccaggttacccgagttgaagaacacggtggcaaaaaaaacacatgcgaccctgctggctttggactggcagggcaacaaaccgcttggggcggaggagctggcggatttgaaaccgctttacaaagacttaaagaa

SEQ ID NO: 52078 - DNA, 423 bp, Neisseria meningitidis; identical to SEQ ID NO: 44041

SEQ ID NO: 52079 - DNA, 732 bp, Neisseria meningitidis
gtgtcgcgcgaaatcaatgcgggcgggcatcatttcctctacggcggcatcagcggcggcggcgtgcattattgggataacaaagatttcagcgaacagtgcctgcgcctgtcgctcggctataaaaatcgttcggtaacgcgctcgttcggcatcgtgccgtttatcgggcaaaacctcttaggcggcagccgatacaatttcgtcggcggcttcaatgccgatttctcccgacgcttgagcgaacgctggcggctgacgctgaacgtgggcaatatgtagaagcgttatcaggaagaccgcaccgccgcccgatacgacagccatatgccgctggcgggcgcgacgctgatgtattccgcgccgaaagactggctgctttacggcggtgcggactggtcgcacgacttgacgaaggaggcggaacaggcttccatccgcaagggtttgcgtgtcggagcggtcaaaacgttcgacggcggcttgggtctgcgggcaaacctgcgctacacccgcaggacttttgatgcacccgggacccttgtgtactgcttcccgcgcaaagaccacgaatatcaggcaaacctgtcgttgtggcacgacaaaatctcttggaagggctttacgccgcaactcaatttccgctatctgaaaatcgacagcaatatgaaaagtttttacacacgcaaaaacatgcagattttcatgagcgtggaaaaggatttcaaataa

SEQ ID NO: 52080 - DNA, 360 bp, Neisseria meningitidis; identical to SEQ ID NO: 44043

SEQ ID NO: 52081 - DNA, 713 bp, Neisseria meningitidis
atgccatccgttgaactgctgttggagattgtcggactgccacgcggcaccttttattaccaattggccgtccaatcggcagaagacaaatatgccgatttgaaacagcatatccatgatatttatcgacgacataagggaagatacggctaccggaggattgcagcagccatccttcatgcaggaacaccggtcaatcacaagaaagtcagccgtctgatggcgaagacggggctgaaggcagtgatacggcggcgcaaataccgctcgttcaaaggagaagtcggcaaaattgcgccgaatatcctgcgacgctgtttccatgcagaaaagccgaatgagaaatgggtaacggacgttaccgagttcaatgtaggcggagaaaagatatacctttctccgattatggatttgtttaacggggaaatcgtcagttaccgtattcaaatccgcccgactttcgatttggccggcgagatactgaaaggtgcgccggagaaaccgggatcgtctgaaaagccgatactgcattcggatcaaggttggcaatatcagatgttttttatcaaaagcagttgaaaggcaacggtctggttcagagtatgtcccgcaagggaaactgcttggacaatgcggcaatggaaagtttcttcggaacgttgaaatcggaatgtttccatacgtgcaaatatgattccgttaccgaatcgtaa

SEQ ID NO: 52082 - DNA, 189 bp, Neisseria meningitidis; identical to SEQ ID NO: 44049

SEQ ID NO: 52083 - DNA, 282 bp, Neisseria meningitidis
gtgcaacatattactacaaagctattttatttcaaaataactgatatatcttttttcatagattttaaatttcatatttttaatattttaggaattttattccaaagaaaaagaaacagattgataaaaacaatacccgccattcattcgggcaaaaccgcacggaacatccgttttcccgtttccacgacaatccggtacaggacacctcgctgccgattccgcctgcacatccggcaaaatttcatacgcaaggaaaatgttgaaaacaaaaagaactaa

SEQ ID NO: 52084 - DNA, 375 bp, Neisseria meningitidis; identical to SEQ ID NO: 40077

SEQ ID NO: 52085 - DNA, 381 bp, Neisseria meningitidis
ttgtactgtcttcggcttcgtcgccttgtcctgatttttgttaatccactatacatcatcgctactaccgttccggcgcaacaaacattcctcgatgccgccgaactgatgcaatggagtatagaaaccgaagggctgggcttgaacgtcatctcgcacaagatactcggcaaagaccacgcccaagtcgaatttgaagcctacttccgagacggacaacaccgatccgcgcatcacgaactgtccggcttcatcaacatcggcggacaatggtattttatcgatcccaccgttccgcatcctgcgatgaaacaaccctgcatttgcggatcgggcaaaaaattcaaagcctgctgcggcaaatatctgaaacctgtcgca

SEQ ID NO: 52086 - DNA, 324 bp, Neisseria meningitidis
atggatattgtgcaacttgggtcggcggaattgaaggcgtggatggacgaagggcggatgttttgtttgttggacgtgcgtacggatgaagaagcggcgatttgttcgctgcccgatgcgctgcatatcccgatgaatctgattccgctgcggcagaacgagctgccggatgatgtgccgcttgtggtgtattgccaccacggtatccgcagcctgcatacggcgatgtatttggcggacgcgggttttgaaaacctgtacaaccttcagggcggcatcgatgcatgggcggccgagattgacggcaacatgatgcgttattga

SEQ ID NO: 52087 - DNA, 291 bp, Neisseria meningitidis
ttgaggcaggcatttcagacggcattccttaaatgcgtgtacctgtggtgttccaaaaggtcgtctgaaagtgcagcttctgcgaagctaaagcgcggtatcaacgaagttaaaatttgcctgaaccttaaaggcagcctgcaccccaatcccctctcccgtgggagagggctaggacgaggctggcaaactgaaggtttgcttgggcggcattttcaatgtgcaggctgcttttatagtggattaacaaaaatcaggacaaggcgacgaagccgcagacagtacaaatag

SEQ ID NO: 52088 - DNA, 480 bp, Neisseria meningitidis; identical to SEQ ID NO: 46068

SEQ ID NO: 52089 - DNA, 294 bp, Neisseria meningitidis
atgacagctaaaggacaaatgttgcaagatcccttcctgaacgccctgcgtaaagagcatgttccggtttcgatttacttagttaacggtatcaaattacaaggtcaggttgagtctttcgatcaatacgttgttctcctgagaaacacttccgtcacccaaatggtttacaaacacgccatttccaccatcgtaccggcacgctccgtcaacctacaacatgaaaacagaccccaagccgcaccgacttcgaccctcgtccaagtggaaaccgtccagcagcctgccgaataa

SEQ ID NO: 52090 - DNA, 243 bp, Neisseria meningitidis; identical to SEQ ID NO: 44059

SEQ ID NO: 52091 - DNA, 237 bp, Neisseria meningitidis; identical to SEQ ID NO: 44060

SEQ ID NO: 52092 - DNA, 204 bp, Neisseria meningitidis; identical to SEQ ID NO: 41400

SEQ ID NO: 52093 - DNA, 204 bp, Neisseria meningitidis; identical to SEQ ID NO: 43658

SEQ ID NO: 52094 - DNA, 204 bp, Neisseria meningitidis; identical to SEQ ID NO: 40089

SEQ ID NO: 52095 - DNA, 195 bp, Neisseria meningitidis
gtgaagcataagctcgcgtcttggtggaaaaccatcaagctgacggcaaacttgatggcaggcgtgcccgattatgaaaactacgttgcacagcagcgcaaacataatcccaacgcccctgtgatgaccaagctgcagtttcaagactattgccgcaaacgccgctgcggcgcaaacggcggacgctgctgttaa

SEQ ID NO: 52096 - DNA, 444 bp, Neisseria meningitidis; identical to SEQ ID NO: 41076

SEQ ID NO: 52097 - DNA, 129 bp, Neisseria meningitidis
atgagacctttgcaaaattccccaaaatccccaaaattcccaccaagacatttaggggattttggggaattttgcaaaggtctcggacagtattttgaacgcagtgcgcgtaaatccgtatggaaacca

SEQ ID NO: 52098 - DNA, 804 bp, Neisseria meningitidis
atggcagacatcctaccatccgacaagcggcggcaaccgccaaaaacgaaaggaagtacgatgaacataatcgaacaagaaatgaaacactccagtctgagaaaagtagatgccgaaatcgccaaaatcattgcagacgcgcacaaaatcaacgccgaatccgtaaaaatagcccaagaatcccgatggtatcccatgatggcggccaccgggctggttaccgccatcgccgccgtgttggcactgatattcaaatttgcctgaccacaagccccgcgaggggctttatcccccgaacaaaatgaacagagccgcactattcaaccgctaccccgaatggattatcgggcaagacggcgcaagccgtttcattacccattgccgctatccccgcctgattgccaaaatccacaggcagacagacagcgaatgcccgggcgggcattaccgccattccgaaaacggcatcaccctttacgattttatttttttcgacggaaaaccggcagacgaagcccgatttgccgccgtccttaccgaaacctgccgccgggcagtcaaaaaaatatgcgaaacaaaataaaccgcaacgacatggaactcggctacacgccttacaaccttcgcaccctgcgcaaccgctgcaaactgacacaggccgagttggcgcaaatcgtcggggtgaagcactacatacaggtaggccgctgggaagccaaacccgataccgaaacgcggcggaccgatatgtcgctggaaaaatggcggcagttcctcgattggacagaaaaaacaaacgccgtc

SEQ ID NO: 52099 - DNA, 432 bp, Neisseria meningitidis
atgaaaaaacaaatcacctcagccgtaatgatgctgtctatgattgcccccgcaatggcaaacggattggacaatcaggcatttgaaaaatacgtattccacacgcaggcagatgcgccgatgcagttggctgagctttctcaaaaggagatgaaggagactgagggggagtggattcctaatgctgttggaggcattatgggaggagttggagggcatttcagctatatggctagtgctattgctagtggctcgtataatcgagaggcacattgggcaacaattggaggtggtgcgttaattggtgcgatgaaccctattaacggaggaagagcactgattaatggtatgcgaggtgtagcagtggggactgttgctggtggcataactggttatgcaggttctacgggtaagaacactgacattcgccgt

SEQ ID NO: 52100 - DNA, 273 bp, Neisseria meningitidis
atgtttaccacaaacgatttacgccatttcctagaaggtttggccatcctattctcaatcggctattgggacaccatgctgctgttgctttggtttctcgtccgctttgcctacaaaaaaccccggcaaaatcctttcaggcagcctgaccgccgccgctatcctgatgctgtttgtttggattattcccaaacaattctgcccgagcaaagaagaaatacaggcacaagaagagtgggacagaaaatacaaagaagccgaagccgtgtttaa

SEQ ID NO: 52101 - DNA, 303 bp, Neisseria meningitidis; identical to SEQ ID NO: 40930

SEQ ID NO: 52102 - DNA, 219 bp, Neisseria meningitidis
atgggcggcaaagtgcagcacaataaaggcaaaatacgcgacaatgctttaaaagccttagtgaaatccgatttgttccggcacaaggtggaacggaaaaggaaaggcaaaggcagctacaacaggcaggaagcgaaaaaatggcgggacggttttgatacggtcccgccatttttatgtcttaaacatggaagctttcgccgcagccgcaggagtctt

SEQ ID NO: 52103 - DNA, 216 bp, Neisseria meningitidis
atgagtatgcccgaaatgcccaaatggtacgacgatgacggacagatcgtgtcctgtaccgaaaaggtcaaagtgatgtccgaaaatatggccgagctgtatcagacggcacaagacgcgtttgaagacgcgctgctgatgggttgcggcgaacgtcaattgcgcgattacctgctcgcgctgattgaaggtttggaaaatccctaccgcaaagtc

SEQ ID NO: 52104 - DNA, 291 bp, Neisseria meningitidis; identical to SEQ ID NO: 44076

SEQ ID NO: 52105 - DNA, 201 bp, Neisseria meningitidis
atgccgtctgaagcagcttgggctttcagacggcatttcctccgcttaaaacagcatatcggcaaccccgccccgcccgtccacggcaatctgcatctgaaaaccatctgtatgccaaaccacacccccatcccgatttccgtcatttgcaccctgcctgtattgggcaatcatcggtttttcgcttacaatagccgaatc

SEQ ID NO: 52106 - DNA, 807 bp, Neisseria meningitidis
atgaaaagctcttttgtgcaaacgcttaccatcgccggttcggattcgggcggcggtgcgggcattcaggcggatttgaaaacgtttcagatgcgcggcgtgttcggaacgtgcgtcatcaccgccgttaccgcgcaaaataccttgggcgtgtcggcggttcatctcgtcccgaccgaaaccatcaccgcacaaatccaagcaatcagggaagactttgacatccgcgcctacaaaataggaatgctcggcacggcggaaatcatcgaatgcgttgccgacaagctgaaacactgtgacttcggcaggcgcgtactcgaccctgtgatgattgccaaaggcggtgcgccgctgttgcaggattccgccgttgcggcactgacgcgcctgctgcttcccgatacggatgtattgacccccaacctgcccgaggcggaagccctgaccggcgtgcatatcgaaaaccgtaaagatgcggaacgtgcggcaaaaatcctgcttgattacggtgtcaaaaatgtcgttatcaaaggcggacatttgaacggcagcagcagcggacgctgcacggattggctgtttacgcaaaacgaaacgctggaattggacagcccgcgctttccgaccgcccacacgcacggcacaggctgcacgttttccgcctgcattaccgctgaattggcaaaaggctcggacgtttgcgaagccgtacagactgccaaggcctatatcacggcggcaatctcaaaccctttggaaatcggcgcgggacacgggccggtcaatcattgggcgtatcgggactaa

SEQ ID NO: 52107 - DNA, 1290 bp, Neisseria meningitidis
atggctgtcttcccactttcggcaaaacatcggaaatacgcgctgcgcgcgcttgccgtttcgattattttggtgtcggcggcatacattgcttcgacagagaggacggagcgcgtcagaccgcagcgcgtggaacaaaaactgccgccgctgtcttggggcggcagcggtgttcagacggcatattgggtgcaggaggcggtgcagccaggcgactcgctggcggacgtgctggcgcgttcgggtatggcgcgggacgaaattgcccgaataacggaaaaatatggcggcgaagccgatttgcggcatttgcgtgccgaccagtcggttcatgttttggtcggcggcgacggcggcgcgcgcgaagtgcagttttttaccgacgaagacggcgagcgcaatctggtcgctttggaaaaaaaaggcggcatatggcggcggtcggcttctgaggcggatatgaaggttttgccgacgctgcgttcggtcgtggtcaaaacgtcggcgcgcggttcgctggcgcgggcggaagtgcccgtcgaaatccgcgaatccttaagcgggattttcgccggccgcttcagccttgacggtttgaaggaaggcgatgccgtgcgcctgatgtacgacagcctgtatttccacgggcagcaggtggcggcgggcgatattttggcggctgaagtcgttaagggcggcacaaggcatcaggcgttctattaccgttcggacaaggaaggcggagggggcggcaattattatgatgaagacggcagggtgttgcaggaaaaaggcggcttcaacatcgagccgctggtctatacgcgcatttcttcgccgttcggctaccgtatgcaccccatcctgcacacttggcggctgcacacgggcatcgattatgccgcaccgcagggaacgccggtcagggcttccgccgacggcgtgattacctttaaaggccggaagggcggatacggcaacgcggtgatgatacgccacgccaacggtgtggaaacgctgtacgcgcacttgagcgcgttttcgcaggcacaaggcaatgtgcgcggcggcgaggtcatcggttttgtcggttcgacagggcgttcgaccgggccgcacctgcattacgaggcgcgcatcaacgggcagcccgtcaatcctgtttcagtcgcattgccgacacccgaattgacgcaggcggacaaggcggcgtttgccgcgcagaaacagaaggcggacgcgctgcttgcgcgcttgcgcggcataccggttaccgtgtcgcaatcggat

SEQ ID NO: 52108 - DNA, 222 bp, Neisseria meningitidis; identical to SEQ ID NO: 40096

SEQ ID NO: 52109 - DNA, 2082 bp, Neisseria meningitidis
atgggcaaagccaacgcctttaccgcgccgattaccgtcgtcaactacgacgaacaagccctcaacaacaccgaggcgcgtactttggtggatgccgtagcgaaaaaagacgcttccgtttggcagttcggcggcgaaagcaacacgctgaccggattgtatttcagaggttatcagcttgatgcgcgccaattcagcgtcaacggtttgacaggtatgtacggcacgcaaggcacgaccagcgtgcaagtcggctccgcacaactgattcaaggcgcgtccaccgccgtaaacggcatgaaccctgatggcgcggtatccggttccgtcaatatcgaaaccaaaaaagccgctgatgaaggcaaccgcaaaatcggtttggcccggttcggcaacaaccgcgcccaaggtacgttcgacttgggccaacgtttcggcgaaaacaaagcattcggcgtgcgcgccaacggcaaactgcgccacggcgacaccccgcgccacggttacagcgaagacaacaaagaatttgcggtaaatgccgactatcgcggcgaaacactgcgcgtagcgttcgattccatctacgcaaaacgcaaaaccaacggcggtcgcgcgcgtatgcaggacattcaaaacgccggcggacgcttgtcctgactttgggcggacgtttccaagcggttgaatacaccaataagaaaaaatcacgcggaacggcagccggagctagcaaggtagaagtgaaggcaaacggaaatattgagcatcaattggcatcgtttacagccgactatcccaattcttgggagaactctgccaacttggatgccaatatcaaagtcaacagcctggctttgtccgacaccttgggcttcgtggataacaaataccgttggcgcgcccgatggtaaaaccaacctgctgccttcttggaactggcaaaataccgccggccaaaccaatatgcttacgtttgaatgggatgcgtttgacaatgcccaaattaccggcggtatcggctacaacaaggcgcgttattacggcacgctgatttccccgaccgtttgcggtacaagcggtgcgagcgaccaaaccgctacctgctcaagtgccaagcaataccacaccgacacggcgagcctgaccgaccaatatttccgcacattgagtatgaacctgaccgcacgcggcgaatttgaaaccggtccggtaacacataactggagcaccgcgttcgaccgtgttatccgccagcggaaaaccattcagagcggtgatgccaaacgtttcagcccgatgctgatggcggcgtgggtgccgcaacctgatttggttgtgtacggcaactatatggaagacttggagcctgccgatatcaaaaccgatgattccggcgaaacgacaatggcgaaaccgcgtgtcagccgtcagtttgaagtgggcgtgcgtaaaaactggggcaatttcgtaaccacgttaaacgcgttccaaatcaaacgcccgggctactggcgcggtcagactaataaagatggcagcctgacctacggcaataattccgattttgcccgctataaagcgcaaggcggtgcggccaaagacgaacaaggcatggaacgcaatcgcggtattgagttcaacacctacgcgaacttgctcaacaatactttgcgtccgactttgggtctgatgtatctgcaatcgaccgtgaaagagtatccaaattcacgcgatatgctggttaacggcgtacaagttgccaacccgcgtgtgattgccaaagcgggcgtggaatgggataccccgtttgccaaaggtttgaccttgaacggcaacgtttcgtatttcggcaagtcttaccaagatacgaaaaaacaatacgccttcccgtcttacactttggttgacgtaggcgcgcgctacaaaaccaagcttggcaaaaacactctgaccgtcagcagctcggtggaaaacctgttcaacaaaaactattggcaggtacagcgcggccaatacgaccgcagcttcgccgtcgtcggtatgccgcgcacttactggctgaaggcggaattggatttctga

SEQ ID NO: 52110 - DNA, 326 bp, Neisseria meningitidis
ttgataaacatgaaaacatcgacggtcgtttttggcggattttttatggcagacaacggagagcgaatccaaatccccgttttggaaaatcctgacattagggaaatcaatcacttttttccgtatcaaattttgagaaaaaagccggcgtccttgttttcagaatcatccccgagccggaatttggcgataccgaattaactgtctattttgaaaaggatattatagtggattaacaaaaaccagtacggcgttgcctcgccttgccgtactggtttttgttaatccactatatcagacgaaaacaaacacccgcgccaatagcc

SEQ ID NO: 52111 - DNA, 1230 bp, Neisseria meningitidis; identical to SEQ ID NO: 44084

SEQ ID NO: 52112 - DNA, 429 bp, Neisseria meningitidis
ctcagctacaacaacgaaggcttgatgtctgtcgggcaggtaagggagatttttgagcgtttcggcaaatatgatttggttcaaacggaataccggcggtttaaggcagataaaacagaaaaccgtaaccataaggcaaattcgatattcgaatatctgcatgagacctttgcaaaaatagtctgttaacgaaatttgacgcataaaaatgcgccaaaaaattttcaattgcctaaaaccttcctaatattgagcaaaaagtaggaaaaatcagaaaagttttgcattttgaaaatgagattgagcataaaattttagtaacctatgttattgcaaaggtctctgcatattttagaaaagaccttttatagtggattaacaaaaaccagtacagcgttgcctcgccttagctcaaagagaacgattctc

SEQ ID NO: 52113 - DNA, 297 bp, Neisseria meningitidis
atgcattatttcagtattcatgaccaatggggacggcatataggctttttcatcctgcttgccgacgacgaatcggaagcacggccgcaaagcgggcgttttgccgtcaaacttgaaggcggaatggaaaatcatgtcctgtcgccgttcggtcagacggaaattccccaatattggcgcgtggtcaaagaccgtatcgagctgttttttgacgaagctcccgtcggaactttgcgtaacgaatatctgaccgtgtcggggcagacttttgttttgaacgatttgacagggaatatg

SEQ ID NO: 52114 - DNA, 411 bp, Neisseria meningitidis; identical to SEQ ID NO: 40101

SEQ ID NO: 52115 - DNA, 213 bp, Neisseria meningitidis; identical to SEQ ID NO: 40104

SEQ ID NO: 52116 - DNA, 198 bp, Neisseria meningitidis; identical to SEQ ID NO: 48082

SEQ ID NO: 52117 - DNA, 1128 bp, Neisseria meningitidis
atgaaaatcgtttttatcacaacagtcgcatccagcatttacggtttccgcgcccccgtcattaaaaaattaatcggcaaaaaccatcaggtgtatgcctttgtatcggagttttccgacaatgaattggatattatcagggaaatgggggttacacccgttacctaccgttcaaaccgcagcgggctgaacccgttttcggatataaaatccaccttcctcatctttaaagaactcaaaaaaatatcgccggatttggttttcccttatttcgcaaaacccgtgattttcggcacttttgccgcaaaactggcaggcgtgcccagaatcgtcgggatgctggaaggtttgggattcgcatttaccccgcagccggaaggcataccgttaaaaacaaaaatcataaaggggattttgattgccttataccgcattgccctgccgatgttggaaagcctgattgtattaaaccccgacgacaaagacgaactgacggacaaatacggcatcaaaataaaaaacatccatattttgggcggaatcggtctggatttgcggcaatatccttattccgaggcggatattcccgatgaaaaagaacccgtaaaattcctctttatcggcagatttctgaaagaaaaggggattgatgattttattcgggcggcggaacaggttaaggacaaataccccgatacggtttttaccgctttgggcgcaatcgacaaatcacgcggggggggggatttggaacggcttgccgcccgcgatattatccgtttccccggttttgtgaacaatgtttccgaagtgataaaagaacatcatatattcgtattgccgtcttattatagggaaggcgttccccgaagcactcaggaggcaatggccgtcggcagggcagtgattacgacggatgtccccggatgcagggaaacggtcgccgacaaggtcaacggcttcctgatcgagccttggaatccccgcatcttggccgaaaaaatgatttattttatcgaaaacagggaagccgtccgcctgatggggaatgcaagttatgcgattgccaaagataaattcgatgccgaaaaagtcgatttgaaattgctcgatattttgaaggcgtaa

SEQ ID NO: 52118 - DNA, 1074 bp, Neisseria meningitidis
atgcgcccgtttttcgtcggcgcgacagtgcttgccatactcggcgcgttggtgtttttcatcagccccggtgccgtcgtcctgcaccgccaaatcttcttagaactcatgctacctgcggcatatggtggtttcctgactgcggctttgttggactggacggttttttcgggtaacctgaaacctgtcgcgactttgatggcggcattattgctcgccgcatccgctatactgcccttttcgccgcaaactgcctcgtttttcgttgccgcctattggctggtattgctgctgttctgcgcccggctgatttggctcgaccgcaacaccgacaacttcgctcttttgacgttgcttgccgcatttaccgtttttcagacggcctatgccgtcagcggcgatttgaacttactgcgcgcgcaagtgcatttgaatatggcggcggtgatgtttgtttccatacgcgtgagtgttttgctgggtgcggaagcgttgaaagaatgccgtctgaaagaccccgtattcatccccaacgtcgtctataaaaacatcgccatcaccttcctgctgctgcacgccgccgccgaactttggctgcccgcgcaaaccgccggttttaccgcattcgccgtcggtttcatcctgctcgccaagctgcgcgaactgcaccatcacgaactcctgcgcaaacactacgtccgcacctattacctactccaactctttgccgccgcaggctatctgtggacaggcgcggcgaaactgcaaaatctgccctcctccgcgcccctgcacctgattactctcggcggcatgatgggcggcgtgatgatggtgtggctgactgccggactgtggcacagcggctttaccaaacttgactaccccaaactctgccgcatcgccatccccattcttttcgccgccgccgtttcgcgcgctgttttaatgaacgtgaacccgatattcttcatcaccgtccccgcgattctgaccgccgtcgtgttcacgctttatcttttcacgtttgttccgatttttcgggcgaatgcgtttacgggcgacccggaataa

SEQ ID NO: 52119 - DNA, 1011 bp, Neisseria meningitidis
atgattttctccatcatcgtccctatttacaatgtggaaaaatacctccgctgctgcgtggattccgtgcttgccgaaaattttgccgattatgaaatgattttggtcgatgacggttcgccggatggctgcgggaagatttgcgacgaatatgcaggcaaatatccgcatataaaagtgattcatcaagaaaacggcgggctgtcggatgcccgcaacgccggtatccgagcggcaaaaggcgattacctgatctttttggacagcgacgactattgggccgataccaaccgttcaaaaaacgggggggggattctctttgatttacaacaacttgcagacaaaaaggttgatttgatcctgcatccctcgtccctcaattaccacgtcatccccaaaggggcggacttttcggataatgattttgtccgccattttgaaacgttggtggaggggcggtactatatcgccaacgcgtggacaaaaatcgtcaggcgggaaataatcatcaaaaacaatctgtttttcccaaaaggatacattcacgaggatttcccgtacagtttgcaattggcgcgttttatcaagacttttgccttttacgataaccctttttaccagtaccgcgttctcggcggctctatcagccacaacatcaaatacaaaaatttcagcgatgtgctgacgcatctcgaccggggtgtggattttttagtcgaaaacaaaaattcccccatctacggcggtttgcaaaaatttgtcttcgacaatatcggctatctgaggtctatattggtaaggctttatttttccaaaaacattatcgtcatctaccggaaatatttttcatttaaagaaaaatgcagaaagatattcggcgcgaaggcaatccgtccggtttttatcgggaagaccgcattcatcataggattgccgatattgcgcctgctcgtaccgcctatgctgtacccggcaatcaaggccgtttatcaaaaatttttttcggaataa

SEQ ID NO: 52120 - DNA, 657 bp, Neisseria meningitidis; identical to SEQ ID NO: 44093

SEQ ID NO: 52121 - DNA, 3201 bp, Neisseria meningitidis
atgcgaacgaccccaaccttccctacaaaaactttcaaaccggctgccatggcgttagctgttgcaacaacactttctgcctgcttaggcggcggcggcggcacttctgcgcccgacttcaatgcaggcggcaccggtatcggcagcaacagcagagcaacaacagcgaaatcagcagcagtatcttacgccggtatcaagaacgaaatgtgcaaagacagaagcatgctctgtgccggtcgggatgacgttgcggttacagacagggatgccaaaatcaagccccccccgaatctgcataccggagactttacaaacccaaatgacgcatacaagaatttgatcaacctcaaacctgcaattgaagcaggctatacaggacgcggggtagaggtaggtatcgtcgatacaggcgaatccgtcggcagcatatcctttcccgaactgtatggcagaaaagaacacggctataacgaaaattacaaaaactatacggcgtatatgcggaaggaagcgcctgaagacggagacggtaaagacattgaagcttctttcgacgatgaggccgttatagagactgaagcaaagccgacggatatccgccacgtaaaagaaatcggacacatcgatgtggtctcccatattattggcgggcgttccgtggacggcagacctgcaggcggtattgcgcccgatgcgacgctacacataatgaatacacatgatggaaccaagaacgaaataatgtctgcagccatccgcaatgcatgggtcaagctgggcgaacgtggcgtgcgcatcgtcaataacagttttggaacaacatcgagggcaggcactgccgaccatttccaaatagccaattcggaggagcagtaccgccaagcgttgctcgcctattccggcggtgataaaacagacgagggtatccgcctgatgcaacagagcgattacggcaacttgtcctaccacatccgtaataaaaacatgcttttcattttttcggcaagcaatgacgcacaagctcagcccaacacactgaccctattgccattttatgaaaaagatgctcaaaaaggcattatcacagtcgcaggcgtagaccgcagtggagaaaagttcaatggctccaaccattgcggaattactgccatgtggtgcctatcggcaccctatgaagcaagcgtccgtttcacccgtacaaacccgattcaaattgccggaacatccttttccgcacccatcgtaaccggcacggcggctctgctgctgcagaaatacccgtggatgagcaacgacaacctgcgtaccacgctgctgacaacggctcaggacatcggtgcagtcggcgtggacagcaagttcggctggggactgctggatgcgggtaaggccatgaacggacccgcgtcctttccgttcggcgactttaccgccgatacgaaaggtacatccgatattgcctactccttccgtaacgacatttcaggcacgggcggcctgatcaaaaaaggcggcagccaactgcaactgcacggcaacaacacctatacgggcaaaaccattatcgaaggcggttcgctggtgttgtacggcaacaacaaatcggatatgcgcgtcgaaaccaaaggtgcgctgatttataacggggcggcatccggcggtagcctgaacagcgacggcattgtctatctggcagataccgaccgatccggcgcaaacgaaaccgtgcacatcaaaggcgatctgcagctgggcggcgaaggtacgctgtacacacgtttgggcaaactgctgaaagtggacggtacggcgatgaccggcggcaagctgtacatgtcggcacgcggcaaaggggcaggctatctcaaccgtaccggacaacgtgttcccttcctgagtgccgccaaaatcgggcgggattattctttcttcacaaacatcgaaaccgacggtggtctgctggcttccctcgacagcgtcgaaaaaacagcgggcagtgaaggcgacacgctgtcctattatgtccgtcgcggcaatgcggcacggactgcttcggcagcggcacattccgcgcccgccggtctgaaacacgccgtagaacagggcggcagcaatctggaaaacctgatggtcgaactggatgcctccgaatcatccgcaacacccgagacggttgaaactgcggcagccgaccgcacagatatgccgggcatccgcccctacggcgcaactttccgcgcagcggcagccgtacagcatgcgaatgccgccgacggtgtacgcatcttcaacagtctcgccgctaccgtctatgccgacagtaccgccgcccatgccgatatgcagggacgccgcctgaaagccgtatcggacgggttggaccacaacggcacgggtctgcgcgtcatcgcgcaaacccaacaggacggtggaacgtgggaacagggcggtgttgaaggcaaaatgcgcggcagtacccaaaccgtcggcattgccgcgaaaaccggcgaaaatacgacagcagccgccacactgggcatgggacgcagcacatggagcgaaaacagtgcaaatgcaaaaaccgacagcattagtctgtttgcaggcatacggcacgatgcgggcgatatcggctatctcaaaggcctgttctcctacggacgctacaaaaacagcatcagccgcagcaccggtgcggacgaacatgcggaaggcagcgtcaacggcacgctgatgcagctgggcgcactgggcggtgtcaacgttccgtttgccgcaacgggagatttgacggtcgaaagcggtctgcgctacgacctgctcaaacaggatgcattcgccgaaaaaggcagtgctttgggctggagcggcaacagcctcactgaaggcacactggtcggactcgcgggtctgaagctgtcgcaacccttgagcgataaagccgtcctgtttgcaacggcgggcgtggaacgcgacctgaacggacgcgactacacggtaacgggcggctttaccggcgcgactgcagcaaccggcaagacgggggcacgcaatatgccgcatacccgcctggttgccggtctgggcgcggatgtcgaattcggcaacggctggaacggcttggcacgttacagctacgccggttccaaacagtacggcaaccacagcggacgagtcggcgtaggctaccggttctga

SEQ ID NO: 52122 - DNA, 1200 bp, Neisseria meningitidis
atggatatacaaagtaaagcgaaaaaattgattgagatgattcagacggcaccggtggagtggaagccgttgggggaagtggcaagtataggaaagggaaagcagcttaataaatcactacttagagaaaaagataagtatcccgtaatcaatggcggtattaatccatcaggttattggcatgaatacaataacgaagctggcacgattgttattagccaaggaggagcaagtgcggggtttgttaattggatggatatccctttttttgcaggagctcacgcatatactattaaagcgaacgaagacaaactattgcaacggtttgcatatttttttaaaaatgaagcaaattacattcatgcaatgtcaatacggagcagtataccagcacttgctaaaagtgaattgcaaaacttacttattcccatcccgcccctagaaacccaacaaaaaattgtaaaaatacttgacaaattcaccgagctggaagctacgctggaagctacgctggaagctacgctggaagcggaattagccctgcgcaaacgccaataccggtattaccgcgactttcttttagattttgacaatcaaatcgggggggtagctgatggctatcaatgccgtctgaaagatgtggtttggaagacgttgggggagattgccgaatattcaaaaaaccgtatttgttcggataaactgaacgaacataattacgtgggcgtggataatctcttacaaaatagagaaggtaaaaagttatccggttatgttccaagtgagggaaaaatgacagaatatattgccaatgacatcttgattggaaatattcgtccgtatttgaaaaaaatctggcaggcagactgcacgggcggaacaaacggtgatgttttggttatccgggtaacagatgaaaaggttaatccaaaatatctgtatcaggtattggccgatgataaattttttgcctttaatatgaagcacgccaaaggtgcaaaaatgccgcgtggcagcaaagcagcgattatgcaatataaaatccccatcccaccactccccgaacaggaaaaaatcgtcgccatcctagacaaattcgacaccctgacccactccgtcagcgaaggcctgccgtacgaaatcgccctgcgccgcaaacaatacgaatattaccgcgaacagctgcttgcctttcggtag

SEQ ID NO: 52123 - DNA, 1053 bp, Neisseria meningitidis; identical to SEQ ID NO: 44095

SEQ ID NO: 52124 - DNA, 421 bp, Neisseria meningitidis
atgtttgtgaacgagaaatatccttatgcggctctgtttgcgggactggtgtttttgacgctgccgtttgcgttggcggtgcatgatgcctttgcgcttgcgttcggacggacggggttgctggtgtcggtgtcggacggcggattcggctggcgtggcggttgggacggcactgtttggtttgtgttcggtgtgtttgcgtttttgaatgtggttgtgtcggcgggtctgacgaaactggcgtacaaaaagatgatgcggcggcattcgcgttacacactgtttctgtcgggcgtggcggcttgcgcggcggcagcggtggcttggattttcgagctgctgcttggcagtggggctttgggcgggctgggggaggcggtgttggaatatgcgtttgccgtgtggctggtggcgatgctga

SEQ ID NO: 52125 - DNA, 192 bp, Neisseria meningitidis; identical to SEQ ID NO: 48097

SEQ ID NO: 52126 - DNA, 792 bp, Neisseria meningitidis
atgaaagccttgcataaaacatcattttgggaatctttagccattcaaaggcgcgtaatcggtgcgcttttgatgcgggaaattatcacccgttacggtcgcaataatattggctttttatggctgtttgttgagccgttgctgatgacattcgttatcgtcttgtggaaattttaggcagaccgatattcaactttgaatattgtcgcatttgcgattactggctatccgatgttgatgatgtggcgtaatgcctcaaaacgggcagttgggtcgatttcttcaaatgccagcttgctttatcaccgcaatgtaagagttttggataccatcttggcgcgcatgattttggaaattgctggtgcaaccattgcgcagattgtgattatggcggtattgattgcgattggctggattgaaatgccggcagatatgttttatatgctgatggcttggcttttgatggctttttttgcgattggtttgggtttggtgatttgttcgattgcctttaatttcgagccgtttggcaagatttggggcacattgacttttgtgatgatgccgttatcgggtgcattcttttttgtacataatttgcctccgaaagtgcaagagtatgcattgatgatcccgatggtgcatggcacagaaatgttccgtgccggatattttggcagcgatgtaattacctatgaaaatccttggtatatcgtattgtgcaatctggtgttgttgttgtttggcttggcgatggtcagtaaattcagtaaaggagtcgagccgcaatga

SEQ ID NO: 52127 - DNA, 1155 bp, Neisseria meningitidis
atgaaacgccaagccttagctgcaatgattgcttccttattcgcattagccgcctgcggaggcgaacctgccgcgcaagcccctgccgcttccgcagaagccgcaagttccgccgcacaaaccgccgccgaaacgccgacaggcgaactgcccgttatcgatgcagttaccacccacgctcctgaagtacctcccgcaatcgaccgcgactatcctgccaaagtccgcgtaaaaatggaaactgtcgaaaaactgaccatggaagacggtgtggaataccgctactggacatttgacggcgacgttccgggccgcatgatccgcgtacgcgaaagcgatacggttgaagtggaattttccaacaacccgtcttctaccgttccccataacgtcgacttccacgccgcaaccggtcagggcggcggtgcagccgcaacctttaccgccccgggtcgcacttccacattcagcttcaaagccctgcaaccgggtctgtacatctaccactgcaccgtcgcgccggtcggtatgcacatcgccaacggtatgtacggtctgattttggtcgagcctaaagaaggtctgccgaaagtggataaagagttctacatcatccaaggcgacttctacaccaaaggcaaaaaaggcgcgcaaggcctgccgttcgatatggacaaagccgttgccgaacagcctgaatacgtcgtattcaacggtcatgtaggttctatcgccggcgataacgcgctgaaagccaaagcaggcgaaaccgtgcgtatgtacgtcggtaacggcggtccgaacctagtgtcttccttccacgttatcggcgaaatcttcgacaaagtttatgttgaaggcgacaagctgattaacgaaaacgtacaaagcaccatcgttcctgccggcggctctgccatcgtcgaattcaaagtcgacatcccgggcagctacactttggttgaccactctatcttccgcgcattcaacaaaggcgcactgggtcaattgaaagtagagggtgcggaaaaccctgaaatcatgactcaaaaattgagtgataccgcttacgccggcaacggtgcggctcctgccgcttccgcccccgcagcttctgccccggcagcctctgaatccgaaaaaagcgtttattaa

SEQ ID NO: 52128 - DNA, 831 bp, Neisseria meningitidis
atggaatttttcattatcttgttggtagccgttgccgttttcggcttcaaatcctttgtcgtcatcccacagcaggaagtccacgttgtcgaaaggcttggacgtttccatcgcgccttgacgacggttgacggcatcatctatttccaagtaaccgatcccaaactcgcctcatacggttcgagcaactacattatggcgattacccagcttgcccaaacgacgctgcgttccgttatcgggcgtatggagttggacaaaacgtttgaagaacgcgacgaaatcaacagcaccgtcgtttccgccctcgatgaagccgccggagcttggggtgtgaaagttctccgttacgaaatcaaggatttggttccgccgcaagaaatccttcgctcaatgcaggcgcaaattactgccgaacgcgaaaaacgcgcccgtatcgccgaatccgaaggccgtaaaatcgaacaaatcaaccttgccagtggtcagcgcgaagccgaaatccaacaatccgaaggcgaggcccaggccgcggtcaatgcgtcaaatgccgagaaaatcgcccgcatcaaccgcgccaaaggcgaagcggaatccctgcgccttgttgccgaagccaatgccgaagccatccgtcaaattgccgccgcccttcaaacccaaggcggcgcggatgcggtcaacctgaagattgcggaacaatacgtcgccgcgttcaacaatcttgccaaagaaagcaatacgctgattatgcccgccaatgttgccgacatcggcagcctgatttctgccggtatgaaaattatcgacagcagcaaaaccgccaaataa

SEQ ID NO: 52129 - DNA, 369 bp, Neisseria meningitidis
atgtctttcggctatttgattgcaacatcgcaaccttgcgaattgttgacaaaatctcgaggtgaaactttttctttaattatggataaatggatttatttcagattttgtgaaggaaatatttatacaataaggaagaatgaaactgaatcttgtcttacagaaagaggaggcgaatggttgaaacatatttatgaatttaatcggggaagttttattttttcttatgtgcttctaaaaaagagagaaagcgaagagaattttgcagaaattgttttaaaatcaataaaaaataataaaattttgacagttaaggtacggtcaggcttgcattttgacttaagaaatatttatcgtattgagatgtaa

SEQ ID NO: 52130 - DNA, 402 bp, Neisseria meningitidis
atgagaaaaagtcgtctaagccggtataaacaaaataaactcattgagctatttgtcgcaggtgtaactgcaagaacggcagcagagttagtaggcgttaataaaagtaccgcagcctattattttcatcgtttacgattacttatttatcaaaacagtccgcatttggaaatgtttgacggcgaagtagaagcagatgaaagttattttgctgaacgacaaaaccatatcaatggaattgggaacttttggaaccgggcaaaacgtcatttacgcaagtttgacggcattcccaaagcgcattttgagctgtatttaaaggggtacgaacggcgttttaacaacagcgagataaaagtttgttccattttaaaacaattagtaaaatcgagtttatcctag

SEQ ID NO: 52131 - DNA, 1009 bp, Neisseria meningitidis
ttgcagcctttagtcagcgtattgatttgcgcctacaacgtagaaaaatatttcgcccaatcattagccgccgtcgtgaatcaaacttggtgcaacttggatattttgattgtcgatgacggctcgacggacggcacgccctccattgcccggcgtttccaagaacaggacggcaggattaggataatttccaatccccgcaatttgggctttatcgcctctttaaacatcgggctggacgaattggtaaagtcgggggggatatattgcgcgcaccgatgccgacgatattgccgcccccggctggattgaaaaaatcgtgggcgagatggaaaaagacgcggatattgccgcgatgggttcctatttggagattttggcggaagaaaacaataaaagcgtgcttgccgccattgcccgaaacggcgaaatttggaaaaaccccctgacccatcaggaaatcacgtctgccttccccctccgcaaccccatacacaacaacacgatgattatgcggcgcagcgtcattgacggcggtttgcggttcgatcccgcctatatccacgccgaagactataagttttggtacgaagccggcaaattgggcaggctggcgaattaccccgaagccttggtcaaataccgtttccatcaagaccagacttcttccaaacacaacctgcaacagcgtaagacggcgtggaaaatcaaagaagaaatcagggcggggtattggaaggcggcaggcataaccgtcgggtcggactgcctgaattacgggcttttgaaatcaacggcatatgcgttgcacgaaaaagccttgtccggacaggatatcggatacctccgcctgttcctgtacgaatatttcttgtcgttggaaaagtattctttgaccgatttactggattttctgacagaccgcgtgatgaggaagctgtttgccgcaccgcaatataggaaaatcctgaaaaaaatgttacgcccttggaaataccggggctattga

SEQ ID NO: 52132 - DNA, 2007 bp, Neisseria meningitidis
atgaaactcgaagcaagcaagcacaagcaaaagtttaaaaaatcatttattgtaagtctatttttttctattctttatacctctccgcttttggctgttgattacgtttacgacaaaaccaagctcactgatgatgaaattacccgcttaaaaaaactccgcgatagaaatagtgaatattggaaagaagaaacttatcacataaaaagtaacaaccgagtttatccaaacattcccgcattattccctaaacatcctttcgatccattcgaaaacatcaataattcaaaaaggatttctttttatgacaaagaatacactgaagattaccttgttggttttgctcaaggtttaggcgttgcaaaaagaaatggggaaacagaaaaaccaatacggcaatattttaaggaatgtttaaacactgggaaatatagtgatgatacttgcaaatctcaacaatctattcctacagtaagaagtgatattttcgccctaaatacgaaaataaaaaatagccatatcaacagcgaaattttcgctgtcggtaattatacaaaattgatgtactcagcccaacatcattctatttggtcagagcatctctattccaattcagaattatctcttgacgttgataactcacacgttatcggacaaacgattgatttgggagcattagaattaacaaattctctatgggaaccccgttggaactctaatattgattatttaataacaaaaaatgctgaaattcgttttaacactaaaagtgaaagtttactcgtaaaagaagattatgctggcggagctcgttttcgttttgcttacggtctaaaagataaagtccctgaaacaccagttttaacttttgaaaaaaatataactggcacttccgacatcatcttcgaaaatccaatagacgatttaaaaagcctcgatgggcatcaaattatcaaagtaaatggcacagcagataaacacgcattccgtctttctggcaaacaccaaaagggaatttatacgctttctttacaacaacgcccagagggcttttttaccaaagtgcaagaacgcgatgatattgcgatttatgcacaacaagcccaagccgccaataccttattcgccttgcgtttaaacgacaaaaacagcgatatttttgaccgcactttaccgcgcaaaggcttgtggttacgtgtgattgacggacattccagccaatgggtacaaggcaaaacggcacctgtagaaggctatcgaaaaggtgtgcaactcggcggcgaagtattcacgcggcaaaacgaaagtaatcaattttccgttggcttaatgggtggacaagcagaacaacgcagcactttccgcaatccagatacagataatcttacaacgggaaatatgaaaggctttggtactggtttttacgccacttggcatcagcttcaagataaacaaacaggggcatatattgacagctgggtacaatatcaacgtttccgccaccgtattaacactgaagatgctacagaacgttttacttcaaaaggtattactgcctcaattgaagcaggttacaatgctttattggcggaacacttcactaaaaagggcaaccgtgttcgtttttacctgcaaccacaggcacaattgacttatttgggggtaaacggaaaattcagcgatagcgaaaatgcccacgtgaatttacttggctctcgccaattacaaagccgagtgggcgttcaagctaaagctcaattttcactctataaaaatatcgctattgaacctttcgccgctgtgaacgcgctttaccacaacaaacctttcggtgtggaaatggacggagagcgtcgagtgataaacaataagacggcaattgagagccaattaggtgtagcagtgaaaatcaaatctcacttaaccttacaagccacattcaaccgccaaacaggcaaacatcatcaaactaaacaaggtgcgttgaatttgcagtggacgttttaa

SEQ ID NO: 52133 - DNA, 2040 bp, Neisseria meningitidis
atgacactgaaagcaagcaagcaagcaagcaagcagcaagcaagcggtcgggttaatctattaacattatctgttttatcgctgttttgcacgccatatgcttggggtgcggatgaatatgatcctgaagttcttccgcgattcattttagaagcggcggaaaacagagattcccacgtttggcgcggtccgtgcagcatatcttttgattgcttcggtatgttcagagctcagcttggttcaaatactcgttctaccaaaatcggcgacgatgccgatttttcattttcagacaagccgaaacccggcacttcccattatttttccagcggtaaaaccgatcaaaattcatccgaatatgggtatgacgaaatcaatatccaaggtaaaaattacaatagcggcatcctcgccgtcgataatatgcccgttgtcaaaaaatatattacagagaagtatggggctgatttaaaggatgcggttaagaagcaattacaggatttatacaaaacaagaccggaagcttgggcagaaaataaaaaacggactgaggaggcgtatatagcacagtttggaacaaaatttagtacgctcaaacagacgatgcccgatttaattaataaattggtagaagattccgtactcactcctcatagtaatacatcacagactagtctcaacaacatcttcaataaaacactgcacgtcaaaatcgaaaacaaatcccacgtcgccggacaggtgttggaactgaccaagatgacgctgaaagattccctttgggaaccgcgccgccattccgacatccatatgctggaaacttccgataatgcccggatccgcctgaacacgaaagatgaaaaactgaccgtccataaagcgtatcagggcggcgcggatttcctgttcggctacgacgtgcgggagtcggacaaacccgccctgacctttgaagacaaagtcagcggaaaatccggcgtggttttggaacgccggccggaaaatctgaaaacgctcgacgggcgcaaactgattgcggcggaaaaggcagactctaattcgtttgcgtttaaacaaaattaccggcagggactgtacgaattattgctcaagcaatgcgaaggcggattttgcttgggcgtgcagcgtttggctatccccgaggcggaagcggttttatatgcccaacaggcttatgcggcaaatactttgtttgggctgcgtgccgccgacaggggcgacgacgtgtatgccgccgatccgtcccgtcaaaatatacggggtggcgcggctgcggacgggcggcgcaaaggcgtgcaaatcggcggcgaggtgtttgtacggcaaaatgaaggcagccggctggcaatcggcgtgatgggcggcagggtcggccagcacgcatcagttaacagcaaaggcggtgcggcaggcagtgatttgcatggttatggcgggggtgtttatgctgcgtggcatcagttgcgcgataaacaaacgggtgcgtatttggacggctggttgcaataccaacgtttcaaacaccgcatcaatgatgaaaaccgtgcggaacgctacaaaaccaaaggttggacggcttctgtcgaaggcggctacaacacgcttgtggcggaaggagttgtcggaaaaggcaataatgtgcggttttacctgcaaccgcaggcgcagtttacctacttgggcgtaaacggcggctttaccgacagcgaggggacgggggtcggactgctcggcagcggtcagtggcaaagccgcgccggcattcgggcaaaaaaccgttttgctttgcgtaatggtgtcaatcttcagccttttgccgcttttaatgttttgcacaggtcaaaatctttcggcgtggaaatggacggcgaaaaacagacgctggcaggcaggacggcgctcgaagggcggttcggcattgaagccggttggaaaggtcatatgtccgcacgcatcggatacggcaaaaggacggacggcgacaaagaagccgcattgtcgctcaaatggctgttttga

SEQ ID NO: 52134 - DNA, 729 bp, Neisseria meningitidis
atgcctgattacatccgcacctcgcgcgccgcggacagcctgcgcgatatcaaaatcacccctcatttcctgccgcatacggacggttcgtgccttattgaatgcggcaataccaaagtgatttgtaccgcttccatagatgaaaacgtcccgccgtttctgcgcggtaaaaaccaaggctgggtaacggcggaatacgggatgctgcctgcctcaactgcttcccggatgcgccgcgaagcttcggcgggcaaacagtccgggcgcacacaagaaatccaacgccttatcgggcgttcgctgcgcgcggtcgtggatatggaaaaactcggcgaacgccaaatcttgattgactgcgacgtgattcaggcagacggcggtacgcgtacggcttcgattaccggtgcgtttgtcgcgctgcaaatcgccgtcggcaaactggtttcagacggcattttgagtgaaaaccccatccgcgaagccgttgccgctgtgtcagtaggcgtagtgaacggcgtgccgcttttggatttggattatcccgaagactccggttgcgacagtgatgtgaatatcgtcatgaccgcatcgggaaaaatcatcgaaatccaaggtacggcggaagacgcgccgttcagtttggacgaattgggcaaactggttgcactggcgcaaaaaggcataggcgaactgctgcaacaccagcaaaatgcgttgtccgccgcctga

SEQ ID NO: 52135 - DNA, 123 bp, Neisseria meningitidis
ttgttaatccgccataaagaccgtcgggcatccgcagccgtcattcccgcgcaggcgggaatccagaacgtggaatctaaagaaaccgttttacccgataagtttccgcaccgacagacctag

SEQ ID NO: 52136 - DNA, 1719 bp, Neisseria meningitidis
atgaacctacatcaaaccgtcgaacacgaagccgccgccgcctttgccgccgcaggcatcgccgacagtcccgttgttttgcagccgaccaaaaatgccgaacacggcgatttccaaatcaacggcgtgatgggtgcggcgaaaaaagccaaacaaaacccgcgcgaactggcgcaaaaggtcgccgacgcattggcaggcaacgccgtcatcgaaagcgcggaagtcgccggcccgggcttcatcaacctgcgcctgcgccccgaatttctcgcgcaaaacattcagacggccttgaacgacgcgcgtttcggcgtggcaaaaaccgacaaaccgcaaaccgtcgttatcgactattcttcgcccaatctggcaaaagaaatgcacgtcggccacctgcgttccagcatcatcggcgacagcatttcgcgcgtgttagaatttatgggcaataccgttatccgtcaaaaccacgtcggcgactggggtacgcagtttggcatgttggtcgcttatttggtcgagcagcaaaaagacaatgccgcgttcgagttggcggatttggagcagttttaccgcgccgccaaagtgcgctttgacgaagaccctgcctttgccgacaccgcacgcgaatacgttgtgaagctgcaaggcggcgatgaaaccgttttggcattgtggaaacagtttgtcgatatttcgctctcgcacgcccaagccgtttacgacacgctgggcttgaagctgcgccctgaagacgtggcaggcgaatcgaaatacaacgacgatttgcaagccgtggtcgatgatttggttcaaaaaggcttggcggtcgaagacgacggcgcgaaagtcgtgttcttggacgagtttaaaaacaaagaaggcgaacccgccgcatttatcgtgcaaaaacaaggcggcggcttcctttatgcttccaccgatttggcgtgtctgcgctaccgtgtcggcacgcttcatgccgaccgcctgctgtacgtcgtcgaccaccgccaagccctgcactttgagcaactctttaccacttcacgcaaagccggctatctgccggaaaacgtcggcgcggcatttgtcggcttcggcacgatgatgggcaaagacggcaaaccgttcaaaacacgcagcggcgacactgtaaaactggtcgatctgctgaccgaagccgtcgaacgcgccaccgctttggtgaaagagaaaaatcccgaattgggcgcggacgaagccgccaaaatcggcaaaaccgtcggcatcggcgcggtcaaatacgccgacttgagcaaaaaccgcaccagcgattatgtgttcgactgggacgctatgctctcgtttgaaggcaacaccgccccctatctgcaatacgcctacacccgcgtgcaaagcgtgttccgcaaaacaggcgaatgggatgcggacgcgccaaccgttttgaccgaaccgctggaaaaacagcttgccgccgagctgctgaaatttgaagacgtactgcaaagcgtggcggacacggcgtatccgcactacctcgccgcctacctctatcaaattgcgaccctgttcagccgcttctacgaagcctgtccgatactcaaagccgaaggcgcaagccgcaacagccgcctgcaactggcaaaactcaccggcgacacgctgaaacaaggcttggatttgctgggcatcgatgtgttggacgtaatgtaa

SEQ ID NO: 52137 - DNA, 1209 bp, Neisseria meningitidis
atgaccggcatcatacattcgctgcttgacaccgacctctacaaattcactatgctgcaagtagtcctgcaccagtttccgcagacgcacagcctttacgaattccgctgccgcaacgcctcgaccgtctatccgcttgccgacatcaaagaagacttggaagtcgaactcgacgcgctctgccggctgcgcttcacccacgacgaactcggctatctgcgctccctgcgtttcatcaaaagcgactttgtcgattatctcgaactcttccagctccaacgccgctttgtcgaagtcgggacagacgataaaggccgtctgaacatccgcatcgaaggtccgatgatacaggcgatgttctttgaaatcttcatcctcgccattgtcaacgaactttacttccgccgcctggaaacccctgcagtcatagaagaaggcgaacgccgccttcaagccaaagccgcgcgcctcaaagaaatcgccgccgcacaaaaccccgacgaaccgcccttcctgatttccgacttcggcacgcgccgccgctacaagctcgcgtggcaggaacacgtcatccgcaccctgctcgaagccgccccaagcatcgtgcgcggcaccagcaatgtctttctcgccaaaaaactcggcattacccccatcggcaccatggcgcacgaattcctccaagccttccaggccctcgacgtacgcctgcggaatttccaaaaggccgcgctcgaaagctgggtgcacgaataccggggcgatttgggcgttgccctgaccgacgttgtcggtatggatgccttcctgcgcgatttcgacctctatttcgccaaacttttcgacgggctgcgccacgacagcggcgacccttacgtttggggcgacaaagcctacgcccactatcaaaagctcaaaatcgacagccgcaccaaaatgctgaccttctccgacgggctggacatcgaacgctcttgggcattgcaccaatatttcaaagaccgcttcaaaaccggcttcggcatcggcaccaacctcaccaacgatatggggcatacgcccttgaatatcgtcttgaaactggtcgaatgcaacgggcagtccgtcgccaagctgtccgactctccgggcaaaaccatgaccaacaacagcaccttcctcgcctacctgcgccaagtgttcgacgtacccgaacccgaaacgccgtaa

SEQ ID NO: 52138 - DNA, 159 bp, Neisseria meningitidis
atgtttcgtgctttcttgtgtgggattggtcgggcagcatggtttgctggaaaagcggctattattactattttttacatgaagttcaagaacggactgcgctttcccgcctgccgtttgacagcggtcagcgaaaaacctgttctttcagattgttga

SEQ ID NO: 52139 - DNA, 420 bp, Neisseria meningitidis
  misc_feature 4, 5, 6, 7, 8: 'n' is a, c, g or t
gtgnnnnncgcaccggaccatccgcttgccgccaaaaacgtttggacggcggaagactttatcggggaaaccctgattacctatcccgttcccgacgagatgctggatttgcccaaaaaaatcctgattccgaaaaacatcaacccgccgcgccgacacagcgaactgaccatcgccattatccaactggttgccagcagacgtggcattgccgcctttccctattggacagtcatgccctaccttgaaaaaggctatgtcgttcaccggcagattaccgacgacggactgcaaagcaaactgtatgccgccatccgcactgaagacacagataaaagttatctgaacaacttttgccaaatcatacgcgaacgcggttttgcagatttgcccggactgagcgaactggaaccggtctga

SEQ ID NO: 52140 - DNA, 306 bp, Neisseria meningitidis; identical to SEQ ID NO: 43025

SEQ ID NO: 52141 - DNA, 777 bp, Neisseria meningitidis
atgtccgacaacgctttgacctcttcgcgacgcttcggcggcatcgccagactctacggagactctgccttggcgcacttttcacaggcacacgtctgcgtagtcggcgtgggcggtgtcggctcgtgggcggtcgaggctttggcgcggacgggcatcggacgtttgactttgattgatttggacaacgttgccgaatcgaatgtcaaccgccagctgcacgccctgaccggcgacttcggcaaagcaaaagttaccgccttgcgcgaacgcattacacaaatcaatccgcaatgcgaagtgtttgaaattgaagatttcgttaccgaagacaatttgccggaatacttcggaaaaggttttgatttcgtcatcgacgcgatcgaccaagtgcgcgtcaaagcagcaatggcggcttattttgtggaacgcaaacaaccgtttgtcctcagcggcggcgcgggcggacaaaaaaatccggcgttaatccaaaccgccgatttgagccgcgtaacccacgacccgctgcttgccaacctgcgctacaccttgcggaaacgctacggattcagccgcgatacgaaagcaaatatgcgcgtgccttgcgtgtattcgaccgaaaatatcgtgccgccgcagtctagggaggcttgttcggcagatgccgctccgcaaggcttgtcgtgcgccggctacggtgcaagcatgctcgttaccgcttcgttcgggctatattgcgcacaggcggcggtggaacacatcgcagacaaaaaataa

SEQ ID NO: 52142 - DNA, 582 bp, Neisseria meningitidis
  misc_feature 563, 564, 565, 566, 567: 'n' is a, c, g or t
atggcagagatctgtttgataaccggcacgcccggttcagggaaaacattaaaaatggtttccatgatggcaaacgatgaaatgtttaagccggatgaaaacggcatacgccgtaaagtatttacgaacatcaaaggcttgaagataccgcacacctacatagaaacggacgcgaaaaagctgccgaaatcgacagatgagcagctttcggcgcatgatatgtacgaatggataaagaagcccgaaaatatcgggtctattgtcattgtagatgaagctcaagacgtatggccggcacgctcggcaggttcaaaaatccctgaaaatgtccaatggctgaatacgcacagacatcagggcattgatatatttgttttgactcaaggctctaagcttctagatcaaaatcttagaacgcttgtacggaaacattaccacatcgcttcaaacaagatgggtatgcgtacgcttttagaatggaaaatatgcgcggacgatcccgtaaaaatggcatcaagcgcattctccagtatctatacactggataaaaaagtttatgactnnnnncacacacttaattaa

SEQ ID NO: 52143 - DNA, 1197 bp, Neisseria meningitidis; identical to SEQ ID NO: 42563

SEQ ID NO: 52144 - DNA, 273 bp, Neisseria meningitidis; identical to SEQ ID NO: 41774

SEQ ID NO: 52145 - DNA, 285 bp, Neisseria meningitidis
atgaaattgttggccgcattgattccgcttttgatgagcgtggcaggccgtatattgactgcattgggattgatggccgtgacctattcgggggtggatagattggtagcccattttcaacaggcgataacccatagcataacgggcgcacctcaagcaatgttacagcttttctatataagcggcggtggtactgttctaaacattcttttcggcgcgatcgcctttattctgtcattcaaacaaatgacaaaactagcaacctcaatcgggaagaaaaaataa

SEQ ID NO: 52146 - DNA, 261 bp, Neisseria meningitidis
  misc_feature 4, 5, 6, 7, 8: 'n' is a, c, g or t
gtgnnnnnctgcactggcgcactctcacgcaaccgccgcgtcggcttgggtttggcagaaggcaaggaactgcatcaggtgctggtcgaaatcggacacgtttccgaaggggtcagcacgatagaagaagtcttcaatactgcctgtaagtaccaaatcgatatgccgattacccaaaccctgctgcaactcatccgcaaagaaatgaccccgcaacaggttgtcgaaagactgatggaacgcagcgcgcgttttgaataa

SEQ ID NO: 52147 - DNA, 1245 bp, Neisseria meningitidis; identical to SEQ ID NO: 46748

SEQ ID NO: 52148 - DNA, 321 bp, Neisseria meningitidis
  misc_feature 306, 307, 308, 309, 310: 'n' is a, c, g or t
atggcgttaatcgtacataaatacggcggcacatccgtaggctcgcccgaacgcattaaaaacgtggccaaacgtgtcgccaaagcccgcgccgaaggacacgacatcgtcgtcgtcgtatccgccatgagcggtgaaaccaaccgcctggtcgcgttggcgcacgaaatgcaggagcatcccgatccgcgcgaattggacgtggttttgtccaccggcgaacaagtaaccatcggccttttggcgatggcattgaaagacatcggcgtggaagccaaaagctacaccggctggcaggtcgccctnnnnncacacacttaa

SEQ ID NO: 52149 - DNA, 180 bp, Neisseria meningitidis
  misc_feature 157, 158, 159, 160, 161: 'n' is a, c, g or t
atgagactgaccaccaaagggcgtttcgccgttaccgctatgctggatttggcgatgaacgcgcaaaccggcgccgtcaaactcagtgccatcagcgaacgccaaaacatatccctctcctatctcgagcaattgttcggcaaactccgccgcgccnnnnncacacacttaattaattaa

SEQ ID NO: 52150 - DNA, 156 bp, Neisseria meningitidis
atggtcattttcctgattctgtcgtgtgttgccgaatcgggcgacctgtgtgaaggtaacaaaaaagccgccccgttttcgagcggcctgttttgcgtatgggatggatttcaagcaagcgcaaaaaagtaccgcacgtctgtgtggtaccaatag

SEQ ID NO: 52151 - DNA, 120 bp, Neisseria meningitidis
atgttggaaattcaaaaaaccctgcttatcgcagggttttttatttgtagtagacggtttcccattggcaatctaaagattacagattgggcaaaaatcaaaaacagtatagtggattaa

SEQ ID NO: 52152 - DNA, 1161 bp, Neisseria meningitidis
ttgagcaaaatgacctgcatcgaagacttgcgccgcgttgccaagcgcaaaatgccgcgtatgttttacgattacatcgattcgggttcgtggacagaaactacctaccgtgaaaacacttcggatttcaaagacatccgcttccgacaaaaggtattggtcaatatggaaggccgaagcctggaaaccaaaatgatcgggcaggatgtgaaaatgccggtggcgattgcgccgacgggtttcacgggtatggcacacgccgacggtgaaattttggcggcgcgggcggcggagaagttcggcattccgtttacgctgtccacgatgtctatctgctcgattgaagacgttgccgagaacacttccgcaccattttggtttcagctttatgtgatgcgcgaccgcgagtttatggaaaacctgattaagcgcgcgaaggatgccaaatgttcggcattggtattgaccgctgatttgcaggttttggggcaacgccacaaagacatcaaaaacggcctgtccgcgccgccgaaaccgaccatcgccaatttaatcaatctggcgaccaagcccgaatggtgtatgaaaatgctgaacacggaacgccgcacgttccgcaatatcgtcggacacgcgaagaacgtcggcgatttgtcttcgctgtcttcatggacttccgaacaattcgacccgcgcctgagctgggacgatgtggcgcgcattaaagatttgtggggcggcaagctgattatcaaaggcattatggaacccgaagacgcggaaaaagcagcgaaaagcggcgcggacgcattgattgtttccaaccacggcggccgacagctcgacgataccgtgtctgccatcaaagccttgcccgacatcgtcagcgcagtgggcagcgacatcgaagtttggatggacagcggcatccgcagcggtcaggatattttgaaggcttgggctttgggcgcgaaaggtacaatgataggtcgggcgttcctgtatggcttgggcgcgtatggcgaagaaggcgtaacccgtgcgctggaaatcctatataaagaaatggatatatctatggcgtttacgggacaccgcgatattcaagatgtcgatgcctcgattttgaggggtaaggattggggtagggaaacggtttag

SEQ ID NO: 52153 - DNA, 432 bp, Neisseria meningitidis
atgaaaaccttttcagcgaaaccccacgaggtgaagcgcgaatggttcgtcatcgatgcccaagacaaagtcttgggtcgcgttgcagccgaagtcgccagccgcctgcgtggcaaacacaaacctgaatacaccccccacgtcgataccggcgattacatcattgttatcaacgcggacaaactgcgtgtaaccggtgccaaattcgaagacaaaaaatacttccgccattccggtttcccgggcggcatctacgaacgcaccttccgcgaaatgcaagagcaattccccggccgcgctttggaacaagccgtaaaaggcatgttgcccaaaggtcccttgggttacgccatgattaaaaaactgaaagtgtacgctggtgcagaacatgcccatgccgcacaacaacccaaagttttggaattgaaataa

SEQ ID NO: 52154 - DNA, 123 bp, Neisseria meningitidis
atggtcgaatcctgcaagattgcgtcaaatcaaaaagtgaacgaaagccggcaaaaaatgcctgactgcacggaagcggcatattatactggaaagcggtcgggctgttcggctgttgtataa

SEQ ID NO: 52155 - DNA, 189 bp, Neisseria meningitidis
atggttaatatccgcacaccattgtgcggaactcggcattgtattgttatttgcctgttttgtcaaagtttgcgcggttcggacaatcatatgccgtctgaaaagatgtaccctgatggctttgctgatataattgcccgctatttgaatcagctttcaagcggtatctgccgtttgacggaaacgtaa

SEQ ID NO: 52156 - DNA, 330 bp, Neisseria meningitidis; identical to SEQ ID NO: 43091

SEQ ID NO: 52157 - DNA, 384 bp, Neisseria meningitidis
ttgcggacaacagcctcgccatccttatccgaatctgaaaaaagcggcgcgatacaccgtatccgccgcccctcccaaaatgcgaaacaaacaaacgccaagcaagcaagcaagcaagcaagcaagcaagcaagcaagcaaaaaattataacccccttcctgccgacgcacgcactttccgcgcggcgcattcccctttttccgcccctcaaacccgccttttcttcaggcagggtttcagcccgccccctttcccctgttttcctttccccgacacgcgcgcgcgacccctgccgcatcgtgccgcactttcgcgcccggacggcatcgttccgccatccggttctctgtttcaaatacccctgtttcagaaagaaattctag

SEQ ID NO: 52158 - DNA, 1419 bp, Neisseria meningitidis
atgaatattcacaccctgctctccaaacaatggacgctgccgccattcctgccgaaacggctgctgctgtccctgctgatactgcttgcccccaatgcggtgttttgggttttggcactgctgaccgccaccgcccgcccgattgtcaatttggactaccttcccgccgcgctgctgatcgccctgccttggcgtttcgtcaaaattgccggcgtattggcattttggctggcggttttgtttgacgggctgatgatggtgatccagcttttcccttttatggatctcatcggcgccatcaacctcgtccccttcgtcctgaccgcccccaccccttatcagataatgaccgggctgttgctgctgtatatgctggcgatgccgtttgtgttgcagaaagccgccgccaaaaccgacttccggcacattgccgtctgcgccgccgttgtggcggcagccggctatttcaccggccatttgagttactacgaccgggggccgatggccaatatcttcggcgcaaacaacttctattacgccaaaagtcaggcgatgctctacaccgtcagccagaatgccgactttattaccgccggcctggtcgatcccgtcttcctccccttgggcaatcaacagcgtgccgccacgcatctgaacgagccgaaatctcaaaaaatcctctttatcgtcgccgaatcttgggggctgccggccaatcccgaacttcaaaacgccacttttgccaaactgctggcgcaaaaagaccgtttttcggtttgggaaagcggcagttttcccttcatcggcgcgacggtcgaaggcgaaatgcgcgaactgtgcgcctacggcggtttgcgcgggttcgcactgcgccgcgcgcccgacgaaaaatttgcccgctgcctccccaaccgtttgaaacaagaaggttacgccacctttgcgatgcacggcgcgggcagttcgctttacgaccgcttcagctggtatccgagggcgggctttcaagaaatcaaaaccgccgaaaacctgatcggtaaaaaaacctgcgccattttcggcggcgtgtgcgacagcgagctgttcggcgaagtgtcggcatttttcaaaaaacacagcaaaggattgttttactggatgacgctgaccagccacgccgactatcccgaatccgacattttcaaccacaggctcaaatgcaccgaatacggcctgcccgccgaaaccgacctctgccgcaacttcagcctgcacacccaattcttcgaccaactggcggatttgatccaacgccccgaaatgaaaggcacggaagtcatcatcgtcggcgaccatccgccgcccgtcggcaacctcaatgaaaccttccgctacctcaaacaggggcacgtcgcctggctgcacttcaaaatcaaataa

SEQ ID NO: 52159 - DNA, 501 bp, Neisseria meningitidis; identical to SEQ ID NO: 42243

SEQ ID NO: 52160 - DNA, 885 bp, Neisseria meningitidis
  misc_feature 4, 5, 6, 7, 8: 'n' is a, c, g or t
gtgnnnnncaaccctgtcgaaatcgtcatcgacacgcccgaaccggaatctgtcgcccaaactgccgaaaacaaaccggaaaccgtcgataccgatttctccgacaacctgccctcaaacaaccatatcggcacagaagaaacagcttccgcaaaacctgcctcaccctccggactggcaggcttcctgaaggcttcctcgcccgaaaccatcttggaaaaaacagttgccgaagtccaaacaccggaagagttgcacgatttcctgaaagtgtacgaaaccgatgccgtcgcggaaactgcgcctgaaacgcccgatttcaacgccgccgcagacgatttgtccgcattgcttcaacctgccgaagcaccgtccgttgaggaaaatataacggaaaccgttgccgaaacacccgacttcaacgccaccgcagacgatttgtccgcattacttcaaccttctgaagtacctgccgttgaggaaaatgcagcggaaaccgttgccgatgatttgtccgcactgttgcaacctgctgaagcaccggccgttgaggaaaatgcagcggaaatcactttggaaacgcctgattccaacacctctgaggcagacgctttgcccgacttcctgaaagacggcgaggaggaaacggtagattggagcatctacctctcggaagaaaatatcccaaataatgcagataccagtttcccttcggaatctgtaggttctgacgcgccttccgaagcgaaatacgaccttgccgaaatgtatctcgaaatcggcgaccgcgatgccgctgccgagacagtgcagaaattgctggaagaagcggaaggcgacgtactcaaacgtgcccaagcattggcgcaggaattgggtatttga

SEQ ID NO: 52161 - DNA, 486 bp, Neisseria meningitidis
  misc_feature 8, 9, 10, 11, 12: 'n' is a, c, g or t
gtgtgtgnnnnnaacaacccggcccccaatgagaaccccggcacgcgtcccaatcccgaacccgaccccgatttgaatcccgatgcaaatcccgatacggacggacagcccggaacaagccccgattccccggccgttccggaccgcccaaacggcagggacggcaaagatggcgggcttttgtgcaaattcttccccgacattctagcttgcgacaggctgcccgagcccaatccggcagaagatttaaatctgccgtctgaaaccgtcaatgtagagtttaagaaatccggaatctttcaagattccgcacagtgtcccgcccccgttacgttcactataaccgtgcttgattcaagcaagcagttcgcgttcagctttgagaacgcatgtaccatagccgaacggctaaggtacatgcttctcgcccttgcttgggcggttgccgcctttttttgtatccgcacagtatcccgtgaagtctag

SEQ ID NO: 52162 - DNA, 945 bp, Neisseria meningitidis
atgccgtccgaacatcgaaccatgaatacaggcaaaccccaaaaacgtgccgtcaacggtgttttgctcttggacaaacccgaaggcctttccagcaacaccgcgctgcaaaaagcgcggcgtttgtttcatgccgaaaaagccggacataccggcgtgctcgaccctttggcaaccggacttttgcccgtctgcttcggtgaagcgaccaagttcgcccaatacctgctggatgccgacaaagcctacaccgccacgctgaaactcggcgaagccagcagcacgggtgatgccgaaggcgaaatcattgccaccgcccgcgccgatatttccttagccgaatttcagacggcctgccaagcactgacaggcaacatccgccaagtgccgccaatgttttccgcgctcaagcacgaaggcaaaccgctgtacgaatacgcccgcaaaggcatcgtcatcgaacgcaagccgcgcgatattaccgtttacgccatcgatattgccgaatttgacgcacccaaagccgtgataagcgtgcgttgcagcaaaggcacctatatccgcaccctcagcgaagacatcgccaaacacatcggcacgttcgcccacctgaccgccctgcgccgcaccgaaaccgccggctttaccatcgcccaaagccacacgctcgaagccttggcaaatttgaacgaaacagaacgcgacagcttgctgctgccctgcgacgtattggttgcccattttccccaaaccgttttaaacgattatgccgtccatatgctccaatgcgggcaacggccgcgtttcgaggaagacctgccttccgatacgccggtacgcgtttacacggaaaacggccgctttgtcggactggcggaatatcaaaaagaaatatgccgtctgaaagccttgcgcctgatgaacacggcggcatccgccgcctga

SEQ ID NO: 52163 - DNA, 309 bp, Neisseria meningitidis; identical to SEQ ID NO: 38004

SEQ ID NO: 52164 - DNA, 855 bp, Neisseria meningitidis
atgccgcccatccctgccccatccgcaccatccgagcacactgtcgcatgggtattcggccaacccgttaccgatttgccgcaggatttgtttatcccacccgacgcgctgaaagtcgtattgggcagttttcaaggccctttggatctactgctgtatctgatccgcaagcagaacatcgatgttctcgatattccgatggtgaagattaccgagcagtatctgcactacatcgcccaaatagaaacctatcagtttgatttggcggcggaatatcttttgatggcagcaatgctgattgaaatcaaatcgcgcctgctgctgccgcgtaccgaagccgtcgaagacgaagaagccgacccgcgtgccgagttggtgcgccgcctgttggcttatgaacagatgaagctggcggcacaagggttggatgcgcttcctcgtgcgggccgggatttcgcatgggcgtacctacctctggaaattgccgtcgaagccaagctgcccgaagtctatattaccgacttgacgcaagcgtggctgggtattttgtctcgggcaaaacatacgcgcagccacgaagttatcaaagaaaccatctccgtgcgcgcgcaaatgacggcaatcctgcgccgtttgaacggacacgggatatgcaggtttcacgacctgttcaatcccgaacagggcgcggcttacgtggtcgtcaacttcatcgcactgttggagcttgccaaagaaggtttggtcggaatcgtacaggaagtcggtttcggagaaatccgaatcagcctcaatcatgagggggcacattcagacggcatttccggcacacggggcgggcgcgatgtgttctaa

SEQ ID NO: 52165 - DNA, 2781 bp, Neisseria meningitidis
atggcgaataataaaatgttgtttgaagtgattgaaaaccgcaaagctgtgtatttggaagacggcgatgatgaaaaatgcaggctgcctgaatttgtagaacgcaatttaaaatatccgttttttgaatggcaaaaatcggctttagaaaactttgtgatttttgaccgcacttcaaaattaaaggattttcccgatatcaaaaaccgccctacccatttgctgttcaatatggcaacaggtgcaggcaaaacgatgatgatggcggcgttgattttgtattattttgaaaagggttatcggcattttctgtttttcgtcaatcaaaacaatatcgtagataaaacggaaaataattttattggctcaacgcacgcaaaatttttatttaccgagaagattttgcagggcgatacggtaattcccattcgcaaagtggaaatgttcagcccacattcagacggcattgaaattaaatttaccagcattcaaaagctgtataacgatatccacaccgaacgggaaaaccaaaccacattggcggatttgcacaaattgaaccttgtgatgctgggcgatgaagcacaccatttaaacgcacaaaccaaaggcaaaaaacaaggcgaattagatttagaaaaggaaattaacgaccgcactagcaatgccgagattgaacgcaaaggctgggagcatatggttttggaattgttactcaataaaaatggcaatcctagcgaaaatgtgctgttggaatttaccgccacgctacctgaaaatgctgacgtgcaacaaaaatacgcggataaaatcatcacaaaatttggcttaaaagaatttttgcaaaaaggttataccaaagaaatcaatttggtatccagtacgctgggcaagaaagagcgggtgttgcacgctttattatttgcttggtatcgccatcaaatcgcgttgaaatacggcattgccaatttcaagcctgtgatgttgtttagaagtaagacgattgatgaatcaaaagcggattattcggcatttttaaattgggcagaaaatgtacaagcggatgattttgagtttttagatacgttttcaggcagcctgaataatagcgacaacgccaacgaacaaggcaaaacccgaaccgaacaagccctaaaatttatgcaggaaaatggctttgagtttgcacatttggcaaattgggtgaaacaaaattatcaaaaacataatgtgattattaccaactccgaaaccaacaaaaacaaaactgaaaaaaccgacagcgaaaccgaaaaattgctaaacaatttggaagcggctgataatccaatccgtgccatttttacggtagatagattaaccgaaggttgggacgttctgaatttgtttgatattgtgcgtttgtatgaagggcaaaatggcggtggttcaaataaaaaatcaggcaaaacggctgccgctaccgtatcggaaaagcagttgattggtcgtggcgtgcgttattttccatttgcgtttgaaggtaaacagccgaataaacgcaaatttgacaacgatatgcaacacgaattgcgtatcttggaagaattgttttattacacgcacgatgagcaatcccgctatatttcagaactgaaaaacgagttgcgaaaagacggttatttgcctgaaaaagacgatgataaggtattggcaacatttaaactcaaatctgaatttgccgctaataaggattttagagaattgttaatttgggcgaataaaaaaatccccaacccaaacgccaaaaccaataatgcaaacagcctgcaagccaatccgcaaacgctttcattccaagttcacggcaatcaactgttgcaggaaacgcaatttacagccgatgaaaatgatgaaaaagtcaagcaacttggcacgcaaaataattttactcaaaccataaaaatgagtgaaatggagcggcacattttcaataaagccctgcatatcaaagggaaaaatagtcaatctttattccatttcaaccgtttgcaaagcaagctcaacattcaaaatcgcaatgaattgcaaaataacttgttgaaagactggcaaattgaatttttaggattagggcaagacaaacaggttcgcccggacgataaacttgcaggctgcctgaaaatcttggaaatggttgaaaaacatctgaatgaaagtgatatgccgtttatcggtacaaaagaatttacgcctaaaacattatgggaaattttcggcacaccaaaacaaaaatgggtcaaaaaagatgatgtaaaaacgactattgccacgcaaaatgattggtatgtgatgaataattttgccggaacgggtttggaagaagcgttaattcaatttatttcagcgcgtttgggcgatttgaaatctcaatatgacattcatttaatccgtaatgaagaagtgtttaaattgaataactttgccgatggtgaaggatttatgccggactttattttattgctgaaagataaacaaaaatcttcttccaatggcgtgaatgactttttgcattaccaaattttcattgagcccaaaggtgagcatttagtggaaactgatggatggaaagaagaatttttagaagccatcactgtggaatatgggatggataagatcctgcaaaaagatacaccgcattatcgtttgatcggtttaccgttttttactgatcatcagaaaaatggacaatttacggagtcattccctttaggtgcggcatcgcttgaaaaaatgaagtag

SEQ ID NO: 52166 - DNA, 393 bp, Neisseria meningitidis
atgaacggtaaatactactacggcacaggccgccgcaaaagttcagtggctcgtgtattcctgactaaaggtacaggtcaaatcatcgtaaacggccgccccgttgacgaattcttcgcacgcgaaaccagccgaatggttgttcgccaacccttggttctgactgaaaacgccgaatctttcgacatcaaagtcaatgttgttggcggcggcgaaaccggccagtccggcgcaatccgccacggcattacccgtgccctgatcgacttcgatgccgcgttgaaacccgccttgtctcaagccggtttcgttactcgcgatgcccgcgaagtcgaacgtaaaaaaccgggtctgcgcaaagcacgccgtgcaaaacaattctccaaacgttaa

SEQ ID NO: 52167 - DNA, 372 bp, Neisseria meningitidis; identical to SEQ ID NO: 45763

SEQ ID NO: 52168 - DNA, 204 bp, Neisseria meningitidis
  misc_feature 185, 186, 187, 188, 189: 'n' is a, c, g or t
atgctcgagaatctgccctatttccagcgacatctgcctgaagaccttgccaaagtcaatgaagtcatcaaccgtgcggtgcaatccgatgtcgcactgatttcgcaaatcggtacatatatcatcagcgcgggcggcaaacgcctgcgtccgattatgacgattttggcgggtaaggcggtcgnnnnncacacacttaattaa

SEQ ID NO: 52169 - DNA, 129 bp, Neisseria meningitidis
  misc_feature 106, 107, 108, 109, 110: 'n' is a, c, g or t
atgcttgccaaaattcccgacggcgatacaataaaaccgattttccacccaaacaggacacacatgaaaaaaatcatcgcctccgcgcttatcgcaacattcgcannnnncacacacttaattaattaa

SEQ ID NO: 52170 - DNA, 465 bp, Neisseria meningitidis; identical to SEQ ID NO: 44908

SEQ ID NO: 52171 - DNA, 2079 bp, Neisseria meningitidis
atgaagacagacattcaaaccgaattaacccaagccctactaccacacgaaaaagtatgggcgaacgaagaaaaaaccattttagccaaaaacatcctgttggatttggtggaaaaaaccgacccgaccattatcggtttgttattgagtaatgatgagttaaaacgccatttctttgtggaagtgaatggtgtgctggtgtttaaattgcaggatttccgttttttcttggacaaacacagcgtcaataattcctacacaaaatacgccaaccgcattggtttgacggacagcaaccgctttttgaaagacagcagtgatattgtgttggattttccgtttaaagattgtgtgttaaatggcggacaaagcaccgaggaaggcgaagaaatttattttaaacgcaataacagccagccagccagccagccagccagccagccagccagccagccagccagccagccagccagccaattatacactaaattaacccgaaaaagacaagaaatcttttttaatcaaacccttgcttttgatgaaattgatcggctttttgacgcaaaagcattctcaaaattctctcgctataccgcagacggcaaacaagccgttggcgaaatcaaacgacattcagacggcacacccgccgaaaatctcattatcaaaggcaataatctgattgccctgcattcgcttgccaagcagtttaaaggcaaagtgaagctgatttatattgacccgccatataacacgggtaatgacggttttaaatacaacgacaaatttaatcattccacttggctgacttttatgaaaaaccgtctagaaatcgccaaagagctgcttatgaaagacggttcgatttttgtgtcaattgacgacaacgaacaggcatatttgaaaattttaatggatgaagttttcggaaatgaaaatttcatctgcaattttatttgggaaaaaaagacaggtgcgtccgatgccaaacagatagcgactattacagagtttgtcttatgttactcaaagaactttaaaacagttaaattaaataaaaacacgttttcttatgatacagagagatacaaattaagtgataagtttgaacaggaaagaggcaaatattatatcgacaatttagatagagggggattgcagtatagtgacagtttgaattttgcaatccaatgtccagatggcacttttacgtatccgaatggcaggactgaatttgtcaatgatggctggatatggaaatggagtaaaaataaaattgattgggcaataacaaacggttttttggagtttagaaaatcaaagtctaaaaaatctggatggagtgtatgttataaaaactatatgttggttgataacgaaaacaagccgatagaacgttctgctccctataagaacttaatacaggatatcttaaatacacatgcgacagatgaattgaaaaaactgttcggcagcaaagtttttactactccaaaacctgagagcttattgcagtatcttattcaaattgccacatccgaatccgacatcgtcttagactaccatcttggtagtggcacaaccgccgccgttgcccacaaaatgaaccgccaatatatcggtattgaacaaatggattatattgaaacgcttgctgttgaacgcttgaaaaaagtgattgatggcgagcaaggcggtatttccaaagccgtgaattggcaaggtggtggcgaatttgtttatgccgaacttgctccatttaacgaaaccgcaaaacaacagattttggcttgcgaagattcagacggcatcaaaacgctgtttgaaggtttatgcgaacgctatttcttgaaatacaacgtcagcataaatgaatttagtcaaaccattcaagagcctgaatttcaatctttgccattagacgaacaaaaacaaatggtgcttgaaatgttggatttaaatcaaatgtatgtttcattatccgaaatggacgatgaacaatttgcaggctgtctgaatgatgacgataaagcgttaagccgtgcgttctatcaaacggagaaaaaagatggcgaataa

SEQ ID NO: 52172 - DNA, 486 bp, Neisseria meningitidis
atggacgcgctgcacaccatcgcccgaaacctgacgaaaaaacgtcaaaccgtaagctgtgccgaatcctgtacgggcggaatgcttgccgccgcattcacaagcgttgcaggcagttcgcaatggttcgaccagagttttgtaacatacagcaacaaagccaaagaagaccgcttgggcgtgttgcccgaaaccctgctcgaacacggcgcggtcagccgccaaaccgtctatgagatggcgcgcggcgcgaaagccgtggcgcaggcggattacgccgtcggtatttccggcatcgccggtccgggcggcggcagcgaaagcaaacccgtcggcacggtttggttcgggtttgcctttccgggcggaagttgcgaagcaatgcgccgttttgacggcaaccgcgaatccgtccgcgcgcaggcggtcgccttcgcgttggaacggttggcggggctgattgaaaacggcggcgatgctgtctaa

SEQ ID NO: 52173 - DNA, 1674 bp, Neisseria meningitidis
atgcttctaacactttctttgcgtgattttgtcattgtcgaaaatctgaatctggattttcaaagcggctttaccgtattgaccggagaaactggcgcgggcaagtccattactttggatgcgattggtctgctgttgggcgataaagccgattacagccaagtccgcagcggcgcaaaagaagcgcagttgtcggcgttgtttgatatttcccatttacctgttttaaaagcagaattgtatgaacaggggcttttaaacgacggagaagaagaactcagtatccgccgcattatcgatgccaaaggcaaaagccgcagctttatcaacaatcaggccgctaccttggcgcaactcaaagccgtcggcagccagcttatcgacatccacgggcaaaacgcccatcattcgcttaatcaggaagccgctcagcgcgaattgttggacgcatttgcgggcagcagggcgcaggcggaaaccgtcaggcagctttatcaaaactgggcaaactcaaaaaaagcattgcaggaagcgcaggaacaggcagaaaacattgcactcgaacaagagcgtctggaatggcagtttaacgaattgaatcagttggacattaaacaaggcgaatgggaagccctcagccaaagccacgacagccttgcccattctgccgagctgttgcaggctgccgaagaagtcggaagcaagattgacggcgacaacggcatccaacgccatatctatcaatgtcaaaaactattggccaatctgcaaaacatcgagccgcgctttgccgagagcctgaatatgttggcaagcatcgaggccgaattgggcgaaatcagtgccaatatgcgcgatgtggcaggtcgcagcgacatcaaccccaatgaattggcggcacaggaacagcgtatgggcgaactgatggggatggcgcggaaataccggatcgagcctgaagagttgcctgccaagttggcagaaatcgaagaacgcctgcaaagcctgcaagctgccgccgatttggacgcgctcgagcataatgttgcccacaattttgccgaatatcaggaagctgcccacatcctttctgccatgcgccatcaggcggcagagcgtttgagcggcgaaacgaccgagcatatgcaacaccttgccatgaaaggtgcacgtttcgacatcgtcctgttgccctcgtcgccgacggcacacggtttggagcaggttcaatttcaagttgccgccaacaaaggcaatccgccccgtccgctgaataaagttgcctccggcggcgaattggcgcgtatcagccttgccttacaggttgttgccagccaatatacccaagttcccaccctgatttttgatgaggtcgataccggtattggagggggagtggctgaaatggtcggcaaggcattacgtgcgttgggcagaaaacatcaggtgcttgccgttacccaccttccccaagtcgcatcctgcggagaaaaccactggcgggtgcgcaagcacagcgagggagagcaaaccgtcagcgaaatcagtatattggatgaaatccaacggatcgaagaggttgcccgtatgttgggcggagaagtcattaccgatacgacgcggcaacatgcggcagaattgctgcaacttgcgtcgaaaaatagtttattttaa

SEQ ID NO: 52174 - DNA, 348 bp, Neisseria meningitidis
atgtatattcccgacaaaggcgatattttccatttgaatttcgacccttccagcggcaaggaaatcaagggcgggcggtttgcgctggctctgtctccaaaagcattcaaccgcgcaacgggattggtttttgcctgccccatttcacaggggaatgcagcagctgcacgaagcagcggcatgatttcaaccttactcggtgcaggaacggaaacgcagggcaatgtccactgccaccagctcaaatctctagactggcaaatccgcaaggcttcttttaaagaaactgtacccgattatgtattggacgatgtgctggcgcgcatcggcgccgtcttattcgattaa

SEQ ID NO: 52175 - DNA, 504 bp, Neisseria meningitidis
atgaacacccttcaaaaaggttttacccttatcgagctgatgattgtgattgccatcgtcggcattttggcggcagtcgcccttcctgcttatcaagactacacagcccgcgcacaagtttccgaagccattcttttggctgaaggtcaaaaatcagccgtcaccgagtattacctgaatcacggcgaatggcccggcaacaacagttctgccggcgtggcaacctccgccaacatcaaaggcaaatatgttgagaaagttgaagtcaaaaacggcgtcgttaccgccacaatgctttcaaccggcgtaaacaaagaaatcaaaggcaaaaaactctccctgtgggccaagcgtcaagacggttcggtaaaatggttctgcggacagccggttacgcgcaccgacgccaaagccgacaccgtcgccgccgccgccaagaccgccgacaacatcaacaccaagcacctgccgtcaacctgccgcgacgcaagtgatgccagctaa

SEQ ID NO: 52176 - DNA, 999 bp, Neisseria meningitidis
gtgattgcaagccgtctctctggaaatatatcttcagctattcaggagcataaagatggtaaagttaatatcaaccgttttcaaaatattttagcggatttatattcattgggagggttaggaagtacattaatagagaagaatggaaatatgcagagttgggggattccattagcaattgctggagatataattgcagcaacggctattgccacaggagatactggtacgatatctacagaggaattttataattttgacaactggaaaggttttgggtatgagctatttgaagactggtctcgttgggtatacgactggctgcccgacggctggaatctgtggaaagaattggacagaaaccgttcaggccaataccacatctacgaccccctcgccctagacctagacggcgacggcatagaaacagtcgccgccaaaggcttttcaggcagcctcttcgaccataacggcaacggcatccgcaccgccactggctgggtttctgccgatgacggtttactcgtccgcgatttgaacggcaacggcatcatcgacaacggcgcggaactcttcggcgacaacaccaaactggcagacggttcttttgccaaacacggctatgcagctttggccgaattggattcaaacggcgacaacatcatcaacgcggcagacgccgcattccaatccctgcgtgtatggcaggatctcaaccaggacggcatttcccaagctaatgaattgcgtacccttgaagaattgggtatccaatctttggatctcgcctataaagatgtaaataaaaatctcggtaacggtaacactttggctcagcaaggcagctataccaaaacagacggtacaaccgcaaaaatgggggatttacttttagcagccgacaatctgcacagccgcttcacgaacaaaatgctatccattagccatgttcgggaaaacacgatttccccgtttgttttaggctgtctaaacaaataa

SEQ ID NO: 52177 - DNA, 2691 bp, Neisseria meningitidis; identical to SEQ ID NO: 43817

SEQ ID NO: 52178 - DNA, 957 bp, Neisseria meningitidis; identical to SEQ ID NO: 42418

SEQ ID NO: 52179 - DNA, 1488 bp, Neisseria meningitidis; identical to SEQ ID NO: 39015

SEQ ID NO: 52180 - DNA, 855 bp, Neisseria meningitidis; identical to SEQ ID NO: 42807

SEQ ID NO: 52181 - DNA, 735 bp, Neisseria meningitidis; identical to SEQ ID NO: 44023

SEQ ID NO: 52182 - DNA, 669 bp, Neisseria meningitidis; identical to SEQ ID NO: 41179

SEQ ID NO: 52183 - DNA, 702 bp, Neisseria meningitidis; identical to SEQ ID NO: 42609

SEQ ID NO: 52184 - DNA, 2115 bp, Neisseria meningitidis; identical to SEQ ID NO: 43177

SEQ ID NO: 52185 - DNA, 1911 bp, Neisseria meningitidis; identical to SEQ ID NO: 43610

SEQ ID NO: 52186 - DNA, 159 bp, Neisseria meningitidis; identical to SEQ ID NO: 47859

SEQ ID NO: 52187 - DNA, 612 bp, Neisseria meningitidis; identical to SEQ ID NO: 40039

SEQ ID NO: 52188 - DNA, 318 bp, Neisseria meningitidis
atgggcaacaaattgaccccgcctgccgaactgcctgacgaacaggatttgcgggcggtattggcatacaatatgcggcttttccgcgtgaacaagggttggtcgcaagaagaattggcgcggcaatgcggtttggacaggacttatgtgtcggcagtcgagcgcaaacgctggaacatcgccctgtcgaatatcgaaaaaatggcggcggctttgggcgtggcggcgtatcagttgctgctgccgccgcaggaacggttgaagctgatgaccaattccgccgatacccgacaaatgccgtctgaaagcggtatttga

SEQ ID NO: 52189 - DNA, 249 bp, Neisseria meningitidis; identical to SEQ ID NO: 43100

SEQ ID NO: 52190 - DNA, 792 bp, Neisseria meningitidis; identical to SEQ ID NO: 43764

SEQ ID NO: 52191 - DNA, 738 bp, Neisseria meningitidis; identical to SEQ ID NO: 43795

SEQ ID NO: 52192 - DNA, 633 bp, Neisseria meningitidis; identical to SEQ ID NO: 42590

SEQ ID NO: 52193 - DNA, 1887 bp, Neisseria meningitidis; identical to SEQ ID NO: 42634

SEQ ID NO: 52194 - DNA, 489 bp, Neisseria meningitidis; identical to SEQ ID NO: 45553

SEQ ID NO: 52195 - DNA, 1257 bp, Neisseria meningitidis; identical to SEQ ID NO: 42746

SEQ ID NO: 52196 - DNA, 1134 bp, Neisseria meningitidis; identical to SEQ ID NO: 44802

SEQ ID NO: 52197 - DNA, 810 bp, Neisseria meningitidis; identical to SEQ ID NO: 42939

SEQ ID NO: 52198 - DNA, 171 bp, Neisseria meningitidis; identical to SEQ ID NO: 39149

SEQ ID NO: 52199 - DNA, 339 bp, Neisseria meningitidis
atgacgggatttaatgatgccgccggcgtggcatcttcttcaacaatcaaaggcaaatatgttaaggaagttgaagtcaaaaacggcgtcgttaccgccacaatgctttcaaccggcgtaaacaacgaaatcaaaggcaaaaaactctccctgtgggccaagcgtcaagccggttcggtaaaatggttctgcggacagccggttacgcgcgccgacaacgccaaagacgacgttgccgccgccaccggcaccgacaaaatcgacaccaaactaaagaaacctttttacccgataagtttccgcaccgacgaggctggattcccgcttttgcgggaatga

SEQ ID NO: 52200 - DNA, 546 bp, Neisseria meningitidis; identical to SEQ ID NO: 43739

SEQ ID NO: 52201 - DNA, 354 bp, Neisseria meningitidis
gtgaacagacaaaccgcttacctccttgcctctttcagcctgatcgcactgataatcctgtccctttcctgggaactgtggattgcaccgttgcgcccgggcggctcgtggctcgcgctcaaagccctccccctctgtctgccgctttcaggcatcttgaaaaagaaaatctatacttaccaatacagctccatgctggttctgatttactttgccgaagccgtcatgcgcctgttcgacgcctatcccgcagaacagatttgcgccgcgctttccgcagtattcagcatcatcttcttcatatcctgcctgtcgttcgtcaaacaatacaaggaaacaaacaatgcccgctga

SEQ ID NO: 52202 - DNA, 216 bp, Neisseria meningitidis; identical to SEQ ID NO: 42474

SEQ ID NO: 52203 - DNA, 2748 bp, Neisseria meningitidis; identical to SEQ ID NO: 43112

SEQ ID NO: 52204 - DNA, 546 bp, Neisseria meningitidis; identical to SEQ ID NO: 42806

SEQ ID NO: 52205 - DNA, 1242 bp, Neisseria meningitidis; identical to SEQ ID NO: 43214

SEQ ID NO: 52206 - DNA, 708 bp, Neisseria meningitidis; identical to SEQ ID NO: 43138

SEQ ID NO: 52207 - DNA, 180 bp, Neisseria meningitidis; identical to SEQ ID NO: 43299

SEQ ID NO: 52208 - DNA, 303 bp, Neisseria meningitidis
atgggctttcgtgtcggtatgaattgttttgatacaagattgcaggcagacgactatttattgtcgtcccttccccctactgttacccaggacggaaaaatcatcaggccggaaagggtgggcgaaaaatgggtcttgaacggaaagccggtaatgttgtcctatccgaaatgttccaattttgagcagatcaaacagggttcttatgtcggttcgacggttttaattctgttcgtagtcatttacggtttcaggctgctgattaatttcttaaaagacatgggcaaggttgggattgattga

SEQ ID NO: 52209 - DNA, 696 bp, Neisseria meningitidis
atgaaagcgatgatactggcggcaggacgcggcgagcgtatgcgccctttgaccgataccactccgaagccgctgctcgatgtggcgggtaagcctctaatcggttggcacctatgccgtctgaagcaggcggggtttaccgaaatcgtcatcaaccacgcttggctgggtcggcagatagaagatgctttgggcgacggctcggcttatggcgtgaacatcgcctattcgcccgaacccgcaggcggtttggaaacggcaggcggcatcgcgcaggcattgccgctgttgggtgggcagccgtttttggtggtcaacggcgacgtgctgaccgacatcgattttaccgccgcgtttcagacggcatcgtccctgccggaacatatttccgcccatctgtggctggtggaaaatccgccgcacaaccccgacggcgatttttccctgctgcccgacagcagcgtgcggccggaagtaaatggcggcaacggattgacattcagcggcgtgggtatttaccgtcctgaaatgtttgacggaatcgaagcgggcagtgtggcgaaactcgcgcccgtattgcgtggcgaaatgcggcaaaaccgcgtgagcggtcagaagcatacgggcttgtggctggatgtcggcacggtatgccgtctgaaagaggctcaagcccttgcaggggcttggaagtaa

SEQ ID NO: 52210 - DNA, 237 bp, Neisseria meningitidis; identical to SEQ ID NO: 39540

SEQ ID NO: 52211 - DNA, 927 bp, Neisseria meningitidis; identical to SEQ ID NO: 43441

SEQ ID NO: 52212 - DNA, 5937 bp, Neisseria meningitidis; identical to SEQ ID NO: 43671

SEQ ID NO: 52213 - DNA, 924 bp, Neisseria meningitidis; identical to SEQ ID NO: 42114

SEQ ID NO: 52214 - DNA, 504 bp, Neisseria meningitidis; identical to SEQ ID NO: 42546

SEQ ID NO: 52215 - DNA, 963 bp, Neisseria meningitidis; identical to SEQ ID NO: 43058

SEQ ID NO: 52216 - DNA, 480 bp, Neisseria meningitidis; identical to SEQ ID NO: 42783

SEQ ID NO: 52217 - DNA, 594 bp, Neisseria meningitidis; identical to SEQ ID NO: 42148

SEQ ID NO: 52218 - DNA, 2277 bp, Neisseria meningitidis; identical to SEQ ID NO: 43572

SEQ ID NO: 52219 - DNA, 897 bp, Neisseria meningitidis; identical to SEQ ID NO: 43129

SEQ ID NO: 52220 - DNA, 591 bp, Neisseria meningitidis; identical to SEQ ID NO: 43293

SEQ ID NO: 52221 - DNA, 1005 bp, Neisseria meningitidis; identical to SEQ ID NO: 42723

SEQ ID NO: 52222 - DNA, 1794 bp, Neisseria meningitidis; identical to SEQ ID NO: 42273

SEQ ID NO: 52223 - DNA, 444 bp, Neisseria meningitidis; identical to SEQ ID NO: 43548

SEQ ID NO: 52224 - DNA, 495 bp, Neisseria meningitidis; identical to SEQ ID NO: 43579

SEQ ID NO: 52225 - DNA, 675 bp, Neisseria meningitidis; identical to SEQ ID NO: 42457

SEQ ID NO: 52226 - DNA, 342 bp, Neisseria meningitidis
atgtgcgactttcgcggttatgaagaaccggaaatggtcaagaaacgccctgtcgtcgtcatagcgcgaaacaggcacaacggcaaactggtaacggtcgtacccttaagcagcacagaacctgtccctttggcggactaccaccacaaaatgagtggaaaccccttaccggacaagccgcacatccaatgttgggcaaaatgcgacatgacggcaacagtcggattggcacgattagaccgatacaaacccaaagggcgcgaccgctgcattccaataatcagtgaagaggattttcaggcgattaaaacagccgttgccaaggcattcaaactgtactag

SEQ ID NO: 52227 - DNA, 156 bp, Neisseria meningitidis; identical to SEQ ID NO: 43751

SEQ ID NO: 52228 - DNA, 1326 bp, Neisseria meningitidis
atgtacgctaaaaaaggcggtttgggactggttaaaagccgccgtttcgcacctcttttcgctacgcagtttctcggcgcgttcaacgacaatgtgttcaaaaccgcgctgtttgtgatgattgggttttacggtttggggcaaaacggcttcctgcctgccggacagatgttgaacttgggcgcgttgctgtttattttgccgtatttcctgttttcctcgctgtcggggcagttgggtaacaaattcgacaaggccgttttggcgcgttgggtcaaggtgctggaaatgatcattatggcggtggcggcatacgggttttatatccggtctgccccgctgcttttggcgtgtctgttttgcatgggcgcgcaatcgacgctgttcgggccgctgaaatacgccatcctgcccgattatctcgacgacaaagagttgatgatgggcaacagcctgattgaatcgggtacgtttgtcgccatcctgttcggtcagattttgggaacggcggtggcaggtgtaccgccttatattgtcgggatactggttttgctggtcgccgtcggaggcacggtcggcagcctgtttatgccgtccgtacccgccaaggctgccgatacacaaattgagtggaatattgtccgtggcacaaaatccctgctgcgtgaaacggtgcggcacaagcccgtttttaccgccattatcggtatttcgtggttttggtttgtcggcgcggtttataccacgcaactgccgacctttacccaaatccatctgggcggcaacgacaatgttttcaacctgatgcttgctctgttttccatcggtattgccgccggttcggtactgtgtgccaagttcagcagggaacgcctgatgttggcttgggtaacggttggtgcgttgggtttgacggtttgcggcttggttttggtgtggctgacgcacggacaccgttttgaagggctgaacggcattttttggtttttatcgcaaggatgggcatatcccgtgatggcggtgatgacgctgatcggctttttcggcggatttttctccgttccgctctatacctggctgcaaaccgccagtagcgagactttccgcgcccgcgccgttgccgccaacaatatcgttaacggtatttttatggtttccgctgccgttttgagcgcggtgttgctgttcgcggtgttgctgtttttgtttgacagcatttccttgttgtatctgattgtcgctttgggcaatattccgttgtcggtatttttgattaagcgcgaaaggcggtttttaggcgcggcggcaatcaggaaaaaaccttga

SEQ ID NO: 52229 - DNA, 648 bp, Neisseria meningitidis
atgaaaggcgtttacttcgtcagcggcatagacacggacatcggcaaaactgtcgccaccggtatgttggcaaaacaattgttgcagcagggcaaaagcgtgatcacgcaaaagcccgtgcaaaccggttgccaagacatcgccgaagacatcgccgttcaccgcaaaatcatgggcatacccatgcaggaagccgatgaacagcgtctgaccatgcccgaaatcttcagctatcccgcctcgccccaccttgccgcccgtctggatggcagggatttggacttggacaaaatccgtaccgccacacaagaattggcggcgcagtacgaagtcgttttggtcgaaggcgcgggcggattgatggttccgctgacggaaaacctgttaaccattgattatatccgtcagcaaggctatcccgtcatcctcgttaccagcggacggcttggcagtatcaaccacactttactcagtttcgcagcgctcaaacaatacggcattcgcttgtacagcctcgtgttcaaccacatccacgacagccgcgacgcacacatcgcccaagacagcctgaactacttgaaatgccgtctgaaagccgatttttccgaagcggaatggatggagttggcaaaaacagacgcggtataa

SEQ ID NO: 52230 - DNA, 1914 bp, Neisseria meningitidis; identical to SEQ ID NO: 42368

SEQ ID NO: 52231 - DNA, 1104 bp, Neisseria meningitidis
atgttgattttacaagccgagcgcgacagcctgctcaagccgttgcaagccgttaccggcatcgtcgaacgccgccacaccctgcccatcctgtccaacgtcctgattgagggaaaaggcggtcagaccaaactcttggcaaccgatttggaaatccaaatcgacactgcgggtcccgagggcggcgcgggcgacttccgcatcaccaccaatgccaagaaatttcaggatattttgcgcgcgctgcctgccggtgcgctggtgtcgctggattgggacgacagccgtctgacgctgaaggcgggcaaatcgcgttttgccctgcagaccctgcctgccgccgattttccgatgatgaatgtcggcgaggacatcagcgcgactttctcgctggagcaggagcgtttcaaaaccatgctgtcgcaagtgcagtacagcatggcggtgcaggacatccgctattatctcaacggtctgctgatgcaggttgagggcagccagttgcgccttgtggcgaccgacggacaccgccttgcctatgcagcctgcgcgattgatgcggatttgccgcgcgccgaagtgattttgccgcgcaaaacggtgctggaactgttcaaactgttgaacaaccccgacgatccgattcaaatcgagctgctggacaaacaggtgcgtttccaatgcaacggcacgaccatcgtcagcaaggtcatcgacggcaaattccccgatttcaaccgcgtgattcctttggacaacgacaagattttcgtgttgtcgagggcagaattgttgggcgcgttggaacgtgcatcgattcttgccaatgaaaaattccgcggtgcgcgattgtttttgcaacccggcctgttgagcgttgtgtgcagcaacaacgagcaggaagaagcgcgcgaagaaatcgaaatcgcctatcagggcggcgaactcgaagtcggtttcaatatcggctatctgatggacgtgttgcgcaacatccattccgacgatatgcagcttgccttcggcgatgccaaccgctcgacgctgtttaccgtgccgaacaatccgaatttcaaatatattgtgatgccgatgcggatttga

SEQ ID NO: 52232 - DNA, 948 bp, Neisseria meningitidis; identical to SEQ ID NO: 43198

SEQ ID NO: 52233 - DNA, 330 bp, Neisseria meningitidis; identical to SEQ ID NO: 43853

SEQ ID NO: 52234 - DNA, 882 bp, Neisseria meningitidis
atgccgtctgaaaaaaccctctttcccctgcccgacaccctgttgcgccccatagtagaacaagccttgagcgaagacttgggcaggcgcggcgatattacgtccgccgccgtcatcgcccccgacaaaaccgccaaactcttccttgtcagccgcgaagacggcgttatcgccggcatggacttggcgcgtctcgcctttcagacgatggatccgtccgtccgcttccaagccgaaatccgagacgggcaagccgtccgcgcaggtcagacgcttgccgccgtcgaaggcaacgcccgcgcgctgctcgccgccgaacgcaccgcgctcaactacctcacgcacttaagcggcatcgccaccgccaccgcgcgtgccgttgccgaagtcgccgaatacggtacagacatcgtgtgcagccgcaaaaccatccccctgctgcgtgtcctgcaaaaatacgccgtcagggcaggcggcggtgtgaaccaccgcatgggtttggacgacgccgtgctcatcaaagacaaccacctcgcctattgcggcagcatcgcccaagccgtgcagcaggcaaaacaggctgtcggagcattgacctgcgtggaaatcgaagtggatacgttggcacaactggacgaagccatcgcagcgggcgcggaacggattttgctggataacatggacgacgaaaccctgaaagaagcggcaaaccgctgccacacgcaaaccgcccacccccacaccatctattgcgaagcatcgggcggcatcggcttcgaccgcctgaagcgcgtggcgcaaaccggagtggacggcatcgccctcggctatctgacccacagcagccgttcgttggacataggtttggatttcgtggcgtga

SEQ ID NO: 52235 - DNA, 651 bp, Neisseria meningitidis; identical to SEQ ID NO: 42591

SEQ ID NO: 52236 - DNA, 519 bp, Neisseria meningitidis; identical to SEQ ID NO: 38951

SEQ ID NO: 52237 - DNA, 1374 bp, Neisseria meningitidis; identical to SEQ ID NO: 43378

SEQ ID NO: 52238 - DNA, 645 bp, Neisseria meningitidis; identical to SEQ ID NO: 42867

SEQ ID NO: 52239 - DNA, 192 bp, Neisseria meningitidis; identical to SEQ ID NO: 37158

SEQ ID NO: 52240 - DNA, 549 bp, Neisseria meningitidis; identical to SEQ ID NO: 43417

SEQ ID NO: 52241 - DNA, 378 bp, Neisseria meningitidis; identical to SEQ ID NO: 42275

SEQ ID NO: 52242 - DNA, 117 bp, Neisseria meningitidis; identical to SEQ ID NO: 42842

SEQ ID NO: 52243 - DNA, 132 bp, Neisseria meningitidis; identical to SEQ ID NO: 39343

SEQ ID NO: 52244 - DNA, 309 bp, Neisseria meningitidis; identical to SEQ ID NO: 42479

SEQ ID NO: 52245 - DNA, 873 bp, Neisseria meningitidis; identical to SEQ ID NO: 42569

SEQ ID NO: 52246 - DNA, 999 bp, Neisseria meningitidis
atgagcagacccgtacccgccgtattcggcagcgtttttcacagtcaaatgcccgtcctcgcctaccgcgaaggcaaatggcagccgaccgaatggcaatcttcccaagacctctccctcgcaccgggcgcgcacgccctgcactacggcagcgaatgtttcgagggactgaaagccttccgtcaggcagacggcaaaatcgtgctgttccgtccgactgccaatatcgcgcgtatgcggcaaagtgcggacattttgcacctgccgcgccccgaaaccgaagcttatcttgacgcgctaatcaaattggtcaaacgtgccgccgatgaaattcccgatgcgcctgccgccctgtacctgcgtccgaccttaatcggtaccgatcccgttatcggcaaggccggttctccttccgaaaccgccctgctgtatattttggcttcccccgtcggcgactatttcaaagtcggatcgcccgtcaaaattttggtggaaaccgaacacatccgctgcgccccgcatatgggccgcgtcaaatgcggcggcaactacgcttccgccatgcactgggtgctgaaggcgaaagccgaatatggcgcaaatcaagtcctgttctgcccgaacggcgacgtgcaggaaaccggcgcgtccaactttatcctgattaacggcgatgaaatcattaccaaaccgctgaccgacgagtttttgcacggcgtaacccgcgattccgtactgacggttgccaaagatttgggctataccgtcagcgaacgcaatttcacggttgacgaactcaaagctgcggtggaaaacggtgcggaagccattttgaccggtacggcagccgtcatctcgcccgttacttccttcgtcatcggcggcaaagaaatcgaagtgaaaagccaagaacgcggctatgccatccgtaaggcgattaccgacatccagtatggtttggcggaagacaaatacggctggctggttgaagtgtgctga

SEQ ID NO: 52247 - DNA, 306 bp, Neisseria meningitidis; identical to SEQ ID NO: 38577

SEQ ID NO: 52248 - DNA, 627 bp, Neisseria meningitidis; identical to SEQ ID NO: 43738

SEQ ID NO: 52249 - DNA, 1014 bp, Neisseria meningitidis; identical to SEQ ID NO: 36441

SEQ ID NO: 52250 - DNA, 1587 bp, Neisseria meningitidis; identical to SEQ ID NO: 43701

SEQ ID NO: 52251 - DNA, 966 bp, Neisseria meningitidis; identical to SEQ ID NO: 42827

SEQ ID NO: 52252 - DNA, 435 bp, Neisseria meningitidis
atggaaaaattcaacaatattgcacaactgaaagacagcggtctgaaggttaccggcccgcgtttgaagattttggatttgttcgagacgcatgcggaagagcatttgagtgcggaagatgtgtaccgcattttgttggaagagggtgtggaaatcggtgtggcgacgatttaccgtgtgctgacccagtttgagcaggcgggtattctgcaacgccaccattttgaaacgggcaaggcggtttatgagttggacaagggcgaccaccacgaccatatcgtctgcgtgaagtgcggcgaggtaacggaattccacaatcccgaaatcgaagccctgcaagacaaaatcgcggaagaaaacggctaccgcatcgtcgatcacgcgctttatatgtacggcgtgtgcagcgactgtcaggccaagggcaaacgttaa

SEQ ID NO: 52253 - DNA, 819 bp, Neisseria meningitidis; identical to SEQ ID NO: 51623

SEQ ID NO: 52254 - DNA, 666 bp, Neisseria meningitidis; identical to SEQ ID NO: 42106

SEQ ID NO: 52255 - DNA, 597 bp, Neisseria meningitidis
atgacgggatttaatgatgccgccggcgtggcatcctcctccgacatcaaaggcaaatatgttgagaaagttgaagtcaaaaacggcgtcgttaccgccacaatgctttcaagcggcgtaaacaaagaaatcaaaggcaaaaaactctccctgtgggccaagcgtcaaaacggttcggtcaaatggttctgcggacagccggttacgcgcaacgacaccgccaccgccaccgccaccgacgtcgccgccgccaacggcaagaccgacgacaaaatcaacaccaagcacctgccgtcaacctgccgcgatgattcatctaccggttgcatagaaacaccacgcgccgatttcaaacactttcaaaaaatcagccgttaccgagtattgcccgaatcacggcaaatggcagaaaaacttcgtcattcccgcaaaagtgggaatctagttcgttggtttcagttatttagaataaattttgaaactttaatcccgtcattcccgcgaaagtgggaatccagaacgcaaaatctaaagaaaccgttttacccgataagtttccgtaccgacagacctggattcccgcctgcgcgggaatga

SEQ ID NO: 52256 - DNA, 966 bp, Neisseria meningitidis
gtgaaaccgcgtttttattgggcagcctgcgccgtcctgctgaccgcctgttcgcccgaacctgccgccgaaaaaactgtatccgccgcatccgcatctgccgccacgctgaccgtgccgaccgcgcggggcgatgccgttgtgccgaagaatcccgaacgcgtcgccgtgtacgactgggcggcgttggatacgctgaccgaattgggcgtgaatgtgggcgcaaccaccgcgccggtgcgcgtggattatttgcagcctgcatttgacaaggcggcaacggtggggacgctgttcgagcccgattacgaagccctgcaccgctacaatcctcagcttgtcattaccggcgggccgggcgcggaagcgtatgaacagttagcgaaaaacgcgaccaccatagatctgacggtggacaacggcaatatccgcaccagcggcgaaaagcagatggagaccttggcgcggattttcggcaaggaagcgcgcgcggcggaattgaaggcgcagattgacgcgctgttcgcccaaacgcgcgaagccgccaaaggcaaaggacgcgggctggtgctgtcggttacgggcaacaaggtgtccgccttcggcacgcagtcgcggttggcaagttggatacacggcgacatcggcctaccgcctgtagacgaatctttacgcaacgaggggcacgggcagcctgtttccttcgaatacatcaaagagaaaaaccccgattggattttcatcatcgaccgtaccgccgccatcgggcaggaagggccggcggctgtcgaagtattggataacgcgctggtacgcggcacgaacgcttggaagcgcaagcaaatcatcgtcatgcctgccgcgaactacattgtcgcgggcggcgcgcggcagttgattcaggcggcggagcagttgaaggcggcgtttaaaaaggcagaacccgttgcggcggggaaaaagtag

SEQ ID NO: 52257 - DNA, 468 bp, Neisseria meningitidis; identical to SEQ ID NO: 43503

SEQ ID NO: 52258 - DNA, 1107 bp, Neisseria meningitidis
atgtctctttatccgatttacaatttttccgccggccctgccgtattgcccgaagccgtgttggaaacggcgcggcaggaaatgttggactacaacggtacgggttttcctgtgatggcaatgagccaccgttcggaaatgtttttgagcatcctgcatcatgcggaacaggatttgaggcagcttttgaaagtgcctgacaactataagatattgtttctgcagggcggagcaacaacccaatttaatatggcagccatgaatctggcacacggtttccgcactgccgacgcggtggtaacgggcaactggagccgtatcgcttatgaacagatgagccgtttgaccgatacggaaatccgtttggcggcgcatggcggcgagcagttcgactatctcgacctgccgcctgtggaaacgtgggatgttgcacccgattcggcgtttgtccattttgccgtcaatgaaacggtcaacgggctgcaataccgtgaagtgccgtgcctttcagaaggcatgccgccgctggtgtgcgatatgtccagcgagattttgtcgcgcgagtttgatgttgccgactacggactgatttacgcaggcgcacagaaaaacatcgggccggcaggagttacggtggtgattgtgcgtgaggatttgctcgagcgttgtccgaacgatattcccgatgtgttcaactaccgttcgcacatcaaccgcgacggtatgtacaacacgccgtcaacttacgcgatttatatgtcggggctggtgttccgctggctacaggcgcagggcggtgtgaaaaaaattgaagcggtcaatcggctgaaggcgcaaaccttgtatgagacgatagacggcagcgatggtttttatatcaaccgtatccgtccgaatgcgcgttctaaaatgaatgtcgtgttccaaacgggggatgaggagcttgaccgccgttttgtgctggaagccgaattgcagggcttgtgcctgcttaagggctataaaaccgtcggcggtatgcgtgccagcatttataatgcgatgccgcttgaaggcgtgcgggctttggcagattttatgcgcgatttccaacggcgttacggttga

SEQ ID NO: 52259 - DNA, 402 bp, Neisseria meningitidis; identical to SEQ ID NO: 36186

SEQ ID NO: 52260 - DNA, 918 bp, Neisseria meningitidis; identical to SEQ ID NO: 43287

SEQ ID NO: 52261 - DNA, 621 bp, Neisseria meningitidis; identical to SEQ ID NO: 42850

SEQ ID NO: 52262 - DNA, 663 bp, Neisseria meningitidis
atggattcccgaaaatttaccgaagcatccaaacggcggttgagcgaattgttggatgccaaaagcgaacaaggcaacacgatgcgttgcgacgaggttcaaggttttatgacggcgctgttgagcgggccggacaaattgacaccgctcgactggctgcccgaagtgttgggcgacgaatcgcaatttaccgccgccgaacgttccgaaatcgaacggctggttttggcaatggcgatggaaacaaccgccgcgatgtcggataaaaaactgcccgatttgtggctgtatgaaaacgaagacggcggcagcgatttttacacatggtgcaatgcttatctttacggtttggatattgtgccgaccgattggtttgaagccgtcgatgatgaagcgtttgaagagttgttttatcccatcatggcattgggcggtatttacgacgaagaggaaaacggcgctatccgtctgcaattcacagaaggcgagctggcggaactggaatccgagttgccttatgcattggcggatatctaccgctactggcaggcagtcatcaacaaaccgcaaaccgtccgcagggaaggcgaaaaaacaggcaggaacgatccctgtccgtgcggcagcggcagaaaatacaaggcgtgttgcggtaagaattga

SEQ ID NO: 52263 - DNA, 486 bp, Neisseria meningitidis
atgagatttttcggtatcggttttttggtgctgctgtttttggagattatgtcgattgtgtgggttgccgattggttgggcggcggttggacgctgtttctaatggcggcagactttgccgccagtgtgctgatgctcaggcatacggggctgtccggtcttttattggcgggcgcggcaatgagaagcggcgggagggtatccgtttatcagatgttgtggcctatccgttatacggtggcggcggtgtgtctgatgagtccgggattcgtatcctcggtgttggcggtgttgctgctgctgccgtttaagggaggtgcagtgttgcaggcaggaggtgcggaaaattttttcaacatgaaccaatcgggcagaaaagagggcttttcccgcgatgacgatattatcgagggggaatatacggttgaagagccttacggcggcaatcgttcccgaaacgccatcgaacacaaaaaagacgaataa

SEQ ID NO: 52264 - DNA, 297 bp, Neisseria meningitidis; identical to SEQ ID NO: 43208

SEQ ID NO: 52265 - DNA, 678 bp, Neisseria meningitidis; identical to SEQ ID NO: 43059

SEQ ID NO: 52266 - DNA, 657 bp, Neisseria meningitidis
atgaccattaaaattattctgatagacgaccacaccctcttccgcagcggcattaaagcccttttgtcgcgccaacacggttttgaagtcatcggcgaagccgcagacggcctctcgggcatcaaaatgattagtcggctgcaacccgatgtcgtcctgctcgatttggatatgcccggcatgaacggacgcgaagcactctcccaaatcatcagcatcaatccgcagcaggcagtgattatgctgaccgtttccgaagacagcgacgacttgaccgaatgtattcgcatcggcgcgcgcggttacctgctgaaaaacatcaacgctgactttctgctcgaaagcatacgcaaagccgccgaaggcgataatgtattctcgcccgagatgaccgccaaactcgttaaaagcctgatttccccccaacctgcccaagggacgcaggcactctcctcacttacccctcgtgaactggaaatcttgggctatctcgccgcaggacacagcaacaaaatcatcgcccgccacctcgatcttgccgaatccaccgtcaaagtccacgttcaaaacctgctccgcaaactcaacctcagcagccgggtgcaggccgccgtttacgccatccggcacaacgtcccccaacctgtgccggaatag

SEQ ID NO: 52267 - DNA, 870 bp, Neisseria meningitidis; identical to SEQ ID NO: 43036

SEQ ID NO: 52268 - DNA, 309 bp, Neisseria meningitidis
atgaccctgaaaaccgatttattgcctaaaatcaacaacgaagattatcaacgcctcatcctcaaacacagtgcggaatttagcggtggcgaaatccgcctattgaacgaaatcctcgaaaaattcaatttcgacgttgttcaggcgcaggcgttggcgcaggcggtgatgcagcaagtccgcttcgaccccaacgcctatcacatcgacagcgacgacgaagacaccacaggcatctgcccacactgcatcaacccgcctatgccgcccctgcgcgactatctcgtttggcgcgaaacgcgcgggtaa

SEQ ID NO: 52269 - DNA, 1509 bp, Neisseria meningitidis; identical to SEQ ID NO: 43352

SEQ ID NO: 52270 - DNA, 762 bp, Neisseria meningitidis
atgggcaatctgcatgaaggacatcttgcgcttgtgcgtgaggcgaaaaaacgcgcggacagtgtcgtggtcagcattttcgtcaatcgcctgcaattcggtcagggcgaggatttcgacaaatatccgcgcactttgcaacaggatgcggacaaacttgccgccgaaggcattgccgttgttttcgcgcccgatgagaaagaactctatccgaacgtggaacagcgttacaacgtcgaaccgcccaatctgcaaaatgagttgtgcggcaaattccgcccggggcattttcgcggtgtggcaacggttgtttctaaattgttccacatcgtttccccggacattgcctgttttggtaagaaggattaccagcagcttgccgtgattaaaggttttgtcgaagatttgaattttgatgttgaaatagtgcctgttgatacagggcgcgcggaagacgggttggcactgtcgagccgcaaccagtatttgagtgcggcggaacgcgacgaagcaccgcgcctgtaccgcgaattaaaggctgttgccgaatccttggtgcagggcagtttggattatgcaggtttggaaaaacgtgccgtccaatccctgacagaatacggctgggtggtcgattatgtcgaaatccgccgcgccgatacgctcgaagtggcgcgggcgggagataagaaactggtggtcttggccgccgcctgtctggggacgacgcgcctgattgacaatttggaaataaaactcccttaa

SEQ ID NO: 52271 - DNA, 294 bp, Neisseria meningitidis; identical to SEQ ID NO: 44080

SEQ ID NO: 52272 - DNA, 1662 bp, Neisseria meningitidis
atgacagaatccatcacccgcgacagtatgcaatacgatgtcgtgattgtcggcgcaggcccatcgggtttgtccgccgccatcaaactcaagcagcttgccgaacagaacgggcgcgaaatcagcgtttgcgtggtggagaaaggttcggaggtgggggcgcattcgctggctggcgcagttatcgatccgattgcgctgaatgagttgatttccgactggaaagaaaaaggcgcaccgctgacacgcacagtaacgcaggacaaagtgttgttcctgaccgagaaaaaagcgttcaacctgccgattaccccgaatttcgacaatcacggcaactacatcgtcagcttgggcgaagtcgtgcgctggttggcggagcaggcggaaaatatgggcgtggaaatctatccgggctttgccgccgccgaagtgctgtatcacgaagacggttcggtcaaaggcattgcaaccggcaatatgggcattggcaaagacggcgagccgaccgattcattccaacccggcatggagctttgggcgcagcaaaccctgtttgccgaaggttgtcgcggttcgctttccaaacaaatcatcgaacgtttccaactcgaccaaaacagccagccgcaaacttacggcttgggcattaaagaagtttgggaagtgccgtccgaacagcatcagcccggtttggtggtgcacagcgcaggctggccgctggacagcaaaacctacggcggcgcgtttgtttaccatttcgacgacaacaaagtcgccgtcggcttcgtggtcggtttggactatcaaaatccttatctgtcgccgtttgaagagttccaacgtttcaaaacccatcccgaaatccgcaaaacctttgaaggcggccgccgcattgcttacggcgcgcgttcgctgattgaaggcggtttgcaaagtttgccgaagctctcgttcaaaggcggcattttggtcggcgatgcggcgggtttcctcaatatgccgcgcatcaaaggcattcataccgcgatgaaatccgccatgctcgccgccgaagccgtgttccccttgttggaaaaccttgaagaagtggagggtttcgacagcggcaaagaggcggcggattatcagcaacgttttgaacaaagctggctgtatcaagagctttacgccgcgcgcaatgtccgtccgtcattcaaatggggcgtttacctcggctcaatctacaccggcatcgatcagatgattttcagaggcaaagccccgtggaccttgaaacatcacggcaaagacaacgagcagcttaaaaaagccgccgcgtgtaagccgattgattatccgaaacccgacggcgtgttgaccttcgaccgcttgagcagcgtcttccttgccaatctcgcgcacgaagaaaaccagcccgaccatttggtgctgaacaatccgcaaacgatgatagacgtgaactacaaagaatacgcctcgcccgaaacgcgctattgtccggccggcgtgtacgaaattgttgaagaaaacggcaatccgcgcctgcaaatcaacgcggcaaactgcgtgcactgcaaaacctgcgacatcaaagacccgacgcaaaacatcacttggatttgccccgaaggcgcgagcgggccgaattacggcgggatgtga

SEQ ID NO: 52273 - DNA, 264 bp, Neisseria meningitidis; identical to SEQ ID NO: 42153

SEQ ID NO: 52274 - DNA, 474 bp, Neisseria meningitidis
gtgaaaaattccgtggtttcgctgcattatgagatgtatgatgccaacaatcagcttttggacaaaaccgaagaaccgattgcgtatctgcacggcggttacgacggcattttccctttggtggaagaggcgttgcacggtaaggatgccggcgatacggtcgatgtggcgctgtcgcccgacgatgcgttcggcgagcaggatccggagttggtccgtatcgaagatgcgggcgtgttccctgttgaagtcgaagtcggcatgatgtttgaagccgacgatcctgaaaccggcgatgttgtcgtctatcgtgtaaccgatgttgccgacggcaaggcggtggtggacggcaaccatcctttggcaggcatgaaaatccgctttaaggctacagttgaaagcgtgcgcgatgcatccgatgaggaaatcgcacacggtcatgtccacggcccgcacggtcatcaccaccactga

SEQ ID NO: 52275 - DNA, 1128 bp, Neisseria meningitidis; identical to SEQ ID NO: 51985

SEQ ID NO: 52276 - DNA, 471 bp, Neisseria meningitidis; identical to SEQ ID NO: 43747

SEQ ID NO: 52277 - DNA, 306 bp, Neisseria meningitidis; identical to SEQ ID NO: 42487

SEQ ID NO: 52278 - DNA, 471 bp, Neisseria meningitidis; identical to SEQ ID NO: 43833

SEQ ID NO: 52279 - DNA, 969 bp, Neisseria meningitidis
atgactgccaaacctttttccctcaacctgaccaacctcctgctgctggcggtgttgtttgccgtcagcctgtcggtcggcgttgccgatttccgctggtcggatgtgttttcgctgtcggacagccagcaggttatgttcatcagccgcctgccgcgcacgtttgcgattgtgctgacgggcgcgtcgatggcggtggcggggatgattatgcagattttgatgcgtaaccgttttgtcgagccttctatggcgggcgcgggtcaaagcgcggctttgggtttgcttctgatgtccctgctgctgcctgccgcgccgctgccggtcaaaatgtcggttgccgccgttgccgcgctgatcgggatgctggtgtttatgctgctgatccgccgtctgccgccgacggcgcaactgatggtgccgctggtggggattattttcggcggcgtggttgaggcagtggcgacgtttatcgcgtatgaaaacgaaatgctgcaaatgctcggcgtgtggcagcagggcgatttttcaggcgtactgctggggcggtacgagctgctttggattacgggcggtttggcggtgtttgcctatctgattgccgaccggctgacgattttggggctgggcgagacggtcagcgtgaatttgggtttgaaccggacggcggtgttgtggtcggggctgattattgtggctttgattacgtcgctggttatcgttacggtcggcaatatcccgtttatcgggctggtcgtgccgaacatcatcagccgcctgatgggcgacaagctgcgacaaagcctgcctgcggtggccttgctgggcgcatctttggtgttgctgtgcgatattatcggacgcgtgattgtgtttccgtttgaaattccggtctctacggtttttggtgtgttgggtacggctttgtttttgtggcttttgttaaggaaacctgctcatgccgtctga

SEQ ID NO: 52280 - DNA, 240 bp, Neisseria meningitidis; identical to SEQ ID NO: 43044

SEQ ID NO: 52281 - DNA, 2016 bp, Neisseria meningitidis; identical to SEQ ID NO: 42496

SEQ ID NO: 52282 - DNA, 198 bp, Neisseria meningitidis; identical to SEQ ID NO: 42724

SEQ ID NO: 52283 - DNA, 1275 bp, Neisseria meningitidis; identical to SEQ ID NO: 43140

SEQ ID NO: 52284 - DNA, 480 bp, Neisseria meningitidis; identical to SEQ ID NO: 43074

SEQ ID NO: 52285 - DNA, 267 bp, Neisseria meningitidis; identical to SEQ ID NO: 42299

SEQ ID NO: 52286 - DNA, 348 bp, Neisseria meningitidis; identical to SEQ ID NO: 43577

SEQ ID NO: 52287 - DNA, 1248 bp, Neisseria meningitidis; identical to SEQ ID NO: 43504

SEQ ID NO: 52288 - DNA, 2664 bp, Neisseria meningitidis
atgtccacccaattacacgatgttgaccctatcgaaacccaagagtggctggacgcgttaagctccgtcctcgaatatgaaggcggcgaacgcgcgcaatacctcttggaaaacctggtcaaatactgccgcgacaagggcgtacgtatgccacacggcacgaccaccccgtatttgaataccgtttcggttgaaaacgaaaaaggcattccgggcgaccaaaacatcgaacaccgcatccgcgcattcgtgcgctggaacgccgccgccatcgtattgcgcgccggcaagaaagatttggaactgggtgggcacatcgcatctttccaatctgccgccaccatgtacgaagtcggtttcaaccacttttggaaagccaaaggcgaaggcgaagaaggcgatttggtcttcttccaaggtcacgtcgccccgggcatctatgcacgcgcattcgtcgagggccgtctgaccgaagaccagctgaacaacttccgccaagaagtggacggacacggtctgccttcctatccgcacccccacctcttgcccgacttttggcagttcccgaccgtatccatgggcttggggcccatcatggcgatttatcaggcgcgtttcctgaaatacttggaatcgcgtggtttggcaaaaaccaaaggccgtaaagtatggtgtttctgcggcgacggcgaaatggacgaacccgaatctcaaggtgcaatcgcactggctgcacgcgaaggcttggacaacctgattttcgtcatcaactgcaatctgcaacgcttggacggtccggtacgcggcaacggcaaaatcatccaagaattggaaggcaactttgccggcgccggctggaatgtcgtcaaagtcatttggggccgccgctgggaccgcctcttggcgaaagacaaagacggtatcctgcgccaacgtatggaagaatgtttggacggcgactaccaaacttacaaatccaaagacggcgcgtatgtgcgcgaacacttcttcaatacgcccgaactgaaagcattggttgccgatatgaccgatgagcaactctgggcattgaaccgcggcggccacgacccgcaaaaagtgtacaacgcctacgaccgcgcagcgaaccatgccgacggcaaacctaccgtcatcttggcgaaaaccattaaaggttacggtatgggcgcatccggcgaaggtcagaacgttgcccaccaagccaaaaaaatggacaaagcgtccctgaaacaattccgcgaccgctttgacattccggttaccgacgaacaaatcgaaagcggcgatctgccttacctgacttttgcccccgatacggaagaatacaaatacctgcacgcacgccgcgatgctttgggcggctacctgccgcaacgcaaaccgacgcaggaagtattggaagtgcccgagctgtcagcattcgacgcacaactcaaatccagcggtgaacgcgagttctcgaccacgatggcattcgtccgcatcctgtccactttactgaaagacaaaaaaatcggcaaacgcgtcgtacctatcgttcccgacgaaagccgtactttcggcatggaaggtatgttccgccaatacggtatttggaatccgaaaggtcagcaatatacccctcaagacaaagaccaactgatgttctataaagaatccgttgacggtcaaatcttgcaagaaggtattaacgaaccgggcgcgatggccgactggattgcggctgcaaccagctacgccaacagcaacttcgccatgattccgttctacatttactattctatgttcggtttccaacgtatcggcgacttggcttgggcggcgggcgatatgcacgcgcgcggcttcctgctgggcggtactgccggccgtacgacgctgaacggcgaaggcctgcaacacgaagacggccacagccacatccaggccgacctgattccgaactgcgtatcttatgacccgactttccaatacgaagtcgccgtcatcgtacaagacggtctgcgccgtatgtatgccaataatgaagacgtgttctactacatcaccctgatgaacgagaactacacccatccggatatgcccgaaggtgcggaacaagacatcttgaaaggtatgtacctgctgaaagccggcggcaaaggcgataagaaagttcaattgatgggctccggtaccatcctgcaagaagtcattgccggtgccgagctgctgaaagccgacttcggcgtagaagcagacatctggtcttgcccgtccttcaacctgctgcaccgcgacgctgtcgaggtagaacgcttcaaccgcctgcatccgctggaagccgaaaaagtacctttcgttacttcccaactgcaaggtcatgacggtccggttattgccgctaccgactatatccgcagctatgctgaccgtatccgcgcctacatcccgaacgactaccacgtcttgggcactgacggtttcggccgttccgacagtcgcgccaacctgcgccgcttctttgaagtggatcgctacaacgttgccgtggccgcattggccgcattggcggaacaaggcaaagtcagcaaagaaaccgttcaacaagccattgagaaatacggcatcaaagccgattcagctcctagctggaaacgctga

SEQ ID NO: 52289 - DNA, 186 bp, Neisseria meningitidis; identical to SEQ ID NO: 37143

SEQ ID NO: 52290 - DNA, 1059 bp, Neisseria meningitidis; identical to SEQ ID NO: 43615

SEQ ID NO: 52291 - DNA, 369 bp, Neisseria meningitidis
ttggtcgtgtatttttatccgaaagacagtacgcctggctgtacgacggaaggcttggatttcaatgcgcgtttggaacagtttgaggcattgggttataccgtggtcggtatttcccgcgacggcgtaaaggcgcatcagaatttttgcgccaagcagggtttccggttcgagctgttgagcgacaaggatgaaacagtgtgccgcctgtttgatgtcatcaaattgaagaaactgtacgggaaagagtcgttaggtatcgagcgcagtacgttcgtcttgaataaggatggagaaatcgcccatgaatggcggaaagtcaaagtggcgggtcacgcgcaggaagtattggaaacgctttcccgataa

SEQ ID NO: 52292 - DNA, 1035 bp, Neisseria meningitidis; identical to SEQ ID NO: 42242

SEQ ID NO: 52293 - DNA, 279 bp, Neisseria meningitidis; identical to SEQ ID NO: 36210

SEQ ID NO: 52294 - DNA, 774 bp, Neisseria meningitidis; identical to SEQ ID NO: 43964

SEQ ID NO: 52295 - DNA, 1350 bp, Neisseria meningitidis; identical to SEQ ID NO: 42503

SEQ ID NO: 52296 - DNA, 291 bp, Neisseria meningitidis; identical to SEQ ID NO: 39715

SEQ ID NO: 52297 - DNA, 1746 bp, Neisseria meningitidis; identical to SEQ ID NO: 43160

SEQ ID NO: 52298 - DNA, 876 bp, Neisseria meningitidis; identical to SEQ ID NO: 43306

SEQ ID NO: 52299 - DNA, 357 bp, Neisseria meningitidis
ttgctgtggtggttgttggatgacaagaaactggggatatctgcacgcaaactgatagaaaatccgagaaatgcgatctttgtcagtgcagcaagtatttgggaaatttccatcaagcagaacaaggggttgttgaaattaccggaagagttttttgatgtgcttcaagaagaggattttgaaatgttgcctataggtctgtttcatgcaaaacaggctggaagccttccggagatacacaaagaccctttcgataggatgttgattgcacaaacccaagcggaaggctttgaactgatgactgtcgatgaatatattccgcaatatggaattagagttgtcaacgcatcaagctga

SEQ ID NO: 52300 - DNA, 606 bp, Neisseria meningitidis; identical to SEQ ID NO: 43290

SEQ ID NO: 52301 - DNA, 192 bp, Neisseria meningitidis
atgtccgcgctgctgccggctgcctgccaacacgtttcggacaggcatggcaaattccgcttccaaattctgcattgccaaaggcggcagacgggaagcaaaaaagacgaaagcggcggcggatatgccctgtgccatttgccggacagcaggattgtcgaggagtgggaatatttccgttcacaatattga

SEQ ID NO: 52302 - DNA, 420 bp, Neisseria meningitidis
atgaattccggcgacgattctccgatgtccgacatcaacgttacgccgttggtggacgtgatgctggtgttgctgattgtgtttatgattactatgccggtgctgacgcattccatccctttggaactgccgaccgcgtccgagcagacaaacaagcaggacaaacagcctaaagaccccctgcgcctgacgattgatgcgaacggcggctattatgtcggcggggattctgcaagcaaagtggaaatcggggaagtggaaagccgtctgaaagccgccaaggagcagaatgaaaacgtgattgtggcgattgcggcagacaaggcggtggaatacgattatgtaaacaaagctttagaagccgcccgtcaggcaggaatcaccaaaatcggttttgtaaccgaaaccaaggcgcaataa

SEQ ID NO: 52303 - DNA, 561 bp, Neisseria meningitidis
ttgcccttcgccacgctggcattgtgcaccaatgcttttgccgccccgcccagcgacgcgtcgttggcgcgttggctggatacgcagaattttgaccgggatatagaaaaaaatatgattgagggctttaatgccggatttaaaccgtatgcggacaaagcccttgccgaaatgccggaagcgaaaaaagatcaggcggcagaagcctttaaccgttatcgtgagaatgttttgaaagatttgattacgcccgaagtgaaacaggctgtccgcaatactttattgaagaatgcccgtgagatatacacgcaagaagaaattgacggcatgattgccttttacggttcgcctgtcggtcagtccgtcgttgccaaaaatccgcgcttaatcaagaaatcgatgagtgaaatagcggtatcttggactgcattgtcagggaaaatcgcgcaacatcatctgcccgagtttacggaagagttgcggcgcatcatctgcggcggtaaaaatcccgatgcgggctgtaaacaagccggacaggttgggaaaaggcatcagaaataa

SEQ ID NO: 52304 - DNA, 618 bp, Neisseria meningitidis; identical to SEQ ID NO: 43073

SEQ ID NO: 52305 - DNA, 786 bp, Neisseria meningitidis; identical to SEQ ID NO: 51588

SEQ ID NO: 52306 - DNA, 273 bp, Neisseria meningitidis
atgcccatcgaggacatccctttttatatttttgatttggcggattttgatgggggaattgccgatattgacaatattgtaggttttgtttcaagttgcagactatcaaaatcgaaaaaaaatgccttgaccggcattgccttcttaagggggatagatgtctatgatccgcctatttcaaaagaaaaagcattaaaagccttagagaaacatcctgaaatttatcagaaatttcagcatttctttccgtttgtagaactgcccccgctttaa

SEQ ID NO: 52307 - DNA, 1536 bp, Neisseria meningitidis; identical to SEQ ID NO: 40679

SEQ ID NO: 52308 - DNA, 1887 bp, Neisseria meningitidis
atgatttaccccaaaacctacgacgttatcgtcgtcggcggcggacacgccggcacggaagccgcactcgccgccgcccgtatgggcgcgcagacgcttttgctctcacacaatatcgaaacgctcggacaaatgtcgtgcaacccctctatcggcggcatcggcaaagggcatttggtgcgcgaactcgacgcgctcggcggcgcgatggcgttggcaaccgacaaatccggtatccagttccgccgcctgaacgccagcaaaggcgcggcagtgcgtgccacgcgcgcgcaggcggaccgcatcctgtacaaagccgccatccgcgaaatgttggaaaaccaagaaaacctcgaccttttccaacaagccgtcgaagacgtaacgctcgacggcgaacgcatcagcggcgtaattaccgcgatgggcgtggagtttaaagcacgcgccgtcgtgttgaccgcaggcacgtttttgtccggcaaaatccacatcggtttggaaaactacgaaggcggacgcgccggcgaccccgccgccaaatcgttgggcggacgtttgcgcgaattgaagctgccgcaaggccgtctgaaaaccggcacgccgccgcgtattgacggacgcacgattgacttctcccaactgaccgaacagcccggcgacacgcccgttcccgtcatgtccgtgcgcggcaacgccgatatgcacccgcgccaagtgtcctgctggattacgcataccaacacgcaaacccacgacatcatccgctcaggcttcgaccgcagcccgatgtttaccggcaaaatcgaaggcgtgggtccgcgttattgtccgtctatcgaagacaaaatcaaccgcttcgccgacaaagacagccaccagattttcctcgaacccgaaggtctgaccacgcacgaatactatcctaacggtatctccaccagcctgccgttcgacatccaaatcgcgctcgtccgcagtatgaaaggtttggaaaacgcccatatcctgcgccccggctacgccatcgaatacgactacttcgatccgcgcaacctcaaagcaagcctcgaaaccaaaaccattgccggattgtttttcgccgggcaaatcaacggtacgaccggctacgaagaagccgccgcgcaaggtttattggcaggcgcgaacgccgtgcaatatgtgcgcggacaagacccgctcctgctgcgccgcgaacaagcctacctcggcgtattggtggacgacctcatcaccaaaggcgtgaacgaaccctaccgaatgttcaccagccgcgccgaataccgcctgcaactcagggaagacaacgccgacatgcgcctgaccgaagacggctacaaaatcggcttggtgtccgaagcgcaatggcgcatgttcaacgaaaaacgcgaagccgtcgaacgcgaaatccaacgtttgaaaacaacgtggtacacgccgcaaaaactcgccgaaggcgaacaaatccgtgtgttcggacaaaaactcagccgcgaagccaacctgcacgacctcctgcgccgcccaaacctcgactacgccgcgctgatgacgctcgaaggcgcgatgccgtctgaaaacctctccgccgaagtcatcgaacaagtcgaaatccaagtcaaataccaaggctatatcgaccgccaaaacgaagaaatcgacagccgccgcgacatcgaaaccttaaaactgcccgacggcatcgattacggcaaagtcaaaggcttgtcggcagaagtgcagcaaaagctcaaccagcacaaacccgaaaccgtcggacaagccagccgcatttccggcgtaacccctgcggcagtggcattgctgatggtgcatttgaagcgcgggtttaaagacgcgaaataa

SEQ ID NO: 52309 - DNA, 1173 bp, Neisseria meningitidis; identical to SEQ ID NO: 43174

SEQ ID NO: 52310 - DNA, 726 bp, Neisseria meningitidis; identical to SEQ ID NO: 42919

SEQ ID NO: 52311 - DNA, 579 bp, Neisseria meningitidis
atgaaaacttttgccctgatactggccgacggtcaggcgagccgtatgggaggcgaggacaaggggcttgctcttttggggggtaaggcactgatagatcatgtcatcgacagggtcaggccgcaggtcagccatatcgccatcagcaccaaccggaatttggaagaatatgctcgaagaagtccgcatatttttccggacgcacggcagtggcagcatttcggcccgctttcggcattgtgtaccgcagccaacgatttgcagttggcgactgccgactggcttttggttgtgccgtgcgatatgccgtatctgccggacgatttggtggcgaggtttgaaaccgtgtcgaaacgcacaccgttgtgcaatgcgtattatgtggaaacgccgataacgatgcactacaacattatgtatatccgcccgcagattctgcaaagcgcgattccctatctgttttcgggtatgaaaacattaagaagctggttgcagcagcaaagggcgcgaccggtcagattcgagtttgacgggcattttgccgacttgaacacgcaaactgatttgcaggagggataa

SEQ ID NO: 52312 - DNA, 1419 bp, Neisseria meningitidis; identical to SEQ ID NO: 43878

SEQ ID NO: 52313 - DNA, 120 bp, Neisseria meningitidis; identical to SEQ ID NO: 43584

SEQ ID NO: 52314 - DNA, 729 bp, Neisseria meningitidis; identical to SEQ ID NO: 43836

SEQ ID NO: 52315 - DNA, 966 bp, Neisseria meningitidis; identical to SEQ ID NO: 42659

SEQ ID NO: 52316 - DNA, 387 bp, Neisseria meningitidis; identical to SEQ ID NO: 43341

SEQ ID NO: 52317 - DNA, 120 bp, Neisseria meningitidis; identical to SEQ ID NO: 42469

SEQ ID NO: 52318 - DNA, 762 bp, Neisseria meningitidis; identical to SEQ ID NO: 43667

SEQ ID NO: 52319 - DNA, 522 bp, Neisseria meningitidis
ttgctcattcctgtcctgacagcccttttttacctgccttttccgtggttcgcggaggaaacgattaatctcaccgccgccgtcatttttgccgttgccgccttgaccgactggtttgacggatttttggcaaggttgtggaaacagacctcggatttcggcgccttcctcgatcccgttgccgacaagctgatggtcgccgtctctttgcttttactggtcaaactcgaccggacctatgttttgtttgccatgatcatcatcggcagggaaattaccatttccgcattgcgcgaatggatggcgcaaatgggcaaaaggaacagcgttgccgtcgccaccgtcggtaagtttaaaaccgccgcgcaaatgctggcaatcttcctgctgctgctgaattttcccgatttttatggatttaacctcgcattcatcggcaatgtattgatgtttatcgcatctttgctgacagtctggtcgatgctgtattatctgaaaatggcgtggaaagaaatcgcctga

SEQ ID NO: 52320 - DNA, 609 bp, Neisseria meningitidis
ttgaataccctctatttaggttcaaacagcccgcgccgaatggaaatcctgacacagttgggctaccgcgtcatccaactgcctgccggcatcgacgaatccgttaaagccggcgaaacacctttcgcttacgttcaaaggatggcagaagaaaaaaaccgaaccgccctgaccctcttttgcgaaaccaacggcacaatgcccgatttccccctgattaccgccgacacctgcgtcgtttcagacggcatcatattgggcaaaccccgctcccaagccgaagcaatcgaatttttaaaccgattgtccggcaaacaacataccgtcctgactgctgtctgcattcattatcgcggcaaaacgtcaagccgcgtccaaaccaaccgcgtcgttttcaagcccctgagttcggaagaaatttccgcctatgtgcaaagcggcgagccgatggacaaagccggtgcctacgccgtacaaggcataggcggcatctttatccaatctatcgaaggcagcttcagcggcattatgggactgcccgtttatgaaaccgtttcgatgttgcaggatttgggataccgctcccccttgtccgcccttaaaccgtaa

SEQ ID NO: 52321 - DNA, 207 bp, Neisseria meningitidis; identical to SEQ ID NO: 43230

SEQ ID NO: 52322 - DNA, 324 bp, Neisseria meningitidis; identical to SEQ ID NO: 41034

SEQ ID NO: 52323 - DNA, 1095 bp, Neisseria meningitidis; identical to SEQ ID NO: 42524

SEQ ID NO: 52324 - DNA, 720 bp, Neisseria meningitidis; identical to SEQ ID NO: 43329

SEQ ID NO: 52325 - DNA, 816 bp, Neisseria meningitidis; identical to SEQ ID NO: 38138

SEQ ID NO: 52326 - DNA, 576 bp, Neisseria meningitidis; identical to SEQ ID NO: 37908

SEQ ID NO: 52327 - DNA, 159 bp, Neisseria meningitidis; identical to SEQ ID NO: 43881

SEQ ID NO: 52328 - DNA, 540 bp, Neisseria meningitidis; identical to SEQ ID NO: 43008

SEQ ID NO: 52329 - DNA, 462 bp, Neisseria meningitidis
gtgagcggcgagcaaactttggaaacggcggccttgatgtgcgaaatcccgcagaccactgcgcgtgcgtggaaacgtgcggataaggaaaaaggcgacgactgggataagatgcgcgccgcttacactttggccggtggcggtattgaggatttgagccgtgcgatgttggccggttttatggtgcagtacaacagcacgatgacgatgctgcaggattcgagtaccgaagatttgccaccatccgaccgcgccaagctgttggccagcctggccgatgcgtttacgaaaaccgtatcggccaatgcgcgtgtgatgccggaaacgtcaaaactggcgacggctttggaattgattgagttcttgatggcgtttgtacaagaaaaacatcccaaacatttgcctgcctttgtggaggtattggagccgtttggggtggaagtggagaagaagtttggttag

SEQ ID NO: 52330 - DNA, 534 bp, Neisseria meningitidis
atgtttccccccgacaaaacccttttcctctgtctcagcgcactgctcctcgcctcatgcggcacgacctccggcaaacaccgccaaccgaaacccaaacagacagtccggcaaatccaagccgtccgcatcagccacatcgaccgcacacaaggctcgcaggaactcatgctccacagcctcggactcatcggcacgccctacaaatggggcggcagcagcaccgcaaccggcttcgattgcagcggcatgattcaattcgtttacaaaaacgccctcaacgtcaagctgccgcgcaccgcccgcgacatggcggcggcaagccgcaaaatccccgacagccgcctcaaggccggcgacctcgtattcttcaacaccggcggcgcacaccgctactcacacgtcggactctacatcggcaacggcgaattcatccatgcccccagcagcggcaaaaccatcaaaaccgaaaaactctccacaccgttttacgccaaaaactacctcggcgcacatactttttttacagaatga

SEQ ID NO: 52331 - DNA, 930 bp, Neisseria meningitidis; identical to SEQ ID NO: 42132

SEQ ID NO: 52332 - DNA, 2439 bp, Neisseria meningitidis; identical to SEQ ID NO: 43102

SEQ ID NO: 52333 - DNA, 843 bp, Neisseria meningitidis
atggatattaaaatcaacggcattaccgtcggtaacgacgctccttttgtactgttcggcggcatcaacgttttagaagatttggattccaccctccaaacctgtgcgcattacgtcgaagttacccgaaaactcggtattccctatatctttaaagcctctttcgacaaggcaaaccgttcctccatccattcttatcgcggcgtaggcttggaagaaggcttaaagatttttgaaaaagtcaaagcagagttcggcatccccgtcattaccgacgtacacgaaccccatcagtgccaacccgtcgccgaagtgtgcgatgtcatccagcttcccgcattccttgcgcggcagaccgatttagtggttgccatggcaaaaaccggcaacgtcgtcaacatcaaaaaacctcagttcctcagcccctctcaaatgaaaaacattgtggaaaaattccacgaagccggcaacgggaaactgattttatgcgaacgcggcagcagcttcggctacgacaacctcgttgtcgatatgctcggtttcggcgtgatgaaacagacttgcggcaacctgccggttattttcgacgttacccattccctgcaaacccgcgatgccggttctgccgcatccggcggtcgtcgcgcacaggctttggatttggcacttgcaggcatggcaacccgccttgccggcctgttcctcgaatcgcaccccgatccgaaactggcaaaatgcgacggccccagcgcgctgccgctgcaccttttagaagattttttaatccgcatcaaagcattggacgatttaatcaaatcacaaccgattttaacaatcgagtaa

SEQ ID NO: 52334 - DNA, 225 bp, Neisseria meningitidis; identical to SEQ ID NO: 42859

SEQ ID NO: 52335 - DNA, 240 bp, Neisseria meningitidis; identical to SEQ ID NO: 42143

SEQ ID NO: 52336 - DNA, 759 bp, Neisseria meningitidis; identical to SEQ ID NO: 42800

SEQ ID NO: 52337 - DNA, 606 bp, Neisseria meningitidis; identical to SEQ ID NO: 39821

SEQ ID NO: 52338 - DNA, 771 bp, Neisseria meningitidis
atggaacccgaacgcctgcaaaaagtgcttgccgcgtccggcgtcggctcgcgccgcgaaatggaagaatggattaccaacggctggataacggtcaacggcaaaaccgcgcaactgggcgacaaagttacccccgacgaccacgttaccgtcaaaggcagcatcatcaagctcaaatgggcggaccgcctgccgcgcatcatcctgtattacaaacaagaaggcgaaatcgtttcccgtgacgacccgcaaggccgcgtcagcatattcgaccgcctgccgcaggccgccagcagccgctgggtcgccatcggacgcttggacatcaacaccagcggacttctgattcttaccacctccggcgaactcgtccaacgtttcgcccaccccagcttcgaagtcgaacgcgaatacgccgtgcgcgtcttgggcgggctgaccggcgaacaaatgcgcgtcctcaccgaagaaggcgtgatgctcgaagacggcttggcaaaagtcgaacgcatccgcgaacaaggcggcgaaggcgcgaacaaatggtacaacgtcgtgattaaagaaggccgcaaccgcgaagtgcgccgcatttttgaaagccaaggactcaccgtcagccgcctcgtgcgcatcggcttcggtcccatcggactgcccaaccgcctcaaacgcgggcagttctacgaactcaaccccgccgaagtcgccaacatcatcaaatgggcggacatgctgctgccgggcgaacgccgccgcaaaaaagcctaa

SEQ ID NO: 52339 - DNA, 873 bp, Neisseria meningitidis; identical to SEQ ID NO: 43062

SEQ ID NO: 52340 - DNA, 273 bp, Neisseria meningitidis; identical to SEQ ID NO: 43828

SEQ ID NO: 52341 - DNA, 630 bp, Neisseria meningitidis; identical to SEQ ID NO: 43032

SEQ ID NO: 52342 - DNA, 603 bp, Neisseria meningitidis
atgaccgacaaaatttctcccgacgcgctgattgaagccgcactgctgacccaaaccgaaccgctgaccgaaaaatctatgcgcgaactgtgtgtgccgccgttgtcgcaagacaaactgattgatgtgttggcgcagttgaaaacgcgttggcaggatagggcgttgcaactggtgcatacgcaagagggctggcgttttcagattgttcagacggcattcgagcggctgggcagcctgcaagaacagcgtgcgccgcgctactcccgcgccgtgatggaaacactggcgattatcgcctaccagcagcccgtaacgcgcggcgacatcgagggcatacgcggcgtggcggtgtcgcagaacgtgatgcagaccttgcaggatcgggggtggattgaagtcatcggacatcgggacacattgggaaaacccgcattgtgggcgacaacggcaacgttcctcagcgatttgggtttgaacagcttggaagaactgccgccgctgaccgaactgggcgaactggttttgcccgatttgatagaaatgcagcctacggatgaagaagagccggaaaccgtaccgtccgataccctgcccaactga

SEQ ID NO: 52343 - DNA, 435 bp, Neisseria meningitidis; identical to SEQ ID NO: 43698

SEQ ID NO: 52344 - DNA, 1053 bp, Neisseria meningitidis
atgaccgtatcccccgtcgccttgcgccgtaagaccgagtgcaagcctcatcccaccgcgcgctattggaaaaaatgcgatgtcgaagccctgttcggacttcccttcctcgacctcatttaccaagccgccgaaatccaccgccaaaatttcaacccgcgcgaaatccagctttccacgctgttgtccatcaaaaccggcggttgtcccgaagactgcgcctattgtccgcaatcggcgcaccacaataccaatctgggcaaagagcagatgatggatgtggatgaaatcgtcgaaaaagccaaaatcgccaaatcgcgcggcgcaagccggttttgtatgggcgcggcgtggcgcggccctaaacccaaagacgtggagacggtttccgcaatcatcaaagccgtcaagggcttgggtatggaaacctgcggcacgttcggtatgctcgaagaaggtatggcggaagacttgaaagaggcgggcttggattattacaaccacaacctcgacaccgaccccgaccgctacaacgacatcatccacacccgccaacacgaagaccgaatggacaccttgggcaaagtccgcaacgccggtttgaaagtctgctgcggcggcatcgtcgggatgaacgaaacccgcgccgaacgtgccgggctgattgccagtctcgccaatctcgacccgcagcccgaaagcgtgccgattaaccggttggtcaaagtggaaggcacgccgcttgccgatgccgaagatttggactggacggaatttgtccgcaccatcgccgtggcgcggattacgatgccgcaaagttatgtccggctgtcggcagggcgcagcaatatgcctgaagcaatgcaggcgatgtgctttatggcgggcgcgaactcgattttttacggcgacaagctgctgaccacgggcaatcctgatgaggacggcgacagaatcctgatggaaaagctcaacctgtatcccttgcagtttgaaccggaaggcgaggtcgccgaagtggaaaaagcctctgggattaaagtggattattga

SEQ ID NO: 52345 - DNA, 279 bp, Neisseria meningitidis; identical to SEQ ID NO: 36778

SEQ ID NO: 52346 - DNA, 780 bp, Neisseria meningitidis; identical to SEQ ID NO: 42858

SEQ ID NO: 52347 - DNA, 687 bp, Neisseria meningitidis
atgacggtgttgcaagaacgttattgtgaggtgtccgaccgtatcggaaaattggttctgcaggcgggcagggagccgcattccgtcagcctgattgccgtcggtaagactttcccttcagacggcatccgcgaagtttacgccgccggacagcgtgatttcggcgagaactatattcaggagtggtacggcaaaacggaagagttggcggatttgaccgacatcgtgtggcacgtcatcggcgatgtgcagtccaacaaaaccaagtttgtcgccgaacgcgcgcattgggtgcataccgtatgccgtctgaaaaccgccgtccggctgagcgggcaacgtccttcctcaatgccgcctttgcaggtgtgtatcgaggtgaacattgcgggcgaggcggtgaagcacggtgtcgcgcccgaagaagcagtcgcgcttgctgtggaagtggcgaagctgccgaatatcgtcgtacgtggactgatgtgtgttgccaaagccaacagcagtgaaacggagttgaaggtgcaatttcaaacgatgcggaaactgcttgccgacctcaatgcggctggcgttaaggcagacgtgctgtctatggggatgtcggacgatatgcctgccgccattgagtgcggtgcgacacacgtccgtatcggcagcgcgattttcgggaaaaggggctga

SEQ ID NO: 52348 - DNA, 1347 bp, Neisseria meningitidis; identical to SEQ ID NO: 42142

SEQ ID NO: 52349 - DNA, 474 bp, Neisseria meningitidis; identical to SEQ ID NO: 36318

SEQ ID NO: 52350 - DNA, 273 bp, Neisseria meningitidis; identical to SEQ ID NO: 43985

SEQ ID NO: 52351 - DNA, 465 bp, Neisseria meningitidis
atgtacaaacatttggttgttgccgttgacggcagtgaaacgtccatcaatgccctgaaacatgccgccgagcttgccggggtcaacggtgcgcgcctgactttggtgcacgttgccaatcctgccgaatatatggcactcgcccccgaatttttgcaacacgaaagctacgaagccgccgccgtcgcgcaaggcaacgaagttttggatgccgccgagcgcaccgcccaggaactgggtgtggaaaataccgtcaaacacctgctggttgccaataagggtgcgcgtgaaatggcgcaggatttggttgattatgccgatgaaaacggtgccgacctgctggtgttgggtacgcacggacgtaccgggctgatgcaccttttaatgggcagttttgccgaaacggtaatgcgccaaagccacctgccgcttttgattatccgcagcaaagccgaagaggcgtag

SEQ ID NO: 52352 - DNA, 699 bp, Neisseria meningitidis; identical to SEQ ID NO: 43428

SEQ ID NO: 52353 - DNA, 924 bp, Neisseria meningitidis; identical to SEQ ID NO: 43888

SEQ ID NO: 52354 - DNA, 1623 bp, Neisseria meningitidis; identical to SEQ ID NO: 43332

SEQ ID NO: 52355 - DNA, 747 bp, Neisseria meningitidis; identical to SEQ ID NO: 43425

SEQ ID NO: 52356 - DNA, 267 bp, Neisseria meningitidis; identical to SEQ ID NO: 43047

SEQ ID NO: 52357 - DNA, 519 bp, Neisseria meningitidis; identical to SEQ ID NO: 42967

SEQ ID NO: 52358 - DNA, 351 bp, Neisseria meningitidis; identical to SEQ ID NO: 41719

SEQ ID NO: 52359 - DNA, 171 bp, Neisseria meningitidis; identical to SEQ ID NO: 42160

SEQ ID NO: 52360 - DNA, 273 bp, Neisseria meningitidis; identical to SEQ ID NO: 37685

SEQ ID NO: 52361 - DNA, 561 bp, Neisseria meningitidis; identical to SEQ ID NO: 43439

SEQ ID NO: 52362 - DNA, 324 bp, Neisseria meningitidis; identical to SEQ ID NO: 42233

SEQ ID NO: 52363 - DNA, 3216 bp, Neisseria meningitidis; identical to SEQ ID NO: 42969

SEQ ID NO: 52364 - DNA, 849 bp, Neisseria meningitidis; identical to SEQ ID NO: 37501

SEQ ID NO: 52365 - DNA, 1221 bp, Neisseria meningitidis; identical to SEQ ID NO: 42668

SEQ ID NO: 52366 - DNA, 633 bp, Neisseria meningitidis; identical to SEQ ID NO: 42193

SEQ ID NO: 52367 - DNA, 876 bp, Neisseria meningitidis; identical to SEQ ID NO: 43311

SEQ ID NO: 52368 - DNA, 1098 bp, Neisseria meningitidis; identical to SEQ ID NO: 42788

SEQ ID NO: 52369 - DNA, 213 bp, Neisseria meningitidis; identical to SEQ ID NO: 41375

SEQ ID NO: 52370 - DNA, 1194 bp, Neisseria meningitidis; identical to SEQ ID NO: 42839

SEQ ID NO: 52371 - DNA, 495 bp, Neisseria meningitidis; identical to SEQ ID NO: 43557

SEQ ID NO: 52372 - DNA, 309 bp, Neisseria meningitidis
atggttgaacgttacaaaaccatgattgccgaagcaaacggtaagattcaccgtctggaagactggggtcgccgccagctggcttacccgattaacaaaatccataaagcccattacgttttgatgaacatcgaaaccactcccgaagtggttgaagagctggaaaccgcattccgcttcaatgatgcagtattgcgtcatctgaccatcaaaaccaaacacgccgttaccgaagcatcccctatgttgggtggtgaaaaggctaagaacctgttgagcggtgcgtctgaagaagcggtcgcccaataa

SEQ ID NO: 52373 - DNA, 936 bp, Neisseria meningitidis; identical to SEQ ID NO: 42535

SEQ ID NO: 52374 - DNA, 960 bp, Neisseria meningitidis; identical to SEQ ID NO: 42610

SEQ ID NO: 52375 - DNA, 789 bp, Neisseria meningitidis; identical to SEQ ID NO: 43700

SEQ ID NO: 52376 - DNA, 957 bp, Neisseria meningitidis; identical to SEQ ID NO: 42658

SEQ ID NO: 52377 - DNA, 279 bp, Neisseria meningitidis; identical to SEQ ID NO: 37465

SEQ ID NO: 52378 - DNA, 678 bp, Neisseria meningitidis; identical to SEQ ID NO: 42463

SEQ ID NO: 52379 - DNA, 5988 bp, Neisseria meningitidis
atgaataaaggtttacatcgcattatctttagtaaaaagcacagcaccatggttgcagtagccgaaactgccaacagccagggcaaaggtaaacaggcaggcagttcggtttctgtttcactgaaaacttcaggcgacctttgcggcaaactcaaaaccacccttaaaactttggtctgctctttggtttccctgagtatggtattgcctgcccatgcccaaattaccaccgacaaatcagcacctaaaaaccagcaggtcgttatccttaaaaccaacactggtgcccccttggtgaatatccaaactccgaatggacgcggattgagccacaaccgctatacgcagtttgatgttgacaacaaaggggcagtgttaaacaacgaccgtaacaataatccgtttgtggtcaaaggcagtgcgcaattgattttgaacgaggtacgcggtacggctagcaaactcaacggcatcgttaccgtaggcggtcaaaaggccgacgtgattattgccaaccccaacggcattaccgttaatggcggcggctttaaaaatgtcggtcggggcatcttaactaccggtgcgccccaaatcggcaaagacggtgcactgacaggatttgatgtgcgtcaaggcacattgaccgtaggagcagcaggttggaatgataaaggcggagccgactacaccggggtacttgctcgtgcagttgctttgcaggggaaattacagggtaaaaacctggcggtttctaccggtcctcagaaagtagattacgccagcggcgaaatcagtgcaggtacggcagcgggtacgaaaccgactattgcccttgatactgccgcactgggcggtatgtacgccgacagcatcacactgattgccaatgaaaaaggcgtaggcgtcaaaaatgccggcacactcgaagcggccaagcaattgattgtgacttcgtcaggccgcattgaaaacagcggccgcatcgccaccactgccgacggcaccgaagcttcaccgacttatctctccatcgaaaccaccgaaaaaggagcggcaggcacatttatctccaatggtggtcggatcgagagcaaaggcttattggttattgagacgggagaagatatcagcttgcgtaacggagccgtggtgcagaataacggcagtcgcccagctaccacggtattaaatgctggtcataatttggtgattgagagcaaaactaatgtgaacaatgccaaaggcccggctactctgtcggccgacggccgtaccgtcatcaaggaggccagtattcagactggcactaccgtatacagttccagcaaaggcaacgccgaattaggcaataacacacgcattaccggggcagatgttaccgtattatccaacggcaccatcagcagttccgccgtaatagatgccaaagacaccgcacacatcgaagcaggcaaaccgctttctttggaagcttcaacagttacctccgatatccgcttaaacggaggcagtatcaagggcggcaagcagcttgctttactggcagacgataacattactgccaaaactaccaatctgaatactcccggcaatctgtatgttcatacaggtaaagatctgaatttgaatgttgataaagatttgtctgccgccagcatccatttgaaatcggataacgctgcccatattaccggcaccagtaaaaccctcactgcctcaaaagacatgggtgtggaggcaggctcgctgaatgttaccaataccaatctgcgtaccaactcgggtaatctgcacattcaggcagccaaaggcaatattcagcttcgcaataccaagctgaacgcagccaaggctctcgaaaccaccgcattgcagggcaatatcgtttcagacggccttcatgctgtttctgcagacggtcatgtatccttattggccaacggtaatgccgactttaccggtcacaataccctgacagccaaggccgatgtcaatgcaggatcggttggtaaaggccgtctgaaagcagacaataccaatatcacttcatcttcaggagatattacgttggttgccggcaacggtattcagcttggtgacggaaaacaacgcaattcaatcaacggaaaacacatcagcatcaaaaacaacggtggtaatgccgacttaaaaaaccttaacgtccatgccaaaagcggggcattgaacattcattccgaccgggcattgagcatagaaaataccaagctggagtctacccataatacgcatcttaatgcacaacacgagcgggtaacgctcaaccaagtagatgcctacgcacaccgtcatctaagcattaccggcagccagatttggcaaaacgacaaactgccttctgccaacaagctggtggctaacggtgtattggcactcaatgcgcgctattcccaaattgccgacaacaccacgctgagagcgggtgcaatcaaccttactgccggtaccgccctagtcaagcgcggcaacatcaattggagtaccgtttcgaccaaaactttggaagataatgccgaattaaaaccattggccggacggctgaatattgaagcaggtagcggcacattaaccatcgaacctgccaaccgcatcagtgcgcataccgacctgagcatcaaaacaggcggaaaattgctgttgtctgcaaaaggaggaaatgcaggtgcgcctagtgctcaagtttcctcattggaagcaaaaggcaatatccgtctggttacaggagaaacagatttaagaggttctaaaattacagccggtaaaaacttggttgtcgccaccaccaaaggcaagttgaatatcgaagccgtaaacaactcattcagcaattattttcctacacaaaaagcggctgaactcaaccaaaaatccaaagaattggaacagcagattgcgcagttgaaaaaaagctcgcctaaaagcaagctgattccaaccctgcaagaagaacgcgaccgtctcgctttctatattcaagccatcaacaaggaagttaaaggtaaaaaacccaaaggcaaagaatacctgcaagccaagctttctgcacaaaatattgacttgatttccgcacaaggcatcgaaatcagcggttccgatattaccgcttccaaaaaactgaaccttcacgccgcaggcgtattgccaaaggcagcagattcagaggcggctgctattctgattgacggcataaccgaccaatatgaaattggcaagcccacctacaagagtcactacgacaaagctgctctgaacaagccttcacgtttgaccggacgtacaggggtaagtattcatgcagctgcggcactcgatgatgcacgtattattatcggtgcatccgaaatcaaagctccctcaggcagcatagacatcaaagcccatagtgatattgtactggaggctggacaaaacgatgcctataccttcttaaaaaccaaaggtaaaagcggcaaaatcatcagaaaaaccaagtttaccagcacccgcgaccacctgattatgccagcccccgtcgagctgaccgccaacggcataacgcttcaggcaggcggcaacatcgaagctaataccacccgcttcaatgcccctgcaggtaaagttaccctggttgcgggtgaagagctgcaactgctggcagaagaaggcatccacaagcacgagttggatgtccaaaaaagccgccgctttatcggcatcaaggtaggcaagagcaattacagtaaaaacgaactgaacgaaaccaaattgcctgtccgcgtcgtcgcccaaactgcagccacccgttcaggctgggataccgtgctcgaaggtaccgaattcaaaaccacgctggccggtgcggacattcaggcaggtgtaggcgaaaaagcccgtgccgatgcgaaaattatcctcaaaggcattgtgaaccgtatccagtcggaagaaaaattagaaaccaactcaaccgtatggcagaaacaggccggacgcggcagcactatcgaaacgctgaaactgcccagcttcgaaagccctactccgcccaaactgaccgcccccggtggctatatcgtcgacattccgaaaggcaatttgaaaaccgaaatcgaaaagctggccaaacagcccgagtatgcctatctgaaacagctccaagtagcgaaaaacgtcaactggaaccaggtgcaactggcttacgataaatgggactataagcaggaaggcttaaccagagccggtgcagcgattgttaccataatcgtaaccgcactgacttatggatacggcgcaaccgcagcgggcggtgtagccgcttcaggaagtagtacagccgcagctgccggaacagccgccacaacgacagcagcagctactaccgtttctacagcgactgccatgcaaaccgctgctttagcctccttgtatagccaagcagctgtatccatcatcaataataaaggtgatgtcggcaaagcgttgaaagatctcggcaccagtgatacggtcaagcagattgtcacttctgccctgacggcgggtgcattaaatcagatgggcgcagatattgcccaattgaacagcaaggtaagaaccgaactgttcagcagtacgggcaatcaaactattgccaaccttggaggcagactggctaccaatctcagtaatgcaggtatctcagctggtatcaataccgccgtcaacggcggcagcctgaaagacaacttaggcaatgccgcattaggagcattggttaatagcttccaaggagaagccgccagcaaaatcaaaacaaccttcagcgacgattatgttgccaaacagttcgcccacgctttggctgggtgtgttagcggattggtacaaggaaaatgtaaagacggggcaattggcgcagcagttggggaaatcgtagccgactccatgcttggcggcagaaaccctgctacactcagcgatgcggaaaagcataaggttatcagttactcgaagattattgccggcagcgtggcggcactcaacggcggcgatgtgaatactgcggcgaatgcggctgaggtggcggtagtgaataatgctttgaattttgacagtacccctaccaatgcgaaaaagcatcaaccgcagaagcccgacaaaaccgcactggaaaaaattatccaaggtattatgcctgcacatgcagcaggtgcgatgactaatccgcaggataaggatgctgccatttggataagcaatatccgtaatggcatcacaggcccgattgtgattaccagctatggggtttatgctgcaggttggacagctccgctgatcggtacagcgggtaaattagctatcagcacctgcatggctaatccttctggttgtactgtcatggtcactcaggctgccgaagcgggcgcgggaatcgccacgggtgcggtaacggtaggcaacgcttgggaagcgcctgtgggggcgttgtcgaaagcgaaggcggctaagcaagctgctcctaaagaaacaataaacaatttggcaaatttagccaaagcagaacagcagattttattccgtattgcccaacgcgatacgcaactggatgcatggaagacgggatttaacaatagagtaaggaaaggagcaggcttgcttgatgcaagtaatattccgataaccattaacggaaaaaccatcaaacctgtacaagccataagcttaaagggagcacccgtttacagcggcgtaagcgaacaggagatttttgcgctttatcggcagatgactggccagaatccgaattttagagttttgcctgacggaagattagcaaatggcattatcagtactggagaatgggcaggaacaaaaattgcattaagaaatttttcaaaaacagagaattcaactcaagcacgatggacattagatttgcagaatcctccatcatttattaaaggtactaaattggagcttaaattccaataa

SEQ ID NO: 52380 - DNA, 252 bp, Neisseria meningitidis
ttgcctgccaataacggtataattcgggcgttatcaccgccttttaccggtataaacatcagactttttgccgccttgggtctcctgtccctttccggcgcggcggcgcaagcctccgtataccattgcaactcaaatggcaaaagcgtatatacatcagccccagcaggattgtgcgccgatgcggatttacctaaaatcagcagccatcagggaggcggataccgcctgaaaattaaaaaactcagttaa

SEQ ID NO: 52381 - DNA, 606 bp, Neisseria meningitidis; identical to SEQ ID NO: 42283

SEQ ID NO: 52382 - DNA, 972 bp, Neisseria meningitidis; identical to SEQ ID NO: 39558

SEQ ID NO: 52383 - DNA, 984 bp, Neisseria meningitidis; identical to SEQ ID NO: 42514

SEQ ID NO: 52384 - DNA, 1248 bp, Neisseria meningitidis; identical to SEQ ID NO: 43529

SEQ ID NO: 52385 - DNA, 660 bp, Neisseria meningitidis; identical to SEQ ID NO: 43645

SEQ ID NO: 52386 - DNA, 999 bp, Neisseria meningitidis; identical to SEQ ID NO: 42537

SEQ ID NO: 52387 - DNA, 1677 bp, Neisseria meningitidis
atgagcgtaggtttgctgaggattctggttcaaaaccaggtggttactgttgagcaggccgagcattactacaatgagtcgcaggcgggtaaggaagtgttgccgatgctgttttcagacggtgtcatttcgcccaagtcgcttgcggcattgattgcgagggtgttcagttattcgattcttgatttgcgtcattatccgcgccacagggtgctgatgggggtgttgacggaggagcagatggtggagttccactgtgtgccggttttccgtcggggcgacaaagtattttttgcggtttccgatccgacacagatgccgcaaattcagaaaaccgtttctgccgcagggattgaggttgagttggtcattgtcgaggatgaccagttggcgggtttgctcgattgggtgggttcgcgttcgacatcgctgcttcaggagcttggggaggggcaggaggaagaggaaagccacaccctgtatatcgacaacgaggaggcagaagacggccctgttccgaggtttatccataagactttgtcggatgccttgcgcagcggggcatcggacatccatttcgagttttacgaacacaatgcccgtatccgtttccgtgtggacgggcagctccgcgaggtggttcagccgcccattgcggtaagggggcagcttgcttcacggattaaggtaatgtcgcgtttggacatttccgaaaaacggataccgcaggacggcaggatgcagctgacctttcaaaagggcggcaagcctgtcgatttccgtgtcagcacattgccgacgctgtttggcgaaaaggtcgtgatgcggattttgaattccgatgccgcgtctttgaacatcgaccagctcggttttgagccgtttcagaaaaaattgttgttggaagcgattcaccgtccctacgggatggtgctggtaaccggtccgacgggttcgggtaagacggtgtcgctctatacctgtttgaatattttgaatacggagtcggtaaatattgcaacggcggaagaccctgccgagattaacctgccgggcatcaatcaggttaacgtcaatgataagcagggcctgacttttgccgctgctttgaagtctttcctgcgtcaggacccggacatcattatggtcggtgagattcgtgatttggaaactgccgatattgcgattaaggcggcacaaacagggcatatggtgttttccaccctgcacaccaataatgcgccggcgacgttgtcgcgtatgctgaatatgggtgtcgcgccgtttaatattgccagttcggtcagcctgattatggcgcagcgtcttttacgcaggctgtgttcgagctgcaaacaggaagtggaacgcccgtctgcctctgctttgaaggaagtcggcttcaccgatgaggaccttgcaaaagattggaaactttaccgcgccgtcggttgcgaccgttgccgggggcagggttataaggggcgtgcgggcgtgtatgaggttatgcccatcagcgaagaaatgcagcgtgtgattatgaacaacggtacggaagtggatattttggacgttgcctataaggagggtatggtggatttgcgccgggccggtattttgaaagttatgcagggcattacttcattggaagaggtaacggcaaataccaacgattag

SEQ ID NO: 52388 - DNA, 687 bp, Neisseria meningitidis; identical to SEQ ID NO: 42141

SEQ ID NO: 52389 - DNA, 138 bp, Neisseria meningitidis; identical to SEQ ID NO: 39930

SEQ ID NO: 52390 - DNA, 1776 bp, Neisseria meningitidis; identical to SEQ ID NO: 43694

SEQ ID NO: 52391 - DNA, 957 bp, Neisseria meningitidis
atgaaagtcctctttatcgccgacccgatggcaagtttcaaaacctataaagacaccacctacgcgatgatgcgcgaaatggcaaaacgcggctggcggctgtttcacacattgagcggggaattgtctgtaaacggcggtttggtaacggcgcaggcatcggcatttgaatttttgggtgcaaaaaacgatgatgatcatgcgtggttcaaatctgccgacaaagttcagacggcattggaagcatttgatgccgtgattatgcgtaccgatccgccgttcgatatgcaatacctctacgccacccaattactgacgctggcggaacagcagggcgcgaaggtctttaacagcggacaggcgatgcgcgactttaatgaaaaactggcgattttgaacttcagccgctttatcgcgcccacgctggtaacgacccgttccgccgatgtccgcacatttttgaaagaacacggcgacatcatcatcaaaccgctcgacggcatgggcggtatgggaattttccgcctgaccgaaaaagaccccaacatcggcagcatcctcgaaaccctgatgcagcttgattcccgcaccattatggcgcaacgctacattcccgaaatcgtacacggtgacaaacgcatcctgattatcggcggcgaagtcgtcccctatgctttggcgcgtatcccgcaaaacggcgaaacacgcggcaaccttgcggcaggcgggcgcggcgtggcgcaggaattgggcggacgcgaccgcgaaattgccgaaacgctcgcccccgaactcaaacggcgcggcatcctgctggccggtttggacgttatcggcagcaacctgaccgaagtcaacgtaaccagcccgaccggattccaagaaattatgaaacaaaaaggtttcgatgtggcggcaatgtttgccgatgccgttgccgcgtggtcggtacgttaa

SEQ ID NO: 52392 - DNA, 822 bp, Neisseria meningitidis
atgtctttgcaaaacattatcgaaaccgcctttgaaaaccgcgcggacatcaccccgaccaccgttactcccgaagtcaaagaagccgtgttggaaaccatccgccaactcgattccggcaaactgcgcgttgccgaacgtttgggcgtgggtgagtggaaagtcaacgaatgggcgaaaaaagccgtgttgctgtccttccgcatccaagacaacgaagtcctcaacgacggcgtgaacaaatacttcgacaaagtgccgaccaagtttgccgactggtctgaagacgagttcaaaaacgcaggcttccgcgcagttccgggtgcggttgcccgacgcggcagctttgtggcgaaaaatgtcgtgctgatgccatcttatgtcaacatcggcgcatacgtcgacgaaggcgcgatggtcgatacttgggcaaccgtcggctcttgcgcgcaaatcggtaaaaacgtgcacttgagcgggggcgtcggcatcggtggtgtactcgaacccctgcaggccgcacccaccatcattgaagacaactgcttcatcggtgcgcgttctgaaatcgttgagggcgtgattgtcgaagaaggcagcgtgatttctatgggcgtgttcatcggtcaatccaccaaaatctttgaccgtacaaccggcgaaatctatcaaggccgcgtaccggcaggttcggttgtcgtatccggcagtatgccttccaaagacggcagccacagcctttactgcgccgtcatcgtcaaacgcgtggacgcgcaaacccgtgcgaaaaccagcgtcaacgaattgttgcgcggcatctga

SEQ ID NO: 52393 - DNA, 417 bp, Neisseria meningitidis; identical to SEQ ID NO: 39610

SEQ ID NO: 52394 - DNA, 183 bp, Neisseria meningitidis; identical to SEQ ID NO: 43318

SEQ ID NO: 52395 - DNA, 147 bp, Neisseria meningitidis; identical to SEQ ID NO: 42908

SEQ ID NO: 52396 - DNA, 255 bp, Neisseria meningitidis; identical to SEQ ID NO: 39349

SEQ ID NO: 52397 - DNA, 648 bp, Neisseria meningitidis; identical to SEQ ID NO: 43613

SEQ ID NO: 52398 - DNA, 1857 bp, Neisseria meningitidis; identical to SEQ ID NO: 43949

SEQ ID NO: 52399 - DNA, 1134 bp, Neisseria meningitidis
atgtttaaaaaattcaaaccggtactgttgtcattttttgcacttgtatttgccttttggctgggaacgggtattgcctatgagattaatccgcgttggtttttgagcgatacggcaactgaagtacctgaaaatccgaatgcttttgtggcgaaacttgcccgcctgttccgaaatgccgacagggcggttgtcatcgtgaaggaatcgataaggacggaggaaaatcttgccggaactgtggatgacggtccgttgcagtcggagaaggattatctcgcgctcgctatccggctcagtcgtttgaaagaaaaagcgaaatggtttcacgtaacggagcaggaacatgggaaagaggtttggctggattaccatatcggcgagggcggtttggttgcggtttcgctttcgcaacgctcgccggaagcatttgttaatgccgaatatctgtatcggaacgatcgtccgttttctgtaaatgtgtacggcggaacggttcacggggaaaattatgaaacgacaggagaatatcgggttgtttggcaaccagacggttcggtatttgatgcggcggggcgcgggaaaatcggggaagatgtttatgagcattgcctcgggtgttatcagatggcccaggtatatttggcgaaataccgggatgtcgcgaatgacgagcagaaggtttgggacttccgcaaagagagcaaccgaattgcgtcggactcgcgcaattctgtgttttatcagaatatgcgggaattgatgccccgagggatgaaggcgaacagtcttgtggtcggctatgatgcggacggtctgccgcaaaaagtctattggagtttcgacaatggaaaaaaacgccagagtttcgaatattatttgaaaaacggaaatctttttattgcacaatcttcgacggtagcattgaaagcggatggcgtaacggcggatatgcagacctatcatgcgcaacagacgtggtatttggatggcgggcggattgtccgcgaagagaaacagggagacagactgcctgattttcctttgaacttggaaaatttggaaaaagaggtgcgccgttatgcagaggctgcggcgagacgttcgggcggcaggcgcgacctttctcactga

SEQ ID NO: 52400 - DNA, 507 bp, Neisseria meningitidis; identical to SEQ ID NO: 43680

SEQ ID NO: 52401 - DNA, 1443 bp, Neisseria meningitidis; identical to SEQ ID NO: 42650

SEQ ID NO: 52402 - DNA, 639 bp, Neisseria meningitidis; identical to SEQ ID NO: 43647

SEQ ID NO: 52403 - DNA, 465 bp, Neisseria meningitidis; identical to SEQ ID NO: 42740

SEQ ID NO: 52404 - DNA, 891 bp, Neisseria meningitidis; identical to SEQ ID NO: 43449

SEQ ID NO: 52405 - DNA, 1272 bp, Neisseria meningitidis; identical to SEQ ID NO: 43272

SEQ ID NO: 52406 - DNA, 1131 bp, Neisseria meningitidis
atgaaacaagccgattcaaccatcaaatctcgtgcggcggtggcattcgcccctaaccaacccttacaaattgtggaaatcgacgtagaaatgccgcgtaaaggcgaggtgttaatccgcaatacccacactggcgtgtgccatactgatgcgtttacgttatcaggaagcgatcctgaaggcgtattccctgtggtgcttggacacgaaggtgcgggtgtggtcgttgctgtgggcgaaggtgtgtcaagcgtaaaaccgggtgatcacgtgattccgctttacaccgccgaatgtggcgaatgtgagttttgttgttcaggtaaaaccaacttgtgcgtctcagtgcgtgatacacaaggtaaaggcttaatgccggacggcacgacgcgtttttcttatcaaggtcagccaatctatcactatatgggctgttcgactttcagtgaatactccgttgttgccgaagtttcactggcgaaaatcaaccctgaagccaaccatgaacaagtatgtttgctcggctgcggcgttaccacaggtattggtgcggtacataatacggcaaaagtgcaagaaggcgactctgttgccgtgtttggtttgggggcgattggtttggcggtggtgcaaggtgcgcgtcaagccaaagccggccgcattatcgccattgataccaatccatcaaaatttgagttggcaaaacagttcggtgcaacggattgtttgaacccgaacgattacgataaaccgatcaaagatgtgttgttagacattaataaatggggcattgaccatacctttgaatgtatcggcaatgtaaacgtaatgcgtcaggcattagaaagtgcacatcgtggttggggtcaatccattatcatcggcgtagcaggtgcaggacaagaaatttcaacgcgtccgttccagttggtaacaggtcgtgtttggaaaggttcagcatttggcggtgtgaaaggtcgctctgaactgccgaaaatggtggaagattcaatgaaaggcgacattgagttagaaccgtttgtaacccacacaatgacactcgatcaaatcaataaagcctttgacttaatgcacgaaggtaaatcgatccgcgccgttattcactactaa

SEQ ID NO: 52407 - DNA, 843 bp, Neisseria meningitidis
atggattcttttttcaaaccggcagtttgggcggttttgtggctgatgtttgccgtccgccccgcccttgccgacgagttgaccaacctgctcagcagccgcgagcagattctcagacagtttgccgaagacgaacagcccgttttacccatcaaccgagcccccgcccggcgggcgggcaatgccgacgaactcatcggcagcgcgatggggcttaacgaacagcccgttttacccatcaaccgagcccccgcccggcgggcgggcaatgccgacgaactcatcggcagcgcgatggggcttaacgaacagcccgttttacccgtcaaccgagtccccgcccggcgggcgggcaatgccgacgaactcatcggcaacgcgatggggcttaacgaacagcccgttttacccgtcaaccgagcccccgcccggcgggcgggcaatgccgacgaactcatcggcaacgcgatgggacttttgggtattgcctaccgctacggcggcacatcggtttctaccggttttgactgcagcggcttcatgcagcacatctttaaacgcgccatgggcatcaacctgccgcgcacgtcggcagaacaggcacggatgggtacgccggttgcccgaagcgaattgcagcccggagatatggtgtttttccgcacgctcggcggcagccgcatttcccatgtcggactttatatcggcaacaaccgcttcatccacgcgccgcgcacggggaaaaatatcgaaatcaccagcctgagccacaaatattggagcggcaaatacgcgttcgcccgccgggtcaagaaaaacgacccgtcccgctttctgaactga

SEQ ID NO: 52408 - DNA, 507 bp, Neisseria meningitidis; identical to SEQ ID NO: 42171

SEQ ID NO: 52409 - DNA, 951 bp, Neisseria meningitidis
ttgctgaatgaggcggtggatgcgcttgccgtgcgcgaagacggtgtctatgtggacggtacgttcggcaggggagggcattcccggctgattttgtcgcgtttgggcgatgcggggcggttgattgttttcgacaaagacccgcaggcgattgctgtggcagaagagctggcgcgttcggacaaacgggtcggtgtcgtgcatggcggttttgcttcgtttcagacggcattggacggtttgggtatcggcaaggtggacggtgcgctgtttgatttggggatttcgtccccgcaaatcgatgacggcagccgcggtttcagcttccgtttcgatgcccctttggatatgcgtatggatacgacgcgcggtatgtctgccgcagagtggatagcggttgcgtcggaacaggatttgcacgaggtaatcaagaattatggtgaagagcggtttagccgccggattgcgcgcgccattgttgcgcaacgggcggaaagtccaatcgatacaacccgcaagctggcgcagatcgtggcacaaaacgtccgtactcgcgagcgggggcaggatcctgcgacgcgcaccttccaggcggtccgcatctttattaaccgcgagcttgaagaagtaggggcagtattgccgcaggtcatgtgtcgtctgaaagagggcggacgtttggcggtcattgctttccattcgttggaagatcgcattgtgaagcagtttgtcaaaaaatattcgcaacacgcgcccctgccgcgctgggcggcggtcagggaagcggatttgcccgagctgcccctgaaaatcgtgggcagggcattaaagccgggtgaggcggaaattgccgccaatccgagggcgagaagtgcggttttgcgtgtggcggagcggactgccggtccgataccggaacaatcacagagaaaaacgtctgaatggcaatga

SEQ ID NO: 52410 - DNA, 753 bp, Neisseria meningitidis; identical to SEQ ID NO: 43178

SEQ ID NO: 52411 - DNA, 372 bp, Neisseria meningitidis; identical to SEQ ID NO: 40198

SEQ ID NO: 52412 - DNA, 1005 bp, Neisseria meningitidis; identical to SEQ ID NO: 42147

SEQ ID NO: 52413 - DNA, 1311 bp, Neisseria meningitidis; identical to SEQ ID NO: 42564

SEQ ID NO: 52414 - DNA, 798 bp, Neisseria meningitidis; identical to SEQ ID NO: 43611

SEQ ID NO: 52415 - DNA, 2028 bp, Neisseria meningitidis
ttgaccggcatccgctcagaaaaacagattcaacgcgaaatcatgctgacacaggctgcgtttaaccgtttggcgcgcagcggcaaggcatcacaaaatgatttggcacgggcggcggtcgctacgcgtaaccgaattcgcgagctgaacgcggaactgaaacagggcacgggatttgcggacaagatgggaaaaatcggaagattcggtgcagctgcggtggctggtggcgcggcagcgtatacggtgcttaagcctgctatggacaacagaaagcagcttgatgagaacatcaaccgcgtgtccagacaggcatttattgaggataacagtaaatcggcagcgtggattgcaactgaaggtgcgcaacagatcaaggatttggcacttgaacttgtcgagaaaaatggcgggacccacgataaggctttggatttaatcagcggcatgatgaccaccggtctgaattttgcccaaaccaagaatgaagcgcaggcggcatatgcttttgcacttgcctcagaaggcagtggcgaggatacggcaaaactgattaaaaccctgaaagatggcggcatgagcggtaaagacctgcaactcgggcttgagcacgtcttgcaatcgggtttagacggcactttcgaggtgcgggatatggttcgggagctgccgagcctgctctctgccgcgcaacaggcagggatgaatggtgtcggcggtttggactacctgctctcactcttacaatctgcggcgaataaatcgggcagtcctgccgaagcggcgactaatgtgcaaaatcttttgagtaaaactctgtcgcctgacacgataggtcgtctgaagaagatggcaaatccgaatgacccgaagaaaggtgtcgattggataggctcggttgtgcaaggcaagcaaaacggcgaaaacgcagtgcaggtgttgtcccgtcttgccgatgccatgctagtaaaggataagcaataccaagattataagaaacgcgcggctgcaggcgataagacggcggcggagcaggcaaatatgcttaagggcgcgcttttggcgcaactgctgcctgatttgcaggcaaaacaaggtttgctggctgcaacggatatgacgcaaatccgtgaatatatggcttcgttggctggcgtaacgttggataacggaaaaattgctaagaacaacgaggcgcgaatgttgtcggcagcggcgcaacaagagcaacaggaatcgctggcaatgttgcgggaaagtctgacgggaacattggtggatatggaaacctcgtttaaaaagctggcagcggaataccctaatgccactctagccctgcaagcattgacgacggcggcaacagcggcgtctgccgcaatgttattaaccgccggtggcggtaaaggtgcaggctttctgaaagatgtaggtagtaaagcgttgggatggggtaaggcttccgcaggcggcgtggcagcaggtgccacagcggcaggcggtaagttgctgtcatggggaaaatctgccggtagcgggctcatgaataatccagcgttagttaaacgggcgggtttgttaggtatgttgctgtattccgagtctttgggtgacggcacattgccaaagggtttgcgtggtaccaagacaactcctgaaatgattaatcgtctgaaaaacaacggtatccgatttgaacctgcgccgaagcgggaacaggcgcggggtggtgtccctcagtatttggctgctccgtcagcgcagcctaccgataagatgttgtctccgttgttttcaactcagacggcggcgtatcaggcagccattcagcagcagacggcggcgtatcaggcagcattggcgcaggatacggctgcagttacaacaggtttggcacaagtgcaaagtgcgatggcgtcggcaagtcagaccatcaataccaatgtgagcctgaatatcgacggacgtgttatcgcgaatgaggtatcgcggtatcaagtggccatgttcggccgtggagcgggtcaataa

SEQ ID NO: 52416 - DNA, 375 bp, Neisseria meningitidis
ttggtcgaaggtcaaaaatcagccgttaccgagtattacctgaatcacggcgaatggcccggcgacaacagttctgccggcgtggcaacctcctctgaaatcaaaggcaaatatgttaaaagcgttgaagtcaaaaacggcgtcgttaccgcccaaatggcttcaagcaacgtaaacaacgaaatcaaaggcaaaaaactctccctgtgggccaagcgtcaaaacggttcggtaaaatggttctgcggacagccggttacgcgcgacaaagccaaagacgacgccgtcaccgccgccaccggcaagggcaccgccaacatcaacaccaagcacctgccgtcaacagcaccgacaagaaaatcgacaccaaactag

SEQ ID NO: 52417 - DNA, 1092 bp, Neisseria meningitidis
atgtcccatatctcccccatccccgaaatcctagccgacatcaaagccggcaaaatggtcatcatcaccgatgccgaagaccgagaaaacgaaggcgacctgctgatggcggcgcaattcgtcacgcccgaagccatcaacttcatgatcaaacacgcgcgcggcttggtctgcctgccgatggacggcgaaatggtcgaaaaactcgggctgccgatgatgacccaaaaaaacggcgcgcaatacggcaccaactttaccgtctccatcgaagccgcacacggcattaccaccggcatttccgccgccgaccgcgccctgactattcaaaccgccgtttccccgaccgctaaacccgaagacatcgtccaacccggtcatatctttccgcttcgcgcccaaaaaggcggcgtactcgtccgcgccggacacaccgaagccggcgtcgacctggcgcaaatgaacgggctgattcctgcctccgttatttgcgaaatcatcaacgacgacggcacgatggcgcgtatgcccgaactgatgaaattcgccgaagaacacaagctcaaaatcggcacgattgccgacctcatcgaataccgcagccgtaccgaaagcctgcttgaagacatgggcaatgcgcctgtacaaaccccgtggggcgagttccaacaacacgtttacgtcgacaaactctccggcgaaacccacctcgccctcgtcaaaggcacgcccgccgccgacaccgaaaccctcgtccgcgtccacgaacccttcagtgtgatggacttcattcaagccaacccgcgccattcatggtcgctgcccaaagcccttgagcacatccaacaagccgaaagcggcgtcgtcatcctcttacaccgcaccgaagacggcgcatccctgctcgaccgaaccctacccaaaggcgcaaaccaagcctacaaatgggacagcaaaagctacggcatcggcgcacaaatcctcgccggcctcaacgtcaaaaaactgcgcgtcctcgggcagccctcatctttcaccggcctgaccggcttcggtttggaagtcgtcggctttgaagaagcggaaaaataa

SEQ ID NO: 52418 - DNA, 1392 bp, Neisseria meningitidis; identical to SEQ ID NO: 42489

SEQ ID NO: 52419 - DNA, 396 bp, Neisseria meningitidis; identical to SEQ ID NO: 43375

SEQ ID NO: 52420 - DNA, 1251 bp, Neisseria meningitidis; identical to SEQ ID NO: 42992

SEQ ID NO: 52421 - DNA, 570 bp, Neisseria meningitidis; identical to SEQ ID NO: 42483

SEQ ID NO: 52422 - DNA, 777 bp, Neisseria meningitidis; identical to SEQ ID NO: 43168

SEQ ID NO: 52423 - DNA, 543 bp, Neisseria meningitidis
gtgcagagttggaaagaaaggcgggatttcaatattgtaaagcaggatttggatttttcctgcggggcggcttcggtggcgacacttttgaacaatttttacgggcaaaagctgacggaagaagaagtgttggaaaaactggataaggagcagatgcgcgcgtcgtttgaggatatgcggcgcattatgcctgatttgggttttgaggcgaagggctatgccctgtctttcgagcagctcgcgcagttgaaaatccccgtcatcgtgtatctgaaataccgcaaagacgaccatttttcggtattgcgcggtatagacggcaatacggttttgcttgccgacccgtcgctggggcatgtttcaatgagcagggcgcagtttttggatgcttggcaaacccgtgagggaaatttggcaggtaagattttggctgtcataccgaaaaaagccgagacaatttcaaataaattgtttttcacacaacacccaaaacggcagacggagtttacagtcggacaaatcaggcaagcacgtgcagagtaa

SEQ ID NO: 52424 - DNA, 972 bp, Neisseria meningitidis; identical to SEQ ID NO: 43512

SEQ ID NO: 52425 - DNA, 261 bp, Neisseria meningitidis; identical to SEQ ID NO: 42753

SEQ ID NO: 52426 - DNA, 783 bp, Neisseria meningitidis; identical to SEQ ID NO: 42303

SEQ ID NO: 52427 - DNA, 297 bp, Neisseria meningitidis; identical to SEQ ID NO: 43641

SEQ ID NO: 52428 - DNA, 150 bp, Neisseria meningitidis; identical to SEQ ID NO: 41322

SEQ ID NO: 52429 - DNA, 789 bp, Neisseria meningitidis; identical to SEQ ID NO: 43304

SEQ ID NO: 52430 - DNA, 1116 bp, Neisseria meningitidis; identical to SEQ ID NO: 42748

SEQ ID NO: 52431 - DNA, 678 bp, Neisseria meningitidis; identical to SEQ ID NO: 37180

SEQ ID NO: 52432 - DNA, 1410 bp, Neisseria meningitidis; identical to SEQ ID NO: 42456

SEQ ID NO: 52433 - DNA, 1017 bp, Neisseria meningitidis; identical to SEQ ID NO: 43997

SEQ ID NO: 52434 - DNA, 891 bp, Neisseria meningitidis; identical to SEQ ID NO: 43530

SEQ ID NO: 52435 - DNA, 456 bp, Neisseria meningitidis; identical to SEQ ID NO: 42404

SEQ ID NO: 52436 - DNA, 1416 bp, Neisseria meningitidis
atgaacctgcatgcaaaggacaaaacccagcatcccgaaaacgtcgagctgctcagtgcgcagaagccgattaccgactttaagggcctgctgaccaccattatttccgccgtcgtctgtttcggcatttaccacatcctgccttacagccccgatgccaataaaggtatcgcgttgctgattttcgttgccgcactttggtttaccgaagccgtccacattaccgttaccgcgctgatgatccctatcctcgccgtcgtactcggtttccccgacatggacatcaaaaaggcgatggctgatttttccaacccgattatctacatttttttcggcggtttcgcactcgccaccgccctgcatatgcagcgtctcgaccgcaaaatcgccgtcagcctgctgcggctgtcgcgcggcagtatgaaggccgccgtgctgatgttgttcctcgttaccgcctttctgtccatgtggatcagcaacaccgccaccgccgcgatgatgctgcctctggcaatgggtatgctgagccacctcgaccgggaaaaagaacgcaaaacctacgtcttcgtcctgctcggcatcgcctattgcgccagcatcggcggcttgggcacgctcgtcggctcgccgcccaacctgattgccgccaaagccctaaatctggacttcgtcggctggatgaagctcggcctgccgatgatgctgttgattctgcccttgatgctgctctccctgtacgtcatcctcaaacctaatttgaacgaacgcgtggaaatcaaagccgaatccatcccttggacgctgcaccgcgtgatcgcgctgttgattttccttgccacagccgccgcgtggatattcagctccaaaatcaaaaccgccttcggcatttccaatcccgacaccgttatcgccctgagtgccgccgtcgccgtcgtcgtcttcggcgtggcgcaatggaaggaagtcgcccgcaataccgactggggcgtgttgatgctcttcggcggcggcatcagcctgagcacgctgttgaaaacatccggcgcgtccgaagccttgggacagcaggttgccgccaccttttccagcgcgcccgcatttttggtgatactcatcgtcgccgccttcattatttttctgaccgagttcaccagcaacaccgcctccgccgcattgcttgtaccgattttctccggcatcgctatgcagatggggctgcccgaacaagtcttggtattcgtcatcggcatcggcgcatcttgtgccttcatgctgccggttgccacaccgcctaacgcgattgtgttcggcacaggcttaatcaagcaacgcgaaatgatgaatgtcggcatactgctgaacatcctctgcgtagtattggttgctctgtgggcttatgctgtactgatgtaa

SEQ ID NO: 52437 - DNA, 300 bp, Neisseria meningitidis
atgggctatcgtgtcggcataaattgttttgatacaagattgcatgcagacgactatttattgtcgtcccttcctcctactgttacccaggacggaaaaatcatcaggccggaaagggtgggcgataaatggattttgaacggaaagccggtcacgctgtcttatccgaaatgttcgaattacgaacaagttaaatccggagcttatctcgggtctatggttttaattctgtttgtcgttatttacggcttcaggctgctgattaatttcttaaaagacataggcaaagtaggggcgtga

SEQ ID NO: 52438 - DNA, 357 bp, Neisseria meningitidis; identical to SEQ ID NO: 42228

SEQ ID NO: 52439 - DNA, 1137 bp, Neisseria meningitidis
atggattggcacgaacgtttccccgaattggaagcgcaactgggtgcgccgattgaaaattacgcgccgccgaaacattggacgcgcaagcagctcagaagtatggggcgcgtgtcgtacctgtgcgtcgatgcggcggagcaggcgctggcggatgccggtttgctcggggacgaaagcattaccgacggacggatgggcgttgcctgcggctcttccagcggcagcaccaaagacatcggcgatgtgggcgaattgttgctgaccggcacgtcgcgcaacttcagcgccaacacctatgtgcgtatgatgccgcacaccaccgccgccaatatcggcatctttttcgggctgaaagggcgcatcatcccgacatcgagcgcgtgttcgtccggcagccaaggcataggttatgcctacgaagccatcaaatacggtctgaccgatatgatgctggcgggcggaggcgaagaatttttcccgtccgaagtgtatgttttcgactcgctttatgccgccagccgccgcaacggcgaaccggaaaaaaccccgcgcccatacgacgcgaaccgcgacgggctggtcatcggcgaaggcgcggggattttcgtgctggaagaattggaacacgccaaacggcgcggtgcgataatttacgccgaactcgtcggctacggagccaacagcgatgcctaccatatttccacgccccgccccgacgcgcaaggcgcaatccttgcctttcagacggcattgcaacacgcaaaccttgcacccgaagacatcggctggattaatctgcacggcaccgggacgcaccacaacgacaatatggaaagccgcgccgttgcagcggttttcggcaacaatacgccctgcacgtccaccaagccgcaaaccggacacacgctgggcgcggcggacgcaatcgaagccgcgttcgcgtggggcattgccgaccggcaaagcaatcccgaaggaaaacttccgccccggctttgggacgggcagaacgaccccaacctgcccgccatcaacctgaccggcagcggcagccgctgggaaaccgaaaaacgcattaccgccagctcgtcgtttgccttcggaggaagcaactgcgtcttaatcatcggatga

SEQ ID NO: 52440 - DNA, 996 bp, Neisseria meningitidis
atgaaaaaatccctgattgccctgactttggcagcccttcctgttgcagcaatggctgacgttaccctgtacggcaccatcaaagccggcgtagaaacttcccgctctgtatttcaccagaacggccaagttactgaagttacaaccgctaccggcatcgttgatttgggttcgaaaatcggcttcaaaggccaagaagacctcggtaacggcctgaaagccatttggcaggttgagcaaaaagcatctatcgccggtactgactccggttggggcaaccgccaatccttcatcggcttgaaaggcggcttcggtaaattgcgcgtcggtcgtttgaacagcgtcctgaaagacaccggcgacatcaatccttgggatagcaaaagcgactatttgggtgtaaacaaaattgccgaacccgaggcacgcctcatttccgtacgctacgattctcccgaatttgccggcctcagcggcagcgtacaatacgcgcttaacgacaatgcaggcagacataacagcgaatcttaccacgccggcttcaactacaaaaacggtggcttcttcgtgcaatatggcggtgcctataaaagacatcatcaagtgcaagagggcttgaatattgagaaataccagattcaccgtttggtcagcggttacgacaatgatgccctgtacgcttccgtagccgtacagcaacaagacgcgaaactgactgatgcttccaattcgcacaactctcaaaccgaagttgccgctaccttggcataccgcttcggcaacgtaacgccccgagtttcttacgcccacggcttcaaaggtttggttgatgatgcagacataggcaacgaatacgaccaagtggttgtcggtgcggaatacgacttctccaaacgcacttctgccttggtttctgccggttggttgcaagaaggcaaaggcgaaaacaaattcgtagcgactgccggcggtgtcggtctgcgccacaaattctaa

SEQ ID NO: 52441 - DNA, 669 bp, Neisseria meningitidis; identical to SEQ ID NO: 43457

SEQ ID NO: 52442 - DNA, 639 bp, Neisseria meningitidis
atgtttcaaaattttgatttgggcgtgtttctgcttgccgtcctgcccgtgctgctctccattaccgtcagggaggtggcgcgcggctatacggcgcgctactggggagacaacactgccgaacaatacggcaggctgacactgaaccccctgccccatatcgatttggtcggcacaatcatcgtaccgctgcttactttgatgttcacgcccttcctgttcggctgggcgcgtccgattcctatcgattcgcgcaacttccgcaacccgcgccttgcctggcgttgcgttgccgcgtccggcccgctgtcgaatctagcgatggctgttctgtggggcgtggttttggtgctgactccgtatgtcggcggggcgtatcagatgccgttggctcaaatggcaaactacggtattctgatcaatgcgattctgttcgcgctcaacatcatccccatcctgccttgggacggcggcattttcatcgacaccttcctgtcggcgaaatattcgcaagcgttccgcaaaatcgaaccttatgggacgtggattatcctactgctgatgctgaccggggttttgggtgcgtttattgcaccgattgtgcggctggtgattgcgtttgtgcagatgttcgtctga

SEQ ID NO: 52443 - DNA, 1155 bp, Neisseria meningitidis
atggttgataaaaaaagccctttgattgccgtcagtgtcggcgaagcgtcgggcgacctgttgggggcgcacctgatacgcgccatccgaaagcgttgcccgcaggcgcgttttgtcggtatcggcggcgaactgatgaaggcggaaggtttcgagagcctttatgatcaggagcgactggcggtgcgcggctttgccgaggtggtaaaacgcctgccggaaattttacggatacgcagggggctggtacgggatttgctgtcgttgaaacctgatgtgtttgtcggcatcgatgcgcccgattttaatctaggtgtggcggagcggctcaaacgggcgggcattccgaccctgcattatgtcagtccgtcggtgtgggcgtggcggcgggaacgcgtgggcaaaatcgtgcatcaggtcaaccgcgtgctgtgcctgttcccgatggagccgcagctttatctcgatgcgggcggacgtgcggagtttgtcggtcatccgatggcgcagcttatgcccttggaagacgaccgtgaaacggcgcggaaaactttgggcgtggatgccggcatccccgtattcgccctgctgcccggcagccgcgtcagcgaaatcgactatatggcgccggtgttttttcagacggcattattgttgttggaacgctatcctgccgcacgcttcctgctgcctgccgcaacggcggcgacgaagcggcgtttggcggaagttttgcagcggccggagtttgccggattgccgctgacggtaatcgacagacagtctgaaacagtgtgcagggcggcggatgcggtgctggtaacgagcggtacggcaactttggaagtggctctgtgcaagcgtccgatggtcatcagctacaagatttcgccgctgacttatgcttatgtgaaacgcaaaatcaaagtgccgcatgtcggcctgccgaatatcctgttgggtaaggaggctgtgccggagctgcttcaacatgatgccgtaccggaaaaactggcggcggcgttggcggactggtacgaacaccccgataaggttgccgcgctgcaacaggatttcagggcgttgcacctgctgttgaaaaaagatacggcggatttggccgcgcgcgcggttttggaagaggcgggatgttga

SEQ ID NO: 52444 - DNA, 1209 bp, Neisseria meningitidis; identical to SEQ ID NO: 43218

SEQ ID NO: 52445 - DNA, 507 bp, Neisseria meningitidis; identical to SEQ ID NO: 43438

SEQ ID NO: 52446 - DNA, 624 bp, Neisseria meningitidis; identical to SEQ ID NO: 51954

SEQ ID NO: 52447 - DNA, 1035 bp, Neisseria meningitidis; identical to SEQ ID NO: 42172

SEQ ID NO: 52448 - DNA, 1623 bp, Neisseria meningitidis
atgcaagtaaatattcagattccctgtatgctgtacagacgcgggagtgttaagccccccttgtttgaagctccgcggctcctgccgagcttcaccgaccccgttgtgcccaagctctctgctcccggcggctacattgtcgacatccccaaaggcaatctgaaaaccgaaatcgaaaagctggccaaacagcccgagtatgcctatctgaaacagctccaagtagcgaaaaacgtcaactggaaccaggtgcaactggcttacgataaatgggactataagcaggaaggcttaaccagagccggtgcagcgattatcgcgctggctgttaccgtggttactgcgggcgcgggagtcggagccgcactaggcttaaacggcgcagccgcagcagcggccgatgccgcctttgcctcactcgcttctcaggcttccgtatcgctcatcaacaataaaggcgatgtcggcaaaaccctgaaggaactgggcagaagccgcacggtaaaaaatctggttgtagcggcggcaacggcaggcgtatccaacaaactcggtgcctcttcccttgccacttggagcgaaaccccttgggtaaacaacctcaacgttaacctggccaatgcgggcagtgccgcgctgatcaacaccgctgttaacggcggcagcctgaaagacaatctggaggcaaatatcctggcggcattggtgaataccgcgcatggggaggcggcgagtaagatcaaaggactggatcagcactatgtcgcccacaaaatcgctcatgccgtagcgggctgtgcggctgcagcggcgaataagggcaaatgtcaggacggcgcgatcggtgcggctgtgggtgagattgtcggggaggctttggttaaaaataccgattttagcgatatgaccccggaacaattagatctggaagttaagaaaattaccgcctatgccaaacttgcggcaggtacagttgcaggcgtaacgggaggagatgtcaatactgctgcacaaaccgcacaaaacgcggtagaaaataatgcggttaaagctgttgtaactgctgcaaaagtggtttataaggtagccagaaaaggattaaaaaacgggaaaatcaacgttagagatttaaaacagacgttgaaagacgaaggttataatttagccgacaacctgaccaccttattcgacgaaacattggattggaacgatgccaaagccgttattgatattgtcgtcggaacagagctgaatcgcgctaataaaggggaagcggcacaaaaggtcaaggaagttttagaaaaaaatcgtccttatatccctaataaaggtgctgtaccgaatatgagtacatacatgaaaaataatccttttggaaaacagctggctcaaatttcagaaaagacaacgcttccgacgcagcaagggcagtctgtcttcttggtaaaaagaaaccaagggttattaaaaaccggtgataggttttatttagatggccaacataaaaatcatttagaggtttttgataaaaatgggaactttaagtttgttctaaatatggatggttcgcttaaccaaatgaaaactggggcagcaaaaggtcgtaaattaaacttaaaatag

SEQ ID NO: 52449 - DNA, 645 bp, Neisseria meningitidis; identical to SEQ ID NO: 43086

SEQ ID NO: 52450 - DNA, 1542 bp, Neisseria meningitidis; identical to SEQ ID NO: 43670

SEQ ID NO: 52451 - DNA, 441 bp, Neisseria meningitidis
gtgcgcgcctttcagacggcattgaggccgtcccgcatcctgaacatcctgactgtatcgcttcacgccgcctcccttgccgtctgcctgacttggttttacggctggatgatgtggttcggtttggcggctttggtggcaagttacgcatactcgctcaggataacgaatctgaaacaccgccatgccataaccgccattaccatagaccgcgacggacaggcggaaatcatatccggcaaagacaaaacagcggcaacacttgcgggcagcagtatggttacgccttatgccttattcttacaatgggacacaggcggcacaaccgtcagccaatgcatcatacccgacatgacggacaaagaatcctaccggcggctgaaagtctggatactttggcggcagccgaaaaaaaccgccgaaaccgatacatcagactga

SEQ ID NO: 52452 - DNA, 213 bp, Neisseria meningitidis; identical to SEQ ID NO: 43313

SEQ ID NO: 52453 - DNA, 336 bp, Neisseria meningitidis
ttggaaatgtttgatggcgaagtagaagcagatgaaagttattttggcggacaacgcaaaggcaaacgcggtcgcggtgctgccggtaaagtcgccgtattcggtcttttgaagcgaaatggtaaggtttatacggttacagtaccgaatactcaaaccgctactttatttcctattatccgtgaacaagtgaaacctgacagcattttttatacggattgttatcgtagctatgatgtattagatgtgcgcgaatttagccattttagcttcgctgaaacttcgttttcgtatcaatcacagcacacattttgccgaacgacaaaaccatattaa

SEQ ID NO: 52454 - DNA, 366 bp, Neisseria meningitidis; identical to SEQ ID NO: 42928

SEQ ID NO: 52455 - DNA, 855 bp, Neisseria meningitidis; identical to SEQ ID NO: 43427

SEQ ID NO: 52456 - DNA, 1554 bp, Neisseria meningitidis
atgccgtctgaaaggtcggcggattgttgcccggcgcactttgtggtaaagtttagaaaatcaactctaaactgtggcaggcggtttgaccggccgccgattaatgggaaccgacagaggaagccgatgatacacaccgaaccgagcgcgcagccgtcaactatggacacggctgcttttttaaagcacatcgaatccgcattccgccgcattttttcagacggtatcgacctgatgcgatacctgcccgaagacaaatggcttgccttgaagcaggcgggtttgctgttgcccttcctcgacaaaaaatacggcgggcgcaagggcagccagtttgaaatccaagaagtcctgcggattgcggggcattacggcgtgcccgttacgctgcgtaccggcatcgaaggcgcgctggtgttgcagccactgcaagagttcggcgatgaagcgcaagtcgcgcaaggtttggagatgattttcaaaggcgagggcggcggtttgggtgttaccgaacccgaaacctccggcgcggcgattgcacgcgaaatgcagtcctactacgaatatatcgacggacaaaccatttacgtcaacgccgcgaaatactggcagggcaactcgcaaagcgacttcctcctcgttgccgccaaagagcgcaaaaacggcaaactcgccaaagtcatcgacctgctgctcgtccccaaaacatacatccgctgcgaaaccctcgcatccgaaggcttgcgcgccgtccgttacgccgtcaaccgcatcgatgccgaaatgcctgcaaccgccgtgatgaaactctcccagagcgacgctgccggtttgcgcgcgttccaaaacatctttatccgcagccgcctgcaactgatcggcatgacgcacggcattatggaatacacccttgaaaacctggaacgatacgtccgcaacgacatcagattcgtcgattacgaacgccgcgaaatccggcgccgccatcaggtttccgagattctttaccgctacgtctgccattccgtttcgcccgttgcacccgtcgcccatcaactgatggaggcgaacatcgtcaaaaccctcgccacggaatacacttacgccgccgcgcaaatgttgcaaaaactcttgggcgcgaagggttttgaacgcggacacaccgccggcaatatcgctatcgacatccgccccttcacgatttttgaaggcccgaacgatatgctttatgccgaaatttacgaccagtttgtccgcgccaccgccgaagaaaaagaagcaggcatgaagttggacaaaaaccaaaccctgctcgaccgcctgcaaaccgatgcccgctttgccgccgtcgcccgcgactatactttgcccgaagacatccgcagcttcctgcaggaacacaccctgaccgatgcctgcgccctgcaaaaaatctttatcggcaaaatcatcgcccgactctttgtcttcgtacaggcggaacacgaagacaccgcagccttcctgctgaacgacatccgcaaagacatattggactgccgatattgcggatag

SEQ ID NO: 52457 - DNA, 459 bp, Neisseria meningitidis; identical to SEQ ID NO: 43454

SEQ ID NO: 52458 - DNA, 759 bp, Neisseria meningitidis; identical to SEQ ID NO: 42408

SEQ ID NO: 52459 - DNA, 303 bp, Neisseria meningitidis; identical to SEQ ID NO: 43046

SEQ ID NO: 52460 - DNA, 510 bp, Neisseria meningitidis; identical to SEQ ID NO: 43513

SEQ ID NO: 52461 - DNA, 276 bp, Neisseria meningitidis; identical to SEQ ID NO: 42667

SEQ ID NO: 52462 - DNA, 204 bp, Neisseria meningitidis; identical to SEQ ID NO: 42415

SEQ ID NO: 52463 - DNA, 486 bp, Neisseria meningitidis; identical to SEQ ID NO: 42873

SEQ ID NO: 52464 - DNA, 351 bp, Neisseria meningitidis; identical to SEQ ID NO: 40802

SEQ ID NO: 52465 - DNA, 534 bp, Neisseria meningitidis; identical to SEQ ID NO: 42780

SEQ ID NO: 52466 - DNA, 597 bp, Neisseria meningitidis; identical to SEQ ID NO: 43326

SEQ ID NO: 52467 - DNA, 276 bp, Neisseria meningitidis
atgaatgagggtgaagttgttttaacaccagaacaaatccaaaccttgcgtggttatgcttcccgtggcgatacctatggcggttggcgttatttggctaatttgggtgaccgttatgcggatgatgctgctgcaattgtcggtaaggatgcaaacttaaatggtttgaatttatggatgaaaaaaggggtggaaaacctatgggatgatacggtcggtaaaaagacccgtttaatgtgtatttccgttttttggattgtggttttcaatttgtag

SEQ ID NO: 52468 - DNA, 4290 bp, Neisseria meningitidis
atgaatgagggtgaagttgttttaacaccagaacaaatccaaaccttgcgtggttatgcttcccgtggcgatacctatggcggttggcgttatttggctaatttgggtgaccgttatgcggatgatgctgctgcaattgtcggtaaggatgcaaacttaaatggtttgaatttatggatgaaaaaaggtgtggaaaacctatgggatgatacggtcggtaaaaagacccgtttagagaaatttgatcgggttgcactgcaacatttcaggcaatatgcgcgtctaattaatcaaaataatggtagattacccaatactagtgaaattgagagaagttactataaagccgttaccgataatggcgtttcttccagtgcagctattgatttagttattaatcgttcacttccggatatggcggatggttattgggcattaggtttggggatagaagccgaacgtatccacaatgagcaagcagtaaataatccgaacggtagcgaaagggataatagaaagcagttaatatctgctttagataaaggatttgatggatcttttaaagagaagcattttacttttttacaatctgtgatgatggatgtaacaaagttaggtgttgaatatacaatagatggttggcaaaaaattggaggttggggtaatgggataatcaatgatttatataaaagtgttgtaaaaagagagtggactggaatatttgagatcgttaataataacatcaagcaaggaaatgaagcttttaaaaatgaaatcaatagcttggttcatgatatgaaagctgctggcaaggaatttggagatgacttaaatacacagtggaataatctcactcaggctgccgaaataatctataatgacatagtagacaatactagtcaaggaatagaaaaaggtgtcaaagccattaaagaattgtctgaaaaaatgaaaaatgctgcttccgatttggctgacggttcagcagagaaagctaaacaagtagtggaagatttggctcaagccgccaaagaagcatacgaaaatgccaaatccacagccgagaaggctgctcaagcagctcgagaattttttaagggcttgcccagttttaaagatctggccgaaaaatttagagatctgttcccaaatccggaaggctggatcgatgatggtcaccaatgtttagctccttgggttaaagaaactaaaaaacgcaatggcaaatatcatgtctacgacccccttgccctagacctagatggcgacggtatagaaaccgttgccaccaaaggctttgcaggcagcttatttgatcacaccaacaacggtatccgcaccgccaccggttgggtttctgccgatgacggtttactcgtccgcgatttgaacggcaacggcatcatcgacaacggtgcggaactcttcggcgacaacaccaaactggcagacggttcttttgccaaacacggctacgcggctttggccgaattggattcaaacggcgacaacatcatcaacgcggcagacgccgcattccaaaccctgcgtgtatggcaggatctcaatcaggacggcatttcccaagctaatgaattgcgtacccttgaagaattgggtattcaatctttggatctcgcctataaagatgtaaataaaaatctcggtaacggtaacactttggctcagcaaggcagctataccaaaacagacggtacaaccgcaaaaatgggggatttacttttagcagccgacaatctgcacagccgttttaaagataaagtggaactcactgccgaacaggcaaaagccgccaatcttgcgggcatcggccgtctgcgcgatttgcgcgaagctgccgcattgtccggcgatttggccaatatgctgaaagcttattctgccgccgaaactaaagaagcacagttggcattgttagataatttgattcacaaatgggcggaaaccgattcgaactggggcaaaaaatcgccaatgcgactttcaaccgattggacgcaaacggctaatgaaggtattgcactgacaccatcccaagtagcacaactaaaaaagaacgctttagtttccctttctgataaagctaaagcagctattgacgccgcccgcgaccgcattgccgtgcttgatgcctacacggggcaggattccaacacactctattacatgagcgaggaagatgcgcttaatatcgtcaaagtaaccaacgatacatacgaccatctcgccaaaaacatctaccaaaacctgttgttccaaacccgtttgcagccatatttgaatcaaatcagtttcaaaatggaaaatgatacgttcactttggattttagtggtcttgttcaagcatttaaccatgtcaaagaaactaatccgcaaaaagcttttgtggatttggccgagatgcttgcatatggcgaacttcgttcttggtatgaaggccgaagactaatgaccgattatgtggaggaggcaaaaaaagcaggtaaatttgaagattaccagaaagtgttgggtcaggagaccgttgcattattagctaaaacatcgggtacgcaagcagatgatatcctgcaaaatgtaggctttggtcataataaaaatgtttctttatatggtaatgacggcaacgacactctaatcggcggcgccggtaatgactatttggagggcggcagcggttcggatacttatgtcttcggcgaaggcttcggtcaggatacggtctataattacgactacgctaccggacgcaaagacatcatccgctttaccgacggtattacagccgatatgctgacttttacccgagagggcaaccatcttcttatcaaggcaaaagacggcagtggacaagtgactgttcagtcctatttccagaacgatggctcaggtgcttaccgtatcgatgagattcatttcgataacggcaaagtactggatgttgccactgtcaaagaactggtacagcaatccaccgacggttcggacagattgtatgcctaccaatccggaaataccttaaatggcggattgggcgatgactatctgtacggtgccgacggggatgacctgctgaatggtgatgcaggcaacgacagtatctacagtggcaatggcaatgatacgctcgatggaggagaaggcaacgacgccctgtacggctataatggtaacgatgcactgaatggtggcgaaggcaatgatcatttgaacggcgaagacggtaacgacactctgatcggcggtgccggtaatgattacttggagggcggcagcggttcggatacttatgtcttcggcaaaggcttcggtcaggatacggtctataattacgactacgctaccggacgcaaagacatcatccgctttaccgacggtattacagccgatatgctgacttttacccgagagggcaaccatcttcttatcaaggcaaaagacggcagtggacaagtgactgttcagtactatttccagaacgatggctcaggagcttaccgtatcgacgagattcatttcgataacggcaaagtactggatgttgccactgtcaaagaactggtacagcaatccaccgacggttcggacagattgtatgcctaccaatccggaagtaccttaaatggcggattgggcgatgactatctgtacggtgccgacggggatgacctgctgaatggtgatgcaggcaacgacagtatctacagtggcaatggcaatgatacgctcgatggaggagaaggcaacgacgccctgtacggctataatggtaacgatgcactgaatggtggcgaaggcaatgatcatttgaacggcgaagacggtaacgacactctgatcggcggtgcaggcaatgattacttggagggcggcagcggttcggatacttatgtcttcggcgaaggcttcggtcaggatacggtctataattaccatgtggataaaaactctgacactatgcactttaaaggatttaaagcagcagatgttcattttatccgttccggaagtgatttggtgcttagcgcttctgaacaagacaacgtacgtatttccggatttttctatggtgaaaaccatcgtgtagatacatttgtctttgatgatgcagctatcagtaatccagattttgccaagtatattaatgctggcaataatttggtacagtctatgtctgtgttcggttctaatactgctgcgacaggaggaaatgtggatgccaatatacaatccgtacagcagccgttattggtaacgccatctgcataa

SEQ ID NO: 52469 - DNA, 129 bp, Neisseria meningitidis; identical to SEQ ID NO: 42950

SEQ ID NO: 52470 - DNA, 1266 bp, Neisseria meningitidis
atgttcagcttcttccgtcgcaagaaaaaacaggaaacgccggctctcgaggaggctcaaattcaggaaaccgcagcaaaagcagaatctgaacttgctcaaatagttgaaaatattaaagaagatgctgaatctttagcagaaagcgtcaaagggcaggtcgaatctgccgttgaaaccgtcagcggtgcggttgaacaggtaaaggaaaccgttgccgagatgctgtctgaagcagaggaagcggcggaaaaagcagcggaacaagtcgaagcggcaaaagaagccgttgccgaaaccgtcggcgaggctgtcgggcaagttcaagaagccgttgcgacaactgaagaacacaagctcggttgggcggcgcgtttgaaacaaggcctgaccaaatcgcgcgacaaaatggcgaaatcgctggcgggcgtgttcggcggcggacaaatcgacgaagatttatacgaagagctggaaaccgtgctgattaccagcgatatgggcatggaagccaccgaatacctgatgaaagacgtgcgcgaccgcgtcagcctcaaagggctgaaagacggcaacgaattgcgcggcgcgttgaaagaagccttgtacgacctgattaagcctctggagaaacctttggttttgcccgaaaccaaagagccgtttgtcatcatgcttgccggcatcaacggcgcgggcaaaaccacgtctatcggtaaactcgccaaatatttccaagcgcagggcaaatccgtattgctggcggcaggcgatactttccgtgccgccgcgcgtgagcagcttcaagcttggggcgagcgcaacaacgtaaccgtgatttcgcaaaccacgggcgattccgccgccgtgtgcttcgatgccgtccaagccgccaaagcgcgcggcatcgacattgtgctggccgacaccgccggccgcctgcccacgcagcttcatttgatggaagaaatcaaaaaagtgaaacgcgtgctgcaaaaagccatgcccgacgcgccgcacgaaatcatcgtcgtgcttgatgccaatatcgggcaaaacgccgtcaaccaagtcaaagcctttgacgacgcattggggctgaccggtttaatcgttaccaaactcgacggcacggcaaaaggcggcatcctcgccgcgcttgcctccgaccgccccgttcccgtccgctatatcggcgtgggcgaaggcatagacgacctgcgcccgtttgacgcgcgcgcgtttgtggacgcactgctggattga

SEQ ID NO: 52471 - DNA, 960 bp, Neisseria meningitidis; identical to SEQ ID NO: 42523

SEQ ID NO: 52472 - DNA, 2121 bp, Neisseria meningitidis
atgttcgacaaacacgttaaaactttccaatacggcaaccacaccgttactttggaaaccggcgaaattgcccgccaagccgccgctgccgttaaagtctctatgggcgacaccgtggttttggttgccgttaccaccaacaaagaagtgaaagaaggccaagacttcttccctctgactgtcgattacctcgagcgcacttacgccgcaggcaaaattcccggcggtttcttcaaacgcgaaggcaaacaaagcgaaaaagaaatcctgaccagccgtctgatcgaccgtccgattcgtccgctgttccctgaaggtttctaccacgacatccaaatcgtagcgatggtcgtgtccgtcgatcctgaaatcgattctgatattcctgcaatgttgggcgcgtctgccgcgctggtgttgagcggcgtaccgtttgccggcccgatcggcgcggcacgcgtcggttatgtaaacggcgtgtacgttttgaacccgactaaagccgaattggcgaaatcgcaattggacttggtggtcgccggtacttccaaagccgtgttgatggtggaatccgaagccaaaatcctgcccgaagacgtgatgttgggcgcggtggtttacggtcacgatcaaatgcaagtggccattaacgccatcaatgagtttgccgatgaagtcaatccggaagtttgggattggaaagcacctgaaaccaatgaagaattggttgcaaaagtacgcgaaattgccggtgaaaccattaaagaagcattcaaaatccgtcaaaaacaagcgcgttctgccaaattggacgaagcttggagtgctgtaaaagaagccttgattaccgaggaaaccgacactttggcagccaacgaaatcaaaggcattttcaaacacttggaagccgatgttgtccgcagccaaattttagacggccaaccgcgtattgatggtcgcgacacccgcactgttcgtccgctgaacattcaaaccggcgtattgccgcgcacgcacggttctgcattgtttacccgtggcgaaactcaagctttggcggttgcaactttgggtacttcacgcgacgagcaaatcattgatgcgctgtccggtgaatacaccgaccgcttcatgctgcactacaactttcctccatactctaccggcgaagtgggtcgcgtaggtgcgccaaaacgtcgtgaaatcggtcacggccgtttggctaaacgtgcattgttggccgtattgccgaaacctgaagatttcagctacaccatgcgcgtggtctccgaaattaccgaatccaacggctcttcctctatggcttccgtctgcggcggctgcttgagcctgctgtccgccggcgtgcctttgaaagcacacgttgccggtatcgcgatgggtctgattctggaaggcaataagtttgccgtcctgaccgacattttgggcgacgaagaccacttgggcgatatggactttaaagtggctggtacgaccgaaggcgttaccgcgctgcaaatggacatcaaaatccaaggcattaccaaagagattatgcaaatcgctttggcgcaggccaaagaagcgcgtctgcacatcttggatcagatgaaagccgccgttgcgggcccgcaagagctgtccgcacacgcgccacgcttgttcacgatgaaaatcaaccaagacaaaatccgcgaagttatcggtaagggcggtgaaaccatccgtgcgattaccgctgaaaccggtacggaaatcaatattgccgaagacggtacgattaccattgccgcaaccactcaagaagccggcgatgcggcgaaaaaacgcatcgagcagattactgccgaagtggaagtgggcaaagtgtacgaaggcactgtggtgaaaatcctcgacaacaatgtcggcgcgattgtcagtgtgatgccgggcaaagacggtttggtacacatcagccaaatcgcccacgagcgcgtacgcaatgtcggcgactacctgcaagtcggtcaggtggtgaacgtgaaagcattggaagtggacgacagaggccgtgtccgtctgtccatcaaagccctgctggacgcgcctgcccgtgaggaaaatgccgccgagtaa

SEQ ID NO: 52473 - DNA, 807 bp, Neisseria meningitidis; identical to SEQ ID NO: 43004

SEQ ID NO: 52474 - DNA, 459 bp, Neisseria meningitidis
atggtcgacgcggtcgttaaaactcccgaatttttaccttttacttctgtaggaatattccgttttggtgcggatataacacagtacaaaaacatactggaaacttttatgtatgaacctcctgatgagtttagaacagaatattatgaatctcccgactcaaatttactcatttccgtcaaaaaaaaaaacaaaattatttcgatattttgttatcaggagctatattttatgggcgttaatataataggtctgaattttgaagattttaaacagcttttccattaccctaaatcatacggtgttgataaatattatttatcaaatgaatcttatccgacatatgtctatgagtttgatgaaataggagtacaagcttgggaagcaaaagggaaaattgttactatcattgccgggggcaaagacaattattcaacagaaccttactacgatgaataa

SEQ ID NO: 52475 - DNA, 2607 bp, Neisseria meningitidis; identical to SEQ ID NO: 42589

SEQ ID NO: 52476 - DNA, 654 bp, Neisseria meningitidis; identical to SEQ ID NO: 43632

SEQ ID NO: 52477 - DNA, 684 bp, Neisseria meningitidis; identical to SEQ ID NO: 36776

SEQ ID NO: 52478 - DNA, 768 bp, Neisseria meningitidis; identical to SEQ ID NO: 43234

SEQ ID NO: 52479 - DNA, 360 bp, Neisseria meningitidis; identical to SEQ ID NO: 36598

SEQ ID NO: 52480 - DNA, 582 bp, Neisseria meningitidis; identical to SEQ ID NO: 37778

SEQ ID NO: 52481 - DNA, 861 bp, Neisseria meningitidis; identical to SEQ ID NO: 42904

SEQ ID NO: 52482 - DNA, 345 bp, Neisseria meningitidis; identical to SEQ ID NO: 42101

SEQ ID NO: 52483 - DNA, 750 bp, Neisseria meningitidis; identical to SEQ ID NO: 43456

SEQ ID NO: 52484 - DNA, 1224 bp, Neisseria meningitidis
atgtctgcgcaatcacaaaacaatcatacgtccccattggtcgtcttgaccacgctgttcttcatgatgggttttattacctgcatgaacgacatccttatccctcatttgaaagaaattttcgacctgtcttacgttcaggcgatgctgatccaattctgtttctttaccgcctatgcggtgatgtccatcccgatgggggcttttgtcggcaaagtcggctacaaaaacggcgttatcggcggctttctgctgacggcggtcggatgcctgctgttttatcctgctgcgggcagccattcttacgcggtatttttgggcgcgttgtttattttggcttccggcgtaacgctgcttcaggtcgccggtaatccttatgttaccctgctggcgaaacccggcaaggaatcggcaacactgacgctggttcaggcgtttaacgctttgggtacgaccattgcgccgcaaatcggcgcgttcctgattctggcggacgcaacccaaaccgtcagcaaggcggaacagatttcttccgtacagattccctatttgggactggcggggctgctgattatccttgccgttttcgtgaaaatgatccggctgcccgacgcgcgcaaaattgccgccgaggaaagcgcgcacaaccacgacggcaaaaccagcgtatggcaatacaaacatctcgtgttcggtacggcaggcattttctgctatgtcggcgcggaggtgtctatcggttcgttgatggtcaacgtattgggttatctgaaagggctggatcatgcttctgccgcgcattacctgtcgttctattggggcggcgcgatggtcggacgtttcctcggttcggcggtgatggcgaaattcgcgcccaaccgttatttggcgtttaacgcatcggctgcggtcgtactgcttgccgtcgcgatggcgacgggtagcggcaatgcggatgtggcgatgtggtcgctgcttgccatcggttttttcaactcgattatgtttccgacgattttctctttggcaaccaaaggattgggaaaatttaccaacgcggcttccggtgtactgtgtaccgcgattgtcggcggtgcggtcgttcctgtcgtgcagggctgggtggcagatacttacaccctgatgtcttcgtttgtcgtttccgtcatctgttatctgtatatcgtgttttttgcggtgtacggatatagggcggacaaataa

SEQ ID NO: 52485 - DNA, 1503 bp, Neisseria meningitidis; identical to SEQ ID NO: 43806

SEQ ID NO: 52486 - DNA, 519 bp, Neisseria meningitidis
ttgaacaaagtcatcctcatcggccgcctcggacgcgatcccgaagtgcgctatatgcccaacggcgaggcggtttgtaatttcagcgtcgccaccagcgaaacttggaacgaccgcaacggccaacgtgtagagcgtactgagtggcacaacatcaccatgtaccgcaaactggcggaaattgccgggcaatacctcaaaaaaggcgggctggtttatttggaaggcagaatccaaagccgcaaataccaaggcaaagacggcatcgaacgcaccgcttacgatattgtcgccaacgaaatgaaaatgttgggcgggcgcaatgaaaacagcggcggtgcgccttacgaggaaggttacggtcagagtcaggaggcttaccaacgccccgcgcagcaaagccggcagcccgcctccgacgcgccgtcccatccccaagaagcaccagccgcgccgcgccgccaacccgtgcctgccgccgccccggtcgaggacattgacgacgatatcccgttctga

SEQ ID NO: 52487 - DNA, 288 bp, Neisseria meningitidis; identical to SEQ ID NO: 42374

SEQ ID NO: 52488 - DNA, 1335 bp, Neisseria meningitidis; identical to SEQ ID NO: 42816

SEQ ID NO: 52489 - DNA, 363 bp, Neisseria meningitidis; identical to SEQ ID NO: 43119

SEQ ID NO: 52490 - DNA, 1050 bp, Neisseria meningitidis
ttgatattaatgaacacacccatccccttctccgaacggctcatccgctggcaaaaacaacacggtcgccaccacctcccttggcaggtcaaaaacccttattgcgtctggctttccgaaatcatgctccagcaaacgcaagtcgccaccgtgttggactactatccgcgcttcttagaaaaattcccgaccgttcagacgcttgccgccgcgccgcaagacgaagtgttgtcgttgtgggcgggcttgggctattacagccgcgcgcgcaacctgcacaaagccgcgcaacaagtcgtcaggcaattcggcggcacgtttccgtcggagcgcaaagacttggaaaccctctgcggcgtaggcagaagcaccgccgccgccatttgcgccttctccttcaaccgccgcgaaaccattttggacggcaacgtcaaacgcgtactctgccgcgtgttcgcccgcgacggcaatccgcaggacaaaaaatttgaaaactcgctctggacacttgccgaaagcctgctgccgtctgaaaacgccgatatgcctgcctatacacaaggtttgatggatttgggcgcgaccgtgtgcaaacggacgaaacccttgtgccaccaatgcccgatggcggacatctgcgaagcgaaaaagcaaaaccgcaccgccgagctgccgcgcaaaaaaaccgccgccgaagtaccgaccctgccgctttactggctgattgtccgcaaccgggacggcgcgattttgctggaaaaacgccccgccaaaggcatttggggcgggctgtattgcgtgccgtgttttgaaagtttgaacgggctttccgactttgccgccaaattctccctgaccatggcagatatggacgaacaaaccgccctgacccaccgcctgacgcaccggctgctattgattacgccctttgaagcacaaatgccgtctgaaagcccttcagacggcatttggataaagccggcgcatttgaaagattacggtttgcccaagcctttggaaatttatttaaacggtaataggttagaataa

SEQ ID NO: 52491 - DNA, 1251 bp, Neisseria meningitidis; identical to SEQ ID NO: 43418

SEQ ID NO: 52492 - DNA, 435 bp, Neisseria meningitidis
gtgccactgcctgctccctgccgttttgccaaacctgccgcctcttttttaagtatggctttgctttcctgccagctttcccacgccgccacggcttatatccccctgaacgattttcaaccgaactgcgacatacgccggctcggactgacacagggtcagcacaatgaactgcgtaaaatccgcgccgccttcaaaatggcgggcgacagggcgcgtttgaaggttatgcattccgaacacagccgccgccggtctgtcgtcgaaatcatttcctcggatgtttttaatcggaacgaggcgcgcgattatgtcgaaagccgctatttgtccggtatggattttgcggtggacgaattggaaatccaacaccggttcttccatatcctcacaccgcaacagcagcaaatgtggctttcttcctgcctcaaataa

SEQ ID NO: 52493 - DNA, 450 bp, Neisseria meningitidis
atgagccttatcggcgaaattttgcctttgtcccatattgttttggatatggaggtgggcagtaaaaaaaggctgtttgaggaagcgggcctgcttttggaacgcgaatcctcattgtcccatgctgatgttttcgaatgtctttttgcccgtgaaaaactcggttcgaccggtttggggcagggcgttgccatcccgcacggccgtcatgccggcgtgaagcaggcgacgggcgcgtttatccgcacgcgcgaacccgtcggatttgacgcaccggacggcaaaccggtttccctggtttttatcttgctggttccggaaaatgcgacgggagagcatttggaagtattgtccaaactggccggcaagttttcccaaaaaagcatcagagaatcgctgatgaccgtttcttctgcggaagaagcccgcgccatcctgactgaagaataa

SEQ ID NO: 52494 - DNA, 393 bp, Neisseria meningitidis; identical to SEQ ID NO: 43472

SEQ ID NO: 52495 - DNA, 237 bp, Neisseria meningitidis; identical to SEQ ID NO: 43261

SEQ ID NO: 52496 - DNA, 138 bp, Neisseria meningitidis; identical to SEQ ID NO: 43276

SEQ ID NO: 52497 - DNA, 2043 bp, Neisseria meningitidis; identical to SEQ ID NO: 43678

SEQ ID NO: 52498 - DNA, 1362 bp, Neisseria meningitidis; identical to SEQ ID NO: 42739

SEQ ID NO: 52499 - DNA, 621 bp, Neisseria meningitidis; identical to SEQ ID NO: 42375

SEQ ID NO: 52500 - DNA, 621 bp, Neisseria meningitidis
atggctgtacgttccaaatcctcaaaagcgtggctgcacgaacacgtcaacgaccactacgtccatatggcgcaaaaagacggctaccgcgcccgtgccgcatacaaacttttggaaatcaacgaaaaagacaaattaatcaaacccggcacggtacttgccgacttgggcagcgcaccgggaagctggtcgcaggttgccgccaagctgacgggtacttccggagcagttttcgccttggacatcctgcctatggaagccatagggggcgtctccttcattcagggcgacttccgcgagaacgacgtactggcacaattcgaaaccttgttggacaaccgcccgctcgaccttgtaatttgcgatatggcgcccaatatgtcgggaaacgccgtaagcgatcaggcacgcagcttttatctgtgcgaactggctttagacttcgcctcgcaacacctgaaaaccggcggcagctttttggtcaaagtctttcagggtgcaggctatcaggaatacatggcagccatgcgcgaaattttcggcacggtgcagacgcgcaaacccgaagcctcgcgcaatcgctccagtgagatttatttattgggcaaaaataaacgctga

SEQ ID NO: 52501 - DNA, 1071 bp, Neisseria meningitidis; identical to SEQ ID NO: 42857

SEQ ID NO: 52502 - DNA, 819 bp, Neisseria meningitidis; identical to SEQ ID NO: 43345

SEQ ID NO: 52503 - DNA, 1224 bp, Neisseria meningitidis; identical to SEQ ID NO: 42678

SEQ ID NO: 52504 - DNA, 411 bp, Neisseria meningitidis; identical to SEQ ID NO: 42429

SEQ ID NO: 52505 - DNA, 1302 bp, Neisseria meningitidis; identical to SEQ ID NO: 43575

SEQ ID NO: 52506 - DNA, 1524 bp, Neisseria meningitidis
atgaccgtcatcaaacaggaagactttatccaaagcatttgcgatgccttccaattcatcagctactatcatcccaaagactacatcgacgcgctttataaggcgtggcagaaggaagaaaatcctgccgccaaagacgcgatgacgcagattttggtcaacagccgtatgtgtgcggaaaacaaccgccccatctgccaagacacaggtatcgcaaccgtcttcctcaaagtcggtatgaacgtccaatgggatgcggacatgagcgtggaagagatggttaacgaaggcgtacgccgcgcctacacttgggaaggcaatacgctgcgcgcttccgtcctcgccgatccggccggcaaacgccaaaacaccaaagacaacacccccgccgtcatccatatgagcatcgtgccgggcggtaaagtcgaagtaacctgcgcggcaaaaggcggcggctctgaaaacaaatccaaactcgccatgctcaatccttccgacaacatcgtcgattgggtattgaaaaccatcccgaccatgggcgcgggctggtgtcctcccggcatcttgggtatcggcatcggcggcacgcccgaaaaagccgtgctgatggcaaaagagtccctgatgagccacatcgacattcaagaattgcaggaaaaggccgcgtccggcgcggaattgtccaccaccgaagccctgcgcctcgaactctttgaaaaagtcaacgcgctgggcatcggcgcacaaggcttgggcggactgaccaccgtgttggacgtgaaaatcctcgattatccgacccacgccgcctccaaaccgattgccatgattccgaactgcgccgccacccgccacgtcgaatttgaattggacggctcaggccctgtcgaactcacgccgccgcgcgtcgaagactggcccgatttgacttacagccccgacaacggcaaacgcgtcgatgtcgacaagctgaccaaagaagaagtggcaagctggaaaaccggcgacgtattgctgttgaacggcaaaatcctcaccggccgcgatgccgcacacaaacgcctcgtcgatatgctcaacaaaggcgaagaattgcccgtcgatttcaccaaccgcctgatttactacgtcggccccgtcgatccggtcggcgatgaagtcgtcggtccggcaggtccgaccacagccacccgcatggacaaattcacccgccaaatgctcgaacaaaccgacctcttgggcatgatcggcaaatccgagcgcggcgtggccacctgcgaagccatcgccgacaacaaagccgtgtacctcatggcagtcggcggcgcggcgtatctcgtggcaaaagccatcaaatcttccaaagtcttggcgttccccgaattgggcatggaagccatttacgaatttgaagtcaaagacatgcccgtaaccgtcgccgtagatagcaaaggcgaatccatccacgccaccgccccgcgcaaatggcaggcgaaaatcggcatcatccccgtcgaatcttga

SEQ ID NO: 52507 - DNA, 1035 bp, Neisseria meningitidis; identical to SEQ ID NO: 42212

SEQ ID NO: 52508 - DNA, 696 bp, Neisseria meningitidis; identical to SEQ ID NO: 42430

SEQ ID NO: 52509 - DNA, 1101 bp, Neisseria meningitidis; identical to SEQ ID NO: 43485

SEQ ID NO: 52510 - DNA, 843 bp, Neisseria meningitidis; identical to SEQ ID NO: 42882

SEQ ID NO: 52511 - DNA, 372 bp, Neisseria meningitidis; identical to SEQ ID NO: 36794

SEQ ID NO: 52512 - DNA, 1356 bp, Neisseria meningitidis; identical to SEQ ID NO: 42098

SEQ ID NO: 52513 - DNA, 561 bp, Neisseria meningitidis; identical to SEQ ID NO: 43196

SEQ ID NO: 52514 - DNA, 1152 bp, Neisseria meningitidis; identical to SEQ ID NO: 43163

SEQ ID NO: 52515 - DNA, 738 bp, Neisseria meningitidis; identical to SEQ ID NO: 43215

SEQ ID NO: 52516 - DNA, 780 bp, Neisseria meningitidis; identical to SEQ ID NO: 42965

SEQ ID NO: 52517 - DNA, 1980 bp, Neisseria meningitidis
atgcctaaaattttacaacaaacaaccttacatcgcttttttcgcgcaaacacgcaccatccgatcagcccgtccgttttgcagcaggctggcgatttgataagatggttatgtttttcagacggcatttcagatttccgtccatgccatctgaagccgcaaaacccgattggaggaactgttatgaataccgtatcgaattatctgtccgcattacgcgaagccatgaaggcgcaaggcttggatgcactcgtcatcccttccgccgacccccacctgtccgaatacctgcccgagcattggcaggcgcgccgcgaattatcgggctttaccggctcggtcggcacgtttgtcctgaccaccgatgaagcgggcgtgtgggtggacagccgctattgggaacaagccgccaaacagcttgcgggcagcggcattgtgctgcaaaaaagcgggcaagtgccgccgtacaacgaatggctcgcggcaagcctgcccgaaaacgccgccgtcggcatcccttccgatatggtctcgctcaccggcaaacgcactttggcgcaatcactcgccgccaaaaacatccgcatcgaacacccggataatttactgaatcaagtgtggacaaaccgccccgccctccccgccgaaacggtgttcatccacgaccccgactatgtttctgaaaccgccgccgaaaaactcgcccgcgtgcgcgccgtgatggcggaaaaaggcgcggattaccacttggtttcctcgcttgacgacatcgcctggctgaccaacctgcgcggcagcgacgtgcctttcaatcccgttttcgtgtccttcctgctgattggcaaagacaacgccgtcctgtttaccgaccgatgccgtctgaacgccgaagccgccgccgcgctgcaaaccgccggcatcgcggtcgaaccttacgcccaagttgccgacaaactcgcgcaaatcggcggcgtgctgctcatcgagccgaacaaaaccgccgtcagcacgcttgtgcgcctgcccgaaagcgtgcgccttatcgagggaatcaacccatccacgctgttcaaatcctgcaaatccgaagccgacatcgcccgcatccgcgaagcgatggaacacgacggcgcggcgttgtgcggtttcttcgccgagtttgaagacatcatcggcaacggcggcagcctgaccgaaatcgacgtggacaccatgctttatcgccaccgcagcgtgcgcccaggcttcatttcattgagtttcgacaccatcgcaggcttcaacgccaacggcgcactgccgcattacagcgcgacacccgaaagccacagcaccatcagcggcaacgggcttttgctcatcgactccggcgcgcaatacaaaggcggcacgaccgacatcacccgcgtcgtccccgtcggcacgccgagtgccgaacaaaaaagcgacaacaccctcgttctcaaagcccatatcgcgcttgccgaagccgtgttccccgaaaacatcccctcgccgctgattgatgcgatttgccgcaaacccctgtggcaggcgcaatgcgactacggccacggcaccggacacggcgtaggctatttcctcaacgtccacgaaggcccgcagcgcatcgccttcgccgcccccgccacgcccgaaaccgccatgaaaaaaggcatggttacctccatcgaacccggactctaccgcccgggaaaatggggcatccgcattgaaaaccttgccgccaaccaagccgtcgccgcccctcaagaaaccgaattcggcagcttcctctgttttgaaaccctgaccctctgccccatcgacacccgcctgatggacaccgccctcatgaccgacggcgaaatcgactgggtcaaccgctaccacgccgaagtccgccgccgcctcgagccgctgaccgaaggcgcggcaaaagcgtggctgatcaaacgcaccgaaccgctggcgcgttaa

SEQ ID NO: 52518 - DNA, 2229 bp, Neisseria meningitidis
atgcgttctgctgttttatttatatatttctttctacttaatatattccttttccagccagccgttatccacatccaatctaactatattttatttatgtctatcgtatccgcaccgctccccgccctttccgccctcatcatcctcgcccattaccacggcattgccgccaatcctgccgatatacagcatgaattttgtacttccgcacagagcgatttaaatgaaacgcaatggctgttagccgccaaatctttgggattgaaggcaaaggtagtccgccagcctattaaacgtttggctatggcgactttacccgcattggtatggtgtgatgacggcaaccatttcattttggccaaaacagacggtgagggtgagcatgcccaatttttgatacaggatttggttacgaataagtctgcggtattgtcttttgccgaattttctaacagatattcgggcaaactgatattggttgcttcccgcgcttcggtattgggcagtttggcaaagtttgactttacctggtttattccggcggtaatcaaataccgccggttgttttttgaagtattggtggtgtcggtggtgttgcagctgtttgcgctgattacgcctctgtttttccaagtggtgatggacaaggtgctggtacatcggggattctctactttggatgtggtgtcggtggctttgttggtggtgtcgctgtttgagattgtgttgggcggtttgcggacgtatctgtttgcacatacgacttcacgtattgatgtggaattgggcgcgcgtttgttccggcatctgctttccctgcctttatcctatttcgagcacagacgagtgggtgatacggtggctcgggtgcgggaattggagcagattcgcaatttcttgaccggtcaggcgctgacttcggtgttggatttggcgttttcgtttatctttctggcggtgatgtggtattacagctccactctgacttgggtggtattggcttcgttgcctgcctatgcgttttggtcggcatttatcagtccgatactgcggacgcgtctgaacgataagttcgcgcgcaatgcagacaaccagtcgtttttagtagaaagcatcactgcggtgggtacggtaaaggcgatggcggtggagccgcagatgacgcagcgttgggacaatcagttggcggcttatgtggcttcgggatttcgggtaacgaagttggcggtggtcggccagcagggggtgcagctgattcagaagctggtgacggtggcgacgttgtggattggcgcacggctggtaattgagagcaagctgacggtggggcagctgattgcgtttaatatgctctcgggacaggtggcggcgcctgttatccgtttggcgcagttgtggcaggatttccagcaggtggggatttcggtggcgcgtttgggggatattctgaatgcgccgaccgagaatgcgtcttcgcatttggctttgcccgatatccggggggagattacgttcgaacatgtcgatttccgctataaggcggacggcaggctgattttgcaggatttgaacctgcggattcgggcgggggaagtgctggggattgtgggacgttcggggtcgggcaaatccacactcaccaaattggtgcagcgtctgtatgtaccggagcagggacgggtgttggtggacggcaacgatttggctttggccgctcctgcctggctgcggcggcaggtcggcgtggtcttgcaggagaatgtgctgctcaaccgcagcatacgcgacaatatcgcgctgacggatacgggtatgccgctggaacgcattatcgaagcagccaaactggcgggcgcacacgagtttattatggagctgccggaaggctacggcaccgtggtgggcgaacaaggggccggcttgtcgggcggacagcggcagcgtattgcgattgcccgcgcgttaatcaccaatccgcgcattctgatttttgatgaagccaccagcgcgctggattatgaaagtgaacgagcgattatgcagaacatgcaggccatttgcgccaaccggacggtgctgattatcgcccaccgtctgtccactgttaaaacggcacaccggatcattgccatggataaaggcaggattgtggaagcgggaacacagcaggaattgctggcgaagccgaacggatattaccgctatctgtatgatttacagaacgggtag

SEQ ID NO: 52519 - DNA, 1275 bp, Neisseria meningitidis
atgccgtctgaaacctcttccccacgcaaagaaaacgaaacagaagtacacattcctgccgctccttttatcgtcaaacagtccggcagcaacgctttggcagtctgcgccctggtattggcggcattgggtttgggtacaagtggttttttgtttgtccaaggacagaatgtcttgaaaaaccaagagctggcattcaaccaaaaaatcgacaaagccgccttgggcgagtcggaaaacgccgccctgttgaaagacaacctcaaccggcaagccgccatacaatcagagctcgaccgtttggacggaaacgtcaaagcaaacggcgaacaaatcttggaaatgcaaaaatcctatcgcgagttgaccaaaggacgcgccgattggctggtggacgaaaccgagaccatactcaatctggcggcgcaacagctggtgttgactggcaatatccaaacggcagtcggcgtattggagcatatcgacagccgcctgtcccgtttcaatcaggcagagcttctgccgatcaagcaggcggtcagcagcgacttggcggaactgaaaaaccgtccctatgtcgatatttccggcacggcattgcgcctcgacaggctggaaaccgccgtatccggactgccgctgatgctcgacggcgtgctgaaaccgggcgtacaggtgaagaacgaagccgcttccgcttcatggtggcagaacgtatgggaaaaatccctcggcacattgaaggggctggtcgaaatccgacgtttggaaaacaacgatgccatgctgatttctcccgaacaggcatattttgtgcgtgaaaacctgcgcctccgccttttggatgcgcgcactgcattaatgcagcgcaacagcgaagtctatcagggcgatttgaacaatgccgaagccgccgtcagacagtatttcgatgccaagtctcccgccacgcagtcgtggctgaaagaactggcggaattgaaggcgttggatgtgcggatgactgcggatgacggtttgaaaaacagcctaaatgccgtccgcgcctatcgcgacggtacgcgcatgacggcggcggaaaatcaagaagcggaacaggcggcttccgaaccggcaaacgaaaaaacagcttccgaaccggctgccgcatcggatgtgaagaccatagaagcaccgtccctgccttcggaacgcaaaccggaacagcctgcaaaaaaacagaccgtaccggaaaaggcagggcgttcgccgtccgctaaaggagaacgcgcatga

SEQ ID NO: 52520 - DNA, 918 bp, Neisseria meningitidis; identical to SEQ ID NO: 42139

SEQ ID NO: 52521 - DNA, 303 bp, Neisseria meningitidis; identical to SEQ ID NO: 42310

SEQ ID NO: 52522 - DNA, 312 bp, Neisseria meningitidis; identical to SEQ ID NO: 43105

SEQ ID NO: 52523 - DNA, 474 bp, Neisseria meningitidis; identical to SEQ ID NO: 50426

SEQ ID NO: 52524 - DNA, 327 bp, Neisseria meningitidis; identical to SEQ ID NO: 42598

SEQ ID NO: 52525 - DNA, 1302 bp, Neisseria meningitidis; identical to SEQ ID NO: 42626

SEQ ID NO: 52526 - DNA, 813 bp, Neisseria meningitidis
atggacaaaatcagagttgccgccgtgcagatggtgtcgggcgtgtcgccggaaaccaacgtcgccgccatgaaacgcctggtcgcacgggcggcggagcagggtgcggattgggtgctgctgcccgaatattgggtgctgatgggcgcaaacgataccgacaaactcgcgcttgccgagcctttgggcggcggacgctttcagacggcattgagcgaaacggcgaaagaatgcggcgtggtgctgttcggcgggactgtgccgctgcaaagctgcgaggcgggtaaagtgatgaatacgctgttggtgtacggacgggacggcgtaaggacggggctgtaccacaaaatgcacctcttcggtttttccggtttgggcgaacgctatgccgaagccgataccatccgcgcgggcggggatgtgccgcacttgtcggcagaaggcgtgccggtggcggcgggcatttgttacgatgtccgctttcccgaatttttccgacgccagttgccgtttgacgtattgatgctgcccgctgcgtttacgcacacgacgggcaaggcgcattgggagctgctgctgcgcgcgcgtgccgtcgaaaaccaatgttacgtcgtggcggcggcacagggcggtttgcacgaaaacggacggcgcacgttcggacacagcatgattgtcgatccgtggggcgacgtgttggacgtattgcccgagggcgaaggcgttgttacggcagacatcgatgccaaccgcctgaacagcgtccgcaaccgcctgcccgccttgaaataccgggttttggatgccgtctga

SEQ ID NO: 52527 - DNA, 4179 bp, Neisseria meningitidis; identical to SEQ ID NO: 43167

SEQ ID NO: 52528 - DNA, 759 bp, Neisseria meningitidis
atgattaccatccgcaacgtcagctaccgcatcggcacgcaccccatcctcgacaacatcagcctcgacatccccgaaggcggcattaccgcgctaatcggcccgaacggcgcaggcaaatccaccctgttttcctttatggcgcggctgcgcccgcttgaaagcggcagcatcgcctaccgcggcaaaaaccttgccggcacccccaccgccgaactcgcccgcacgctctccatcctcacccaagaaaacagcatcatgagccgcatcaccgtgcgcgacctgctgatgttcggccgttacccctaccatcaaggcagaccgactgccgaatgccgccgtatcgttaacggtgcaatcgaagaattccacctgcaagacttcgccgaccgctacctgaccgagctttccggcggacaacgccaacgcgccatgattgccatggtgttctgccagcgcaccgactacgttttgctggacgaaccgctgaacaacctcgacatgtatcatgcccgctccctcatgcaaatcctgcgccggctgaccgacgaacacaagcgcaccaccgtcgtcgtattacacgacatcaaccaggccgccgcctacgccgaccacgtcgtcgccatgaaaaacggccaagtcgccatgcagggcaagcccgacgacattttcaccgccgcaaacatcaaaaccctgttcgatatggatgtgtccgtcctcgaccaccaaagcaaaaaactcatcgtccaccatatctga

SEQ ID NO: 52529 - DNA, 1320 bp, Neisseria meningitidis; identical to SEQ ID NO: 42881

SEQ ID NO: 52530 - DNA, 492 bp, Neisseria meningitidis; identical to SEQ ID NO: 42955

SEQ ID NO: 52531 - DNA, 996 bp, Neisseria meningitidis; identical to SEQ ID NO: 42282

SEQ ID NO: 52532 - DNA, 1179 bp, Neisseria meningitidis; identical to SEQ ID NO: 42680

SEQ ID NO: 52533 - DNA, 798 bp, Neisseria meningitidis
atgctgaaacaacgggtaataaccgccatgtggctgctgccgctgatgctgggcatgctgttttacgcgccgcaatggttgtgggctgcattttgcggactgattgccctgattgccttgtgggaatatgcccgtatgggcggtttgtgcaaaattaaaaccaaccattacctcgccgcaaccttggttttcggcgtggttgcctatgcgggcggctggatgctgcctaatttggtttggtatgttgttttggcattttggctcgccgttatgcctttatggttgagattcaaatggaggctcaacggcggttggcaggtttatgccgtcggctggcttctggtcatgccgttttggttcgcgctcgtatccctgcgcccgcatcccgatgatgccctgccgctgctcgccgtgatgggtttggtgtgggttgccgatatttgcgcgtatttcagcggcaaggcgttcggcaaacacaaaatcgcgccggcaatcagccccggcaaaagctgggaaggtgcaatcggcggcgcggtttgcgtggcagtgtacatgaccgccgtacgaagtgccggctggctggcattcgatacaggctggttcgataccgtgttaatcggtttggtgctgaccgttgtcagcgtatgcggcgaccttttggaaagctggctcaagcgcgcggcaggcatcaaagacagcagcaagctgctgcccggacacggcggcgtgttcgaccgtaccgacagcctgattgccgttatcagcgtctatgcagcgatgatgtcggttttaaattga

SEQ ID NO: 52534 - DNA, 531 bp, Neisseria meningitidis; identical to SEQ ID NO: 43394

SEQ ID NO: 52535 - DNA, 1179 bp, Neisseria meningitidis; identical to SEQ ID NO: 43689

SEQ ID NO: 52536 - DNA, 360 bp, Neisseria meningitidis; identical to SEQ ID NO: 43945

SEQ ID NO: 52537 - DNA, 912 bp, Neisseria meningitidis; identical to SEQ ID NO: 43497

SEQ ID NO: 52538 - DNA, 687 bp, Neisseria meningitidis; identical to SEQ ID NO: 42895

SEQ ID NO: 52539 - DNA, 1482 bp, Neisseria meningitidis
ttggatattgatcataaaaaatctgtagttaccgattttcgtgttgatggtcagcgtttttcaggtcgaattatcgaaccttcaataatagaacacgtgccaacaggtgcacgctctcttgaaaaagtccccgttaaatttaccgcatcagtttcccgcgccggcgtattggcgggggtcggcaaacttgcccgcttaggcgcgaaattcagcacaagggcggttccctatgtcggaacagcccttttagcccacgacgtatacgaaactttcaaagaagacatacaggcacaaggctaccaatacgaccccgaaaccgacaaatttgtaaaaggctacgaatatagtaattgcctttggtacgaagacaaaagacgtattaatagaacctatggctgctacggcgttgacagttcgattatgcgccttatgtccgatgacagcagattccccgaagtcaaagaattgatggaaagccaaatgtataggctggcacgtccgttttggaattggcataaagaagaactgaataaattaagttctttggattggaataattttgttttaaatagttgcacatttgattggaacggcggagattgtgtggtcaataaaggtgatgattacagaaatggggctgatttttcccttattcgcaattcaaaatacaaagaagaaatggatgccaaaaagctggaagagattttatcgttgaaagtcgatgccaatcccgacaaatacataaaggaaaccggttatcccggttattccgaaaaagtagaagtcgcacccggaacaaaagtgaatatgggtcccgtcacggacaggaacgggaatcccgttcaggttgtcgcaacattcggcagggattcgcaaggcaacaccacggtggatgttcaagtaatcccgcgtcccgacttgacccccggaagcgcggaagcaccgaacgcacagccgctgcccgaagtatcgcccgccgaaaaccccgcaaacaacccgaaccccaatgagaaccccggcacgagccccaatcccgaacccgaccccgatttgaatcccgatgcaaatcccgatacggacggacagcccggcacaagacccgattcccccgccgttccgggacgcacaaacggcagggacggcaaagacggaaaggacggcaaagatggcggccttttgtgcaaattcttccccgacattctcgcttgcgacaggctgcccgagtccaatccggcagaagatttaaatctgccgtctgaaaccgtcaatgtagagtttcagaaatcaggaatctttcaagattccgcacagtgtcccgcacctgtcactttcacagtgactgtgcttgattcaagcaggcagttcgcgttcagctttgagaacgcatgtaccatagccgaacggctaaggtacatgcttctcgcccttgcttgggcggttgccgcctttttttgtatccgcacagtatctcgtgaagtctag

SEQ ID NO: 52540 - DNA, 468 bp, Neisseria meningitidis; identical to SEQ ID NO: 42229

SEQ ID NO: 52541 - DNA, 594 bp, Neisseria meningitidis; identical to SEQ ID NO: 43228

SEQ ID NO: 52542 - DNA, 1596 bp, Neisseria meningitidis; identical to SEQ ID NO: 42398

SEQ ID NO: 52543 - DNA, 909 bp, Neisseria meningitidis; identical to SEQ ID NO: 43910

SEQ ID NO: 52544 - DNA, 591 bp, Neisseria meningitidis; identical to SEQ ID NO: 43077

SEQ ID NO: 52545 - DNA, 282 bp, Neisseria meningitidis; identical to SEQ ID NO: 43465

SEQ ID NO: 52546 - DNA, 498 bp, Neisseria meningitidis; identical to SEQ ID NO: 42333

SEQ ID NO: 52547 - DNA, 1557 bp, Neisseria meningitidis
atggatttcagttggttggcagaaccgcatacctggataggttttgccacgcttttggtgttggaagtcgtattggggatagacaatcttgtctttgtggcgattttggcaaacaaggtccagcccgcacggcgcgaccgcgcacggattatcgggctggggctggcagtcgtcatccgcatcattatgcttgcttttatggcgcacatcatcacgctgaccgagccgctgttccaaatcggcggcctcgccgtttccggcaaggacatgattatgctcgcgggcggtattttcctgctttacaaagccaccaccgaactgcatgaacgcctcgaagggcacaaccgttttaccgttgccgacagccaaaaaaaacacgcgccgttttggggcgtggtcgcgcaaatcctgatactggatgccgtgttttccatcgattcggtcattactgcggtggcgatggtcgatcatatcgtcgtggcgatgggtgcggtcgtcgtcgcgatggctgtaatgatttctgccagcaaactcttgaccgaatttgtcgacagacaccctaccgtcgtgatgctctgccttggttttttgttgatgatcggtttcagcctgattgccgaagccttccatttccacattcccaaaggctacctctacgccgccatcggcttctcgattttaatcgaattgtttaaccagatttcgcagcgcaacagccgcaaaaacgactacatcggcagctcgtggcgcaagcgcaccgccgaaaacgtcttgggtatgatgggtatacgcgaaagcgtgcttgccgacgcgggcggcgaatccggggacgacgcgcattttgaagaaaacgaaaaatcgatgatacgcagcgtgctgacgcttgccgaacgcccgattatgggggtgatgatcccacgccgcgacatcgaacggctggacatttcccaaagccgcgaagaacagtgtgcccaactgcaaaacacgccttacagccgcctgctcgttgtcggtaaggcgggcgtggacgaacctttgggctacatcaacaaaaaagacctgctgtcccaactgctggaaacaggcggtctcgacattcagacggcattgcgccagccgctcgtcctgcccgacagcaccaccgcgctgggcgcaatcgaactcttccgccaaagcagcgcggattatgctttggtggtggacgagttcggcgcggtattgggcatggtaaccatgaaagacctgctcgaaaccatcgcaggcgagttccccgaagaatttgagcgcgaagaagaaccagccgttcaggggaatcccgatgaaagcctgacggtggaaggcgcgttggaatatgtggaactcgcaccgcaactcaacctgccgcagcaggaggaagatgccgatttccatacggttgccgggctgattatggaagaattgcaaaccatccccgatgtcggcgattttgccgatttccacggctggcggtttgaagtggtcgaaaaagaagggcagcgcatcgagcgggtcaaaatcaccaaattgcccgaagaataa

SEQ ID NO: 52548 - DNA, 864 bp, Neisseria meningitidis
atggaattgaacgaatttctcgataaagcctatgccgttttgcggcgtttggatgccgtgcttccgcccgaacccgggcatacggattggaacgcgcttgccttccgctggcagagtgcgggcaaaaaaggttttttggaacacttgcccgatccgcacaccttccccttggcaaggctggcgggagttggcaggcaaaccgaattgctggtgcgtaataccgaacaattcattgccggcagacccgcgaataacgtattgatgagcggcgcgcgcggaacaggcaaatcctcgctggtcaaagccctgctgcacgaatatgcggataagggattgcgcctgatcgaagtcgataaaagcgatttaatcggcctgccttacctgttgacgcttttgaaagaacgtccggaaaaatttatcgtattttgcgacgatttgtcgtttgaaagcggcgatgaaacctataaggcattgaaaaccgcgttagacggcggtctgtctcaacgttgcgccaacgttttggtttacgcgacttccaacagacggcacctgatgcccgaatattttgacgagaatgccggtacgacggggatgcggggggaaatccatcagaaagaagcggtggaagaaaaaatatccctgtccgaccgattcggattgtggctcagtttttatccgttcgatcaaaacgattatctggcggcggtgcaaaattggctggaagatttcggcgtgccgtatgatgaaaccgcacagatggcggcattgcagtgggcgcagacgcggggcagccgttcgggacgttccgcgtggcagtttgcctgcgactgggcgggcaggctgccgaaacaacgggcgttgtga

SEQ ID NO: 52549 - DNA, 1083 bp, Neisseria meningitidis; identical to SEQ ID NO: 43469

SEQ ID NO: 52550 - DNA, 1542 bp, Neisseria meningitidis
atgaccgaaatgcaacaacgcgcccaactgcaccgccaaatttggaaaattgccgacgaagtacgcggcgcggtggatggctgggactttaaacaatacgttctcggcacacttttctaccgctttatcagcgaaaacttcaccgactatatgcaggcaggcgacagcagtattgattacgccgctatgccggacagcatcatcacgcccgaaatcaaagacgatgccgtcaaagttaaaggctatttcatctaccccggccagcttttttgcaatattgccgccgaagcccatcaaaacgaagagctcaacaccaagctgaaagaaatttttaccgcgattgaaagctccgcctccggctatccgtccgaacaggacatcaaaggcctgtttgacgacttcgacaccaccagcagccggctcggcagcactgttgccgacaagaacaaacgccttgccgccgtcctcaaaggcgtggcggaactcgatttcggcaattttgaaaaccaccacatcgaccttttcggcgatgcctacgaatacctgatttccaactacgctgccaacgcaggcaaatccggcggcgaatttttcaccccgcaaagcgtatccaagctgattgcgcggctggcggtgcacggacaggagaaagtcaacaaaatctacgacccagcttgcggctcgggcagtctgctcttgcaggcgaaaaaacagtttgacgagcacatcatcgaagaaggcttcttcgggcaggaaatcaaccacaccacctacaacctcgcccgcatgaacatgttcctgcacaacgtcaattacaaccaattccacatcgaattgggcgacacactgaccaacccaaagctcaaagacagcaaaccctttgatgccatcgtttccaatccgccttattccatcaactggataggcagcgacgaccccaccttaatcaacgacgaccgctttgcccccgcaggcgtacttgccccgaaatccaaagccgattttgccttcatcctgcacgcactgaactacctttccggcagaggccgcgccgccatcgtctcattccccggcattttctatcgcggcggcgcagaacagaaaatccgccaatatctggtggagggcaactacgtggaaaccgtgattgcccttgcgcccaatctcttttacggcaccggcatcgccgtcaatatcctggttttgtccaaacacaaagacaataccgacatccaattcatcgacgcaagcggcttctttaaaaaagaaaccaacaacaacgtcttaatcgaagaacacattgctgaaatcgtcaaactcttcgccgataaagccgatgtgccgcatatcgcccaaaacgctgcccagcaaaccgtcaaagacaacggctacaacctcgccgtcagcagctatgtcgaagccgaagacacacgcgaaattatcgacatcaaacagctcaacgccgaaatcggcgaaaccgtcgccaaaatcgaacggctgcggcgtgaaattgacgaagtgattgcagagattgaagcatga

SEQ ID NO: 52551 - DNA, 345 bp, Neisseria meningitidis; identical to SEQ ID NO: 36231

SEQ ID NO: 52552 - DNA, 558 bp, Neisseria meningitidis
atgatcaacgatattcaaaaaacagccgaaggcaagatgcagcgttcggtcgaagtactgaaagaaaatctggcgaaagtgcgtaccggccgcgcgcataccggcctgctcgaccaagtggaagtcgaatactggggcagcatggtccccgtcagccaagttgccaacgtaacgcttctggacgcgcgcaccatcggcgtgaaaccgtttgagggcaatatggcggccaaagtcgagaaagccatccgcgattcaaacttgggactgaacccggcagctgtcggcgacctgatccgcgtgccgatgcccatgctgaccgaggaacgccgcaaagacctgattaaagtcgtacgcggcgaagcggaagaaggccgcgtctctatccgcaacgtgcgccgcgatgccaacgaccacatcaaaaaactcctcaaagacaaagaaatttccgaagacgaggcacgtcgcggcgaagaagcggttcaaaaactgaccgacaaatacattaccgaagccgacaaactcctgactgccaaagaagaagatttgatggcaatttaa

SEQ ID NO: 52553 - DNA, 1257 bp, Neisseria meningitidis; identical to SEQ ID NO: 43618

SEQ ID NO: 52554 - DNA, 141 bp, Neisseria meningitidis; identical to SEQ ID NO: 43697

SEQ ID NO: 52555 - DNA, 1185 bp, Neisseria meningitidis; identical to SEQ ID NO: 42541

SEQ ID NO: 52556 - DNA, 1170 bp, Neisseria meningitidis; identical to SEQ ID NO: 38149

SEQ ID NO: 52557 - DNA, 426 bp, Neisseria meningitidis
ttgtggctgctgcgcgccctgactgccaaactgccccaacagcgttatgcggctttgtttattacactgttttttgccgcagtattggtgttcgggcggcatgattcgatgtattggtatcccgtcctcgtcaatctgatgatgttggcggtgttcggcggcagcctgtttgccgggcagacggtgattgaaaaacttgcgcggctgcaacagcccgacctgcctgaaaaagccgtgcgctatacccgccgggtaacgcaggtttggtgcgtattttttataatcaacgggacgcttgccgctttgttggcacggttggggcgatatgattggtgggcggtttataccggcgtgattgcctatgtattgatggggatgctgtttgccggcgaatggctttaccgcaaactcgttttgaaagtctga

SEQ ID NO: 52558 - DNA, 360 bp, Neisseria meningitidis; identical to SEQ ID NO: 38354

SEQ ID NO: 52559 - DNA, 900 bp, Neisseria meningitidis; identical to SEQ ID NO: 43336

SEQ ID NO: 52560 - DNA, 360 bp, Neisseria meningitidis; identical to SEQ ID NO: 42625

SEQ ID NO: 52561 - DNA, 696 bp, Neisseria meningitidis; identical to SEQ ID NO: 43109

SEQ ID NO: 52562 - DNA, 1467 bp, Neisseria meningitidis; identical to SEQ ID NO: 42324

SEQ ID NO: 52563 - DNA, 2115 bp, Neisseria meningitidis; identical to SEQ ID NO: 43515

SEQ ID NO: 52564 - DNA, 696 bp, Neisseria meningitidis; identical to SEQ ID NO: 42672

SEQ ID NO: 52565 - DNA, 501 bp, Neisseria meningitidis; identical to SEQ ID NO: 42243

SEQ ID NO: 52566 - DNA, 1512 bp, Neisseria meningitidis; identical to SEQ ID NO: 43193

SEQ ID NO: 52567 - DNA, 762 bp, Neisseria meningitidis; identical to SEQ ID NO: 42099

SEQ ID NO: 52568 - DNA, 543 bp, Neisseria meningitidis
gtgaatatggctgcaagcgtccgtatcttaggcatcgacccgggcagtcgcgtaacgggtttcggtgtcatcgatgtcagggggcgggatcatttttacgtcgcctccggctgcatcaaaacgcctgccgatgcgcctctggcagacaggattgccgtcatcgtccggcacatcggcgaagtcgttaccgtttacaagcctcaacaggcggcagtggaacaggtgttcgtcaacgtcaatccggcatcgacgctgatgctcggtcaggctaggggcgcggcattggcggcattggtcagccataagctgcccgtttcggaatacacggccttgcaggtcaaacaggcggtagtcggcaagggcaaggcggcaaaagaacaggtgcagcatatggtggtgcagatgttgggactttcgggaacgccccagccggatgcggcggacggtcttgccgtcgcgctgacccacgccttacgcaaccacgggcttgccgccaaactcaatccttcggggatgcaggtcaagcgcggcaggtttcaatag

SEQ ID NO: 52569 - DNA, 1020 bp, Neisseria meningitidis; identical to SEQ ID NO: 43794

SEQ ID NO: 52570 - DNA, 699 bp, Neisseria meningitidis
gtgcaggcggatttagcttatgccgccgaacgtattacccacgattatccgaaagcaaccggtacagacaaagacaaaataagcacagtaagcgattatttcagaaacatccgtgcgcattccatccacccccgagtgtcagtcggctacgatttcggcggctggaggatagcggcagattatgccagttacagaaaatggaacaacaataaatattccgtaaacacaaaagagttgcaaaaaaacaatagcagtggcatctggcaagaactgaagacggaaaatcaggaaaacggtacattccacgccgcttcttctctcggcttatccgccatttacgatttcaaactcaacgataaattcgataaattcaaaccctatatcggtgcgcgcgtcgcctacggacacgttaaacatcaggttcattcggtgagaaaagaaaccacgactactttcagtccaccagcgcaaggcgctacagtgccaggcaaaatcgtacaaggtccgaccaacaaacctgcctatcacgaaagcaacagtatcagcagcttaggtcttggtgtcatcgccggtgtcggtttcgacatcacacccaagctgactttagacaccggataccgttaccacaactggggacgcttggaaaacacccgcttcaaaacccacgaagtctcattgggcatgcgctaccacttctga

SEQ ID NO: 52571 - DNA, 921 bp, Neisseria meningitidis; identical to SEQ ID NO: 42756

SEQ ID NO: 52572 - DNA, 1014 bp, Neisseria meningitidis; identical to SEQ ID NO: 43060

SEQ ID NO: 52573 - DNA, 465 bp, Neisseria meningitidis
atgcaaggcaatcaagctgttgttgattatatgaacgaattgctgtctggcgagctggcggcacgcgaccaatactttatccactcccgcctctactccgaatggggctacaccaaactttttgaacgtctcaaccacgagatggaagaagaaaccacacacgccgaagacttcatccgccgcatcctgatgctgggcggcacgccgaaaatggcacgcgccgaactgaatatcggcacggacgtggtttcctgcctcaaagccgacctgcaaaccgaatatgaagtacgtgatgcgttgaaaaaaggcatcaaactgtgcgaagaggctcaagactatgttacgcgcgacctgatggttgcccaactgaaagataccgaagaagaccacgcccactggctggaacagcagcttcgcctgatcgagttaattggcgaaggcaactactaccaaagccaactgtaa

SEQ ID NO: 52574 - DNA, 579 bp, Neisseria meningitidis; identical to SEQ ID NO: 42926

SEQ ID NO: 52575 - DNA, 975 bp, Neisseria meningitidis
atgattgccaaacacatcgaccgcttcccgctattgaagttggaccgggtgattgattggcagctgatcgaacaatacctgaaccgtcaaaaaacccgttaccttagagaccaccgcggccgtcctgcctatcccctgctgtccatgttcaaagccgtcctgctcggacaatggcacagcctctccgatcccgaactcgaacacagcctcattacccgcatcgatttcaacctgttttgccgttttgacgaactgagcatccccgattacagcaccttatgccgctaccgcaaccggctggcgcaagacaataccctgtctgaactgttggaactgattaaccgccaactgaccgaaaaaggtttaaaaatagagaaagcatccgctgccgtcgttgacgccaccattattcagaccgccggcagcaaacagcgtcaggccatagaagttgacgaagaaggacaaatcagcggtcaaaccacaccgagtaaggacagcgatgcccgttggataaagaaaaacggcctctacaaactcggttacaaacaacatacccgtaccgatgcagaaggctatatcgagaaactgcacattacccccgccaatgcccatgagtgcaaacacctgtcgccgttgttggaaggactgcccaaaggtacgaccgtctatgccgacaaaggctacgacagtgcggaaaaccggcaacatctggaagaacatcagttgctggacggcattatgcgcaaagcccaccgcaaccgtccgctgacggaagtgcaaaccaaacgcaaccgatatttgtcgaagacccgttatgtggttgaacagagcttcggtacgctgcaccgtaaattccgctacgcccgggcagcctatttcggactggttaaagtgagtgcgcaaagccacctgaaggcgatgtgtttgaacctgttgaaagccgccaacaggctaagtgcgcccgctgccgcctaa

SEQ ID NO: 52576 - DNA, 2301 bp, Neisseria meningitidis; identical to SEQ ID NO: 43098

SEQ ID NO: 52577 - DNA, 1284 bp, Neisseria meningitidis; identical to SEQ ID NO: 43727

SEQ ID NO: 52578 - DNA, 882 bp, Neisseria meningitidis
atgagcaggcgtgccgccgaagcggacattgccggcgttgtcgcctttatccgcagcagaggtctgcgagaacacatttctcacggcgacgagcgtactgtcatcggcgcaatcggcgacgatagggttttgagcgtcagggaggtgcagacgctgccggaggtcgagaaagccgtccgcattttggatacatggaaaaccgtcagtcgggaaaatcgggcggaagacagccgcgttgccgccaaaggcgtggctttcggcggcggggaaaccgtccgtatcgccgcagaaccgtcagtatggcgcaatgcggatgcagtgtttctggatccgtttttcacttcggcaaacttatacgacacttcaagtgcggatgaagggcggggacggtgcagacggttggcggaacagaccgcatcggcgcatgatgcagggaaacccgtattggtgcgcgtccgcaacgtccgccatgtcgaagcggctttgaatgcgggggcggacatcctgtatttgggcggcgggctgatgtccgatcttgccgtattgaatgaagccggaaacctgaacattcccttggtgctgtgtaaagacaagcaccattctgccgaagattggttgaatgccgcagaatatgtcgtctcgcgcggcaaccgccacctgattctgggcgagtcgggcgtattgaaccataccaaaggccatccctaccgtttggatgtcgaatccatcgtgaaagtccgccaaatcagccatctgcccgtgattgcgaatattacgggattatggaaccgcgatatgccgcaggaaatcctgtacggcttggcaaaggcggcaggcgcgtgcggaatcgtcggaacctgttttgaaaagtcgggcggatag

SEQ ID NO: 52579 - DNA, 225 bp, Neisseria meningitidis; identical to SEQ ID NO: 38459

SEQ ID NO: 52580 - DNA, 2379 bp, Neisseria meningitidis
atgaaaccattacaaatgctccctatcgccgcgctgctcggcagtattttcggcaatccggtctttgcggcagatgaagctgcaactgaaaccacacccgttaaggcagaggtaaaagcagtgcgcgttaaaggtcagcgcaatgcgcctgcggctgtggaacgcgtcaaccttaaccgtatcaaacaagaaatgatacgcgacaataaagacttggtgcgctattccaccgatgtcggcttgagcgacagcggccgtcatcaaaaaggctttgccattcgcggcgtggaaggcaaccgtgtcggcgttagtattgacggcgtaaacctgcctgattccgaagaaaactcgctgtacgcccgttatggcaacttcaacagctcgcgtctgtctatcgaccccgaactcgtgcgcaacatcgacatcgtaaaaggggcggactctttcaataccggcagcggcgccttgggcggcggtgtgaattaccaaaccctgcaaggacgtgacttactgttgcctgaacggcagttcggcgtgatgatgaaaaacggttacagcacgcgtaaccgtgaatggacaaataccctcggtttcggcgtgagcaacgaccgcgtggatgccgctttgctgtattcgcaacggcgcggccatgaaactgaaagcgcgggcaagcgtggttatccggtagagggtgctggtagcggagcgaatatccgtggttctgcgcgcggtattcctgatccgtcccaacacaaataccacagcttcttgggtaagattgcttatcaaatcaacgacaaccaccgcatcggcgcatcgctcaacggtcagcaggggcataattacacggttgaagagtcttacaacctgcttgcttcttattggcgtgaagctgacgatgtcaacagacggcgtaacaccaacctcttttacgaatggacgccggaatccgaccggttgtctatggtaaaagcggatgtcgattatcaaaaaaccaaagtatctgcggtcaactacaaaggttcgttcccgacgaattacaccacatgggaaaccgagtaccataaaaaggaagttggcgaaatctataaccgcagcatggatacaaccttcaaacgtattacgctgcgtatggacagccatccgttgcaactcggggggggggggcgacaccgcctgtcgttcaaaacctttgccgggcagcgtgattttgaaaacttaaaccgcgacgattactacttcagcggccgtgttgttcgaaccaccaacagtatccagcatccggtgaaaaccaccaactacggtttctcgctgtccgaccaaatccaatggaacgacgtgttcagtagccgcgcaggtatccgttacgaccacaccaaaatgacgcctcaggaattgaatgccgactgtcatgcttgtgacaaaacaccgcctgcagccaacacttataaaggctggagcggatttgtcggcttggcggcgcagctgagccaaacatggcgtttgggttacgatgtgacctcaggtttccgcgtgccgaatgcgtctgaagtgtatttcacttacaaccacggttcgggcacttggaagcctaatcctaatttgaaggcagaacgcagcaccacccacaccctgtccttgcaggggcgcggcgacaaagggacactggatgccaacctgtatcaaagcaattaccgaaacttcctgtcggaagagcagaatctgactgtcagcggcacacccggctgtactgaggaggatgcttactactatagatgcagcgacccctacaaagaaaaactggattggcagatgaaaaatatcgacaaggccagaatccgcggtatcgagctgacaggccgtctgaatgtggacaaagtagcgtcttttgttcctgagggttggaaactgttcggctcgctgggttatgcgaaaagcaaactgtcgggcgacaacagcctgctgtccacacagccgctgaaagtgattgccggtatcgactatgaaagtccgagcgaaaaatggggcgtattctcccgcctgacctatctaggcgcgaaaaaggtcaaagacgcgcaatacaccgtttatgaaaacaagggctggggtacgcctttgcagaaaaaggtaaaagattacccgtggctgaacaagtcggcttatgtgtttgatatgtacggcttctacaaaccggctaaaaacctgactttgcgtgcaggcgtgtacaacctgttcaaccgcaaatacaccacttgggattccctgcgcggtttatatagctacagcaccaccaatgcggtcgaccgcgatggcaaaggcttagaccgctaccgcgccccaggccgcaattacgccgtatcgctggaatggaagttttaa

SEQ ID NO: 52581 - DNA, 732 bp, Neisseria meningitidis
ttgcaagatcgtaccggtcaaaaagtaccttccgtagtattccgcacccgtgtcggcgacacttggaaagatgtgtctaccgatgatttgttcaaaggcaaaaaagtagtcgtattctccctgcccggtgcatttaccccgacttgttcttcttcacacctgccgcgttacaacgaattgttcggcgcgttcaaagaaaacggcgttgacgcaatctgctgcgtatctgtaaacgatacgttcgtaatgaacgcttggtctgccgaagaagaatccgacaacatctacatgattcctgacggcaacggcgaatttaccgaaggtatgggtatgctggtcggtaaagaagacttgggcttcggtaaacgctcttggcgttactccatgctggttaacgacggcgtggttgaaaaaatgttcatcgaacctgaagaaccgggcgatcctttcaaagtatccgatgcagatactatgctgcaattcgttgctcccgattggaaggctcaagagtctgtggcaattttcactaaaccaggttgccaattctgcgctaaagccaaacaagctttgcaagacaaaggtttgtcttacgaagaaatcgtattgggcaaagatgcaaccgttacttccgttcgcgccattaccggcaagatgactgcccctcaagtcttcatcggcggcaaatacatcggcggcagcgaagatttggaagcttacttggctaaaaactga

SEQ ID NO: 52582 - DNA, 1227 bp, Neisseria meningitidis; identical to SEQ ID NO: 43663

SEQ ID NO: 52583 - DNA, 780 bp, Neisseria meningitidis; identical to SEQ ID NO: 45496

SEQ ID NO: 52584 - DNA, 969 bp, Neisseria meningitidis; identical to SEQ ID NO: 43206

SEQ ID NO: 52585 - DNA, 483 bp, Neisseria meningitidis; identical to SEQ ID NO: 42391

SEQ ID NO: 52586 - DNA, 408 bp, Neisseria meningitidis; identical to SEQ ID NO: 42367

SEQ ID NO: 52587 - DNA, 1443 bp, Neisseria meningitidis
atgcatccgacctattccgccgtacaggcgcggctgctcgaagccaaccgcctttcccccgaactgctcgccaaaagcctgtgcatcatcggcgcgcaccacgtcgattacgccgacatctactgccagcgcaccgcttatgaaagctggcatttggaagagggcatcgtcaaatcgggcagcttccaaatcaatcagggcgtgggcgtgcgcgccgtttcgggcgacaaaaccgcctttgcctacgccgacagcctgtgcatcgattcgataaaccgttccgcccgcgccgtccgcgcgattggggcggcaggcggcaaggtgtccgccaaaatgccgtctgaaacgcgcggcaagccggtttgttccgcgtccgaccccattgccggcctcgattccgccgccaaagtcgcgctgttgaacaaagtggaagcaatcgccaaagccgccgatccgcgcatcgtgcaagtgatggccggtttgacctgcgaatacgatatggtttacctcgcccgtctggacggcaaacacgccgccgacatccgcccgatggtgcgcctgaacgttaccgttatcgccaaacagggcgaacgccgcgaacagggcagcgcgggcggcggcggacgctacgacttggcttatttcgatgaaaacttggttcatcggtttgtcgatgccgccgtcaaacaggcactcaccaacctcgaatcccgccccgcgcccgccggcgaaatgaccgtcgttttgggcaacggctggccgggcgtgttgctgcacgaagcggtcggacacggtttggaaggcgatttcaaccgcaagggaaccagcgtcttttccggcagaataggcgagcgcgtcgccgccaaaggcgttaccgtcgtcgatcagggtgatattgccggccggcgcggttcgctcaacatcgacgacgaaggcaacgaaacccgccgcaccgtattgattgaagacggcattttagtcggctatatgcaggacgaaaccaatgcccgcctgacgggtacgcagtccaccggcaacggccgccgcgaaagttacgcttccgcccctatgccgcgcatgaccaatacctttatggaaaacggcagctatgagccggaagaaatcatcgcgtccatcgacaagggcatttacgccgtcaactttggcggcggacaagtggacattaccagcggcaagttcgtgttcagtgcgtccgaagcgtggtgggtggaaggcggcaggctgcaatatcccgtcaaaggcgcgaccatcatcggcaacggccccgaagtgctgaaacacgtttccatgataggcaacgatactgcgctcgacagcggtgtcggcgtgtgcggcaaagaagggcagagcgtccccgtcggcgtggggcaaccgactttgcggattgatgccggactgaccgtcggcggcagcgcaatctga

SEQ ID NO: 52588 - DNA, 147 bp, Neisseria meningitidis; identical to SEQ ID NO: 42194

SEQ ID NO: 52589 - DNA, 1575 bp, Neisseria meningitidis
atgaaaaaatctttccttacgcttgttctgtattcgtctttacttaccgccagcgaaattgcctatcgctttgtatttgggattgaaaccttaccggcggcaaaaattgcggaaacgtttgcgctgacatttgtgattgctgcgctgtatctgtttgcgcgttataaggtgacgcgtttgttgattgcggtgttttttgcgttcagcattattgccaacaatgtgcattacgcggtttatcaaagctggatgacgggcatcaattattggctgatgctgaaagaggttaccgaagtcggcagcgcgggtgcgtcgatgttggataagttgtggctgcctgtgttgtggggcgtgttggaagtcatgttgttttgcagccttgccaagttccgccgtaagacgcatttttctgccgatatactgtttgccttcctaatgctgatgattttcgtgcgttcgttcgacacgaaacaagagcacggtatttcgcccaaaccgacatacagccgcatcaaagccaattatttcagcttcggttattttgtcggacgcgtgttgccgtatcagttgtttgatttaagcaggattcccgcctttaagcagcctgctccaagcaaaatcgggcagggcagtgttcaaaatatcgtcctgattatgggcgaaagcgaaagcgcggcgcatttgaagctgtttggctacggacgcgaaacttcgccgtttttaacccggctgtcgcaagccgattttaagccgattgtgaaacaaagttattccgcaggctttatgactgcagtgtccctgcccagttttttcaatgcgataccgcacgccaacggcttggaacaaatcagcggcggcgataccaatatgttccgcctcgccaaagagcagggctatgaaacgtatttttacagcgcgcaggcggaaaacgagatggcgattttgaacttaatcggtaagaaatggatagaccatctgattcagccgacgcaacttggctacggcaacggcgacaatatgcccgatgagaagctgctgccgttgttcgacaaaatcaatttgcagcagggcaagcattttatcgtgttgcaccaacgcggttcgcacgccccatacggcgcattgttgcagcctcaagataaagtattcggcgaagccgatattgtggataagtacgacaacaccatccacaaaaccgaccaaatgattcaaaccgtattcgagcagctgcaaaagcagcctgacggcaactggctgtttgcctatacctccgatcatggccagtatgttcgccaagatatctacaatcaaggcacggtgcagcccgacagctatctcgtgccgctagtgttgtacagcccggataaggccgtgcaacaggctgccaaccaggcttttgcgccttgcgagattgccttccatcagcagctttcaacgttcctgattcacacgttgggctacgatatgccggtttcaggttgtcgcgaaggctcggtaacgggcaacctgattacgggtgatgcaggcagcttgaacattcgcgacggcaaggcggaatatgtttatccgcaatga

SEQ ID NO: 52590 - DNA, 2163 bp, Neisseria meningitidis
atgcaacaaaaaatccgtttccaaatcgaaggcatgacctgccaggcctgcgcttcgcgcattgaaaaagtgttgaacaaaaaagattttgtcgaatcggcgggggtaaacttcgccagcgaagaggcgcaggtagtgtttgacgacagcaaaacctcagtagccgacattgccaaaatcattgagaaaaccggttacggcgcgaaggaaaaaacggaagatacattgccgcaacccgaagcagaacaccatatcggctggcggctgtggctgctgttcaccatcaacgtcccgttccttatcggcatggcggggatgatgatcggcagacacgattggatgattccgccgttgtggcagttcgcattggcaagcgtggtgcagctttggctggcaatcccgttttacaaaagcgcgtgggcgagcattaagggcggactggcgaatatggacgtgctggttaccatcggcacggtctcgatttacctgtattccgtctatatgctgtttttcagcccgcacgcggcgtacggtatggcgcatgtgtattttgaagtgggcgtgatggtgatcggttttgtgtcactgggtaaatttttggaacaccgtaccaaaaaatccagcctcaacagcttgggcttgctgctcaaacttacaccaacccaagtcaacgtgcaacgcaacggcgaatggaaacagcttcccatcgaccaagtgcaaatcggcgaccttatccgcgccaaccacggcgaacgcattgccgcagacggcatcattgaaagcggcagcggttgggcggacgagagccatcttaccggcgaatccaatcctgaagaaaaaaaggcgggcggcaaagtgttggcgggcgcgttaatgaccgaaggcagtgtggtgtaccgcgccacgcagctcggcagccaaacccagctcggcgacatgatgaacgcgctctctgaagcacaaggcagtaaagcaccgattgcgcgcgtagccgataaagcggctgcggtattcgtgcctgccgtcgtgggcattgcgttgttgacttttattgttacttggctgattaagggcgattggacggttgcgctgatgcacgccgtcgccgttttggtgattgcctgcccgtgcgcgctgggtctggcaacccctgccgcgattatggtcggtatgggcaaagcggttaaacacggtatttggtttaaagacgcggcagcaatggaggaagccgcccacgtcgatgccgtcgtgttggacaaaaccggtacgctgaccgaaggcagcccgcaggttgccgccgtttattgcgttcccgacagcggctttgacgaagacgctttgtaccgcatcgccgccgccgtcgaacaaaacgccgcccatccgctcgcccgtgccatcgtctccgccgcccaagcgcgcggtttggacattcccgccgcacaaaacgcacaaaccgttgtcggcgcaggcattaccgccgaagtggaaggcgtgggtttggtgaaagcaggcaaagccgaatttgccgaactggccttgccgaagtttttagacggcgtttgggatattgcaagcattgttgcggtctcagtcgataacaaacccatcggcgcattcgcacttgccgacgcgttgaaagccgataccgccgaagccataggccgtctgaaaaaacacaatatcgatgtctatattatgagcggcgacaaccaaggcacggtcgaatacgtcgccaaacaactgggcatcgcacacgccttcggcaacatgagtccgcgcgataaagctgccgaagtgcaaaaactcaaagccgccggcaaaaccgtggcgatggtcggcgacggcatcaacgacgcgcccgcgcttgccgccgctaacgtcagcttcgccatgaaaggcggagcggacgttgccgaacataccgcatccgccacgctgatgcagcattcggtcaaccaactcgccgatgctctgctggtgtcgcaagccactttgaaaaacatcaagcaaaacctgtttttcgccttcttctacaatattttgggcattcctctcgccgcgcttggctttttaaatcccgtcatcgctggcgcggcaatggcggcaagctcggtttccgtgttgagcaatgccttgcgcctgaaacgggtaaaaatcgattag

SEQ ID NO: 52591 - DNA, 2310 bp, Neisseria meningitidis
atgcttgcacccgaattggaacagattttgcagcagctttaccgcgaggcgcgtaaggctcattatgaatttatcagcctcgagcatctgcttttggtactcatcgaagaagatgcctccgtccacaacgtcctcaagctctgcggcgcggatttgaaagtggtgtccgaacagctcgccgccagcgttgccgaaaacacccccctgattcccgaacaccttttagacacggtcgaaacccggcccacgctcggcttccaacgcgtgatgcaacgggcgatggtgcatacccagtctgccggaaaagccgcagtcgaaccgttggacgttttggtcgcgctgatgagcgaaaccgacagccacaccgtctatttcctcaagctgcaatcggttacgcgttttgaagttttgcgctgtattgcccacggctctcccgatgaagatgaagatgaagatgaagatgaagacgatggcaactattcttcagacggcatggacgacgataatggaaaccgcaccaaaccgggcaaaaaccctttatcggcgtacaccgtcaacctcaacgccgaagtcaaagccggccgtatcgaccctttgattggtcgcaaacacgaaatggaacggctggtgcaaatcctatgccgccgccgcaaaaacaatccgcttttggtcggcgaagcgggcgtgggcaaaaccgcgctggcggaaggtttggcacatcaaatcgtcaacggcggcattccagacgcgcttaaagatgccgaagtgtacgcgctggatatgggctcgctgttggcgggcacgaaataccgcggcgactttgaagcgcgggtcaaatccgtcttgaaacagctcgaaaaaatcccgcacgccattttgtttatcgacgaaatccacaccatcatcggcgcgggcagcaccagcggcggcaccatggacgcgtccaacctgctcaaacccgcgctggcaaaaggttcgctgcgctgcatcggcgcgaccacctacgacgaataccgcaccattttcgacaaagaccatgccttaagccgccgcttccaaaaaatcgacgtggtcgaacccaccgtttccgaaaccgttcaaatcctgcgcggcttgaaaccgatgtttgaagccttccaccaagtccgctacactcaaggcgcactcgaagccgccgccgaactctccgcacgctacatcaacgagcgtttcctgcccgacaaagccatcgacgtgatggacgaagcaggcgcggcgcaacggattctgcccaaatccaaacagaaaaaagtcatcggcaaagcgcaaatcgaaaccgtcatcgccaaagtcgcgcggattccagaaaaaaccgtgtcgcacgacgacaaacaggtgctgcaattcctcggccgcgatttgaaaaacatggtttacggtcaggaaaacgccatcgacgcgttggttgctgccgtcaaaatgtcgcgttccggccttgccctgcccgacaaaccgataggcagtttcctcttctccggtccgactggcgtcggcaaaaccgaagtcgccaaacagcttgcctactcgatgggcgtaccgctgcaacgctttgatatgtccgaatatatggaacgccacgccgtatcgcgcctcatcggcgcaccaccgggctacgtcggctttgaacaaggcggccttttgaccgaagccatcaacaaacagccgcattgcgtattgctcttggacgaaatcgaaaaagcccaccccgacattttcaacgtcctcctgcaagtcatggacgcaggcaaactgaccgacaacaacggcaagagtgccgatttccgcaacgtcatcctaattatgaccactaacgcaggtgcggagagtctcagccgacccagcctcggctttaccgccaaacgcgagcgcggcgacgaaatgcaggctatcaacaagctcttcacgcccgagttccgcaaccgcttggatgcgattatcccgtttgcgcccttatccgaacccgtcatcaccaaagtcgtggacaaattcctgctccagctcgaacaccggctcctcgacaaaaaagtcgaagccgaattcacgtcggcattgcacaaatatctggcggaaaaaggttttgacccgcaaatgggcgcgcgcccgatgcaccgcctgattcaggaaaaaatccgcaaaccgctcgccgacgaactcctgttcggcaaactatccgacggcggcttcgtacggatagactgggatgcggcaaaagaagaagccgtgttgaagtttaagaaaagcaaggtcaaaataaaaaccgcctccgcataa

SEQ ID NO: 52592 - DNA, 1155 bp, Neisseria meningitidis
atgactgaaactactcaaaccccgaccctcaaacctaaaaaatccgttgcgctttctggcgttgcggccggtaataccgctttgtgtaccgttggccgtaccggcaacgatttgagctatcgcggttacgacattctggatttggcacaaaaatgcgagtttgaagaagtcgcccacctgctgattcacggccatctgcccaacaaattcgagctggccgcttataaaaccaagctcaaatccatgcgcggcctgcctatccgtgtgattaaagttttggaaagcctgcctgcacatacccatccgatggacgtaatgcgtaccggcgtatccatgctgggctgcgttcatcctgaacgtgaaagccatccggaaagtgaagcgcgcgacatcgccgacaaactgatcgccagcctcggcagcatcctcttgtactggtatcaatatttgcacaacggcaaacgcattgaggttgaaagcgacgaagagaccatcggcggtcatttcctgcaactgttgcacggcaaacgcccaagcgaatcacacatcaaagccatgcacgtttcactgattctgtatgccgaacacgagttcaacgcttctacctttaccgcccgcgtgatcgccggtacaggctctgatatgtactccagcattaccggagcaatcggcgcgttgaaaggtccgaaacacggcggcgcgaacgaagtggcttacgatattcaaaaacgctaccgcaatgccgacgaagctgaagccgacatccgcgaacgcatcggccgcaaagaaatcgtgatcggtttcggtcatccggtgtacaccatttccgaccctcgcaacgttgtcattaaagaagtggcacgcggtttgagcaaagaaaccggcgatatgcgcctctttgacattgccgaacgtttggaaagcgtgatgtgggaagagaaaaaaatgttcccgaatctggactggttctctgccgtttcctaccaaaaattgggcgtaccgaccgctatgttcacaccgctgttcgtaatttcccgtacaaccggttggagcgcacacgttcttgagcaacgcaaagacggcaaaatcatccgtccgagcgcaaactacacaggccctgaagatttggcgtttgtggagattgaagaacgataa

SEQ ID NO: 52593 - DNA, 552 bp, Neisseria meningitidis; identical to SEQ ID NO: 43814

SEQ ID NO: 52594 - DNA, 1089 bp, Neisseria meningitidis; identical to SEQ ID NO: 43406

SEQ ID NO: 52595 - DNA, 1044 bp, Neisseria meningitidis; identical to SEQ ID NO: 42856

SEQ ID NO: 52596 - DNA, 4707 bp, Neisseria meningitidis
atgaaaaccaaacgttttaaaattaacgccatatccttatccatctttcttgcctatgcccttacgccatactcagaagcagcattggtcagagacgatgtcgattatcaaatattccgtgactttgcagaaaacaaaggcaaattttttgtcggcgcaaccgatttatcagtgaaaaacaaacaaggtcaaaacatcggcaacgcattatccaacgtaccgatgattgattttagcgttgcagatgtcaacagacgtacattaaccgtcatcgatccccagtatgccgtcagcgtcaaacatgtaaaaggagacgaaatctcttattacgggcatcacaatgggcacttagatgttagcaatgatgaaaacgaatatcgttcagttgcacaaaatgactacgaaccaaataaaaattggcatcacggtaatcaaggtcgtcttgaagactacaacatggcacgccttaataaattcgtaacagaagtcgcacctattgcaccaaccagtgcaggcggcggcgttgaaacctataaagataaaaaccgtttttctgagtttgtgcgagttggagcaggtacgcaatttgaatataacagccgctacaatatgacagagctttcacgagcttatcgttatgccattgcaggtacgccttatcaagacgtgaatgtcacatcgaatctaaatcaagaaggcttgattggcttcggtgataattcaaaacatcattccccagaaaaactcaaagaagttttatctcaaaacgcattgactaactatgctgtgttaggcgatagcggttcaccattatttgcttatgataaacaagaaaaacgctgggtctttttaggtgcttacgattattgggcaggctatcaaaaaaactcttggcaagaatggaatatctataaaaaagaatttgcagataaaatcaaacaacgcgataacgccggcaccatcaaaggtaatggagaacatcattggaacattacttttggcacaaacagcaagattggttctacagcggtaaggcttgccggcaatgaaaaggatgcaaacaacggacagaatgttacctttgaagacaacggcactttggtattggatcaaaacatcaaccaaggcgcgggcggtctgtttttcaaaggcgattacacagtcaaaggtataaataatgacatcacttggctaggtgcggggattgatgttaccgacggcaaaaaagtcgtttggcaagtcaaaaatccgaatggcgacagattggcaaaaatcggcaaaggcacattagaaataaacggcacaggcgttaaccaagggcaattaaaagtcggcgacggtacggttattctgaatcaacaagccgatgccgacaaaaaagtccaggctttctcccaagtcggcattgtcagcggacgcggtacattggtattaaatagttcaaatcagattaatcccgataacctatatttcggtttccgtggcggtcgtttggatgccaatggcaatgacttgacttttgaacacatccgcaacgtggatgaaggcgcgcgcattgtcaaccacaacacaagccacgcctccacaatcacgctaacgggtaaatctttaattaccaatccgaacagcctttcggtacatagcatacaaaatgactatgacgaagatgattatagttattactaccgaccaaggcgcccgattccgcaaggcaaagacctttattacaaaaactatcgttattacgccctaaaatccggcggcagcgtgaacgcaccgatgcccgagaacggtgtaacagaaaataacgactgggtctttatgggatatacgcaagaagaagccaagaaaaacgcgatgaaccacaaaaacaatcagcgtattagcggttttagcggtttctttggcgaagaaaacggaaaaggacataacggtgcattaaaccttaatttcaacggcaaaagcgcgcaaaaccgtttcttgttaacaggcggcactaatttaaacggaaaaataagcgtaactcaaggcaatgtcttgttatcaggtcgtccaacaccacacgcaagagattttgtgaacaaatcttcagcccgaaaagacgcacatttctccaaaaacaatgaagtcgtatttgaagacgactggataaaccgcacattcaaagccgcagaaattgcggttaatcaatccgcatcattctcttccggtagaaatgtatccaacattaccgccaacatcaccgcgacagacaacgccaaagtaaatttgggttacaaaaacggcgatgaggtttgcgtgcgctcggactataccggttatgttacctgcaacacaggcaacttatccgataaggctttaaacagctttggagcgacacagattaacggcaatgtgaatctgaaccagaatgcggcattggtcttgggcaaggctgcattatgggggcaaattcaagggcaaggaaacagccgtgtcagcctaaaccaacatagcaaatggcatttgactggcgacagccaagtacacaatctgtcattggcggatagccatattcatttgaacaatgcctccgatgcgcaaagtgcaaatcaataccacacgctcaaaatcaatcatttatccggtaacgggcattttcattatctgacgcacttggcggaaaatcttggggataaagtgcttgtgaaggaatccgcatccggtcattatcagctccatgttcaagataaaacaggcgaacccaatcaggaagggctgaatctctttgatgcatcatccgtacaagaccgctcccgcctttctgtttccttggcgaataaccatgtagatttaggcgcattgcgttatacaatcaaaacagaaaacggtattacccgattgtacaatccttatgccgagaaccgccgccgagtcaaaccggtcccgtctcctgccacaaacacggcttctcaagcacaaacggacagtgcacaaattgccaagcctcaaaatatcgtcgtcgcaccgcctagcccgcaggcaaatcaagccgaagaagcaaaacgccaacaagcaaaagcggagcaagtgaagcgtcagcaagcagaagcagagcgtaaatcggcagagttagcaaaacaaaaagcagaagccgaacgcgaagcaagagagctggcgacccgccaaaaagcagaacaagaacgcagcagcgccgaacttgcacgtcgacatgaaaaagaacgcgaagcggcagagttgtcggcaaaacaaaaagtcgaagccgaacgtgaggctcaagcattggcggtacgccgaaaagcagaagccgaagaggcaaaacgccaagctgcagagcttgcacgccaacaagaagaagcacgaaaagctgcagagttggctgctaagcaaaaagcggaaactgaacgcaaagcagcagaaattgccgagcaaaaagcggaagccgaacgtgaagccgccgaacttgccaagcaaaaggcggaagaagaaggtcgccaagcagcacaatctcaacccaaacgtcgtaaccgcagggctataccaccggaactgtcatctgatgcaacaacccgagctttgcctaggatagcgagaaattcaaatcctgatgccagcgattatgaagaaatccccttggatgcgttggaagatgaagatgtatccgaatcggttgacacatcagacaaacagcctcaagacaatacggaacttcatgaaaaagttgagacagtgagtttgcaaccaagagccgcgcagccgcgagctcaagccgccgcgcagccgcaagcccaagccgccgcgcagccgcaagcccaagccgtcgcgcaagccgatgcagtcagcaccaataccaactcggctttatctgacgcaatggcaagcacgcaatctatcttgttggatacaggtgcttcattaacacggcacattgcacaaaaatcacgtgctgatgccgaaaaaaacagcgtttggatgtcgaacatcggttatggccgtgattatgcttccgcacaatatcgccggtttagttcgaaacgcacgcaaacacaaatcggcattgaccgcagcttgtccgaaaatatgcagataggcggcgtattgacttactctgacagtcagcatacttttgatcaggcgagcggcaaaaatacttttgtgcaagccaacctttatggtaagtattatttaaatgatgcttggtatgtggccggcgatattggtgcaggcagcttgagaagccggttacaaacgcagcaaaaagcaaactttaaccgaacaagcatccaaaccggccttactttgggcaatacactgaaaatcaatcaattcgagattgtccccagtgcggggatccgttacagccgcctgtcatctgcagattacaagttgggtaacgacagtgttaaagtaagttctatgtcagtgaaaacactgacggccggactggattttgcttatcggtttaaagtcggcaaccttaccgtaaaacccttgttatctgcagcttactttgccaattatggcaaaggcggcgtgaatgtgggcggtaattccttcgcctataaagcagataatcaacagaaatattcagcaggtgccgcgttactgtaccgtaatgttacattaaacgtaaatggcagtattacaaaaggaaaacaattggaaaaacaaaaatccggacaaattaaaatacagattcgtttctaa

SEQ ID NO: 52597 - DNA, 561 bp, Neisseria meningitidis
atgaacagactgctactgctgtctgccgccgtcctgctgactgcctgcggcagcggcgaaaccgataaaatcggacgggcaagtaccgttttcaacatactgggcaaaaacgaccgtatcgaagtggaaggattcgacgatcccgacgttcaaggggttgcctgttatatttcgtatgcaaaaaaaggcggcttgaaggaaatggtcaatttggaagaggacgcgtccgacgcatcggtttcgtgcgttcagacggcatcttcgatttcttttgacgaaaccgccgtgcgcaaaccgaaagaagttttcaaacacggtgcgagcttcgcgttcaagagccggcagattgtccgttattacgaccccaaacgcaaaaccttcgcctatttggtgtacagcgataaaatcatccaaggctcgccgaaaaattccttaagcgcggtttcctgtttcggcggcggcataccgcaaaccgatggggtgcaagccgatacttccggcaacctgcttgccggcgcctgcatgatttccaacccgatagaaaatctcgacaaacgctga

SEQ ID NO: 52598 - DNA, 570 bp, Neisseria meningitidis; identical to SEQ ID NO: 43932

SEQ ID NO: 52599 - DNA, 1284 bp, Neisseria meningitidis; identical to SEQ ID NO: 43586

SEQ ID NO: 52600 - DNA, 2259 bp, Neisseria meningitidis
atgtacacaagaatcatggaaatcagcccttggacgctgcgttcggcaaaactggaaaaagaacacaaacggctgcaagagagcctgaccagcttgggcaacggctatatgggtatgcgcggcagctttgaggaaacctattccgccgacagccacttaggcacctacatcgccggcgtgtggttccccgacaaaacccgcgtcggctggtggaaaaacggctatcccaaatatttcggcaaagccatcaacgcgttcaatttcagcaaagtcaaaatctttgtcgacgggcaggaagtggacttggcgaaaaacgacgttgctggcttctccgtcgaactcgatatgcagcacggcgtgttgcgccgctcgttcaccgtattcggtgtgcgtttcaatgtgtgcaaattcctgtctgtcgcacaaaaagagctggcggtcatccgctgggaagccgtatccgttgacggtaaaacccaccaagtccgcatcgattccatcatcgatgccgacgtgaaaaacgaagactccaactacgaagaaaaattctggcaggtattggacaaaggcgtttcagacagtctctcctacattgccgcccaaaccgtcgccaatcccttcggcgtggaacaattcatcgtcaacgccgagcaaacctttgccggcagcttcaaagccctcggcggcagccaaaccgactggcaggtctccaattcttttgaatccgaagtcggcagcacacccgaaacctttgaaaaacgcgtgattgttaccaccagccgcgattatcagagcttggaagcagtgaaagccgcaggccgcgccttgtcggaaaaaattgcaggcgttgcgtttgaaaccttgctggacgcgcacaaagcaggctggctgcaccgttgggaaatcgccgacgtggtcatcgaaggcagcgacgaagcacagcagggcatccgcttcaacctgttccaactgttctccacctactacggcgaagacgcgcgactgaacatcggcccgaaaggctttaccggcgaaaaatacggcggtgcgacctattgggataccgaagcctacgccgtaccgctctacctcgcactggcagaacccgaagttacccgcaacctgctgcaataccgccgcaaccaactgccgcaggcacaacacaacgcgcgcgaacagggcttggcgggcgcactctatccgatggtaacgtttacgggcatcgagtgccacaacgaatgggaaatcaccttcgaggaaatccaccgcaacggcgcgattccttacgccatctataactacaccaactacaccggcgacgagggctatcttgctaaagaaggcttggaagtcttggtcgaagtgtcccgcttctgggcggaccgcgtccacttctccaaacgcaacggcaaatacatgattcacggcgtaaccggtccgaacgaatacgaaaacaacatcaacaacaactggtacaccaacaccctcgccgcatgggtattagactacacccgcgaagccttggcgaaatacccgcgtccggatttgaacgtgcgtgccgccgagttggaaaaatgggcggacatcagcgcgaatatgtaccgtccgcatgacgaagaactcggcgtattcgtgcagcacgacggcttcctcgataaagacatccgcccagtgtccgcgctttcgcccgacgatttgccgctcaaccagaaatggtcgtgggacaaaatcctgcgttcgcccttcatcaaacaggcggacgtcttgcaaggcatctacttcttcggcgaccgtttcaatatcgacgaaaaacgccgcaacttcgacttctacgaaccgatgaccgtgcatgaaagctcgttgtcgccgtgtatccactctattctcgccgccgaactgggcaaagaagaaaaagccgtggaaatgtaccggcgcaccgcacgcctggacttggacaactacaacaacgacaccgaagacggcctgcacattacttctatgaccggctcgtggctcgccatcgtccaaggtttcgcccaaatgaaaacctggggcggcacactcagcttcgcaccgttcctgccgggcgcatggacaggctacgccttccatatcaactaccgaggccgtctgattaaagtcgccgtcggcaaagaaaacgtcgtcttcaccctgctcaaaggcgagccgctcgatttgcaggtgtatggcaaagacatcacgctcgacggcagccacgccgccgcgttggaaaaataa

SEQ ID NO: 52601 - DNA, 1383 bp, Neisseria meningitidis; identical to SEQ ID NO: 42344

SEQ ID NO: 52602 - DNA, 825 bp, Neisseria meningitidis; identical to SEQ ID NO: 43351

SEQ ID NO: 52603 - DNA, 855 bp, Neisseria meningitidis; identical to SEQ ID NO: 42200

SEQ ID NO: 52604 - DNA, 477 bp, Neisseria meningitidis; identical to SEQ ID NO: 43468

SEQ ID NO: 52605 - DNA, 714 bp, Neisseria meningitidis; identical to SEQ ID NO: 43470

SEQ ID NO: 52606 - DNA, 843 bp, Neisseria meningitidis; identical to SEQ ID NO: 42158

SEQ ID NO: 52607 - DNA, 1032 bp, Neisseria meningitidis
atgggcatcaaagtcgccatcaacggctacggacgcatcggccgccaggttttgcgcgccatctacgattatcagattcaagaccaactccaaatcgtcgccgtcaacgccagcggcagccttgaaaccaacgcccatctgaccaaattcgacaccgtacacggacgctttgaagccgacgtatcccacgacggcggcaacctcatcgtcaacggcgacaaaatccccttcttctcgacccgcaaccctgccgaactgccgtggaaagaactcggtgtcgatttggtcatggaatgcaccggcgcgttcaccagcaaagaaaaagccaaagttcatctggaaagcggcgcaaaaaaagtcctcatttccgcaccgggcggcgacgatgtcgatgcaaccgtcgtgtacggcgtgaacgacagcgtcctgaccgccgacatgaccgtcgtttccaacgcttcctgcaccaccaactgcctctcgccggttgccaaagtgttgagcgaaagcgtcggcatcgtcaaaggcgcgatgaccaccatccacgcgctgaccaacgaccaaaccgttaccgacgtgcgccacaaagacctgcgccgcgcccgcagcggcgtggaaaacatgattccgaccaaaaccggcgcggcaaaagccgtcggtttggtactgcccgaattgaaaggcaggctcgacgggcttgccatccgcgtgccgaccgtcaacgtatcattggtagatttgagcttccaagccgcgcacgacacgacagtcgaagaaatcaacgcactgatgaaagccgcctcggaagcaggcgcactcaaaggcgttttgggctacaacaccctgcccttggtttccatggacttcaaccacaccaccgaagccagccacttcgacgcaacgctgaccaaagtcgttgacggcaacatgattaaagtcttcgcatggtatgacaacgaatggggattcagctgtcaaatgctgaacactgcacgccgcatgttcggacttgaagtgcgcccgctcaaataa

SEQ ID NO: 52608 - DNA, 456 bp, Neisseria meningitidis; identical to SEQ ID NO: 40384

SEQ ID NO: 52609 - DNA, 681 bp, Neisseria meningitidis; identical to SEQ ID NO: 43758

SEQ ID NO: 52610 - DNA, 216 bp, Neisseria meningitidis
gtgtttaagctcggcgtttatacctgtctcggactgtttgccggctgggtgctgctgctgatcgtgcaactctggttttcttttctcgaagcggaattgttcttcaaaatcacactgactatggcggggctgtttgtcatcatcctcgccgccttactggtatgcggtcagtatttttccgaaaagaaaatgaaagacgacgggtttatcaactga

SEQ ID NO: 52611 - DNA, 1239 bp, Neisseria meningitidis; identical to SEQ ID NO: 38584

SEQ ID NO: 52612 - DNA, 648 bp, Neisseria meningitidis; identical to SEQ ID NO: 42364

SEQ ID NO: 52613 - DNA, 1287 bp, Neisseria meningitidis; identical to SEQ ID NO: 42118

SEQ ID NO: 52614 - DNA, 1008 bp, Neisseria meningitidis; identical to SEQ ID NO: 43736

SEQ ID NO: 52615 - DNA, 774 bp, Neisseria meningitidis; identical to SEQ ID NO: 37582

SEQ ID NO: 52616 - DNA, 360 bp, Neisseria meningitidis
atgtattttgttgaccgcaccgccgtcgtcctcaagccgaccgtccgctttttggaatggctcaaaagcaccgacgaaaatatgcccgacctgaccatagaacagcttcgtgccaactgttccgtcttcctcgttccgcagttcgacgaaccggaagccgtcgtttcctatttcgacgaacgctaccgccagattttcgaggcggagctggcaggttgggacatcgataaggataaatggccgcaagatatggggctgaaggcgttttgggaatttttcgacatcgaaatccacgatatggtgttggacatggaagaagcggaattgaacattacccccgtgttcgacaacatgatgtaa

SEQ ID NO: 52617 - DNA, 288 bp, Neisseria meningitidis; identical to SEQ ID NO: 43621

SEQ ID NO: 52618 - DNA, 849 bp, Neisseria meningitidis
atggacttcaaacaatttgattttttacacctgatcagtgtttccggttgggagcatctggctgaaaaggcgtgggcgttcgggctgaaccttgccgccgcgctgcttatttttttggtcggaaaatgggcggcgaaacgcattgtcgctgtgatgagggcggcgatgacgcgcgcgcaggtcgatgccacgctgattagttttttgtgtaatgttgccaatatcggcttattgattttggtgattattgccgcattgggcagattgggcgtttccacaacatccgtaaccgccttaatcggcggcgcgggtttggcggtggcgttgtccctgaaagaccagctgtccaattttgccgccggcgcactgattatcctgttccgcccgttcaaagtcggcgattttatccgcgtcggcggttttgaaggatatgtccgagagattaaaatggtgcagacttctttgcggacgaccgacaacgaagaagtcgtgctgcccaacagcgtggtgatgggcaacagcatcgtcaaccgttccacactgccgctgtgccgcgcccaagtgatagtcggcgtcgattacaactgcgatttgaaagtggcgaaagaggcggtgttgaaagccgccgtcgaacaccccttgagcgttcaaaacgaagagcggcaggccgccgcctacatcaccgccttgggcgacaatgccatcgaaatcacattatgggcttgggcaaacgaagcagaccgctggacgctgcaatgcgacttgaacgaacaagtggtcgaaaacctccgcaaagtcaatatcaacatcccgttcccgcaacgcgacatacacatcatcaattcttaa

SEQ ID NO: 52619 - DNA, 1041 bp, Neisseria meningitidis; identical to SEQ ID NO: 43607

SEQ ID NO: 52620 - DNA, 225 bp, Neisseria meningitidis; identical to SEQ ID NO: 43565

SEQ ID NO: 52621 - DNA, 741 bp, Neisseria meningitidis; identical to SEQ ID NO: 42819

SEQ ID NO: 52622 - DNA, 1434 bp, Neisseria meningitidis; identical to SEQ ID NO: 42362

SEQ ID NO: 52623 - DNA, 951 bp, Neisseria meningitidis; identical to SEQ ID NO: 43030

SEQ ID NO: 52624 - DNA, 360 bp, Neisseria meningitidis; identical to SEQ ID NO: 43333

SEQ ID NO: 52625 - DNA, 687 bp, Neisseria meningitidis; identical to SEQ ID NO: 42346

SEQ ID NO: 52626 - DNA, 432 bp, Neisseria meningitidis
ttggacaaacaaatcgacaaccacacccacacgcattttgacggcaaagcccaagtggcagagcaaatcaaaggcatcggttcgataacgacggctacgctgatggcgatgttgcccgaattggggcggctgtcgcacaaacggatagcgagtctagtcggcattgccccacacccgagggagagcggggaaaccaaattcaaaagccgctgctttggcggaaggtctgcggtgcgtaaggcactgtatatggctaccgtggcagcgacacgttttgaaccgcttattcgggatttctaccaacgcctgccgtccgagggtaagccgtataaggttgccgttacggcatgtatgcgcaaactgctgacgatatcgaatgcccggatgcgtgattattttgccgaaaacgataccgccgaaaacggtatctaa

SEQ ID NO: 52627 - DNA, 2016 bp, Neisseria meningitidis; identical to SEQ ID NO: 43516

SEQ ID NO: 52628 - DNA, 186 bp, Neisseria meningitidis; identical to SEQ ID NO: 38793

SEQ ID NO: 52629 - DNA, 1104 bp, Neisseria meningitidis; identical to SEQ ID NO: 42777

SEQ ID NO: 52630 - DNA, 1881 bp, Neisseria meningitidis; identical to SEQ ID NO: 43479

SEQ ID NO: 52631 - DNA, 666 bp, Neisseria meningitidis; identical to SEQ ID NO: 43929

SEQ ID NO: 52632 - DNA, 273 bp, Neisseria meningitidis
ttgaaattagctctcaaacgttcaggcaaatataacgtttacgatcccctcgccctagatttggacggcgacggtatagaaaccgttgccaccaaaggcttttcaggcagcttatttgatcacaccaacaacggcatccgcaccgccacgggctggattgctgcatatgacggttttcctgtgcgcaaattaaacagtaacgggggcattattagcacgacagataccatattccaatctttgcatacatggcttgatcatcaaccaagatga

SEQ ID NO: 52633 - DNA, 1215 bp, Neisseria meningitidis; identical to SEQ ID NO: 42989

SEQ ID NO: 52634 - DNA, 537 bp, Neisseria meningitidis; identical to SEQ ID NO: 37832

SEQ ID NO: 52635 - DNA, 1470 bp, Neisseria meningitidis; identical to SEQ ID NO: 43488

SEQ ID NO: 52636 - DNA, 1059 bp, Neisseria meningitidis; identical to SEQ ID NO: 42848

SEQ ID NO: 52637 - DNA, 246 bp, Neisseria meningitidis; identical to SEQ ID NO: 42999

SEQ ID NO: 52638 - DNA, 966 bp, Neisseria meningitidis
atgttgcgtttgaccgcattgaccctctgcaccgtcctcgccttgggcgcgtgttcgccgaaagattccgactctgccccacaagccaaagaacaggcagtttccgccgcacaatccgaaggcgcgtccgttaccgtcaaaaccgcgcgcggcgatgttcaaataccgcaaaaccccgaacgcatcgccgtttacgatttgggtatgctcgacaccttgagcaaactgggcgtgaaaaccggtttgtccgtcgataaaaacctgctgccttatttggacgaatatttcaaaaccacgaaacctgccggtacgctgtttgagccggattacgaagcactcaacgcttacaaaccgcagctcatcatcatcggcagccgcgcagccaaagcgtttgacaagttgaacgccattgcgccgaccatcgagatgaccgccgataccgccaacctgaaagaaagtgccaaagaacgtatcgacgcgctggcgcaaatcttcggcaaacaggcggaagccgacaagctgaaagcggaaatcgacgcgtcttttgaagccgcgaaaactgccgcacaaggcaaaggcaaaggtttggtgattttggtcaacggcggcaagatgtcggctttcggcccgtcttcacgcttgggcggctggctgcacaaagacatcggcgttcccgctgtcgatgaatcaattaaagaaggcagccacggtcagcctatcagctttgaatacctgaaagagaaaaatcccgactggctgtttgtccttgaccgaagcgcggccatcggtgaagagggtcaggcggcgaaagacgtgttggataatccgctggttgccgaaacgaccgcttggaaaaaaggacaggtggtttaccttgttcctgaaacttatttggcggccggcggcgcacaagaattgctgaatgcaagcaaacaggttgccgacgcttttaacgcggcaaaataa

SEQ ID NO: 52639 - DNA, 807 bp, Neisseria meningitidis; identical to SEQ ID NO: 42698

SEQ ID NO: 52640 - DNA, 693 bp, Neisseria meningitidis; identical to SEQ ID NO: 42313

SEQ ID NO: 52641 - DNA, 417 bp, Neisseria meningitidis; identical to SEQ ID NO: 43650

SEQ ID NO: 52642 - DNA, 948 bp, Neisseria meningitidis
atgaccgacatcacaccgtttgccaaccgcttgggcaaaaacatcaaacaccttatgaaatgggcgaaacgcaacggcatcgaagcctggcgcatttacgaccgcgacatcccccaattcccctttgccgccgatgtttacggcgatcgaatccaccttcaggaatacgataccggctggctgatgcggcccgaagaatacgaagcgtggcttgccgaagtcttggaagccgtcgctttcgttaccggttttgcgcccgaacaaatccgcctcaaacgccgcgaacgccaaaaaggtttgcagcagtacgagaaaaccggcaaggcgggcgacgatttcgtcatcaccgaaaacggccgcaagttttgggtcaaccttgataagtatttggatacggggctttttttggatcatcgaaacacgcgcaaaaaagtcggcgaaacggcggcgggcaaacgttttttaaacctgttttcctacaccggcagcttcaccgtctatgccgccaccggcggcgcggcatccagcgaaaccgtcgatttgtccaacacatatcttgattgggcgaaacgcaattttgaattgaacggcatcgatacggaacgacacaaaatcgtccgcgccgacgtgttccaatatcttcagacggcatatggggaaggcaggcggttcgacctcattgtgatggacccgcccagtttttccaacagcaagaaaatgtccgacatcctcgacatccagcgcgaccacaaaaagctgattgacggcgcggtgaagctgctcgcttcagacggcattttgtacttttccaacaacctgcgcagcttcgtcttagacgacttggtatcggaacaatacgccgtcaaagacatttccaaacaatccgttcccgaagatttcagcaacaaaaaaatccataggtgctgggaaatccgccacaaatcttaa

SEQ ID NO: 52643 - DNA, 1773 bp, Neisseria meningitidis; identical to SEQ ID NO: 43649

SEQ ID NO: 52644 - DNA, 1533 bp, Neisseria meningitidis
atgtgttgttctcttagttttgcagaaccagcaagaatagatgatcgaataataaaatttaggccatctaaattaaagttttttgaatctacaggatatagaaaaatcaataatgaattttctaaattcacagaagcggcaaatgtcgaacatatccccacgggcgcaaaagcccgaatcaacgcaaagataaccgccagcgtatcccgcgccgccgtcttgtcaggagtcggcaaacttgcccgcttaggcgcgaaattaagcacaagggcagttccttatgtcggaacagcccttttagcccatgacgtatacgaaactttcaaagaagacatacaggcacaaggctaccaatacgaccccgaaaccgacaaatttgtaaaaggctacgaatatagtaattgcctttggtacgaagacaaaagacgtattaatagaacctatggctgctacggcgttgacagttcgattatgcgccttatgtccgatgacagcagattccccgaagtcaaagaattgatggaaagccaaatgtataggctggcacgtccgttttggaattggcataaagaagaactgaataaattaagttctttggattggaataattttgttttaaatcgttgcacatttaattggaatggcggagattgtttggtcaataaaggtgatgatttcagaaatggggctgatttttcccttattcgcaattcaaaatacaaagaagaaatggatgccaaaaagctggaagagattttatcgttgaaagtcgatgccaatcccgacaaatacataaaggcaaccggttatcccggttattccgaaaaagtagaagtcgcacccggaacaaaagtgaatatgggtcccgtcacggacaggaacgggaatcccgttcaggttgtcgcaacattcggcagggattcgcaaggcaacaccacggtggatgttcaagtaatcccgcgtcccgacttgacccccggaagcgcggaagcaccgaacgcacagccgctgcccgaagtatcgcccgccgaaaaccccgcaaacaacccgaaccccaatgagaaccccggcacgagccccaatcccgaacccgaccccgatttgaatcccgatgcaaatcccgatacggacggacagcccggcacaagacccgattcccccgccgttccgggacgcacaaacggcagggacggcaaagacggaaaggacggcaaagatggcggccttttgtgcaaattcttccccgacattctcgcttgcgacaggctgcccgagtccaatccggcagaagatttaaatctgccgtctgaaaccgtcaatgtagagtttcagaaatcaggaatctttcaagattccgcacagtgtcccgcacctgtcactttcacagtgactgtgcttgattcaagcaggcagttcgcgttcagctttgagaacgcatgtaccatagccgaacggctaaggtacatgcttctcgcccttgcttgggcggttgccgcctttttttgtatccgcacagtatctcgtgaagtctag

SEQ ID NO: 52645 - DNA, 783 bp, Neisseria meningitidis
atgaaaaccaagttaatcaaaatcttgaccccctttaccgtcctcccgctgctggcttgcgggcaaacgcccgtttccaatgccaacgccgaacccgccgtcaaagccgagtccgccggcaaatccgttgccgcctctttgaaagcgcgtttggaaaaaacctattccgcccaagatttgaaagtgttgagcgtcagcgaaacaccggtcaaaggcatttacgaagtcgtcgtcagcggcaggcagattatctacaccgatgccgaaggcggctatatgttcgtcggcgaactcatcaacatcgacacgcgcaaaaacctgaccgaagaacgcgccgccgatttgaacaaaatcgacttcgcctccctgcctttggacaaagccatcaaagaagtgcgcggcaacggcaagctgaaagtcgccgtcttctccgaccccgattgtccgttctgcaaacgcttggaacacgagtttgaaaaaatgaccgacgtgacggtttacagctttatgatgcccattgccggcctgcaccccgatgccgcgcgcaaggcgcaaatcttatggtgtcagcccgaccgcgccaaagcgtggacggattggatgcgtaaaggcaaattcccggtcggcggcagcatctgcgacaatcccgtcgcggaaaccacttccttgggcgaacaattcggcttcaacggcacgccgaccctcgtcttccccaacgggcgcagccaaagcggctacagcccgatgccccaactggaggaaatcatccgcaaaaatcaataa

SEQ ID NO: 52646 - DNA, 345 bp, Neisseria meningitidis; identical to SEQ ID NO: 36580

SEQ ID NO: 52647 - DNA, 1476 bp, Neisseria meningitidis; identical to SEQ ID NO: 42399

SEQ ID NO: 52648 - DNA, 1848 bp, Neisseria meningitidis; identical to SEQ ID NO: 42938

SEQ ID NO: 52649 - DNA, 1437 bp, Neisseria meningitidis
atgccgctgctgtctgtcgagttcgcactgttctttctcgccttcctgccgatttactggggcttggcgaaatacccgtccgtccaaaacctgctgcttttggctgccggtatgggctggctctaccatatcggccctgtatttgcggcaatcatcgtcctttattcctcctgcgtgtaccttttgggcgaactgctccgttccgatcgcgaaaatacgcgccgtttctggctggggtgcggcattgccgcctcgctgaccgtcttgggctttttcaaatatttcgactttttccgcccgatgattgcccaatatgccggaaaaggcggcgcaatcgacatcctgatgccgctggggctttcgtattacaccttccagtcgctcgcctatctggtttactgcttccgcgccccgcacgccgcgcgtttcagctggcacgagctgctgctgcacctgagttttttccccaccgttacctccggcccgattatccgcgccgccgcattcaaaagcgcagacggcgagcaggcaggcgcattggcgcaaatccgtacccgccgagcgcgttcgcccgtccgccccgcactcgccgtttccctgattctgctgggtattgccaaaaaatggtggctggcggggatgctggcggaaaactgggtgtcgcccgtatttgaaaatcccgcccaattcgacggctggggcgtattgggcggcgtgtacggctataccttccaactctttttagacttttccggatattccgatttggttatcggcatggcgatgctgctgggctttaggctgcccaaaaatttctccgcaccgcttcgtgctttaaacatccgcgcattttgggacaaatggcacatcagcctttccacctggatacgcgactacatctacatccccttgggcggcagcaaaaaaggctttttacggacacagctcaacctgatggcggcaatggtgctctcaggcatctggcacggctacggctggaacttcctcatttggggcgcgctgcacggcacggcactggtgctgctcaacacgggcgaccgctatttcggacgcgacgcgctatgccgtctgaaatacttcgcgccgctctcatggctcattaccttccatttcgtctgccttagctttgtcgtcttcaataccgcaaatcccgacgatgcaggcgcagttttcagtgccctctttgccaatgccaacggctggaatgcgccgcaacaggcaaacatgctgttgcttgcctcgtttgcatccgtgatgctgctctacccttacctgcaacgcgctttcgacggcgcggtcaaaggtttggaaaaaatcccgatgtggctgtggtttatccccgtttccgccgtcctgctgctgattatcgtcctcgccccctcggggatacccggctttatttatgccaatttttaa

SEQ ID NO: 52650 - DNA, 900 bp, Neisseria meningitidis; identical to SEQ ID NO: 42089

SEQ ID NO: 52651 - DNA, 657 bp, Neisseria meningitidis; identical to SEQ ID NO: 43154

SEQ ID NO: 52652 - DNA, 1893 bp, Neisseria meningitidis; identical to SEQ ID NO: 43022

SEQ ID NO: 52653 - DNA, 522 bp, Neisseria meningitidis; identical to SEQ ID NO: 43343

SEQ ID NO: 52654 - DNA, 474 bp, Neisseria meningitidis; identical to SEQ ID NO: 42161

SEQ ID NO: 52655 - DNA, 876 bp, Neisseria meningitidis; identical to SEQ ID NO: 38422

SEQ ID NO: 52656 - DNA, 858 bp, Neisseria meningitidis
atgttgaaacacatagcccaaacccaccgcaagcgattgattggcacattttccctggtcggactggaaaaccttttgatgctggtgtatccggtgtttggcggccgggcgatcaatgccgtgattgcgggggaggtgtggcaggcgttgctgtacgctttggttgtgcttttgatgtggctggtcggtgcggtgcggcggattgccgatacgcgcacgtttacgcggatttataccgaaatcgccgtgccggtcgtgttggaacagcggcagcgacaagtcccgcattcggcggtaactgcgcgggttgccctgtcgcgtgagtttgtcagcttttttgaagaacacctgccgattgccgcgacatccgtcgtatccatattcggcgcgtgcatcatgctgctggtgctggaattttgggtcggcgtgtcggcggtgggcatacttgcgttgtttttatggcttttgccacgttttgccgccatcagcgaaaacctgtatttccgcctgaacaacagcttggaacgcgacaaccactttatccgaaaaggcgaccggcggcagctgtaccgccattacggactgcttgcgcgcctgcgtgtgctgatttccaaccgcgaagccttcggctatctctgcgtcggcacggcgatgggtattttgttcggctttgcttttgtgatgatgacgctcaaaggctacagcagcgcggggcatgtctattcggtcggcacttatctgtggatgtttgccatgagtttggacgacgtgccgcgattggtcgaacaatattccaatttgaaagacatcggacaacggatagagtggtcggaacggaacatcaaagccggaacttga

SEQ ID NO: 52657 - DNA, 903 bp, Neisseria meningitidis; identical to SEQ ID NO: 43614

SEQ ID NO: 52658 - DNA, 936 bp, Neisseria meningitidis
atggggcacaatatgatgaccacccaaaaatggtatgagcatattactaatgtaatcataggcaatactgctaatttcaatagcggttgccttgactctatagattatgtagatgaaagaaaaggcgttccgcttgcagctatgcaacatattttcatggacgttagagctgcagcttcccatgcctatctatttgaacatgatcttaagaaattcaagcaatatgcttatgttgcaggaaagctgggggttttgctgagtgtaaattctacagaccctgaacccttcttctttccctgtgacatgctcaacattcaaaatccgatgtttctgatgctgatgagcgacagcccacagctgcgcgagtttctggtgcgcaatatcgacaacatcgccaacgatacagaagcctttataaaccgctacgacctcaaccgtcatatgatttacaatactctgctgatggtagagggtaagcagcttgatcggttgaaacaacgtagcgagaaagtcttggcgcatcccacccctagcaaatggctgcaaaagcggttgtacgattaccgcttcttcctcgctttcgccgaacaggatgccgaggcgatgaaggccgccttagagccgcttttcgataaaaaaaccgcgcgtatggctgccaaagaaacattgtcctatttcgatttctacctgcagccgcaaatcgttacctacgccaaaatcgcatccatgcacggtttcgatttgggcatagatcaagaaatcgcaccgagggatttgattgtttacgatccgctgccggcagacgaatatcaagacatcttcgattttatgaaacagtatgacttgtcttacccgtatgaatatctgcaggattggatagattactatacgttcaaaaccgataagctggtatttggtaacgcgaagcgagagtga

SEQ ID NO: 52659 - DNA, 1002 bp, Neisseria meningitidis
atgaaacggaaaatttggctgctgccgctgctggcggtttcggcatacctgcaggcgcagacggaagtcaggctggcggtgcataagtcgttcagcctgcccaaagggttgattgcgcgcttcgagcgggcaaacgatgcgaaggtgtcgattattcaggcgggcggcgcgaacgaaatgctcaacaaactgattttgagccgcgccaacccgattgccgacgcggtgtatggtttggacaacgccaatatcggcaaggcgcgggaaatgggcattttggcggcggcgcaacccgaatccgcccccgtcgcggtcgggctgccttcggctttggcggtcgattacggctatgtgtccatcaattacgacaaaaaatggtttgaaggcaaaaagctgcccctgccgcaaaccctgcaggatttgacccgccccgaatataaaaacctattggtcgtgccgtcccccgccacgtcgtccccggggctgggcttcctgatggcgaacatcagcggtctgggcgaagaaagcgcgttcaaatggtgggcacagatgcggcagaacggcgtgaaggtcgccaaaggctggagcgaggcgtattacaccgacttttcgcacaacggcggcgcgtatccgctggtggtcggttatgccgccagcccggcggcggaagtgtatttttccaaaggcaaatacagcgagccgccgacgggcaacctgtttttaaaaggcggcgtattccgccaggtcgaaggcgcggcggtcttgaagggcgcgaaacagccggaattggcggcaaaactggtgcaatggctgcaaagtcgggaagtgcagcaggcggttccgtccgaaatgtgggtttaccccgccgtcaaaaacacgcgcctgcccgacgtgttccgcttcgcccaagccccgacgcacaccaccgcccccgcgcagcgcgatattgatgcgaaccagcgcggatgggtttcccgttggattagaacggttttgaaataa

SEQ ID NO: 52660 - DNA, 258 bp, Neisseria meningitidis; identical to SEQ ID NO: 42731

SEQ ID NO: 52661 - DNA, 1086 bp, Neisseria meningitidis
atgatggaaaacgccctccgacttgccgctttggggcgtttttccacttcgcccaatccgcgcgtcggctgcgttatcgcacacggcagccaaattgtcgggcaaggcttccacgtcaaagcgggcgaaccccatgccgaagtccacgccctgcgtcaggcgggcgaaatggcacaaggcgcgaccgcctttgttaccctcgaaccgtgcagccattacgggcgcacaccgccctgtgccgaagcactggtgcgggcgggcgtgtcccgcgtcgttgccgccatgcgcgaccccaacccgctggttgcaggcaaagggcttgccctgctcgaagcagcaggcatcaagacggaatgcggtttactcgaacatcaggcaagggaactcaaccgaggcttcctgtcgcgcatcgaacgccgccgcccctttgtccgcctcaaatgcgccgtttcgctggacggcaaaaccgccctttcagacggcagcagcttttggattaccggcgaagacgcgcgtgccgacgtacaggttttgcgtgccgaaagctgcgcggtgctgaccggcatcggcacggtgttggcggacaatccccggctcaacgtccgcgcttttccaactttgcgccaacccgcacgcatcgttttagacagccgcctgcgcctgcccccgaacagccatttggttaccgacggacaatctccgacctacatcgccacactcgaacgcaacgaagacagactgcacccctatcgggaacacgcacacgtccgcatcctgatgccgtctgaaacggcagacagcaaaatcgacctgcaccacctgatgcgcctccttgctgacgaaggtttcggcgaaatcatggtcgaagcaggctccgaactcacatccgcatttttggcagaaaatctggcagacgaaatcgtcctgtaccgttcgcccaaaatcctcggcagcggcaaagacctgttttccctgctcgaaaaccgcgccgccctttccgcaccgcccttgtggacacccgtttcaagcgaaatcctcggacacaacatcaaaaccgtgttccgaaaaaacggcaacgccttttaa

SEQ ID NO: 52662 - DNA, 669 bp, Neisseria meningitidis
atgttaccctcgaaatatgaagataacgcactgcaaattaaagaaaaaagtacagaaagaactgctccgttttttgtactggaagttaccgcccgttctgccgccgatattttgggtatccatcccaattcggcagcactgttctaccgtaaaatccgcacggttatcaaccatcatttagccttggctgccgatgaggtttttgagggccctgtcgagccggacgaaagcgatttcggcggacggcgtaaaggtagacgtggtcgcggtgcggcaggaaaagtggttgtcttcggcattctgaaacgcaacggacgggtctataccgttgtggtggataatgccaagtctgaaacgttactccctgtcatcaaaaagaaaatcatgccggacagcattgtttataccgatagtctgagcagctgcgacaagttggacgtgagcggttttatccattaccgcatcaaccattccaaggaatttgcagaccgtcagaaccacattaacggcattgagaacttttggaatcaggcaaaacgcgtcttgcgaaaatacaacggaatcgatcgtaaatctttcccgctgttcttgaaagaatgcgaatttcgatttaacttcggcacaccgtctcaacagcttaaaatcctgcgggattggtgtgggatttag

SEQ ID NO: 52663 - DNA, 231 bp, Neisseria meningitidis; identical to SEQ ID NO: 43676

SEQ ID NO: 52664 - DNA, 2226 bp, Neisseria meningitidis; identical to SEQ ID NO: 43863

SEQ ID NO: 52665 - DNA, 300 bp, Neisseria meningitidis; identical to SEQ ID NO: 43921

SEQ ID NO: 52666 - DNA, 780 bp, Neisseria meningitidis; identical to SEQ ID NO: 36766

SEQ ID NO: 52667 - DNA, 1092 bp, Neisseria meningitidis; identical to SEQ ID NO: 43081

SEQ ID NO: 52668 - DNA, 1137 bp, Neisseria meningitidis; identical to SEQ ID NO: 42276

SEQ ID NO: 52669 - DNA, 2376 bp, Neisseria meningitidis; identical to SEQ ID NO: 42602

SEQ ID NO: 52670 - DNA, 555 bp, Neisseria meningitidis; identical to SEQ ID NO: 43391

SEQ ID NO: 52671 - DNA, 1404 bp, Neisseria meningitidis; identical to SEQ ID NO: 43725

SEQ ID NO: 52672 - DNA, 1092 bp, Neisseria meningitidis; identical to SEQ ID NO: 43435

SEQ ID NO: 52673 - DNA, 795 bp, Neisseria meningitidis; identical to SEQ ID NO: 43823

SEQ ID NO: 52674 - DNA, 1281 bp, Neisseria meningitidis
atggaaaactcattgaaagaagccgccctcaagttccacgaattccccgtgccgggcaaaatttccgttaccccgaccaaatctctggcgaccgacaaagatttggcgttggcgtactctccgggcgtagccgctccttgtatggaaatccatgccgatccgcaaaatgcctacaaatacaccgccaaaggcaacttggtcgctgtcatttccaacggtacggccgttttgggcttgggcgacatcggcgcgctggcgggcaaacccgtgatggaaggcaaaggcgtattgttcaaaaaattcgccggtgtggacgtgttcgacatcgaaatcgatgaaaaagacccgcaaaaactcgtggacatcatcgccgctttagagccgaccttcggcggcatcaacctcgaagacatcaaagcacccgagtgtttctacatcgaacgcgaattacgcaaacgctgcaaaatccccgtattccacgacgaccagcacggcacggccatcattaccgccgccgccgtattgaacgccctgcgttttaccggccgtaaaatcgaagaagcgactttggtgtgttccggcgcaggtgcggccgcgattgcctgcttgaaccaattgctggatttgggcttgaaacgcgaaaacgtgaccgtttgcgactccaaaggcgtgatttaccaaacccgcgaagacaaagaccgtatggacgagtccaaacagttctatgccattgaagacaacggccagcgcgtgcttgccgatgccgtcaaaggcaaagacatcttcttgggcctctccggcgcgaacctgctgacgcctgaaatactgaacaccatgaacgaaaaacccatcgtgttcgctatggccaacccgaatccggaaatcctgccgccgctggcgaaagaaacccgtccggacgtggttatcggtaccggccgctccgacttcccgaaccaagtgaacaatgtattgtgcttcccgttcatcttccgcggtgcgttggatgtcggcgcgacgaccatcaacgaagaaatgaaacgcgcctgcgtgtatgctttggcggatttggcgatggaagaagtaaccgaagaagtggttgccgcttacggtaagaaatttgaattcggcgcggaatacctgattccgactccgttcgattcccgcctgctgccgcgcgttgctacggctgccgccaaagcagcgatggaaagcggtgtggcaacccgtccgattgcagatttggaagcttacgctgccaagctgagcgaatggaagctgtaa

SEQ ID NO: 52675 - DNA, 1569 bp, Neisseria meningitidis
atgagtcaaaccgatacgcaacgggacggacgatttttacgcacagtcgaatggctgggcaatatgttgccgcatccggttacgctttttattattttcattgtgttattgctgattgcctctgccgtcggtgcgtatttcggactatccgtccccgatccgcgccctgttggtgcgaaaggacgtgccgatgacggtttgatttacattgtcagcctgctcaatgccgacggtttgatcaaaatcctgacgcataccgttaaaaatttcaccggtttcgcgccgttgggaacggtgttggtttctttattgggcgtggggattgcggaaaaatcgggcttgatttccgcattaatgcgcttattgctcacaaaatcgccacgcaaactcactacttttatggttgtttttacagggattttatctaataccgcttctgaattgggctatgtcgtcctaatccctttgtccgccatcatctttcattccctcggccgccatccgcttgccggtctggctgcggctttcgccggcgtttcgggcggttattcggccaatctgttcttaggcacaatcgatccgctcttggcaggcatcacccaacaggcggcgcaaatcatccatcccgactacgtcgtaggccctgaagccaactggttttttatggtagccagtacgtttgtgattgctttgattggttattttgttactgaaaaaatcgtcgaaccgcaattgggcccttatcaatcagatttgtcacaagaagaaaaagacattcggcattccaatgaaatcacgcctttggaatataaaggattaatttgggctggcgtggtgtttgttgccttatccgccctattggcttggagcatcgtccctgccgacggtattttgcgtcatcctgaaacaggattggtttccggttcgccgtttttaaaatcgattgttgtttttattttcttgttgtttgcactgccgggcattgtttatggccgggtaacccgaagtttgcgcggcgaacaggaagtcgttaatgcgatggccgaatcgatgagtactctggggctttatttggtcatcatcttttttgccgcacagtttgtcgcattttttaattggacgaatattgggcaatatattgccgttaaaggggcgacgttcttaaaagaagtcggcttgggcggcagcgtgttgtttatcggttttattttaatttgtgcttttatcaatctgatgataggctccgcctccgcgcaatgggcggtaactgcgccgattttcgtccctatgctgatgttggccggctacgcgcccgaagtcattcaagccgcttaccgcatcggtgattccgttaccaatattattacgccgatgatgagttatttcgggctgattatggcgacggtgatcaaatacaaaaaagatgcgggcgtgggtacgctgatttctatgatgttgccgtattccgctttcttcttgattgcgtggattgccttattctgcatttgggtatttgttttgggcctgcccgtcggtcccggcgcgcccacattctatcccgcaccttaa

SEQ ID NO: 52676 - DNA, 573 bp, Neisseria meningitidis; identical to SEQ ID NO: 43793

SEQ ID NO: 52677 - DNA, 810 bp, Neisseria meningitidis; identical to SEQ ID NO: 50111

SEQ ID NO: 52678 - DNA, 1491 bp, Neisseria meningitidis
ttgtcaggactccccatccccaaagacatcgcgcgcccgcccgaaacgatattggtcaacatcacgccgcaggaaacgcgcgtagcggtgttggaggaaaacaatatctgcgagctgcacatcgagcgcaacagcgaacacagcctagtcggcaatatctatctgggcgtggtgcgccgcgtgctgcctgggatgcagagcgcgtttatcgacatcggcttggaacgcgcggcgtttttacacatcgtcgatgtcctcgaacaacgccgcaaccccgaagaaacccagcgcatcgaacatatgctgtttgaagggcagtctgttttggtgcaggtcatcaaagacccgatcaacaccaaaggcgcgcggctttccacccaaatctcgctggcggggcgtttcctcgtccatcttccgcaagaagaccacatcggcgtgtcccaacgcatcgaagacgatgccgaacgcagcagcctgcgcgaacgcctcgacaagctcctgccggaaaatgcctgccggggctacatcatccgcaccaacgccgaaaacgccaccgacgaacagctccagtccgacatcgactacctgaccaaagtgtgggaacacatccaagaacaggcgaaaatccggccgcccgaaaccctgctttatcaggatttgcctttaagcctgcgcgtgttgcgcgatatggtcggctgcgacacgcaaaaaatcctcgtcgattccaccgtaaaccacgggcgcatgacgcgttttgccgaacaatacgtccacggcgcattgggcaggatagagctgttcaaaggcgaacgcccgctgtttgaaacccacaacgtcgaacaggaaatcagccgcgccctgcaaccgcgcgtcaacctcaacttcggcagctacctgattatcgaatccaccgaagccatgaccacgatagacgtgaacaccggcggcttcgtcggcgcacgcaacttcgacgaaaccatcttccgcaccaacctcgaagcctgccacaccatcgcccgcgaattgaggctacgcaacctcggcggcatcatcatcatcgacttcatcgatatggcacaggaaagccaccgcgaagccgtgttgcaggagcttgccaaagccctcgccttcgaccgtacccgcgttaccctgcacggttttaccagcctagggctggtcgagctgacgcgcaaacgctcgcgcgaaaacttaaaccaagtcctctgcgaaccctgcccttcctgccaaggcagaggccgtctgaaaacgccgcaaaccgtatgctacgaaatccagcgcgaaatcgtccgcgaagcgcgccgttacgatgccgaaagtttccgcatcctcgccgcccccaacgtcatcgatttgtttttggacgaagaatcgcaatccttggcaatgctgatagatttcatcggcaaaccgatttctctggcggtcgaaaccgcttacacgcaggaacaatacgacatcgttttgatgtaa

SEQ ID NO: 52679 - DNA, 630 bp, Neisseria meningitidis
atgaacctttttcaaaacgccaaattcttcacgacgatcaaccaccttaaagacctgcccgacacccctctcgaaattgcctttgtcggcaggagcaatgccggaaaatccagtgccatcaataccctgaccaaccatgtccgtcttgcctacgtttcaaaaacacccggacggacgcagcatatcaacttcttcgagctgcagaacggcaattttatggtcgatttgcccggctacggttatgcccaagtccccgaagcagtacgcgcacattgggtcaatctgctcggcgactatctgcaacagcgcaaacagcttatcgggctggttttgattatggatgcccgccatcctttaaaagaactcgacatccgtatgctggattttttccacacgaccggcagaccggttcacatcctgctgtcaaaagccgacaaattatccaaaaacgaacagataaaaaccctgtcccaagtcaaaaaactgctcaaaccttattccgacaggcaaaacatcagcgtacagctgttttccagcctgaaaaaacaaggtattgacgaggccaaccgaactgtcggaagctggttggacgcagcagatgccgccgcttcctctccagaggaaaactga

SEQ ID NO: 52680 - DNA, 171 bp, Neisseria meningitidis
ttgcgcatcgccaaatcgccggtcgcaccgaacaacaccaaatcaaaatttgtttgtgtactcatcgtattatctcgtcaggaaagaatttttcgatgccgtctgaaacctgtttcccccatcacgctgcatcgcaatatcggaaacaaaggcaggcggcataatgagtag

SEQ ID NO: 52681 - DNA, 189 bp, Neisseria meningitidis; identical to SEQ ID NO: 43856

SEQ ID NO: 52682 - DNA, 822 bp, Neisseria meningitidis; identical to SEQ ID NO: 50445

SEQ ID NO: 52683 - DNA, 1035 bp, Neisseria meningitidis; identical to SEQ ID NO: 42242

SEQ ID NO: 52684 - DNA, 747 bp, Neisseria meningitidis
atgaaaagcagcacgcaggccgttttggaacacaccgccattcccaagcatatcgccgtgattatggacggcaacggccgttgggcgaaaaaacgtttcctcccgcgcataatgggacacaaacgcggtttggacgcattggaaaatatggtgaagcattgcgccaaactgggtgtgcaatatctgaccgtgtttgccttttcaaccgaaaactggcgccgccccgaagacgaagtttcgttcctgatggggctgtttttacaggctttgcaaaaacaggtacgccgcctgcacgaaaacaatatgcgcctgaagatattgggcagccgcgaacgcttcaaccggcagattctgcaaggcatcgaagaggcggaagcgttgacggcaaacaataccggcctgaccctgagcattgccgccgattacggcggccgctgggatattttgcaggcggcaaacaaactgattgccgaaggcgtatccgagattacggaagacacgctggcgaaacacttgatgctgggcgatgcaccggaaccggatttgttcatccgcaccggcggcgaaacgcgcatcagcaatttcctgctctggcagatggcatatgcagaactgtatttcaccgatattttgtggcccgattttgacggcaaggctttggacgatgccgtcgcttcgttccaaaaacgcgaacggcggttcggacgcacctccgagcaactgcctatcgaacagcaaaggaactga

SEQ ID NO: 52685 - DNA, 450 bp, Neisseria meningitidis; identical to SEQ ID NO: 42419

SEQ ID NO: 52686 - DNA, 2019 bp, Neisseria meningitidis; identical to SEQ ID NO: 42913

SEQ ID NO: 52687 - DNA, 426 bp, Neisseria meningitidis; identical to SEQ ID NO: 43259

SEQ ID NO: 52688 - DNA, 924 bp, Neisseria meningitidis
atggatattgaaaccttccttgcaggggaacgcgccgccggcggataccgttgcggcttcgtagcgattgtcggccgtccgaacgtgggcaaatcaacgctgatgaaccatctcatcggtcagaaaatcagtattaccagcaaaaaggcgcagacgacgcgcaaccgcgtaacggggatttataccgacgataccgcgcagttcgtgtttgtcgatacgcccggctttcaaaccgaccaccgcaacgcgctcaacgacaggctgaatcaaaatgttaccgaggcgctcggcggcgtggatgtggtggttttcgtcgtggaggcgatgcgctttaccgatgccgaccgcgtcgtgttgaaacaactgcccaagcacacgccggtcattttagtggtcaacaaaatcgacaaggacaaggcgaaagaccgttacgcgctggaggcgtttgttgcccaagtgcgcgccgaatttgaatttgcggcggcggaggcggtcagcgcgaaacacggattgcggattgccaacctgttggagctgattaagccgtatctgcccgaaagcgtgccgatgtatcccgaagatatggttacggacaaatcggcgcgttttttggcgatggaaatcgtgcgtgaaaaattgttccgctatttgggcgaggaattgccttatgcgatgaacgtcgaagtggagcagtttgaagaggaagacggtttgaaccgcatctatatcgccgttttggtcgataaggaaagccaaaaggcaattttaatcggtaaaggcggagaacgtttgaagaaaatttccaccgaagcgcggttggatatggaaaaactgtttgataccaaagtatttttgaaggtctgggtcaaagtcaaatccggttgggcggacgacatccgcttcctgcgcgagctgggtttgtag

SEQ ID NO: 52689 - DNA, 1986 bp, Neisseria meningitidis; identical to SEQ ID NO: 43245

SEQ ID NO: 52690 - DNA, 855 bp, Neisseria meningitidis; identical to SEQ ID NO: 42323

SEQ ID NO: 52691 - DNA, 1428 bp, Neisseria meningitidis
atgtttttctccgccctgaaatcctttctttctcgatacattactgtatggcgcaatgtttgggcggtgcgcgaccagttgaaaccgcccaaacgcacggcggaagaacaggcgtttttgcccgcgcatttggaactgaccgatacgccggtctctgccgctccgaaatgggcggcgcgttttattatggcgtttgcgcttttggctttgttgtggtcctggttcggcaaaatcgatattgtggcggcggcttcgggcaaaacggtgtcgggcgggcgcagcaaaaccatccagccgctggaaacggcggtggttaaggcggtacatgtgcgcgacgggcagcatgtgaaacagggagaaacgctggcggaactggaggctgtgggaacagacagcgatgtggtgcagtcggagcaggctttgcaggctgcccaattgtccaaactgcgttatgaagcggtattggcggcattggaaagccgtaccgtgccgcatatcgatatggcgcaagcacggtctttaggtctctccgatgccgatgtgcaatcggcgcaggtgttggcgcagcaccagtatcaggcatgggcggcgcaggatgcgcaattgcagtcggctttgcgcggccatcaggcggaattgcagtcggccaaggcgcaggagcagaagctggtttcggtgggggcgatcgagcagcagaaaacagcagactaccgccgtttgcgggccgacaattttatttcggaacatgcgtttttggagcagcagagcaaatcggtcagcaattggaacgatttggaaagtacgcgcggtcagatgaggcagattcaggcggccattgcacaggcggagcagaatcgggtgctgaatacgcagaacctgaaacgcgatacgctggatgcgctgcgccaggcaaacgaacagattgaccaataccgcggccaaacggataaggcaaagcagcggcagcagctgatgacaatacagtcgcctgcggacggcacggtgcaggaattggctacctatacggtgggcggtgtggtgcaggctgcccaaaaaatgatggtgattgcgcccgatgacgacaaaatggacgtggaagttttggtattgaacaaagacatcggttttgtggaacagggacaggatgcggtggtgaagattgagagctttccctatacgcgctacggttatctgacgggcaaggtgaaaagtgtcagccatgatgcggtaagccacgaacagttgggcttggtttatacggcggtggtgtcgctggacaaacataccttgaatattgacggcaaagcagtgaatctgacggcgggcatgaatgtcacggcggagattaaaacgggtaaacggcgggtgctggattatctgttaagcccgctgcaaaccaaattggacgaaagctttagggagcgatag

SEQ ID NO: 52692 - DNA, 2028 bp, Neisseria meningitidis; identical to SEQ ID NO: 43656

SEQ ID NO: 52693 - DNA, 987 bp, Neisseria meningitidis; identical to SEQ ID NO: 38696

SEQ ID NO: 52694 - DNA, 405 bp, Neisseria meningitidis; identical to SEQ ID NO: 42218

SEQ ID NO: 52695 - DNA, 399 bp, Neisseria meningitidis; identical to SEQ ID NO: 41900

SEQ ID NO: 52696 - DNA, 2151 bp, Neisseria meningitidis
atgaaaaccccactcctcaagcctctgctcattacctcgcttcccgttttcgccagtgtttttaccgccgcctccatcgtctggcagctaggcgaacccaagctcgccatgcccttcgtactcggcatcatcgccggcggccttgtcgatttggacaaccgcctgaccggacggctgaaaaacatcatcaccaccgtcgccctgttcaccctctcctcgctcacggcacaaagcaccctcggcacagggctgcccttcatcctcgccatgaccctgatgaccttcggcttcaccattttaggcgcggtcgggctcaaataccgcaccttcgccttcggtgcactcgccgtcgccacctacaccacacttacctacacccccgaaacctactggctgaccaaccccttcatgattttatgcggcaccgtactgtacagcaccgccatcctcctgttccaaatcgtcctgccccaccgccccgtccaagaaagcgtcgccaacgcctacgacgcactcggcggctacctcgaagccaaagccgacttcttcgaccccgatgaggcagcctggataggcaaccgccacatcgacctcgccatgagcaacaccggcgtcatcaccgccttcaaccaatgccgttccgccctgttttaccgccttcgcggcaaacaccgccacccgcgcaccgccaaaatgctgcgttactactttgccgcccaagacatacacgaacgcatcagctccgcccacgtcgattatcaggaaatgtccgaaaaattcaaaaacaccgacatcatcttccgcatccaccgcctgctcgaaatgcagggacaagcctgccgcaacaccgcccaagccctgcgcgcaagcaaagactacgtttacagcaaacgcctcggccgcgccatcgaaggctgccgccaatcgctgcgcctcctttcagacagcaacgacagtcccgacatccgccacctgcgccgccttctcgacaacctcggcagcgtcgaccagcagttccgccaactccagcacaacggcctgcaggcagaaaacgaccgcatgggcgacacccgcatcgccgccctcgaaaccagcagcctcaaaaacacctggcaggcaatccgtccgcagctaaacctcgaatcaggcgtattccgccatgccgtccgcctgtccctcgtcgttgccgccgcctgcaccatcgtcgaagccctcaacctcaacctcggctactggatactactgaccgcccttttcgtctgccaacccaactacaccgccaccaaaagccgcgtccgccagcgcatcgccggcaccgtactcggcgtaatcgtcggctcgctcgtcccctacttcaccccgtctgtcgaaaccaaactctggattgtcatcgccagtaccaccctctttttcatgacccgcacctacaaatacagtttctccaccttcttcattaccattcaagccctgaccagcctctccctcgcaggtttggacgtatacgccgccatgcccgtacgcatcatcgacaccattatcggcgcatcccttgcctgggcggcagtcagctacctgtggccagactggaaatacctcacgctcgaacgcaccgccgcccttgccgtatgcagcaacggtgcctatctcgaaaaaatcaccgaacgcctcaaaagcggcgaaaccggcgacgacgtcgaataccgcgccacccgccgccgcgcccacgaacacaccgccgccctcagcagcaccctttccgacatgagcagcgaacccgcaaaattcgccgacagcctgcaacccggctttaccctgctcaaaaccggctacgccctgaccggctacatctccgccctcggcgcataccgcagcgaaatgcacgaagaatgcagccccgactttaccgcacagttccacctcgccgccgaacacaccgcccacatcttccaacacctgcccgaaaccgaacccgacgactttcagacagcactggatacactgcgcggcgaactcgacaccctccgcacccacagcagcggaacacaaagccacatcctcctccaacagctccaactcatcgcccgacagctcgaaccctactaccgcgcctaccgccaaattccgcacaggcagccccaaaatgcagcctga

SEQ ID NO: 52697 - DNA, 1233 bp, Neisseria meningitidis
atgccttctgcccattatcctgaaatgagcgaaaaactgatggcggttttgatggcgatgctggttacgctgatgccgttttccatcgatgcctacctgcccgcgattcccgaaatggcgcaatcgctgaacgcggatgttcaccgcatcgaacagagtttgagtttgtttatgttcggcacggcgttcggacaggtggtcggcggttcggtgtccgacatcaaagggcgcaaacccgtcgccctgaccggtttgattgtatattgccttgccgttgccgccatcgtatttgtttcgagtgccgaacagctcctcaacctgcgcgtcgtgcaggcattcggtgcgggcatgactgtggtcatcgtcggcgcaatggtgcgcgattattattccggacgcaaagccgcccagatgtttgcccttatcggcatcattttgatggttgtgccgctggtcgcacccatggtcggcgcattgttgcagggcttgggtggctggcaggcgatttttgtttttctggcggcgtattcgctggtgctgctcggtttggtacagtatttcctgcccaagcccgccgtcggcggcaaaatcggacgggacgtgttcgggctggtggcggggcggttcaagcgcgtattgaaaacccgtgctgcgatgggttatctgttttttcaggcattcagcttcggttcgatgttcgcctttctgaccgaatcttccttcgtgtaccagcagctctaccgtgttacgcctcatcaatacgcttgggcgtttgcactcaacatcatcacgatgatgtttttcaaccgcgttaccgcgtggcggctcaaaaccggcgtgcatccgcaaagcatcctgctgtgggggattgtcgtccagtttgccgccaacctgtcccaactcgccgccgtgctgtttttcgggttgcccccgttttggctgctggtcgcgtgcgtgatgttttccgtcggtacgcagggcttggtcggtgcaaacacgcaggcgtgttttatgtcctatttcaaagaagagggcggcagcgcaaacgccgtattgggtgtattccaatctttaatcggcgcgggggtgggtatggcggcgaccttcttgcacgacggttcggcaaccgtgatggcggcaacgatgaccgcgtccacctcttgcggcattgcgcttctgtggctctgctcgcatcgtgcgtggaaagaaaacgggcaaagcgaatacctttaa

SEQ ID NO: 52698 - DNA, 510 bp, Neisseria meningitidis; identical to SEQ ID NO: 36289

SEQ ID NO: 52699 - DNA, 2028 bp, Neisseria meningitidis
atggaagttatccaatacccaaattcccccttcaaactccaccaacccttcccgcccgcaggcgaccagcccaccgccattgcaggcctgctcgaagggctttcagacggccttgcctatcaaaccctgctcggcgtaaccggttcgggcaaaacctacaccatggcgaacgtcatcgcccaaagcggccgccccgccatcatcatggcgcacaacaaaacccttgccgcccagctttacgccgaaatgcgcgaatttttccccgaaaacgcagtggaatatttcgtctcctactacgactattaccagcccgaagcctatgtgcccagccgcgatttgttcatcgaaaaagacagcgcgatcaacgaacacatcgagcagatgcgcctttccgccaccaaaaacctaatgacgcgcaacgacgtgattatcgtcgccaccgtgtccgccatttacggtatcggcgacccgaccgagtatcaacaaatggtgttgtccgtcaaagaaggcgataccatcgagcagcgcgacatcatcgccacgctcgtttccatgcaatacgaacgcggcgatttggacttcaaacgcggcagcttccgcgtgcgcggcgacgtgattgacgtgtaccccgccgaaagctccgaaaacgccttacgcatcagcctgtttgatgacgaaatcgaccgcctcgatatgttcgacccgctttcaggcagccttatccagcgcgtcggccgctacaccgtcttcccgtccagccactacgttaccccgcgcgacaccgtcttgcgcgcctgcgagtccatcaaagaagaattacgcgaacgcatcgaatttttcgcccgcgaacaacgccccgtcgaacaacaacgcatcgaacagcgcacccgtttcgacctcgaaatgctctacgaaatgggcttctgcaaaggaatcgaaaactactcccgccacttttccggcaaaaaagaaggcgaaccgccgcctacgctgatggactacctgcccgacaacgccatcatgttcatcgacgaaagccacgttaccgtaacccaaatcggcggcatgtacaaaggcgacgcatcgcgcaagcaaaacctcgtcgactacggcttccgcctgccttcagcccgcgacaaccgcccgctcaaattccacgaatttgaaaaagtcatgccgcaaaccatcttcgtttccgctacccccgccaaatacgaagaagaacacgccggacaagtggtcgaacaagtcgtccgccccacagggctggttgatccccaaatcatcatccgccccgttgccacccaagtcgacgacttaatgagcgaaatcaacgaccgcattgaaaaaggcgaacgcgtactcgttactaccctcaccaaacgcatggcggagcaactcaccgactattacagcgaactcggtatcaaagtgcgctacctgcacagcgacatcgacaccgtcgagcgcgttgaaatcattagagatttacggctcggcctgtttgacgtactcgtcggcatcaacctcttacgcgaaggcctcgacatccccgaagtctctctcgtcgccatcctcgacgcagataaagaaggcttcctgcgctcccaccgcagcctgattcaaaccataggccgcgccgcgcgcaacgtgaacggcgtcgccatcctgtacgccgacaaaattaccgactccatgaaagccgctatcgacgaaaccgaacgccgccgtgaaaaacagattaaattcaacgaagaacagggcatcgtgccgcagcagattaaaaaacaggtcaaagacatcatcgacggcgtgtaccacgaagaagacggcagtaaaggccgtctgaaaggtaaaaacaaggttaaagtgggcgagattcacaacgaagaagatgcgattaaagaaatcgccaaactcgaaaaagccatgcagcaggcggctagggatttgcagtttgaagaggcggctgtgttgcgggataggattagggatattaaagagaatttgttgtttggggcggagtga

SEQ ID NO: 52700 - DNA, 372 bp, Neisseria meningitidis; identical to SEQ ID NO: 42721

SEQ ID NO: 52701 - DNA, 699 bp, Neisseria meningitidis
atgagttttgaaatttaccgttacaacccggatgttgatgccaagccttatatgcagcgttacgagttggaattggaaccgaccgacgtgaaacttttggatgctttggtacgcctgaaagcacaagacgataccttgtctttccgccgctcctgccgcgaaggcatttgcggatcggacggtatgaacatcaacggcaaaaacggcttggcgtgtttgaccgatctgcgtggcttgaaacagccagttaaaatccgtcctctgccaggtctgcctgttatccgcgacctgattgtggatatgacccagttcttcaaacaataccattccgtcaaaccttatgttgtcaacgataatccgattgatgcggacaaagagcgtctgcaaactcaggaagagcgtaaagagttggacggtttgtacgagtgtattttgtgcgcctgctgttcgactgcctgcccgtcattttggtggaaccctgataaattcgtcggtccgtccggtttgctgaatgcttaccgtttcattgcggacagccgtgataccatcactaatgagcgtttggataatctgaacgacccataccgtttgttccgttgccacaccattatgaactgcgtagacgtatgtcctaaacacttgaatccgacccgagccatcggtaagattaaagagattatgttgaaacgggccgtttaa

SEQ ID NO: 52702 - DNA, 426 bp, Neisseria meningitidis; identical to SEQ ID NO: 39813

SEQ ID NO: 52703 - DNA, 642 bp, Neisseria meningitidis; identical to SEQ ID NO: 42363

SEQ ID NO: 52704 - DNA, 2304 bp, Neisseria meningitidis; identical to SEQ ID NO: 43552

SEQ ID NO: 52705 - DNA, 1011 bp, Neisseria meningitidis
atgcttccattctttccagaaccctccctttcctatacgcaacaaaaccgtaccgccgttttgctgttgaacctcggcacgcccgacgcgccgaccgcgcaggcggtacgaccttatctgaagtcctttctgaccgaccggcgcgtcgtcgaactgcccaaatggctgtggtatcccattctgcatggtctggtactgacgctccgccccaaaaaaagcgcgcacgcctatgaaaaaatctggtttaaggaaggttcgcccttagaagtttacacagcacgccaagctgccgcgcttgccaaacgtatgcccgacctcatcgtccgccacgccatgacctacggcaatccttcggtggcagacgtattgtcggaactgaaggcgcaaggcgcgggcagactgctggtcatcccgatgtacccgcaatatgccgcttccagcagcggagcggcagtagataaggtgtgcgaacaattactgctgcaacggaaccaaatgagcgtccgcaccgtttcgcgcttttatgacgataccggctacattgatgcgatgaaaaaccacatcctccgatattgggcggaacacgggcgcgggaaaaaactgatgttgagttttcacggcgtaccgcagaagcaccacgacctcggcgacccctatcccgacgagtgccgccacaccgccaaactgcttgccgaagcactggaactgaccgaagaccaatatgtcgtatcgttccaaagccaattcggcagggcaaaatgggttacaccgagcacgcaggatttgttcggcaaactgcccaaacagggggtaaccgagctggacgtattttgcccgggctttttggcagactgtttggaaaccatggaagaaatcgccctgatggggcgggaacagttttatgaagcaggcggcaaaagctaccgctacatcccctgcctcaacgacaaccccgactggatagatgcactcgtcgcacttgccgaagaaaaccttggcagctggcgttga

SEQ ID NO: 52706 - DNA, 372 bp, Neisseria meningitidis; identical to SEQ ID NO: 42581

SEQ ID NO: 52707 - DNA, 669 bp, Neisseria meningitidis
ttgttaatccactatactttatgccgctaccgcaactggctggcgcaagacgacaccctgtccgaattgctcaaactgattaactgccaactgaccgaaaaaggtttaaaaatagagaaagcatccgccgccgtcgttgacgccaccattattcagaccgccggcagcaaacagcgccaggccatagaagttgacgaagaaggacaaatcagcagccaaaccacaccgagtaaggacagcgatgcccgttggatcaagaaaaacggcctctacaaactcggttacaaacaacatacccgtaccgatgcggaaggctatatcgagaaactgcacatcacccccgccaatgcccatgagtgcaaacacctgtcgccgttgttggaaggtctgcccaaaggtacgaccgtctatgccgacaaaggctatgacagtgcggaaaaccggcaacatctgaaagaacatcggctgctggacggcattatgcgcaaagcctgccgcaaccgtccgctgacggaaacgcaaaccaaacgcaaccggtatttgtcgaagacccgttatgtggttgaacaaagcttcggtacgctgcaccgtaaattccgctacgctcgggcagcctatttcggactgatttgcgcccgctgccgcctaaaaggcagcccggatgcctga

SEQ ID NO: 52708 - DNA, 897 bp, Neisseria meningitidis; identical to SEQ ID NO: 42796

SEQ ID NO: 52709 - DNA, 2082 bp, Neisseria meningitidis; identical to SEQ ID NO: 43042

SEQ ID NO: 52710 - DNA, 798 bp, Neisseria meningitidis
atggataccgcacaaaaacaacgctgggcaataaccctatcctatgacggcagccgcttttacggctggcagaaacaggctgacggcgtaccgaccgttcaggcggcattggaaaccgcgctcgcccaaatagcaggggaagcggtttccaccaccgttgccggcaggaccgacaccggcgtgcatgccaccgcccaagtcgtccacttcgacacaactgccgcccgtccccaacaggcatgggtgcgcggcgtaaatgcccacctgcccgaaggcattgccgttttgcacgcccgacaggtcgcccccgaatttcatgcacgatttgacgcatacggacggcactaccgctacctgctcgaatccgcccccgtccgttcccccctgctcaaaaacagggcaggctggacacacctcaaactcgacatcgggcagatgcggcaggctgccgccttattggtcggcgaacaagacttctccagcttccgcgccgccgaatgccaagcaaaatcccccgtcaaaaccatctaccgcgccgaccttacccaaagctcaggactcgtccgcctcgatttgcacggcaacgcctttttgcaccacatggtacgcaacatcatgggcgcgctcgtttatgtcggcagcggcagactcagcgtcgaaggcttcgccgcactgattcaagaacgcagccgcctcaaagccccgccgaccttcatgcccgacggactttacctgaccggcgtcgactatcccgaggcatacggcatcatccgcccccaaatccccgaatggctttaa

SEQ ID NO: 52711 - DNA, 975 bp, Neisseria meningitidis
atggacacactgacccgattcctccccgaacacctgcaacaaaaccagctgcccgaagcactcggcggcgttttactgtccgttgtttccgcctgcaccgaaatcaacgccaaagtccgcctcggcgcactggccggcgtattgggtatggcgggcacgggcaatattcagggcgaagaccaaaaaaaactggatgttatcgccaacaacatcatgattgacacactcaaagccaattctgccgttgccgggctggcgagcgaggaagaagacactttcgtaaatgccggtgaaaacggacgctatctcgtcctattcgaccctttagacggatcgtccaatattgatgtcaacatttccgtcggtacgattttctccatccttgaaaaacccgaaggcgcattggcaaccgaatcattccttcaaacgggcagacagcagcttgccgctggttacgttctttacgggcctcaaacccagctcgtattcacattcggacatggcgtatatatgttcacgctcaatgccgaaaacgaatttgtgctgaccaaagaaaacccgaaagtacccgaaagtaccaaagaatttgccatcaatatgtccaaccgccgccactggctgccccccgtccaacaatacatcgacgagctcttggcgggcgaaaccggtacgcgcggcaaaaactacaatatgcgctgggtagccagtatggttgccgaaatccaccgcatcctgatgcgcggcggcgtgttcatgtatccgcaagacaaacgcgaccccgctaaacccggcaaactgcgcctgatgtacgaagccaaccctatgagcctgatactcgaacaggcgggcgcatcggcaagcaacgcatatcaagccatgctcgacatacagcccgaaaacctgcaccaacgcgtcgccgtcttcatgggcagcagcgaagaagtcgcctatctcgaccgcctgcacgcaaaatag

SEQ ID NO: 52712 - DNA, 957 bp, Neisseria meningitidis
atgattttaacaccgccggacacgccctttttcctccgcaacggcaatgccgacacgattgccgccaaattcctgcaacgccccgcacccacataccgccgcgagctgcttcccgacagcacgggtaaaaccaaagtcgcctacgatttttcagacggcatttcgcccgatgcgccgctggtcgtgctgtttcacggtttggaaggaagcagccgcagccattacgcggtcgaactgatgctcgcggtacgcagccgcggttggcacggcgcagtcgtccatttccgcagctgcggcggcattgccaacaccgctccggtgttctaccacttgggcgataccgccgaaatcgcctttactttggacacgcttgccgcgcgttaccgtgaaatatacgccgtcggcgtatcgctgggcggcaacgcgctggcaaaatatttgggcgaacggggcgaaaacgcgctgccgcaagccgctgccgccgtatccgcccccgtcgatgcagaggcggcaggcagacgcttcgacagcggcatcacgcggctgctctacacgcgctacttcctccgcaccctgatacccaaagcacggtcgctccacggttttcagacggcatttgccgcagggtgcaaaacactgggcgagtttgacgaccgtttcaccgcaccgctgcacggctttgccgatcggcacgactactaccgccaaacttcctgcaaaccgctgctcaaacacgttgccaaaccgctgctcctgctcaatgccgtcaacgaccccttcctgccgcccgaagccctgccccgcgcagacgaagtatccgaagccgttaccctgttccagccggcatatggtggtcatgtcggctttgtcagcagcaccggcggcaggctgcacctgcaatggctgccgcagaccgtcctgtcctatttcgacagcttccgcacaaacaggcgttaa

SEQ ID NO: 52713 - DNA, 417 bp, Neisseria meningitidis; identical to SEQ ID NO: 42505

SEQ ID NO: 52714 - DNA, 819 bp, Neisseria meningitidis
atgcttacctcctccgatccgatagaaatattcgccgaaagcacgatacaccccaccaacacccaagccattacaggcggtctgattctctcctcacagtctgccctggtcgtcaacaacaaaaccggacagatactgtatcagaaaaacgccgacaggattatgcccatcgcctccatttccaaactgatgagcgcgatggtcgttttggatgcaaacttggacatgaacgaaaccgttaccatcacgcccgacgaaatcgaccgcctcaaagggaccggcagccgtcttgccataggtacggcacttacacgcaaagaactgctgcacctgagcctgatgagcagcgaaaaccgcgccacccatgcattgggcagaacctaccccggcggcatgggcgcatttgtcgccgccatgaaccgtaaagcccaaagcctcggtatgtacggcagccgcttttacgaaccgaccggactcaacttccaaaacgtttctaccgccaaagacctgagccttatggtcaacgccgccgcccaatatccgcaaatccgcaccaactcgacttccaactacgcctcggtacagaccaaaaacgggcagcagaactacaaaaactccaatgccctggtcagagaaggcatgtggaacatcgaattgcagaaaaccggctacatacgcgaagcaggcaggtctatggttgtcaaagccaacattcaaaatcaacccgttaccatcgtattgctgaactcgcccacatccgccacacgcgtcaacgacgcccgcaaaatcgaatcgtggatgctgcagcaacgctcctga

SEQ ID NO: 52715 - DNA, 126 bp, Neisseria meningitidis; identical to SEQ ID NO: 42441

SEQ ID NO: 52716 - DNA, 402 bp, Neisseria meningitidis; identical to SEQ ID NO: 42182

SEQ ID NO: 52717 - DNA, 168 bp, Neisseria meningitidis; identical to SEQ ID NO: 42764

SEQ ID NO: 52718 - DNA, 1506 bp, Neisseria meningitidis
atgtatgcactttcggaaaaatataacgataatggatttaaggcatacaaagttttaggtgagggaggaggaattcatacagaatataattacaaatttgataaaagtttgaatttgaatgtattagaaagttcaacaggcgcacgctctcttgaaaaagtccccgttaaagtaactgcatcagtttcccgcgccgccgtcttgtcaggagtcggcaaacttgcccgcttaggcgcgaaattaagcacaagggcagttccttatgtcggaacagcccttttagcccatgacgtatacgaaactttcaaagaagacatacaggcacaaggctaccaatacgaccccgaaaccgacaaatttgtaaaaggctacgaatatagtaattgcctttggtacgaagacaaaagacgtattaatagaacctatggctgctacggcgttgacagttcgattatgcgccttatgtccgatgacagcagattccccgaagtcaaagaattgatggaaagccaaatgtataggctggcacgtccgttttggaattggcataaagaagaactgaataaattaagttctttggattggaataattttgttttaaatcgttgcacatttaattggaatggcggagattgtttggtcaataaaggtgatgatttcagaaatggggctgatttttcccttattcgcaattcaaaatacaaagaagaaatggatgccaaaaagctggaagagattttatcgttgaaagtcgatgccaatcccgacaaatacataaaggcaaccggttatcccggttattccgaaaaagtagaagtcgcacccggaacaaaagtgaatatgggtcccgtcacggacaggaacgggaatcccgttcaggttgtcgcaacattcggcagggattcgcaaggcaacaccacggtggatgttcaagtaatcccgcgtcccgacttgacccccggaagcgcggaagcaccgaacgcacagccgctgcccgaagtatcgcccgccgaaaaccccgcaaacaacccgaaccccaatgagaaccccggcacgagccccaatcccgaacccgaccccgatttgaatcccgatgcaaatcccgatacggacggacagcccggcacaagacccgattcccccgccgttccggaccgcccaaacggtaggcatcgcaaagaaaggaaagaaggcgaagacggcgggcttttgtgcgattattttccggaaatcctagcctgtcaggagatgggcaaaccttcagacggcatgtttcacgatataagcataccgcaggttatagacgataaaacatggtcttcacataactttttaccgtctaacggcgtatgtccgcagccgaaaacctttcatgttttcggtaggcaatatcaggcaagctatgagccgttatgcgtgtttgccgaaaaaatccgttttgccgtactgctcgcctttatcattatgtcggcttttgtcgttttcggttcgttgaaggggaaataa

SEQ ID NO: 52719 - DNA, 993 bp, Neisseria meningitidis
atggaaaatgtaaaccgcatcgttgcagaaggcattgccgcagtagaagctgcgcaagacttcaacgctctagaacaaatcaaagcccgttatcttggtaaaaccggcgagttgaccggacttctgaaaactttggggcaaatgtcgcctgaagagcgcaaaaccataggtgcgcatatcaatgaatgcaaaaaccggtttcagacggcttttaatgccaaacgcgaagccctcaacgaagtcaagctgcaagcccgacttgccgccgaagccctcgatattaccctgcccggacgcgctcaggaaggcggcagcctgcatcccgtaaccctgaccttgcaacgtgtggtcgaactctttcacggaatgggtttcgaagtggcggacgggcctgaaatcgaagacgattttcacaatttccaagccctgaacatccctgcaaaccatcctgcccgtgcgatgcaggatacgttttacgttgaaaacggcgatgttttgcgtacgcacacttccccgattcaaatccgctatatgctcgataaaaaagagccgcccatccgcattatcgcccccggccgcgtttaccgtgtggacagcgatgccacgcactcgcctatgttccatcaggcggaaggtttgtgggtagaagagggcgtaacttttgccgacttaaaagcagtgttcacggattttatccgtcgcttctttgaacgcgatgatttgcaagtacgtttccgcccgtctttcttcccgttcaccgaaccgtctgccgaaatcgacattatgggcgaaaacggcaaatggctggaagtaggcggttgcggtatggtacatcctaacgtgttgaaaaacgtcaatatcgaccctgaaaaatataccggtttcgcctttggtattggtctcgaccgcttcgctatgctgcgttacaacgtgaacgacttgcgcctgttcttcgataatgatttgaactttttgaagcagtttgcgaaatga

SEQ ID NO: 52720 - DNA, 384 bp, Neisseria meningitidis; identical to SEQ ID NO: 40323

SEQ ID NO: 52721 - DNA, 630 bp, Neisseria meningitidis; identical to SEQ ID NO: 42914

SEQ ID NO: 52722 - DNA, 2178 bp, Neisseria meningitidis; identical to SEQ ID NO: 43176

SEQ ID NO: 52723 - DNA, 1923 bp, Neisseria meningitidis; identical to SEQ ID NO: 43536

SEQ ID NO: 52724 - DNA, 315 bp, Neisseria meningitidis
atgaataaaccgtttatcacgcaggcgcagttggcactttataaatatcagccgtcaagcaagtattatggtaaaacaatggcatatactttcgctagtgagcttttggattattcaaaagttaataaatttataattcatgaagaaatccaatgttttttaaatagaaggatttctaataatatttggaaaatttatttttctgatgagtctgttgcgtatataaaaattttagaattacaggatgattatagtcgtggaattgaaattaaaacgtttgattttaatcctaatgttggggatgttttcggttaa

SEQ ID NO: 52725 - DNA, 1377 bp, Neisseria meningitidis; identical to SEQ ID NO: 36747

SEQ ID NO: 52726 - DNA, 1059 bp, Neisseria meningitidis; identical to SEQ ID NO: 44007

SEQ ID NO: 52727 - DNA, 1338 bp, Neisseria meningitidis; identical to SEQ ID NO: 42915

SEQ ID NO: 52728 - DNA, 3420 bp, Neisseria meningitidis
atgcaaaatatgaaaaaccaagtacgcggatcaggcatggatgcccgatccaatccggccaatgtttcagacggcctgcaaaacagttcgggtcatatcggtaccaacacgcgttaccgcctgaccaaactcggcgaacagatagcgcgcctacccatcgacccgaaaatcgcgcgcattttgctggcggcgaagaaacacgactgcatggcggaaatattggtgattgcgtccgcgctgtcgattcaagacccgcgcgagcggccgctagaagcgcgcgatgcctcagccaaggcgcacgagcgttttaccgacaagcagtccgatttccttgcctatctgaacatttgggacagcttccagcgcgaacgcgataaaggcttgtccaacaagcagctggtgcagtggtgccgccaatatttcctgtcgcacctgcggatgcgcgagtggcgcgagctgcaccaccagcttgcccaaaccgcgattgaaatgggtttaaccaccaaggaagccgctttcagacgacctcccgaagtcaggcagctcacgtcgtctgaaaatgcgggtgaccaagacctatctgctaaactcaaacaaaaacaactggataaaaagcaacaccgcgcccaaatccgcgccgccaaagaagcgggctacgaacaaatccaccgcgccctgctcactggccttatcgccaacgtcggcatgaaatcgcccgacggtaacgactacaccggcgcgcgcggcagccgcttccaccttttccccgcctccgccctgttcaaagccaaacccaaatgggtgatggcggcagaattggttgaaaccacgcgcctttacgcgcgcgacgtcgccgttatccagcccgaatggatagagcaggaagcgccgcacctcgtccgctatcattatttcgagccgcattgggaacaaaaacgcggcgaagtcgtcgccagcgaacgcgtgacgctttacggtctgaccgtattgccgcgccgccccgtgtcttacggcaaagttgcccccgaagaagcgcgcgaaatctttatccgcagcgcgttggtggcgcaggaatgcgatttgaaagcggatttttttgtccacaacaaaaagctgattaaagaaattaccgaactcgaacacaaatcgcgcaagcaagacgtgctggtcgatgacgaagccctgtttgcgttttataacgaacgactgcccgaaatggcttggaaagacgcgcaaggcagcgtttggggaagtgaagattccgtacggattattgaatctgacaaagccgagaggtcgtctgaaaatgagcgcaacgagtttcgtaaaaacaagcgtaatgggtctcgccaaaatgaaaatcacggcaacaccgtaggttgggttgaaaacccaacatcagccgcaactgcaaaaactgttgggtttgacaatccaacctacgctgcccaacaaaccaccccctcccccgtgggggagggtcggggagagggcaaaacagttgccgcacaaaccaacttttccgcaaccgcagcaaaccctctccctaaccctctcccgcaggagagggaacagagtgccgcagcttcaacgatttcagacgacctgcgtcctgcaaatctgcagcaaaccgccccctcccccgtgggggagggctggggagagggcaaaacagttgccacacaaaccaacttttccgcaacctcaacaaaccctctcccgcaggagagggaacagagtgcctcagcttcaacgttttcagacgacctgcgtcctgcaaatctgcagcaaccctctccctcccccgtgggggagggctggggagagggcaaaacagttgccacacaaaccaacttttccgcaacctcaacactttcagacgactccaaacccaaaaagcagcctgcaccccaaaaaaaccgtctgaaacccctacccctcgccgacatccgcaccttccaagcctggctcaaaaccgccgagcgcgacaatccgcgcctgctgttcctcagccgcgacgatctgatgcaacacgccgccgcacacattaccgaagaacagttccccaaattctggcaaaccgcagacggcaaattcaaactttcctaccgcttcgagccgcaccatccgctagacggcgtgaccatgaccgtgccgctgaccgtcctcaaccgcctgcacgcgccgtcgctcgaatggctggtgcccggcatgatacgcgaaaaaatccagttgcaaatcaaagcactgcccaagcaaatccgccgcatctgcgtgcccgtgcccgaattcatcacccaatttttaagccaaaaccccgaccgcaacgcccccatcctgccccaactcgcccaagccatcgccaaaaccgcaggcgacatccgcatattcgagcaaatcaaccaagacgaatgggccgcgttcaggctgcccgaacactgctatttcaacctccgcattatcgacgacggcggacaagagcttgccggcggccgcaaactgcacgaattgcaacaacaactcggtcaagctgccgccgttaccttccgtgacaacacccaagaatttgagcgcgacaacgtcaccgcatgggacatcggcaccctgcccgaatccatcaaattcgcacgcggcaaacaacagctcaccggctatctcggcctacaaaaagaaaaagacggccgcatcgccctgcgcctgtttgataccacagaagccgcagagcaggcacaccgtcaaggtgtcatcgaattgatgaagctgcaattaaaagagcaggtaaaggatttgaacaaaggcatccaaggcttcacccaagctgccatgctgctcaaacacatcaacgccgacactctgcgcgacgacctcacccaagccgtctgcgaccgcgcctttatcggcgaagacgagctgccgcgcaacgaaaaagccttcaaagaacaaatcaaacgcgcccgcagccgcctgcccgccgtcaaagaagccctcagccgctacctgcaggaaaccgccgccgtctacgccgaactcaacagcaaactcggcaaacacccattgacccaccttctaagactacgcctgcaaaccctgctcgccgccggcttcgccacccgaaccccgtgggcacaatggccgcgcctccccatctacctcaaagccatgaccctgcgcctcgaaaaatacagcagcaaccccgcccgcgacgcagcccgcgaagccgatatccaagagctggaacaaatgtggcaggaaaaaacagacagcctgattaaacaaggtctccccatttcagacggcctcgccgcgtttaaatggatgattgaagaattgagggtgtcgctgttcgcgcaggaattgaagacaccgtatccggtgtcggtgaagcggctgttgaaagagtgggaaaaaattgaaaaataa

SEQ ID NO: 52729 - DNA, 669 bp, Neisseria meningitidis; identical to SEQ ID NO: 43279

SEQ ID NO: 52730 - DNA, 1356 bp, Neisseria meningitidis; identical to SEQ ID NO: 43735

SEQ ID NO: 52731 - DNA, 630 bp, Neisseria meningitidis
atgagtgaaaccgaaaatcaagccctgacgtttgccaaacgtctgaaggcggataccacggcggttcacgacagcgtggataacctcgttatgtctgtccaaccgtttgtcagcaaagaaaactacatcaaatttttgaaactccaatccgttttccacaaggccgtcgaccacatctataaagatgccgaattaaacaaagccattcccgagctggaatacatggcgcgatacgatgccgtaacgcaagaccttgcagatttgggcgaagaaccttacaaattcgacaaagaattaccgcatgaaaccggcaacaaagcaatcggctggctttattgcgccgaaggatccaatttgggcgcggcgtttttgttcaaacacgcgcaaaaactcgattacaacggcgaacacggtgcgcgccacctcgcaccgcatcccgacgggcgcggcaaacactggcgcgccttcgtcgagcatctgaacgctttgaacctgactcccgaagccgaagcggaagccatccaaggcgcgcgcgaagcctttgcattctacaaagtcgtgttgcgcgaaaccttcggcttggcagccgatgccgaagcaccggaaggaatgatgccgcacaggcactaa

SEQ ID NO: 52732 - DNA, 1929 bp, Neisseria meningitidis; identical to SEQ ID NO: 43576

SEQ ID NO: 52733 - DNA, 624 bp, Neisseria meningitidis; identical to SEQ ID NO: 43144

SEQ ID NO: 52734 - DNA, 1080 bp, Neisseria meningitidis
atgaacatacaaaacatccgcaccctcctcgacaccgtcgccgttccgaatacggcacgcacgctcggcggcgaaaaggccgtccgttcggtcgaacagcgttcagacggcatccatatcgccctgcatttcggcttccccgtcgcgcacattgcctcagaaacagccgaccgcatacaggaaatcctgatgcccgaaacaggcgacacacacatccatctgtccatggacactgaaatcggcacacacaaagtccagcccggcgttaccaccatcaaaggcgtgaaaaacatcatcgccgtcgcatcgggaaaaggcggcgtgggcaaatcgacaaccaccgccaaccttgccgccgcaatggcgcgcatgggcgcgcgcgtcggcgtgctcgatgccgacctttacggcccgagccaaccgaccatgttgggtgtggacgaccgcaaacccgatcagaaaaaccaaaaactcattcccgtcgaatcttcagacggcatacaggtcatgtctatcggctttctcgtcgataccgaccaagccgtcgtctggcgcgggccgatggtcagccaagccttgcagcagctgatgttccaaagcgagtgggacgaagtggactacctgtttatcgacctgccccccggcacgggcgacatccagctcacgctgtcccagcgcatccccgtaaccggttccgtcatcgtaaccacgccgcaggacatcgccctgatagacgcgcgcaaagccgtggatatgttccgcaaagtcaacattcccattttgggcgtattggaaaatatgtccgtccacatctgcaccaactgcggacacagcgaagcactgttcggcacggacggcggcaaagatttcgccgcacgcctcaacgtccccctgctcggacagcttcccctaagcctgcccgtgcgcgaagccatggacggcggcacaccggcgcaactgttcgacgaacaccccgccatcgcccgaatctacaccgatgccgcattccaaatcgccctgagcattgccgacaaaggcaaagacttcagcagccgcttccccaaaatcgtcgtcgaataa

SEQ ID NO: 52735 - DNA, 1863 bp, Neisseria meningitidis
atggctcttttgcagatttcagaaccgggtatgtccgccgccccgcaccggcaccgtttggcggcaggcatcgatttgggtacgaccaacagcttggtcgccaccgtccgcagcggcagtgccgcctgcctgcccgatgccgaagggcgcgttaccctgccttccgtcgtccgctatctggaaaacggcggcattgaagtcggcaaaaccgccctgtccgcccaaaaaaccgacccgctgaacaccgtcagctccgccaaacgccttatcgggcggacgcttgccgatctgcatcaaaatacgcactacctgccttaccgtttcggcgacaatcaacgcgttatcgaactgcatacgcggcagggggtgaaaacgcctgtcgaagtgtcggcggaaatcctcaaaacccttaaatcgcgcgccgaagaaaccttgggcggcgatttggtcggcgtggtgattaccgtccccgcctatttcgacgatgcccaacgccaggccaccaaagatgccgcgcgtctggcgggtttgaacgtattgcgcctgctcaacgaacccaccgccgccgcaatcgcctacgggctggacaacgcctcggaaggcacgtttgtcgtgtacgacttagggggcggcacattcgacgtatccgtattgcaactgaccaaaggactgtttgaagtcaaagccaccggcggcaacagcgcgttgggcggcgacgatttcgaccaccgcctgttctgccgcctgctcgaacaaaacggactctcccaactcaacgaacaagacagccaactcctgctctcgctcgtccgcgccgccaaagaacaattaaccacgcaaaccgaagcgcgcattcaggcgacgctttcagacggcatggcaatcgacacaagcatcagtcgcgccgagttccacaacctgacgcagcatttggtgatgaaaacgctcgaaccggtcacacaggcgttgaaagatgccggtgtcggtaaaaacgaagtcaaaggcgtgattatggtcggcggttcgacccgtatgctgcacgtccaacaggcagtcgccaccttcttcggacaaaccccgctgaacaacctcaaccccgacgaagtcgtcgcgctcggcgccgccatacaggcaaacgtcctcgcaggcaacaaaaccgacggcgaatggctgctgctggacgttacgcccttgtcgctcggtttggaaacctacggcggcttggcggaaaaaatcatcccgcgcaattccaccatccccaccgcgcgcgcgcaggactttaccaccttcaaagacggtcagaccgcgatgacgatacacgtcgtacaaggcgaacgcgaactggttgccgactgccgcagccttgccaaattcaccctgcgcggcattccgcctatggcggcgggtgcggcgcgtatccgcgtaaccttccaaatcgatgcggatgggctgctgtccgtttccgcccaagaacaaagcaccggcgtacaggcgcaaatcgaagtcaaaccctcctacggcttggacgacgacaccatcacccaaatgctcaaagacagcatgagcaatgccgccgaagatatggcggcacgcgcccgtgccgaagccgtagtcgaagccgaaagcctgaccgatgccgtcaacgccgccctcgagttggacagcgatttgctggatgccgaagaattgcaacagattcggcaaggcatcgccgatttgcaaggccgtctgaaagacggaaaagccgaagacatccgtgccgccgccgccaaactcggcagcatcaccgacaatttcgccgccaaacgcatgaaccgcaacatccaacgcgcgctgacaggccagagtgtcgataatatttga

SEQ ID NO: 52736 - DNA, 1149 bp, Neisseria meningitidis; identical to SEQ ID NO: 42267

SEQ ID NO: 52737 - DNA, 684 bp, Neisseria meningitidis; identical to SEQ ID NO: 42211

SEQ ID NO: 52738 - DNA, 366 bp, Neisseria meningitidis; identical to SEQ ID NO: 43248

SEQ ID NO: 52739 - DNA, 423 bp, Neisseria meningitidis; identical to SEQ ID NO: 42719

SEQ ID NO: 52740 - DNA, 648 bp, Neisseria meningitidis; identical to SEQ ID NO: 42354

SEQ ID NO: 52741 - DNA, 927 bp, Neisseria meningitidis; identical to SEQ ID NO: 43931

SEQ ID NO: 52742 - DNA, 621 bp, Neisseria meningitidis
ttgctgggtgtggttccgggtatcggtgaatcgatacaggcctataaagtagcgaaagcggcaaaaaatttacaaggcatgaaaaaagccttggacaaggcagcaaccgttgccactgcacagggctatgtcagcaaaaccaaaatcaaaatcggtcaaattgaattaagggttactgcagcaactgacaaacaattgctgaaagctattggcgaaggaagggacacgacaggtaaaatgaccgagcagttatttgactctgtagctaaacaaaatggcttcagagtgctttcgggcggcaaatacggcggaaataacggttttgatcatgtatggcaggctgccgatggtagtgttgttttgattgtagaaagtaagcagattaggaacggtacggtacagctgaatccgaatggtgcgggtggatatacgcaaatgagtgaggattggattagacaagttttagatcaattacccgatggtagtcccgctaaagctgctgtcttcaaagcaaataagaacggcacattaaaaacagcaatagcaggcgttgatcgtcaaacaggtaaggccgttattcttcctgtcaaagttccttctaaagccaatataaggagataa

SEQ ID NO: 52743 - DNA, 1047 bp, Neisseria meningitidis; identical to SEQ ID NO: 43592

SEQ ID NO: 52744 - DNA, 966 bp, Neisseria meningitidis; identical to SEQ ID NO: 42827

SEQ ID NO: 52745 - DNA, 489 bp, Neisseria meningitidis; identical to SEQ ID NO: 42473

SEQ ID NO: 52746 - DNA, 444 bp, Neisseria meningitidis; identical to SEQ ID NO: 42300

SEQ ID NO: 52747 - DNA, 2379 bp, Neisseria meningitidis; identical to SEQ ID NO: 42502

SEQ ID NO: 52748 - DNA, 738 bp, Neisseria meningitidis; identical to SEQ ID NO: 43006

SEQ ID NO: 52749 - DNA, 870 bp, Neisseria meningitidis; identical to SEQ ID NO: 42113

SEQ ID NO: 52750 - DNA, 441 bp, Neisseria meningitidis; identical to SEQ ID NO: 37247

SEQ ID NO: 52751 - DNA, 777 bp, Neisseria meningitidis
atgaccctcatccacccgaccgccgtcatcgaccccaaagccgaactcgactccggcgtcaaagtcggcgcgtacaccgttatcggccccaacgtccaaatcggcgcgaataccgaaatcggtccgcacgccgtcatcaacggccacaccagcatcggcgaaaacaaccgcattttccaatttgccagcctcggcgaaatcccgcaggacaaaaaataccgcgacgagccgaccaagctgattatcggcaacggcaacaccatccgcgaattcaccacctttaatttaggtacggtaaccggcatcggcgaaacccgtatcggcgacgacaactggattatggcgtactgccacctcgcgcacgactgcgtcatcggcaaccacaccattttcgccaacaacgcctcgcttgccggacacgttaccatcggcgactacgtcgttttgggcggctacacgctggttttccaattctgccgcatcggcgactacgccatgaccgcgtttgccgcaggcgtacacaaagacgtgccgccctactttatggcatcgggctaccgcgccgaaccggcggggctcaacagcgaaggcatgcgccgcaacggttttaccgcagagcagatttccgccgtcaaagacgtgtacaaaaccctctaccatcgcggcattccgtttgaagaagccaaggcagacattctccgccgcgccgaaacccaagccgagcttgccgtattccgagactttttcgcacaatcggcgcgcggcatcatccgctga

SEQ ID NO: 52752 - DNA, 639 bp, Neisseria meningitidis
ttgaccatcgccttatccaaggggcgcatttttgaggagacgctgccgctgcttgccgctgccggcattgttccgactgaagagcctgaaaaatcgcgcaagctgattatcgggacgaaccatgaaaacatccgccttgtcattgtccgcgcaaccgatgtgccgacttatgtccgctacggcgcggcggacttcggcattgcgggcaaagacgtgctgatcgaacacggcggcacggggctttaccggcctttggatttggagattgccaagtgccgcatgatggttgctgtgcgtaaagggtttgattacgaagcagcttcgcaacccggatgccgtctgaagattgccacaaagtatcctgaaatcgcggcatctcattttgccggcaagggtgtccatgtggacattatcaaactgtacggctcgatggaacttgcgccgctggtcggcttgagcgatgcgattgtggacttggtttcgacgggcaacaccttgaaggcaaacggcttggaagcagtcgaacacatcgtcgacatttccagccgcctggtggtcaacaaggctgctttgaaaacgaaatacgcgctgctggagccgattattcaggcgttcggcggcgcagtgaaggcgaagtaa

SEQ ID NO: 52753 - DNA, 159 bp, Neisseria meningitidis; identical to SEQ ID NO: 43766

SEQ ID NO: 52754 - DNA, 1455 bp, Neisseria meningitidis; identical to SEQ ID NO: 43531

SEQ ID NO: 52755 - DNA, 729 bp, Neisseria meningitidis
atgactacttaccgtatcgcacccagcattttatcggcagattttgcacggcttggcgaagaggtggaaagcgtcattgcggcaggtgcagatctgatccattttgacgtgatggacaaccattatgtgccgaacctgaccttcgggcctatggtttgcgcggcgttgaagccttatgcaagcgtgccgatcgatgtgcatctgatggtcgaacccgtggatgacctgattcagtcgtttgccaaagcaggagcatcaatcatcacgttccatcccgaagcgagccgccatattgaccgcagcttgagcctgattcgggacatgggctgtcaggcggggctggtgttgaatccggcaacgcccgtatatctgttggaaaacgtattggacaggctggatatggttttgctgatgtcggtaaaccccgggttcggcggtcagagcttcattccgtatactttggaaaaaatcagacaggttcgtgccatgcttgaccgctatgaagagaaaagcggcagacgtattgccattgaagtggacggcggcatcaaaaccgacaatatcgccgccgccgcccaagccggcgcggatacctttgttgccggttctgcgattttcggcaaaccagactataaggcggtgattgatgcgatgagggcggaactggaaaaaagcggcaggctgaaccttgcgccaatgattgaaatagaaatgccgtctgaaaattag

SEQ ID NO: 52756 - DNA, 651 bp, Neisseria meningitidis
atgatttcggttgaacatgtttccaagcagtatcaaatgcgcggcggtatgcggacggtgttagacgatatcaatttttcgctgcaaaagggtgagaaagttggtattttgggtcgaaacggtgcaggtaaatcgacgctcatccgtttgattagtggtgtcgagccgcctacctcgggcgaaatcaagcgaaccatgagtatttcttggccgctggcgttttctggtgccttccaaggaagcctgaccgggatggataatctgcgttttatctgccggatttataatgtcgatatcgattatgtgaaagcgtttacggaagaattttcggagctggggcaatatttgtatgagccggtgaaacgctattcttcaggtatgaaagcgcgtttggcttttgcgctgtcgttggcggtggagtttgactgttacctgattgacgaagtgattgcagttggtgactcgcgttttgccgataaatgtaagtacgagttgtttgaaaagcgcaaagaccgttccatcatcttggtgtcgcacagccacagcgccatgaagcaatattgcgataatgcgatggtgctggaaaaagggcatatgtaccagtttgaagatatggacaaagcctacgaatattataattcgctgccttaa

SEQ ID NO: 52757 - DNA, 1065 bp, Neisseria meningitidis; identical to SEQ ID NO: 42477

SEQ ID NO: 52758 - DNA, 342 bp, Neisseria meningitidis; identical to SEQ ID NO: 42750

SEQ ID NO: 52759 - DNA, 126 bp, Neisseria meningitidis; identical to SEQ ID NO: 42488

SEQ ID NO: 52760 - DNA, 702 bp, Neisseria meningitidis
atgtctttgaaaacagtagccgttatcggcgcaatggaacaagaaatcgagcttttgcgcgagatgatggaaaatgtcaaagccgtctctttcggcagattttccgcctatgaaggcgaattggcgggaaaacgcatggtgcttgcattgagcggcatcggcaaggtcaacgcggcggttgcaacggcttggattatccgtgaattcgcagcggactgcgtcatcaacaccggcagcgcgggcggtttgggcaagggtttgaaagtcggcgacgtagtcatcggcacggaaaccgcacaccacgatgtcgacgtaaccgcattcggctatgcctggggacaagtgccgcaactgccggcaaggtttgcttcagacggcattttgattgaggcggcaaaacgggcggcgcggacgtttgaaggcgcggcggtagaacaagggctgattgtcagcggcgaccgctttgtccacagcagcgaaggcgtggcggaaatccgcaagcacttccccgaagtcaaagcagtggaaatggaagcggcggcaatcgcccaaacctgtcatcagttggaaacgcctttcgtcatcatccgcgcggtttccgattcggcagatgaaaaagcagacatcagctttgacgagttcttgaaaacggcggcggcaaattccgcaaaaatggtggcagaaatcgtcaaatctttataa

SEQ ID NO: 52761 - DNA, 915 bp, Neisseria meningitidis; identical to SEQ ID NO: 39317

SEQ ID NO: 52762 - DNA, 738 bp, Neisseria meningitidis
atgggcggacagaaaacgcatttcggattcagtacggtcaacgaagatgagaaagccggaaaagtggcggaagtgttccactccgtcgccaaaaactacgacattatgaacgatgtgatgtcggcagggctgcacagggtgtggaagcatttcaccatcaacacggcgcacctgaaaaaaggcgataaagtgttggacattgccggcggtacgggcgatttgtcgcgcggttgggcgaaacgggtcggcaaggaaggcgaggtttggctgaccgatattaattcctctatgctgaccgtcgggcgcgaccgtcttttgaacgaaggcatgattttgcccgtgtcgcttgccgatgcggaaaaactgcctttccctgacaattatttcaacttggtttccgtggcgttcggtttgcggaatatgacgcataaagatgccgcgctgaaagagatgtaccgtgttttgaaacccggcgggacattgctggtattggagttttccaaaatctacaaacctttggaaggcgcgtatgatttctattcgttcaagctgctgccggtcatgggcaaactgattgccaaagatgcggacagctaccagtatctcgccgagtccatccgtatgcaccccgatcaggaaactttgaaacagatgatgttggatgcgggctttgacagcgtggattatcacaatatgagtgcgggcatcgtcgcgctgcataagggcgtgaaattttaa

SEQ ID NO: 52763 - DNA, 774 bp, Neisseria meningitidis; identical to SEQ ID NO: 51816

SEQ ID NO: 52764 - DNA, 594 bp, Neisseria meningitidis; identical to SEQ ID NO: 42358

SEQ ID NO: 52765 - DNA, 366 bp, Neisseria meningitidis; identical to SEQ ID NO: 42810

SEQ ID NO: 52766 - DNA, 336 bp, Neisseria meningitidis; identical to SEQ ID NO: 43247

SEQ ID NO: 52767 - DNA, 1266 bp, Neisseria meningitidis; identical to SEQ ID NO: 43164

SEQ ID NO: 52768 - DNA, 432 bp, Neisseria meningitidis
ttggctttcggtttcggcagcgggctggctccgttcgcgccgggcacattcggcactttggcggcactgcctttggcgtttgtgctgattttgctcggcatagacgggctactgctggcttttttgtgtatcgtgctgtttatgtggggcatacgcatttgcgcttatgcggaacgtgaaacgggtgtcagcgaccacggtgggattgtttgggacgagattgtcgccatgctgtttgtgctggcgtttgtgccgttcaggtggacgtggtggctggcggcatttgtcctattccgtctgtttgacgcgctcaaaccgtctcccgtcggttggtttgacaagaatctgcacggcggtttgggcattatggcggacgatatggcggctgcggtgatgactttgattgtcttgaggattgcaatgctgttttaa

SEQ ID NO: 52769 - DNA, 2163 bp, Neisseria meningitidis
atgaataccccattgttccgtctcagcctgctctcgctcacacttgcggcaggttttgcccacgcggcagaaaataatgccaaggtcgtactggataccgttactgtaaaaggcgaccgccaaggcagcaaaatccgtaccaacatcgttacgctgcaacaaaaagacgaaagcaccgcaaccgatatgcgcgaactcttaaaagaagagccgtccatcgatttcggcggcggcaacggcacgtcccaattcctgacgctgcgcggcatgggtcagaactctgtcgacatcaaggtggacaacgcctattccgacagccaaatcctttaccaccaaggcagatttattgtcgatcccgctttggttaaagtcgtttccgtacaaaaaggcgcgggttccgcctctgccggtatcggcgcgaccaacggcgcgatcatcgccaaaaccgtcgatgcccaagacctgctcaaaggcttggataaaaactggggcgtgcgcctcaacagcggctttgccagcaacgaaggcgtaagctacggcgcaagcgtattcggaaaagagggcaacttcgacggcttgttctcttacaaccgcaacgatgaaaaagattacgaagccggcaaaggtttccgcaatgtcaacggcggcaaaaccgtaccgtacagcgcgctggacaaacgcagctacctcgccaaaatcggaacaaccttcggcgacgacgaccaccgcatcgtgttgagccacatgaaagaccaacaccggggcatccgcactgtgcgtgaagaatttaccgtcggcgacaaaagttcacggataaatattgaccgccaagcccctgcttaccgcgaaactacccaatccaacaccaacttggcgtacacgggtaaaaacctgggctttgtcgaaaaactggatgccaacgcctatgtgttggaaaaagaacgctattccgccgatgacagcggcaccggctacgcaggcaatgtaaaaggccccaaccatacccgaatcaccactcgtggtgcgaacttcaacttcgacagccgccttgccgaacaaaccctgttgaaatacggtatcaactaccgccatcaggaaatcaaaccgcaagcatttttgaactcgaaattctccatcccgacgacagaagagaaaaacggtcaaaaagtcgataaaccgatggaacaacaaatgaaagaccgtgcagatgaagacactgttcacgcctacaaactttccaacccgaccaaaaccgataccggcgtatatgttgaagccattcacgacatcggcgatttcacgctgaccggcgggctgcgttacgaccgcttcaaggtgaaaacccatgacggcaaaaccgtttcaagcagcaaccttaacccgagtttcggtgtgatttggcagccgcacgaacactggagcttcagcgcgagccacaactacgccagccgcagcccgcgcctgtatgacgcgctgcaaacccacggtaaacgcggcatcatctcgattgccgacggcacaaaagccgaacgcgcgcgcaataccgaaatcggcttcaactacaacgacggcacgtttgccgcaaacggcagctacttctggcagaccatcaaagacgcgcttgccaatccgcaaaaccgccacgactctgtcgccgtccgtgaagccgtcaatgccggttacatcaaaaaccacggttacgaattgggcgcgtcctaccgcaccggcggcctgactgccaaagtcggcgtcagccacagcaaaccgcgcttttacgatacgcacaaagacaagctgttgagcgcgaatcctgaatttggcgcacaagtcggccgcacttggacggcctcccttgcctaccgcttccaaaatccgaatctggaaatcggctggcgcggccgttatgttcaaaaagctacgggttcgatattggcggcaggtcaaaaagaccgcaaaggcaacttggaaaacgttgtacgcaaaggtttcggtgtgaacgatgtcttcgccaactggaaaccgctgggcaaagacacgctcaatgtcaatctttcggttaacaacgtgttcaacaagttctactatccgcacagccaacgctggaccaataccctgccgggcgtgggacgtgatgtacgcttgggcgtgaactacaagttctaa

SEQ ID NO: 52770 - DNA, 759 bp, Neisseria meningitidis; identical to SEQ ID NO: 43846

SEQ ID NO: 52771 - DNA, 1383 bp, Neisseria meningitidis; identical to SEQ ID NO: 43734

SEQ ID NO: 52772 - DNA, 552 bp, Neisseria meningitidis; identical to SEQ ID NO: 40497

SEQ ID NO: 52773 - DNA, 2307 bp, Neisseria meningitidis; identical to SEQ ID NO: 43783

SEQ ID NO: 52774 - DNA, 1314 bp, Neisseria meningitidis; identical to SEQ ID NO: 42596

SEQ ID NO: 52775 - DNA, 492 bp, Neisseria meningitidis; identical to SEQ ID NO: 42761

SEQ ID NO: 52776 - DNA, 1182 bp, Neisseria meningitidis; identical to SEQ ID NO: 42423

SEQ ID NO: 52777 - DNA, 534 bp, Neisseria meningitidis; identical to SEQ ID NO: 37691

SEQ ID NO: 52778 - DNA, 993 bp, Neisseria meningitidis
atgaaacagcctgtttttgccgttacttccggcgagcctgccggcatcggccccgatatttgtttggacttggcatttgcacgcctgccctgccgctgcgcggtattgggcgacaaaaacctgttgcgcgcgcgcgccgaagccttgggcaaaagcgtcgtcctgcgcgacttcgatccggaatcaggcggcgcgtccgaagaaggcgtgctggaagtgctgcacatccctgccgccgaagcggttgaggcgggcaaactcaatcccgccaacgccgcctatgtgctgcaacttctagacaccgcgctcgcaggcatttcagacggcattttcgacggcatcgttaccgcgccgctgaacaaaggcatcatcaacgacgcgcgcgcaagcacaggttttttcagcggacacaccgaatatctggcggaaaaaagcggcacggggcaggttgtgatgatgcttgccggcaaaggcctgcgcgtcgccctcgtaacgacccacctgccgctgaaagacgttgccgccgccatcacgcaaccgctgattgaaagcgtcgcacgcattttgcatcacgacttaaaacacaaattcggcatcaaaaatcccaaaatcctagtcgccggactcaacccccacgccggcgaaggcggacacctcggacacgaagaaaccgacaccattatccccgcgctcgaaaacctgcgccgcgaagggataaacctcgccggcccgtatccggcggataccttgttccaaccgtttatgctcgaaggtgcggatgccgtattggcgatgtaccacgaccaagggctgcccgtgttgaaataccacagcttcggacagggcgtgaacatcacgctcggcctgccctttatccgcacctccgtcgatcacggcaccgcgcttgatttggcggcaaccggcagggcggattccggcagcctgataactgccgtggagaccgccgtcgagatggcgcgcggcagcctttaa

SEQ ID NO: 52779 - DNA, 552 bp, Neisseria meningitidis
atgccgtctgaacgccgaccgtttcaaacggcatttttatcgaacaggaaaaccgtcggtaaacttgcagagcgtgtgcaatcccgatatgatggtttgcataaatttaaacatatatgttccgcagctatggcactgattaaagagccgttggacaaagtgaaacaaaggaacgaagaacttgaagcggcagaagaagcggcggcgcaggaggcattgggtcgggagcaggaagccgcccgcgtatccgaatgggaagaacgctacaagctgtcgcgcagcgagttcgagcagttctggaaaggattgcctcaaaccgtacagaataagctgcaagcctcacagaaaacatggaaaagcgggatggataaaatctgtgccaacaatgcgaaagctgaaggtaaaacgccaaacggcataaaattcagcgaactggcatgcaaaacggcgaaaaccgaagcacgcttggaagagctgcacaaccgtaaaaaagcccttatcgacgaaatggccagggaagcggacaagaaagaactgtcaaagcggctctga

SEQ ID NO: 52780 - DNA, 837 bp, Neisseria meningitidis; identical to SEQ ID NO: 42462

SEQ ID NO: 52781 - DNA, 510 bp, Neisseria meningitidis; identical to SEQ ID NO: 42435

SEQ ID NO: 52782 - DNA, 381 bp, Neisseria meningitidis; identical to SEQ ID NO: 42394

SEQ ID NO: 52783 - DNA, 1080 bp, Neisseria meningitidis; identical to SEQ ID NO: 43538

SEQ ID NO: 52784 - DNA, 1254 bp, Neisseria meningitidis; identical to SEQ ID NO: 43325

SEQ ID NO: 52785 - DNA, 588 bp, Neisseria meningitidis; identical to SEQ ID NO: 42437

SEQ ID NO: 52786 - DNA, 201 bp, Neisseria meningitidis; identical to SEQ ID NO: 38240

SEQ ID NO: 52787 - DNA, 747 bp, Neisseria meningitidis; identical to SEQ ID NO: 42920

SEQ ID NO: 52788 - DNA, 1473 bp, Neisseria meningitidis; identical to SEQ ID NO: 43380

SEQ ID NO: 52789 - DNA, 198 bp, Neisseria meningitidis; identical to SEQ ID NO: 36305

SEQ ID NO: 52790 - DNA, 1245 bp, Neisseria meningitidis; identical to SEQ ID NO: 43384

SEQ ID NO: 52791 - DNA, 1281 bp, Neisseria meningitidis; identical to SEQ ID NO: 42411

SEQ ID NO: 52792 - DNA, 366 bp, Neisseria meningitidis; identical to SEQ ID NO: 37248

SEQ ID NO: 52793 - DNA, 291 bp, Neisseria meningitidis; identical to SEQ ID NO: 42317

SEQ ID NO: 52794 - DNA, 159 bp, Neisseria meningitidis; identical to SEQ ID NO: 43473

SEQ ID NO: 52795 - DNA, 645 bp, Neisseria meningitidis; identical to SEQ ID NO: 42084

SEQ ID NO: 52796 - DNA, 1464 bp, Neisseria meningitidis
atgaaagaaacagcttttaaaactgggatgtgtttaggttccaataatttgagcaggctacaaaaagccgcgcaacagatactgatcgtgcgtggctacctcacttcccaagctattatccaaccacagaatatggattcgggaattctgaaattacgggtatcagcaggcgaaataggggatatccgctatgaagaaaaacgggatgggaagtctgccgagggcagtattagtgcattcaataacaaatttcccttatataggaacaaaattctcaatcttcgcgatgtagagcagggcttggaaaacctgcgtcgtttgccgagtgttaaaacagatattcagattataccgtccgaagaagaaggcaaaagcgatttacagatcaaatggcagcagaataaacccatacggttcagtatcggtatagatgatgcgggcggcaaaacgaccggcaaatatcaaggaaatgtcgctttatcgttcgataaccctttgggcttaagcgatttgttttatgtttcatatggacgcggtttggcgcacaaaacggacttgactgatgccaccggtacggaaactgaaagcggatccagaagttacagcgtgcattattcggtgcccgtaaaaaaatggctgttttcttttaatcacaatggacatcgttaccacgaagcaaccgaaggctattccgtcaattacgattacaacggcaaacaatatcagagcagcctggccgccgagcgcatgctttggcgtaacagacttcataaaacttcagtcggaatgaaattatggacacgccaaacctataaatacatcgacgatgccgaaatcgaagtacaacgccgccgctctgcaggctgggaagccgaattgcgccaccgtgcttacctcaaccgttggcagcttgacggcaagttgtcttacaaacgcgggaccggcatgcgccaaagtatgcctgcaccggaagaaaacggcggcgatattcttccaggtacatctcgtatgaaaatcattactgccggtttggacgcagccgccccatttattttaggcaaacagcagtttttctacgcaaccgccattcaagctcaatggaacaaaacgccgttggttgcccaagataaattgtcaatcggcagccgctacaccgttcgcggatttgatggggagcagagtcttttcggagagcgaggtttctactggcagaatactttaacttggtattttcatccgaaccatcagttctatctcggtgcggactatggccgcgtatctggcgaaagtgcacaatatgtatcgggcaagcagctgatgggtgcagtggtcggcttcagaggagggcataaagtaggcggtatgtttgcttatgatctgtttgccggcaagccgcttcataaacccaaaggctttcagacgaccaacaccgtttacggcttcaacttgaattacagtttctaa

SEQ ID NO: 52797 - DNA, 1239 bp, Neisseria meningitidis; identical to SEQ ID NO: 43683

SEQ ID NO: 52798 - DNA, 780 bp, Neisseria meningitidis; identical to SEQ ID NO: 42741

SEQ ID NO: 52799 - DNA, 1479 bp, Neisseria meningitidis; identical to SEQ ID NO: 44572

SEQ ID NO: 52800 - DNA, 993 bp, Neisseria meningitidis
atgaaaacgcacgaaataagcaaagattcggtcagcttgataggggttgccgaacatgaggcgggtcaacgccttgataactatctgataaaaatcctcaagggtgttcccaagagccatatccaccgcattatccgcgccggcgaggtgcggttgaacaagaaacgctgcaaacccgacagccgtattgcggagggggatacggtgcggattccgcctgtgcgcgtggcggagaaggaaatgccgtctgaaaggcgtgccgccgtaccggcgcgtgcgtttgacgttgtttacgaagacgatgcgcttttggtcatcgacaaaccgtccggcgttgccgtccacggcggcagcggcgtgagtttcggcgttatcgaacagttgcgccgcgcccgtccggaggcgaagtatttggagttggttcatcgtttggacaaggatacgagcggcttgttgatggtggcgaagaaacgcagcgcgctcgtcaaacttcacgaagccatccgtaacgaccaccccaaaaaaatctaccttgcgctgggggtgggcaaactgccggacgacaatttccatgtcaaactgcccctgttcaaatataccggcgcacaaggcgaaaagatggtgcgcgtcagtgcggacgggcagtcggcgcatacggtgttccgtgtgttaagccgtttttcagacggcattttgcacggtgtcgggctgtcgcacctgactttggtgcgggcgacgttgaaaacggggcgcacgcaccaaatccgcgtccacctgcaatctcaaggctgtccgattgcgggcgacgaacgctacggcgattatcaggcgaaccgtcgtttgcagaagttgggtttgaagcggatgtttttgcacgcgtccgagctgcacttgaaccatccgctcacgggcgagccgctggtgttgaaggcggagctgccgccggacttggcgcagtttgcggtgatgttggaaaacgggacgaaaatgtga

SEQ ID NO: 52801 - DNA, 1278 bp, Neisseria meningitidis; identical to SEQ ID NO: 42966

SEQ ID NO: 52802 - DNA, 780 bp, Neisseria meningitidis; identical to SEQ ID NO: 43687

SEQ ID NO: 52803 - DNA, 663 bp, Neisseria meningitidis; identical to SEQ ID NO: 50838

SEQ ID NO: 52804 - DNA, 762 bp, Neisseria meningitidis
atgcgtttggcgcgtccgtatgccgaaaaagtgcgtatggtgatgagccatcttgcgcaaaccaataccgatcatggtattccgttactggaatctcatcgggaaatcagacgtgtcggttttattttgattacgtctgataagggtttgtgtggcggtttgaacgccaacgtgctgaaaaagtttttggcacaagttcaagagtatcggaatcaaggtattgaagaggaaatcgtatgctttggcagtaaaggtctgatggcgtgtcagagcattggtctgaatgtggttgccagtgccgtaaatttgggcgataccccaaaaatggaaatgctgctcggacctttgacagaactcttccaacggtatgagaaacatgaaattgacagaatccatctggtgtattcgggttttgtcaataccatgcgtcaagaaccgagaatggaagtattgctgcctatcggtgagaacgtgattggcgattcagctcccaaatcaccgttcagctgggaataccgctacgaaccgactgcacttgcagtgttggaatatctggttcgccgctatttagagtctgtggtttatcaggcgttgagcgacaatatggcatccgaacaggcagcccgcatggttgccatgaaagctgcaacagacaatgcaggcaatgccatcaaagagttgcgtttggtatataacaaatcgcgtcaagctgcgattaccacggaattgtcagaaattgtagcaggtgcggcggctgtctga

SEQ ID NO: 52805 - DNA, 1188 bp, Neisseria meningitidis; identical to SEQ ID NO: 43819

SEQ ID NO: 52806 - DNA, 1509 bp, Neisseria meningitidis
atgttgcctcaagggcagtttgcgcaatggattgcgccccttaccgttggtgaggagggtggcgtatgggtggtgtacggcaagaaccagtttgcctgcaatatgctcaagagccagtttgccggaaaaatagaagcggtgagggaagagttggctgccggccgttccgccttcgtattcaaaccgggagaaggcgtgcgttatgagatggcggcggttgaaggtgctgtcgaacctgccgagccgtccttgcatgcggtgtcggagggaatgcccgtgcaggaggttctgttggacgagctgccgtctgaagagcctgtcaaacccgctgcgtcgaaaacggcggcggatattttggcggaacgtatgaaaaacctgccgcacgagccgcgtcaggctgccgggtctgcttcccggccggaatcggtggcagttgccaaagcacggacggacgtgcagcgcgatgcggaagaggcgcgttacgagcagaccaacctgtctccggattacacgtttgatacgttggtagaaggtaagggcaaccgccttgcggcggctgcggcgcaggcgattgcggaaagcccggggcagagttacaacccgttcttcctctatggcagcacgggtttgggcaaaacccaccttgtgcaggcggtcggcaacgagctgctgaaaaaccgtcccgatgccaaagtgcgctatatgcattcggatgactatatccgcagctttatgaaggcggttcgcaacaacacttacgacgtgttcaagcagcaatacaagcaatacgacctgctgattatcgacgacatccagttcatcaaaggcaaagaccgtacgatggaagagtttttctatctgtacaaccatttccacaacgagaaaaaacagctcatcctcacttgcgatgtgttgcctgcgaaaatcgaaggcatggacgaccgcctcaaatcccgtttttcatggggactgactttggaactcgagccgcccgaattggaaatgcgcatcgccattttgcagaaaaaggcggaagcggcgggcatcagtatcgaagacgaagccgcgctgttcattgccaatctgatccgttccaacgtgcgcgagcttgaaggcgcgtttaatcgtgtcggagcgagcagccgctttatgaaccgtcccgtcatcgacatcgatttggcgcgtaccgctttgcaggacattattgccgagaagcacaaagtcatcaccgccgacatcatcatcgatgcggtggcgaaatattaccgcatcaaaatcagcgatgtgctcggtaagaaacggacacgaaacattgcccgtccgcgccaggtggcgatgagcctgaccaaagaactgactactttgagcctgccgtctatcggcgattcgtttggtgggcgcgaccatacgaccgttatgcacggcatcagggcagtggcgaaactgcgcgaagaagatccggaattggctcaggattatgaaaagctgctgattctgattcaaaactga

SEQ ID NO: 52807 - DNA, 1233 bp, Neisseria meningitidis; identical to SEQ ID NO: 42511

SEQ ID NO: 52808 - DNA, 369 bp, Neisseria meningitidis; identical to SEQ ID NO: 38525

SEQ ID NO: 52809 - DNA, 915 bp, Neisseria meningitidis; identical to SEQ ID NO: 42445

SEQ ID NO: 52810 - DNA, 1449 bp, Neisseria meningitidis
atgaacggcgatattggtgtaatcggtttggcggttatggggcaaaacctgattttgaatatgaacgattgcggatttaaggtggttgcctacaaccgcacgactgccaaggtggacgaatttttaaacggcgcggcaaaaggaactaatattatcggcgcgtattctttgcaagatttggtcgataagctggaaaaaccgcgaaaaattatgatgatggttcgtgccggttcggtggttgacgaatttatcgaacaactgcttccgctgttggaagaaggcgacatccttatcgacggcggcaatgccaattaccccgacacgacacggcggacacattaccttgctgaaaaagggattttgtttgtcggcgcgggcgtgtccggcggggaagaaggggcgcggcgcgggccgtccattatgccgggcggggataagcgcgcttgggatgcggtcaagccgatttttcaggcgattgccgccaaaacgtcgcagggcgaaccgtgttgcgactgggtcggcaaagacggtgcggggcattttgtcaaaatggtgcataacggcatcgaatatggcgatatgcagttgatttgcgaagcgtaccagttcatgaaagacggcttggggctgtcttacgacgaaatgtaccgcgtgtttgccgagtggaacaaaaccgagctggattcttatctgattgaaatcacagcggcaattttgggctataaggacgaaggcggcgaaccgctggtcgagaaaatcctcgatacggcagggcaaaaaggtacaggcaaatggacgggcatcaatgctttggatttgggtattccgctgacgctgatttccgaagccgtattcgcccgctgcgtttcgtcgttcaaagaacagcgcgtgcagaccggcaaactgttcgcccgaaccgttacgcccgtcgaaggcggcaaacaagaatgggtcgaggcgttgagacaggccctgcttgcatctaaaatcatttcctacgcacaaggctttatgctgatccgcgaagcgggcgaaagctacggctgggatttggactacggcaacactgcgctgctgtggcgcgaggggtgcatcattcgcagcgcattcttaagcaatatccgcgacgcgtatgaaaacaatcccgatttggtgttcttgggtgcggatccgtatttcaaaaatattttggaaaactgcctgccggcgtggcgcaaggtggttgccaaggcggtcgaatgcggcatccctatgccctgcatggcttcggcgattacgttcttggacggctacacgaccgaacgtctgcctgccaacctcttgcaggcacagcgcgactacttcggcgcgcacacttacgagcgcaccgacaaaccgcgcggtgagtttttccataccaactggacgggcaagggcggagataccgcttcgacaacctacgatatttga

SEQ ID NO: 52811 - DNA, 2394 bp, Neisseria meningitidis
atgaaactgaaacagattgcttccgcactgatgatgttgggcatatcgcctttggcacttgccgacttcaccatccaagacatccgcgtcgaaggcttgcagcgtaccgagccgagtaccgtattcaactacctgcccgtcaaagtcggcgacacctacaacgacacacacggcagtgccatcatcaaaagcctgtacgccaccggtttctttgacgacgtacgcgtcgaaactgcggacgggcagctcctgctgaccgttatcgaacgccccaccatcggctcgctcaacatcaccggcgcaaaaatgctgcaaaacgacgccattaagaaaaacctcgaatcgttcgggctggcgcagtcgcaatactttaatcaggcgacactcaatcaggcagtcgccggcctgaaagaagaatacctcgggcgcggcaaactcaatatccaaatcacgcccaaagtaaccaaactcgcccgcaaccgcgtcgacatcgacatcacgattgacgagggcaaatccgccaaaatcaccgacatcgaatttgaaggcaaccaagtctattccgaccgcaaactgatgcggcaaatgtccctgaccgaaggcggcatttggacatggctgacacgaagcaaccaattcaacgagcagaaatttgcccaagatatggaaaaagtaaccgacttctaccaaaataacggctacttcgatttccgtatcctcgataccgacatccaaaccaacgaagacaaaaccaagcagaccatcaaaatcaccgtccacgaaggcggacgtttccgttggggcaaagtctccatcgaaggcgacaccaacgaagtccccaaagccgaactggaaaaactgctgaccatgaagcccggcaaatggtacgaacgccagcagatgaccgccgttttgggtgagattcagaaccgcatgggctcggcaggctacgcatacagcgaaatcagcgtacagccgctgccgaacgctgaaaccaaaaccgtcgatttcgtcctgcacatcgaaccgggccggaaaatctacgtcaacgaaatacacatcaccggcaacaacaaaacccgcgacgaagtcgtccgccgtgaattacgccaaatggaatccgcaccttacgacacctccaagctgcaacgttccaaagagcgcgtcgagcttttgggctacttcgacaatgtccagtttgatgctgtcccgcttgccggcacgcccgacaaagtcgatttgaacatgagtctgaccgaacgttccaccggttccctggatttgagcgcgggttgggttcaagataccgggttggtcatgtccgcaggcgtttcccaagacaacctgttcggtacgggcaagtcggccgcactgcgcgcctccaggagcaaaaccacgcttaacggctcgctgtcgtttactgacccgtacttcacggcagacggggtcagcctgggctacgatgtttacggaaaagccttcgacccgcgcaaagcatcgaccagcatcaaacaatataaaaccaccacggcaggcgcaggcatccgcatgagcgtgcctgttaccgaatacgaccgcgtgaatttcggtttggtggcagaacacctgaccgtcaacacctacaacaaagcgcccaaacactatgccgactttatcaagaaatacggcaaaaccgacggcacagacggcagcttcaaaggctggctgtacaaaggtaccgtcggctgggggcgcaacaaaaccgacagcgcgttatggccgacgcgcggctacctgacgggcgtgaacgccgaaatcgccctgcctggcagcaaactgcaatactactccgccacccacaaccaaacctggttcttccccctgagcaaaaccttcacgctgatgctcggcggcgaagtcggcattgcgggcggctacggcagaaccaaagaaatccccttctttgaaaacttctacggcggcggcctgggttcggtgcgcggatacgaaagcggcacgctcggtccgaaagtctatgacgaatacggcgaaaaaatcagctacggcggcaacaaaaaagccaacgtctccgccgagctgctcttcccgatgcccggcgcgaaagacgcgcgcaccgtccgcctgagcctgtttgccgacgcaggcagcgtgtgggacggcaaaacctacgacgacaacagcagttccgcgaccggcggcagggttcaaaacatttacggcgccggcaatacccataaatccacctttaccaacgaattgcgctattccgccggcggcgcggttacctggctctcgcctttaggcccgatgaaattcagctacgcctacccgctgaagaaaaaaccggaagacgaaatccaacgcttccaattccaactcggcacgacgttctaa

SEQ ID NO: 52812 - DNA, 336 bp, Neisseria meningitidis
ttggaaatgtttgatggcgaagtagaagcagatgaaagttattttggcggacaacgcaaaggcaaacgcggtcgcggtgctgccggtaaagtcgccgtattcggtcttttgaagcgaaatggtaaggtttatacggttacagtaccgaatactcaaaccgctactttatttcctattatccgtgaacaagtgaaacctgacagtattgtttatacggattgttatcgtagctatgatgtattagatgtgcgcgaatttagccattttagcttcgctgaaacttcgttttcgtatcaatcacagcacacattttgccgaacgacaaaaccatattaa

SEQ ID NO: 52813 - DNA, 1548 bp, Neisseria meningitidis
atgcagcttaatcctgctgaaattagcgatttgattaaagccaagatcgaaaatctgtctgtaaatgccgaagtgcgtacctgtggtacggtaatttcggtaactgacggtatcgttcgcatccatggtttgtcagatgcaatgcaaggtgagatgctcgaattcccgggtaacactttcggcttggcgatgaacctggagcgcgactccgtcggcgccgtagtgttgggcgagtacgaacacattaaagaaggcgacacggttacctgtaccggtcgtatcttggaagtgccggtcggacgcgaactggtcggacgcgtcgttgatgcattgggtcggcctatcgacggcaaaggcccgattaatacaactttgaccgcccctatcgaaaaaatcgcaccgggcgtgattgcgcgcaaatcggttgaccagccgatgcaaaccggtctgaaggcgattgactctatggttcctgtcggtcgcggtcagcgtgagttgattattggcgaccgtcagacaggtaaaacggccgtagcattggatgccatcgtcaaccaaaaaggtacgggtgttatctgtatctatgtcgctatcggtcaaaaagcatcttctattgccaacgtggtccgcaaattggaagagcatggcgcgatggagcataccatcgtggttgctgcaactgcatctgaagcggcggcattgcaatatatcgcaccttactccggttgtacgatgggtgaattcttccgcgatcgtggcgaagatgccttgattgtttatgacgatttgtccaaacaggctgtggcttaccgtcaaatttccctgcttttgcgccgtccgcccggccgcgaagcctatcccggcgatgtgttctacctgcactcccgtctgttggaacgtgcggcacgtgtcaatgaacacgaagtggagaaattgaccaacggcgaagtaaaaggcaaaaccggttctctgaccgcgttgccgattatcgaaacccaagcgggcgacgtatctgctttcgttccgactaacgtcatttcgattaccgacggtcagattttcttggaaaccgacctcttcaacgccggtatccgtcctgcaatcaatgccggtatttccgtatcccgcgtaggcggtgctgcacaaaccaaagtgattaaaaagctgggtggcggtatccgtttggcgttggcacaatatcgtgaattggcggcgttctcgcaatttgcatccgatttggatgaagctacgcgcaaacaattggagcatggcgaagtcgtaaccgaactgatgaaacagaaacagttcagtacgttgaatacggctgaaatggctttgaccctttgggcaatcaacaacggttcgtattctgatgttccggttgccaaagctctggcttttgaatctgaatttttgagctttgtccgtacccaacatccggaagttttggaagccgtcaatgcttcaggtgcaatgtccgacgagagcgagaaaacgcttgaagcagccatgaaatccttcaaatcttcttacgcctatcaggcataa

SEQ ID NO: 52814 - DNA, 390 bp, Neisseria meningitidis; identical to SEQ ID NO: 43243

SEQ ID NO: 52815 - DNA, 492 bp, Neisseria meningitidis; identical to SEQ ID NO: 42417

SEQ ID NO: 52816 - DNA, 516 bp, Neisseria meningitidis; identical to SEQ ID NO: 42407

SEQ ID NO: 52817 - DNA, 921 bp, Neisseria meningitidis; identical to SEQ ID NO: 43368

SEQ ID NO: 52818 - DNA, 636 bp, Neisseria meningitidis; identical to SEQ ID NO: 43501

SEQ ID NO: 52819 - DNA, 204 bp, Neisseria meningitidis; identical to SEQ ID NO: 44063

SEQ ID NO: 52820 - DNA, 1977 bp, Neisseria meningitidis
atgaacgaattttcgcttgcccctattgtgattgttttgctggtgtcggtcattacggtgatcctgtgccgcaagttcaacattccctccatgctgggctacctgctggtgggctttttggcggggcccggtatgctcagcctgattccgaaaagccatgcgacggattatttgggcgaaatcgggattgtgttcctgatgttcagcatcggtttggagttctcgctgcccaagttgagggcgatgaggcggctggtgttcggtctgggcggtttgcaggtcggcattacgatgctgtcggtaatgggcatactgatgctgacgggcgtgccgttcaattgggcgtttgccgtgtcgggcgcgttggcgatgtcgtccacggcgattgtgagccggattttgtcggaaaagacggaattggggcagccgcacggtcagatggcgatgggcgtgctgctgatgcaggacatcgccgtcgtgccgctgatgattctgattcccgcgctggcgggcggaggggacggaaatatttgggcggccttgggtttggcgtttgcaaaaatgctgctgacgctggggctgctgtttttcgtcggcagcaaaattatgtcgcgatggttcaggatggtggcaaaacgcaaatcgtccgaactctttatgatcaatgtgctgctggtaaccttgggtgtggcttatctgactgagctggaaggtttgtctatggcgttgggcgcattcgttgccggcatgctgctttcggaaacggaataccgtttccaagtcgaagacgacatccgcccgttccgcgatattttgctcggctttttctttatcacggtcggcatgaagctggacattcaggcattgatcggcggctggcggcaggtattgatgctgttggcaatgctgctggtgttgaaggcactggttgtgtttgccattgccttcaaaatgaaacattcggtcggcgacagcctcaaaacggctttgtatctcgcgcagggcggcgagttcggcttcgtgatgctggccattgccgggcagcttgatatggtttcgccagaatgggaacaggcggcgacggcggcggttctgctgtcgatgattatcgcgcccttcctcttgggcggcagcgatgcgctggtcgggcgtttggtcaagtcaagctgggacatgaagtcgctcgatctgcacagtatgctggtagaaaccatgagcaagtccgaccatgtgctgattgtcggcttcggcaggggcgggcagacggtcggacgcgtccttgcccaagaggatattccgtatttcgcgctcgacttggacattgcgcgggtgcaggttgccagaagtgcgggcgaaccggtgtcgttcggcgatgcgaaacgcagggaagtattggaagccgccggtctgggacgggcgaaaatggtggtggttacgctcaacaatatgcacgaaacgcaacacgttttagacaatgtgctgtccatgtatcccaatatgcccgtatatgtgcgcgccaccaacgacgattatgtgaaaacgtttaccgatataggtgcggaagaagccgtgtcggacaccaaagaaaccggactcgtgctggcaggctatgcaatgttaggcaacggcgcgtcgtatcggcacgtctatcagacgatggcaaatatccgccacagccgttatgccgcgttggagggactgtttgtcggtagtgatgatgaggcaggattcggcgaaaacggcgaaaccgtccgtcacgcctttcctttggctgcagaagcatacgccgtcggcaaaacagtcggcacgcttccgatggcggcttacggcatcaaactcttgttcgtccgccgccgcaccggccggattgaaaacccggatgcctcgtttacattggaaggcggtgacgtgttggtggtcgcaggcaaaaaagaagaaattatctcttttgaaaactggagtttgcagggaatataa

SEQ ID NO: 52821 - DNA, 1539 bp, Neisseria meningitidis
atggtttccaaactggacaaatactggcagcaccccgccctctactggcctttgctcatcctttttgccgccgccaccccctttaccttcgcaccctactaccacttttggctgatgcccttgattttcggtgccttcgtccgcctcatcgaactgcgtccgcgttttgctgtctcttccgcctacctgttcggcctgaccgcatacacgacacagttctactggatacacaccgccctgcacgacgtttccggcctgcccgacctctatgccgtaccgctgaccttcctactccccgcctaccttgccctttatccggcactgtgtttctggctgtggaaaaaatttaccctgcctcggggcataaaaatcggtttggtactgcccatcctgtggacgctgaccgagtttgcccgcgaacgtttcctgaccggattcggctggggcgcaatcggctactcccaaatcaccccggacagcccgctcgccggctttgccccattgggcggcatccacatggttacactggcaaccgcctttctcggtgtctggctggttctggcgagtaataacaccgcacgttcgggcaaacgcctgcttccgattatcctgattgccgccctgcttgccgcaggctacaccgcccgacaaaccgacttcacccgccccgacggcagccgcagcaccgtcgccctgcttcaaggcaacatcgaccaaaccctcaaatggcgtgaagaccaagttatcccgaccatacagaaatattacgaacaagtcggcaaaaccaccgccgacatcgtcatcctgcccgaaaccgccatccccgttatgcgccaaaacctgccggaaaacatactggcgaaatttgccgaacaggcgcaaaacaacggcagcgcgctcgccgtcggcatcagccaatacacttcggacggcaacggttacgaaaacgccgtcatcaacctgaccggttatcaggaaaacaatcaggacggtatcccctactacgccaaaaaccacctcgtccccttcggcgaatacaaaccgctgcctttcctgaccacgccgctttacaaaatgatggatatgcccctttccgacttccgcaaaggcggcggcaagcaatccgccctgctgatgaaaaaccaaaaaatcgccttcaacatctgttacgaagacggattcggcgacgaactgattgccgccgcaaaagatgccaccctgcttgccaatgccagcaatatggcgtggtacggaaaatccaacgccatgtaccagcacctccaacaatcgcaggcgcgggctatggaactcggacgctatatggtccgcgccaccaacaccggcgcaaccgccatcatctcccccaaaggcaacatcatcgcccaagcccaacccgatacggaaaccgtattggaaggacacatcaaaggctatgtcggcgaaacgccctatatgaaaaccggcagttcatggtggttgatgggcatattggccctagccgcactgattcttttcatcttccgaaacaaagaacactga

SEQ ID NO: 52822 - DNA, 876 bp, Neisseria meningitidis; identical to SEQ ID NO: 46257

SEQ ID NO: 52823 - DNA, 1161 bp, Neisseria meningitidis
ttgagcaaaatgacctgcatcgaagacttgcgccgcgttgccaagcgcaaaatgccgcgtatgttttacgattacatcgattcgggttcgtggacagaaactacctaccgtgaaaacacttcggatttcaaagacatccgcttccgtcaaaaagtattggtcaatatggaaggccgaagcctggaaaccaaaatgatcgggcaggatgtgaaaatgccggtggcgattgcgccgacgggtttcacgggtatggcacacgccgacggtgaaattttggcggcgcgggcggcggagaagttcggcattccgtttacgctgtccacgatgtctatctgctcgattgaagacgttgccgagaacacttccgcaccattttggtttcagctttatgtgatgcgcgaccgcgagtttatggaaaacctgattaagcgcgcgaaggatgccaaatgttcggcattggtattgaccgctgatttgcaggttttggggcaacgccacaaagacatcaaaaacggcctgtccgcgccgccgaaaccgaccatcgccaatttaatcaatctggcgaccaagcccgaatggtgtatgaaaatgctgaacacggaacgccgcacgttccgcaatatcgtcggacacgcgaagaacgtcggcgatttgtcttcgctgtcttcatggacttccgaacaattcgacccgcgcctgagctgggacgatgtggcgcgcattaaagatttgtggggcggcaagctgattatcaaaggcattatggaacctgaagacgcggaaaaagcagcgaaaagcggcgcggacgcattgattgtttccaaccacggcggtcgacagctcgacgataccgtgtctgccatcaaagccttgcccgacatcgtcagcgcagtgggcagcgacatcgaagtttggatggacagcggcatccgcagcggtcaggatattttgaaggcgtgggctttgggcgcgaaaggtacaatgataggtcgggcgttcctgtatggcttgggcgcgtatggagaagaaggcgtaacccgtgcgctggaaatcctgtataaagaaatggatatatctatggcgtttacgggacaccgcgatattcaagatgtcgatgcttcgattttgagaggcaaagattggggcagggaaacggtttag

SEQ ID NO: 52824 - DNA, 573 bp, Neisseria meningitidis; identical to SEQ ID NO: 43051

SEQ ID NO: 52825 - DNA, 1131 bp, Neisseria meningitidis; identical to SEQ ID NO: 43401

SEQ ID NO: 52826 - DNA, 729 bp, Neisseria meningitidis; identical to SEQ ID NO: 43072

SEQ ID NO: 52827 - DNA, 924 bp, Neisseria meningitidis; identical to SEQ ID NO: 42309

SEQ ID NO: 52828 - DNA, 1851 bp, Neisseria meningitidis; identical to SEQ ID NO: 42285

SEQ ID NO: 52829 - DNA, 3045 bp, Neisseria meningitidis; identical to SEQ ID NO: 43298

SEQ ID NO: 52830 - DNA, 771 bp, Neisseria meningitidis; identical to SEQ ID NO: 42560

SEQ ID NO: 52831 - DNA, 1050 bp, Neisseria meningitidis
atgccgtctgaagccttcagacggcatcgtgcctatcgggagaataaattgcagcctttagtcagcgtattgatttgcgcctacaacgtagaaaaatatttcgcccaatcattagccgccgtcgtgaatcaaacttggcgcaacttggatattttgattgtcgatgacggctcgacggacggtacgcttgccattgcccagcgtttccaagaacaggacggccgcatccgcatcctcgcgcagccgcgcaattccggtctgattccctctttaaacatcgggctggatgaattggcaaagtcggggggggggggggaatatattgcgcgcaccgatgcagacgatattgccgcccccgactggattgagaaaatcgtgggtgagatggaaaaagaccgcagcatcatcgcgatgggtgcgtggctggaagttttgtcggaagaaaaggacggcaaccggctggcgcggcaccacgaacacggcaaaatttggaaaaaaccgacccgacacgaagacattgccgactttttccctttcggcaaccccatacacaacaacacgatgattatgaggcgcagcgtcattgacggcggtttgcgttacaacaccgagcgggattgggcggaagattaccaattttggtacgatgtcagcaaattgggcaggctggcttattatcccgaagccttggtcaaataccgccttcacgccaatcaggtttcatccaaatacagcatccgccaacacgaaatcgcgcaaggcatccaaaaaaccgccagaaacgattttttgcagtctatgggttttaaaacccggttcgacagccttgaataccgccaaataaaagcagtagcgtatgaattgctggagaaacatttgccggaagaagattttgaacgcgcccgccggtttttgtaccaatgcttcaaacggacggacacgctgcccgccggcgcgtggctggattttgcggcagacggcaggatgcggcggctgtttaccttgaggcaatacttcggcattttgcaccgattgctgaaaaaccgttga

SEQ ID NO: 52832 - DNA, 1170 bp, Neisseria meningitidis; identical to SEQ ID NO: 42515

SEQ ID NO: 52833 - DNA, 819 bp, Neisseria meningitidis; identical to SEQ ID NO: 43629

SEQ ID NO: 52834 - DNA, 426 bp, Neisseria meningitidis; identical to SEQ ID NO: 42832

SEQ ID NO: 52835 - DNA, 201 bp, Neisseria meningitidis; identical to SEQ ID NO: 43357

SEQ ID NO: 52836 - DNA, 1068 bp, Neisseria meningitidis; identical to SEQ ID NO: 42520

SEQ ID NO: 52837 - DNA, 390 bp, Neisseria meningitidis; identical to SEQ ID NO: 42765

SEQ ID NO: 52838 - DNA, 270 bp, Neisseria meningitidis; identical to SEQ ID NO: 43130

SEQ ID NO: 52839 - DNA, 876 bp, Neisseria meningitidis; identical to SEQ ID NO: 42702

SEQ ID NO: 52840 - DNA, 1527 bp, Neisseria meningitidis; identical to SEQ ID NO: 44021

SEQ ID NO: 52841 - DNA, 810 bp, Neisseria meningitidis; identical to SEQ ID NO: 42840

SEQ ID NO: 52842 - DNA, 1245 bp, Neisseria meningitidis; identical to SEQ ID NO: 42307

SEQ ID NO: 52843 - DNA, 171 bp, Neisseria meningitidis; identical to SEQ ID NO: 42894

SEQ ID NO: 52844 - DNA, 285 bp, Neisseria meningitidis; identical to SEQ ID NO: 42876

SEQ ID NO: 52845 - DNA, 645 bp, Neisseria meningitidis; identical to SEQ ID NO: 43527

SEQ ID NO: 52846 - DNA, 2526 bp, Neisseria meningitidis
ttgaaaaacaacagacaaatcaaactgattgccgcctccgtcgcagttgccgcatcctttcaggcacatgctggactgggcggactgaatatccagtccaaccttgacgaacccttttccggcagcattaccgtaaccggcgaagaagccaaagccctgctaggcggcggcagcgttaccgtttccgaaaaaggcctgaccgccaaagtccacaagttgggcgacaaagccgtcattgccgtttcttccgaacaggcagtccgcgatcccgtcctggtgttccgcatcggcgcaggcgcacaggtacgcgaatacaccgccatcctcgatcctgtcggctactcgcccaaaaccaaatctgcactttcagacggcaagacacaccgcaaaaccgctccgacagcagagtcccaagaaaatcaaaacgccaaagccctccgcaaaaccgataaaaaagacagcgcgaacgcagccgtcaaaccggcatacaacggcaaaacccataccgtccgcaaaggcgaaacggtcaaacagattgccgccgccatccgcccgaaacacctgacgctcgaacaggttgccgatgcgctgctgaaggcaaacccaaatgtttccgcacacggcagactgcgtgcgggcagcgtgcttcacattccgaatctgaacaggatcaaagcggaacaacccaaaccgcaaacggcgaaacccaaagccgaaaccgcatccatgccgtccgaaccgtccaaacaggcaacggtagagaaaccggttgaaaaacctgaagcaaaagttgccgcgcccgaagcaaaagcggaaaaaccggccgttcgacccgaacctgtacccgctgcaaatactgccgcatcggaaaccgctgccgaatccgccccccaagaagccgccgcttctgccatcgacacgccgaccgacgaaaccggtaacgccgtttccgaacctgtcgaacaggtttctgccgaagaagaaaccgaaagcggactgtttgacggtctgttcggcggttcgtacaccttgctgcttgccggcggaggcgcggcattaatcgccctgctgctgcttttgcgccttgcccaatccaaacgcgcgcgccgtaccgaagaatccgtccctgaggaagagcctgaccttgacgacgcggcagacgacggcatagaaatcacctttgccgaagtcgaaactccggcaacgcccgaacccgctccgaaaaacgatgtaaacgacacacttgccttagatggggaatctgaagaagagttatcggcaaaacaaacgttcgatgtcgaaaccgatacgccttccaaccgcatcgacttggatttcgacagcctggcagccgcgcaaaacggcattttatccggcgcacttacgcaggatgaagaaacccaaaaacgcgcggatgccgattggaacgccatcgaatccacagacagcgtgtacgagcccgagaccttcaacccgtacaaccctgtcgaaatcgtcatcgacacgcccgaaccggaatctgtcgcccaaactgccgaaaacaaaccggaaaccgtcgataccgatttctccgacaacctgccctcaaacaaccatatcggcacagaagaaacagcttccgcaaaacctgcctcaccctccggactggcaggcttcctgaaggcttcctcgcccgaaaccatcttggaaaaaacagttgccgaagtccaaacaccggaagagttgcacgatttcctgaaagtgtacgaaaccgatgccgtcgcggaaactgcgcctgaaacgcccgatttcaacgccgccgcagacgatttgtccgcattgcttcaacctgccgaagcaccgtccgttgaggaaaatataacggaaaccgttgccgaaacacccgacttcaacgccaccgcagacgatttgtccgcattacttcaaccttctaaagtacctgccgttgaggaaaatgcagcggaaaccgttgccgatgatttgtccgcactgttgcaacctgctgaagcaccggccgttgaggaaaatgtaacggaaaccgttgccgaaacacccgatttcaacgccaccgcagacgatttgtccgcattacttcaaccttctgaagcacctgccgttgaggaaaatgcagcggaaaccgttgccgatgatttgtccgcactgttgcaacctgctgaagcaccggccgttgaggaaaatgcagcggaaatcactttggaaacgcctgattccaacacctctgaggcagacgctttgcccgacttcctgaaagacggcgaggaggaaacggtagattggagcatctacctctcggaagaaaatatcccaaataatgcagataccagtttcccttcggaatctgtaggttctgacgcgccttccgaagcgaaatacgaccttgccgaaatgtatctcgaaatcggcgaccgcgatgccgctgccgagacagtgcagaaattgctggaagaagcggaaggcgacgtactcaaacgtgcccaagcattggcgcaggaattgggtatttga

SEQ ID NO: 52847 - DNA, 210 bp, Neisseria meningitidis; identical to SEQ ID NO: 39235

SEQ ID NO: 52848 - DNA, 1356 bp, Neisseria meningitidis; identical to SEQ ID NO: 42446

SEQ ID NO: 52849 - DNA, 1344 bp, Neisseria meningitidis; identical to SEQ ID NO: 42653

SEQ ID NO: 52850 - DNA, 750 bp, Neisseria meningitidis; identical to SEQ ID NO: 42320

SEQ ID NO: 52851 - DNA, 441 bp, Neisseria meningitidis; identical to SEQ ID NO: 43115

SEQ ID NO: 52852 - DNA, 1764 bp, Neisseria meningitidis; identical to SEQ ID NO: 43355

SEQ ID NO: 52853 - DNA, 1518 bp, Neisseria meningitidis; identical to SEQ ID NO: 43777

SEQ ID NO: 52854 - DNA, 1194 bp, Neisseria meningitidis; identical to SEQ ID NO: 43459

SEQ ID NO: 52855 - DNA, 333 bp, Neisseria meningitidis; identical to SEQ ID NO: 40334

SEQ ID NO: 52856 - DNA, 1422 bp, Neisseria meningitidis
atgaaaatcattcagatacagaacaatcacaatgtaaacgatgaccgccccgagtttgaccgcgcgctgattgccagcctgcccgccagcggcccgcgctacacttcctaccctaccgccgaccgtttccatgacggtttccgcgaaggcgaatatatcaaagctttacatttgcgcggtatgggcgcgttaaacaaaccgctttccctttacattcacattccgttctgcaacaccatctgctactactgcggctgcaacaaaatcatcaccaaagacaaaagccgcgccgatgcctacatcgaatatcttgaaaaagaaatggaactgctcgctccacatctgaacggacggcaccagcttgcccaactgcacttcggcggcggcacgccgacctttttgagcgacgaacagatcgaacgtgtcttccgcatgatacgcaaacatttcgagttaatccccaccggcgaatactccatcgaaatcgacccgcgcaaagtcagccgcgacaccgtcctcatgctcggcagactcggcttcaaccgcatgagcatcggcattcaggatttcgaccccaaagtgcaggcggcggtcaaccgcatccaaagttacgaagaaaccaaagaagtcatcgatgcggcgcgcgaagcggggttcaaatccgtcagcgtcgatttgatttacggcctgccgcaccagacttcggaaagcatcaaaaccaccatcgataccgttttgtcgctcgatcccgaccgcctcgccctttatcactacgcccacctgccgcacgtgttcaaaccgcaacgccgcatcgataccgccgccgttcccgacagcgaagagaagctcgatatgctgcaatactgcgtccaaaccctaaccgaacgcggctacgtcttcatcggcatggatcatttcgccaaacctgacgacgaactctccatcgccctcaaagaaggcttcctccagcgcaacttccaaggctattcgacctacgcggattgcgatttggtcgccatcggcgtgtcgtccatcggcaaaatcggcagcacctattcccaaaacgaacgcgacatcgatgcctactatgccgccatcgacgaaggcagactgcccatcatgcgcggctaccagctcaatcaggacgacatcctgcgccgcaacatcattcaggatttgatgtgccgtttcgcgctcgactatcggatttacgaaagtatgttcggcatcccgttcgaccgctacttcaaagacgaactggcggatttggaaaaactcgccggtttgggattggtgcgcctgaacagccacgggctgaccgttaccccgaaaggacgcttcctcatccgcaacatcgccatggtcttcgattaccacctgcgccataaagaaaccaaggcgaaatattcgcaaacagtgtga

SEQ ID NO: 52857 - DNA, 867 bp, Neisseria meningitidis; identical to SEQ ID NO: 43718

SEQ ID NO: 52858 - DNA, 1419 bp, Neisseria meningitidis
atgtctattaaaaacgccgtaaaattgattgaagaaagcgaagcccgctttgtcgatttgcgctttaccgataccaaaggcaagcagcaccactttaccgtgcctgcgcgcatcgtgttggaagaccccgaagagtggttcgaaaacggtcaggcgtttgacggttcgtctatcggcggctggaaaggcattcaggcttccgatatgcagttgcgccccgatgcgtctacagccttcgtcgatcctttttatgatgatgcgactgttgtgttgacttgcgacgttatcgatcccgccgacggtcagggttacgaccgcgacccgcgctccatcgcccgccgagccgaagcctatttgaaatcttccggcatcggcgagaccgcctatttcggtcccgaacccgagtttttcgtattcgacggcatagaatttgaaaccgatatgcacaaaacccgttacgaaatcacgtccgaaagcggcgcgtgggcaagcggtctgcatatggacggtcaaaacaccggccaccgcccgaccgtcaaaggcggttacgcacctgttgcaccgattgactgcggtcaggatttgcgttcggcgatggtaaacattttggaagaactcggtattgaagtggaagtgcaccacagcgaagtcggcaccggcagccaaatggaaatcggcacgcgctttgctactttggtcaaacgcgccgaccaaacccaagacatgaaatatgtgattcaaaacgttgcccacaacttcggcaaaaccgccactttcatgcccaaacccattatgggcgacaacggcagcggtatgcacgttcaccaatccatttggaaagacggtcaaaacctgttcgcaggcgacggctatgccggcttgagcgacaccgcgctctactacatcggcggcatcatcaaacacgccaaagccttgaacgcgattaccaatccgtccaccaactcctacaaacgcctcgtgccgcactttgaagcgccgaccaaactggcatactccgccaaaaaccgttccgcttccatccgcattccgtccgtgaacagcagcaaggcgcgccgcatcgaagcgcgtttccccgatccgaccgccaacccgtatttggcatttgccgccctgttgatggcgggtttggacggcattcaaaacaaaatccatccgggcgaccctgccgataaaaacctgtacgatctgccgccggaagaagatgcattggtgccgaccgtttgcgcttctttggaagaagcactggccgccctcaaagccgaccacgaattcctcctgcgcggcggcgtgttcagcaaagactggatcgacagctacatcgctttcaaagaagaagacgtacgccgcatccgcatggcgccgcacccgctggaatttgaaatgtattacagcctgtaa

SEQ ID NO: 52859 - DNA, 792 bp, Neisseria meningitidis
atgaatgtttattttctcggcggcggcaatatggcggctgccgttgcgggcggattggtcaaacaaggcggttaccgcatctatatagccaatcggggtgcggaaaaacgcgaacgtttggaaaaagagttgggggtcgaaacttcggcaaccctgccggagcttcattccgacgatgttttaatccttgccgtcaaaccgcaggatatggaagctgcgtgcaaaaatatccgcaccaacggcgcattggtgctttctgtcgcagccggattgtcggtcggtacgctcagccgttacctcgggggaacacgccgcattgtccgggttatgccgaatacacccggaaaaatcgggctgggcgtatctggtatgtatgccgaagcggaagtatcggaaacagaccgcaggattgccgatcgaatcatgaaatcagtcggtttgactgtttggttggatgatgaggaaaaaatgcacggcattaccggcatcagcggcagcggaccggcttatgtgttttatctgctggacgcattgcaaaatgccgccatccgacaagggtttgatatggcagaagcacgcgcgctcagtctggcaacgtttaaaggagcggttgcccttgccgagcagacgggtgaagatttcgagaagcttcaaaaaaatgtaacgtcaaaaggcgggacaacccacgaagccgtggaagctttcaggcggcatcgtgtcgccgaagccataagcgagggcgtttgtgcctgtgtgcgccgttcgcaggaaatggaacggcaatatcaataa

SEQ ID NO: 52860 - DNA, 1608 bp, Neisseria meningitidis
atgagtatcgtagaaatcaaagtccccgatatcggcggtcacgaaaacgtcgacatcatcgccgtagaagttaaagcgggcgacaccatcgccgttgacgacaccctgattacactggaaaccgacaaagccacgatggatgtgcctgccgatgcggccggtgtcgtgaaagaagtaaaagtcaaagtcggcgacaaaatctccgaaggcggcgtaattctgaccgttgaaaccggtgccgccgccgccgaagccgccccggctgctgccgaagcacaacctgcacctgctgccgcacccgctgccgcaggcggtgcaaccgttcaagtagccgttcccgatatcggcggccataccgatgtggatgtaatcgccgttgaaatcaaagtgggcgacaccgttgccgaagacgacacgctgattactttggaaaccgataaagcgacaatggacgtaccttgtaccgctgccggtgtcgttaaagccgtattcttaaaagtcggcgacaaagtatccgaaggctctgccattatcgaagtagaaaccgtcggctctgccgcagcagcccctgctcaagccgctcaagctgccgcaccggctgccgctccgcctccgactgctgccgccgcacccgccgccgcgcctgcaccttctgcacctgccgctgccaaaatcgacgaggccgctttcgccaaagcacacgccggtccttccgcacgcaaactggcgcgcgaattgggcgtggatttgggccaagtcaaaggcaccggcttgaaaggccgtatcatgggcgacgacatcaaagcctttgtgaaatccgtgatgcagggcggcgcggcaaaacctgccgcagccagcgcatctttgggcggcggtctggacttactgccgtggcctaaagtggacttctccaaattcggcaatgtcgaagttaaagaattgtcccgcattaagaaaatttccggtcaaaacctgtcccgcaactgggttgtgattccccacgttaccgtacacgaagaagcggacatgaccgagctggaagaattccgcaaacagctgaacaaagaatgggaacgcgaaggcgtgaaactgtccccgttggcgttcatcatcaaagcctctgtttccgcgttgaaagcattccccgaattcaacgcctcactggacggcgacaacctggtgctgaaaaactacttcaacatcggtttcgcagccgatacgccgaacggcttggttgttcccgtcatcaaagacgtggatcaaaaaggcttgaaacaaatcagccaagaattgaccgaattgtccaaaaaagcccgtgaaggcaagctcaaaccgcaagaaatgcaaggcgcgtgctttaccatttccagcttaggcggcatcggcggcacaggcttcacgccaattgtgaacgctcccgaagtcgccatcttgggcgtgtgcaaatcccaaatcaaacctgtttggaacggcaaagagtttgccccgcgcctgatgtgcccgttgagcctgtccttcgaccaccgtgtcatcgacggtgcggccggtatgcgcttcaccgtattcttggcgaagctgttgaaagacttccgccgcattaccttataa

SEQ ID NO: 52861 - DNA, 582 bp, Neisseria meningitidis; identical to SEQ ID NO: 42360

SEQ ID NO: 52862 - DNA, 969 bp, Neisseria meningitidis; identical to SEQ ID NO: 42270

SEQ ID NO: 52863 - DNA, 624 bp, Neisseria meningitidis; identical to SEQ ID NO: 37513

SEQ ID NO: 52864 - DNA, 1392 bp, Neisseria meningitidis
atgcaagtgtttttagacaatcccaaagccttttttgaaaccgtcagcggctgggtttggggacctttgatgctgatgctgctggtcggcacgggtattttgctgactgttttattaaaaggtttgcagttcacgatgttgggttatgcgctgaaacaggcgtttatgccgccaaagaagcataaaagcggcgaaggccacgaaggcgatatttcccattttgcggcgttgatgaccgcgctgtccgccaccatcggcacgggtaacatcgccggcgtggcgactgcggtggtaaccggcggcccgggcgcggtattttggatgtggatgaccgccattttcggcatggccaccaaatacggcgaaggcgtgttggcggtgaaataccgcgtcaacaattccaaaggcgaaatgtccggcggcccgatgtattacatcgaaaaaggcttgggcaaaaactggaaatggatggccgtcgcgtttgcgctgttcggcacattcgcttccttcggtatcggcagctcggtgcagtccaactcggttgcacaggcggtgcaaaccagcttcggtatcgaacctgcctataccggcattacgttgaccgttctgactgccgttgtcgttttaggtggtattaaaggcatcgccaaagccgcttctttcatcgtgcctgctatggcggtgttttatgtgttgggcggtctttccattatcgcgattaattccgatgcactgatgcctgccgtcaagctgattttctccgatgcgttcagcgcgcaggcagtggcgggcggtgctatcggtacggtcatccgctacggcgtggcgcgcggcgtgttctccaatgaggcgggtatgggttctgcgcctattgccgccgcagccgcgaaaaccgaccatcccgtccgtcaggccttggtttctatgaccggtacgtttttggataccatcgtcgtttgctcgattaccggcatcgtgttggtaatgggactgctcggcgcgggcggcgagtttgtcaaacctgaagtgagcggcgcggcactgacaaccgtcacattccaaaaaatgctgcccggcatcggcggctggattgttaccatcggcctgattttctttgcctactcaaccattttgggctggtgctattacggcgaaaaatgcgcggtgtatgttttcggcgagaaatttgccggtttgtaccgcgtgggttatgtttcttccgttatgctgggtaccgtgttgagccttgatttggtgtggctggcttcggacacattcaacggcttgatggcattgcccaacctgattgcacttttattgatggcgaaagtcatcgtcaatgaaacgcgcgacttcaaacaaaaaatcacaaacggcgaattgccgcattaa

SEQ ID NO: 52865 - DNA, 624 bp, Neisseria meningitidis; identical to SEQ ID NO: 43909

SEQ ID NO: 52866 - DNA, 180 bp, Neisseria meningitidis
atgttttggtatgtgattggcttttgcgccttggtcgtcgcgctgctgtcgctgtgggtcaatgccggcgcgttcggtatgcaggaagacgatactccgcaatcggattatgaaaggcgtttgggcttgggtgcgaagctgaaaaacaaaaatccggatacggacgaaaaacggcaataa

SEQ ID NO: 52867 - DNA, 1305 bp, Neisseria meningitidis; identical to SEQ ID NO: 44037

SEQ ID NO: 52868 - DNA, 270 bp, Neisseria meningitidis; identical to SEQ ID NO: 43524

SEQ ID NO: 52869 - DNA, 1281 bp, Neisseria meningitidis
ttgaaggattgttttcctcaaggtctgaatggaaaaaaaacagcggtggcattaagcggcggcttggattccgtcgttttgctgcatctgcttgtccgcgccggaaaaaagggcggttttattccggatgcattgcatatccatcacggcttgagtccccgtgccgacgattgggcagatttctgccaaaactattgcgatatgctcggggtggggctggaaacggttaaggtctgcgtggaaaaaaacggtttgggcatcgaggcggcggcaaggcaaaagcgttatgccgcgtttgccgaaaaaggctttgacgttttggcgttggcgcaccacagggacgatcaaatcgaaacctttatgctggcggtcgcgcgcggcggcggtttgcgcgctttggcggctatgcccgccgtccgcccttttggggaaaaaggcatcatctggcggcccttgctgcctttttcacgccaagatatatgggattatgcccaaaaacacggtttgccgaatatcgaggatgaaagcaataccgatacggcttatttgcgaaaccgcttccggcaccgtattttgcccgaactttcggcgcagattccccatttcgggcggcatgtgctgaacaatgtccgcgctttgcaggaagatttggctttgttggacgaggtcgtcgttcaggactgccgttgggtttgcggggccggttatttcgatacggcgcggtggctgacgttttccccgcgccggaaaacccatattttgcggcattttctgaaggaaaacggcattcccgtgccgaatcagaatgcccttgccgacattgcccgggttttgacggaggcaaaaaccggacgttggaacttgcaaggctttgaattgcatcattatgcaggcaggctgtttgtgttccgactggaaaaaacggataaactgcggtttttgaaagacaggcagataagcggaaatttaagggaaatattgacggggcagggatttgtgttgaagcggcatccgtttgggcttcctgagcatcttttggagcaggacggaattttgaggacggtagcggcatcggatacgttggccatgggcggcatccataaggatgtgaaaaaaatccttcaggggaaacgggttttgcctgtcctgcgcccaatttggccgcttgttgccgacagcggaaaccgtccattggcgttggcaaactgttgtgcggatttccaatactcggtttcagacggcattttgcccgtccatcctgactttcccattttattttga

SEQ ID NO: 52870 - DNA, 750 bp, Neisseria meningitidis; identical to SEQ ID NO: 42584

SEQ ID NO: 52871 - DNA, 396 bp, Neisseria meningitidis; identical to SEQ ID NO: 42151

SEQ ID NO: 52872 - DNA, 2526 bp, Neisseria meningitidis; identical to SEQ ID NO: 42903

SEQ ID NO: 52873 - DNA, 1293 bp, Neisseria meningitidis; identical to SEQ ID NO: 43906

SEQ ID NO: 52874 - DNA, 1380 bp, Neisseria meningitidis; identical to SEQ ID NO: 42736

SEQ ID NO: 52875 - DNA, 492 bp, Neisseria meningitidis; identical to SEQ ID NO: 39850

SEQ ID NO: 52876 - DNA, 897 bp, Neisseria meningitidis
atgaaaggttttaccattattgaatttttggttgcgggcctgctcagtatgattgtcctgatggcggtcggatcgagttacttcacatcccggaaattaaatgatgcggcaaacgagcgtcttgccgcgcaacaggatttgcggaatgcggcaacattgattgtccgcgatgcgagaatggcaggcggcttcggttgtttcaatatgtccgagcatcctgcaactgatgttattcccgatacgacgcaacaaaattctcctttttccttaaaaaggaacggtatagataaacttattcccatagcggaatcttcaaatatcaattatcagaattttttccaggttggtagcgcattgatttttcaatacggaatcgatgatgttaatgcaagcaccgcgactaccgtcgtcagcagctgtgccgcaatatcgaaaccgggcaagcaaatccctactttagaagatgcaaaaaaagaattgaagattctggatcaggataaggagcaaaatggcaatatagcgcgtcaaaggcatgtggtcaatgcctatgcggtcggcaggattgccgatgaggaaggtttgttccgcttccaattggatgataagggcaagtggggtaatcctcagttgctcgtgaaaaaggttagacatatgaaagtgcggtatatctatgtttccggctgtcctgaagatgacgatgccggcaaagaggaaacattcaaatatacggataaattcgacagcgcccaaaatgctgttacgcccgccggggtggaggttttattgagtagcggtactgataccaagattgccgcttcttcagacaatcatatttatgcttaccgtatcgatgcgacaatacgcgggggaaatgtatgcgcaaacagaacactttga

SEQ ID NO: 52877 - DNA, 510 bp, Neisseria meningitidis; identical to SEQ ID NO: 44097

SEQ ID NO: 52878 - DNA, 1467 bp, Neisseria meningitidis
atgtttaaacgcagcgtaatcgcaatggcttgtatttttgccctttcagcctgcgggggcggcggtggcggatcgcccgatgtcaagtcggcggacacgctgtcaaaacctgccgcccctgttgtttctgaaaaagagacagaggcaaaggaagatgcgccacaggcaggttctcaaggacagggcgcgccatccgcacaaggcagtcaagatatggcggcggtttcggaagaaaatacaggcaatggcggtgcggtaacagcggataatcccaaaaatgaagacgaggtggcacaaaatgatatgccgcaaaatgccgccggtacagatagttcgacaccgaatcacaccccggatccgaatatgcttgccggaaatatggaaaatcaagcaacggatgccggggaatcgtctcagccggcaaaccaaccggatatggcaaatgcggcggacggaatgcagggggacgatccgtcggcaggcgggcaaaatgccggcaatacggctgcccaaggtgcaaatcaagccggaaacaatcaagccgccggttcttcagatcccatccccgcgtcaaaccctgcacctgcgaatggcggtagcaattttggaagggttgatttggctaatggcgttttgattgacgggccgtcgcaaaatataacgttgacccactgtaaaggcgattcttgtagtggcaataatttcttggatgaagaagtacagctaaaatcagaatttgaaaaattaagtgatgcagacaaaataagtaattacaagaaagatgggaagaatgataaatttgtcggtttggttgccgatagtgtgcagatgaagggaatcaatcaatatattatcttttataaacctaaacccacttcatttgcgcgatttaggcgttctgcacggtcgaggcggtcgcttccggccgagatgccgctgattcccgtcaatcaggcggatacgctgattgtcgatggggaagcggtcagcctgacggggcattccggcaatatcttcgcgcccgaagggaattaccggtatctgacttacggggcggaaaaattgcccggcggatcgtatgcccttcgtgttcaaggcgaaccggcaaaaggcgaaatgcttgcgggcgcggccgtgtacaacggcgaagtactgcatttccatacggaaaacggccgtccgtacccgaccaggggcaggtttgccgcaaaagtcgatttcggcagcaaatctgtggacggcattatcgacagcggcgatgatttgcatatgggtacgcaaaaattcaaagccgccatcgatggaaacggctttaaggggacttggacggaaaatggcagcggggatgtttccggaaagttttacggcccggccggcgaggaagtggcgggaaaatacagctatcgcccgacagatgcggaaaagggcggattcggcgtgtttgccggcaaaaaagagcaggattga

SEQ ID NO: 52879 - DNA, 1410 bp, Neisseria meningitidis; identical to SEQ ID NO: 42274

SEQ ID NO: 52880 - DNA, 591 bp, Neisseria meningitidis; identical to SEQ ID NO: 38840

SEQ ID NO: 52881 - DNA, 1173 bp, Neisseria meningitidis; identical to SEQ ID NO: 43474

SEQ ID NO: 52882 - DNA, 339 bp, Neisseria meningitidis; identical to SEQ ID NO: 42934

SEQ ID NO: 52883 - DNA, 873 bp, Neisseria meningitidis
atgagctggttagataaaatcctgccacccaaaatcaaaaaccgcagcaaagacggttcttccaatgttcccgagggtttgtggcacaaatgtccgtcttgttcggcaaccgtttattcgaccgagttgcagcagaacaatcaggtttgtccgaaatgcaaccaccacaatccgttgtcggcacgacaacgcctgaatctgcttttggatgaggaaggcagggaggagattgccggaaatgtcaaaccgaccgatcctttgaagtttaaagacagcaaaaaatatccggatcgtttgagtgcggcacgcaagctgaccggggaagatgatgctttggtggtaatgaaaggcaagatgaacggtctgcccgtcgtcgttgccgcgtttgaattccgctttatcggcggttcgatgggttcggttgtgggcgaacgattcgtacaaggtatccgtcgggcggttgccgacaattgtccgttcgtctgtgtggcggcttccggcggtgcgcgtatgcaggagggtgtaaactcgctgatgcagatgacgaaaaccagtgccgcgctgcatttgctgacggaaaaacgcctgccatttatatcggtgttgaccgatccgactatgggcggcgtatccgccagcttcgcatttttgggcgatgtcgtgcttgccgaacccaatgcattaatcggctttgccggtccgcgcgtgattgagcagacggtgcgcgaaacgctgccggaaggcttccaacgcgccgagtttttgctggaaaaaggcgcaatcgaccagattgtcgaccgccgcgatatgaagcggcgcatcagtgatttgattacgctgttgtgccgtcaggacaaagtttccgccgcttga

SEQ ID NO: 52884 - DNA, 300 bp, Neisseria meningitidis; identical to SEQ ID NO: 42170

SEQ ID NO: 52885 - DNA, 975 bp, Neisseria meningitidis
gtgcagccggggctttgggcttcagacggcatattttcggaatggcggcattcttgccgtcggcgcggcagccgtatggggaagggaggggatattgtggtcggtaacggcaaaaaatatgccgcaccattgctggtgctgggttgcgtggtgttcggtctgggcagtctgattgtcagatccgtccccgtcggttcgtatgcaatcgcattttggcggttgctgatttcggtgttcgtattttggtttttagcacggtttttcgggcaaaaattcccaaaaaacaggaaaaccgtccgatatgccctgacggcgggcgtgtttctcgctttcgatttggcgttgtggcacgaaagcatacacgcggtcgggccgggtatttccaccctgctcaacagcctgcaaatctttttcttgtcggcaatcggtgttttctttttcggcgagcgtttgagcgggctgaaaaaggcaggcttaatatcggcagttgccggcgtggcgatgattgccggtgcggaattcggctacaacggtaatgcggtttggggattcgccagcggtttggtatcgggactgatgctcgccctgtcgatggtgttcgtccgcaaaacccatgaaatcgagccggtggcgcttttcccttcaatgatgattttgagtttgggcggcgcggtatcgctggttgttccggcattgctgatggatggcggcgtgctttatccgacgacttggaaagatgcgggtttggtgcttgtgtacggcgtggtgatgcagtgcttcgcgtgggcgatggttgcctatgcgattccgctgctttcgctgtcgctgacggggctgctgcttttgtccgaaccggttgccgccctgttcatcgattatttcgggttgggcaaaccgattgaaggcgtgcagtgggcaggggtggcgctgacgctttcggcaatttacctcggttcgctgaaacagcagtcttaa

SEQ ID NO: 52886 - DNA, 993 bp, Neisseria meningitidis; identical to SEQ ID NO: 44011

SEQ ID NO: 52887 - DNA, 807 bp, Neisseria meningitidis; identical to SEQ ID NO: 42461

SEQ ID NO: 52888 - DNA, 2106 bp, Neisseria meningitidis; identical to SEQ ID NO: 42897

SEQ ID NO: 52889 - DNA, 1980 bp, Neisseria meningitidis
atgtctcaactggcaaacgcaatccgcttcctctcggccgatgccgttcaaaaagccaattccggccaccccggcgcgcctatgggtatggcggaaatggcggaaacattgtggacgaaattcctcaatcacaaccccgccaaccccaaattctacaaccgcgaccgcttcgtcctctccaacggccacgcgtctatgctgttgtacagcctgctgcacctgaccggctacaacctaagcattgaagacttgaaaaacttccgccaactgcacagcaaaacccccggccatcccgaatacggctacaccgacggcgtggaaaccacgaccggcccgttggggcaagggattgccaacgcggtgggtatggcattggcagaaaaaatccttgccgccgaatttaataaagacggtttgaacatcgtcgatcattacacctacgtctttatgggcgacggctgtctgatggaaggcgtatcgcacgaagcctgttcgctcgccggcaccttgggcttgggcaaactgattgttttatatgatgacaacaatatttccattgatggtaaagtggacggctggtttaccgaaaacatcccgcaacgctttgaaagctacggctggcacgtcgttcccaatgtaaacggtcatgacaccgccgccattcaagccgccatcgaagccgcacgtgccgaaaccggcaaaccgtccatcatctgctgcaaaaccttaatcggcaaaggcagtgccaacaaagaaggcagccacaaaacccacggcgcacctttgggcgcggacgaaatcgaagccacgcgcaaacatttgggctggacttaccccgcctttgaaatcccgcaagaaatttacgatgcgtggaatgccaaagaacaaggcgcgaaactggaagccgactggaacgaactgttcgcgcaatatcaagccaaatatcctgccgaagccgcagaatttgtgcgccgtatggataaaaagctgccggacaatttcgatgaatacgttcaagccgcattgaaagaagtgtgcgccaaagccgaaaccatcgccacccgcaaagccagccaaaacagcatcgaaatcttggcaaaagagttgcctgaattggtaggcggttctgccgacctgaccccgtccaatctgaccgactggtcaaacagcgtctccgttacccgcgacaaaggcggcaactacatccactacggcgtgcgcgagttcggcatgggtgcgattatgaacggtttggtattgcacggcggcgtaaaacccttcggcgcgactttcctgatgttcagcgaatacgagcgcaatgccctgcgtatggctgcgttgatgaaaatcaaccctgtatttgtgtttacccacgattccatcggtttgggcgaagacggcccgacccatcaaccgattgagcaaaccgccaccctgcgcctgattccgaatatggacgtatggcggccgtgcgacaccgccgaatccttggtggcttgggcagaagccgtcaaagccgccgatcacccgtcctgcctgattttcagccgtcaaaacctgaaattccaagcgcgcagcgagcaacaactgaacgacatcaaacgcggcggctacgtcatcagcgaagcccaaggcaacgcccaagccgtcatcattgccaccggctcagaagtcgagctggctttggaagcgcaaaaagccctcgccgcgcaaaacatcgccgtgcgcgtcgtttccatgccgtccaccaacgtattcgaccgccaagacgccgcctatcaagccgccgtcctgcccgaaggcctgccgcgcatcgccgtagaagccggacacgccgacggctggtacaaatatgtcggactgaacggcgcagtcgtcggcatcaaccgcttcggcgaatccgcccctgccgatttactcttcaaagcattcggctttaccgtggacaatgtggttgatacggtgaaatccgtgctgtaa

SEQ ID NO: 52890 - DNA, 684 bp, Neisseria meningitidis; identical to SEQ ID NO: 42849

SEQ ID NO: 52891 - DNA, 408 bp, Neisseria meningitidis; identical to SEQ ID NO: 43328

SEQ ID NO: 52892 - DNA, 600 bp, Neisseria meningitidis; identical to SEQ ID NO: 37200

SEQ ID NO: 52893 - DNA, 669 bp, Neisseria meningitidis; identical to SEQ ID NO: 42517

SEQ ID NO: 52894 - DNA, 240 bp, Neisseria meningitidis; identical to SEQ ID NO: 43117

SEQ ID NO: 52895 - DNA, 291 bp, Neisseria meningitidis; identical to SEQ ID NO: 37933

SEQ ID NO: 52896 - DNA, 1977 bp, Neisseria meningitidis; identical to SEQ ID NO: 43804

SEQ ID NO: 52897 - DNA, 492 bp, Neisseria meningitidis; identical to SEQ ID NO: 42478

SEQ ID NO: 52898 - DNA, 1185 bp, Neisseria meningitidis
atggctaaggaaaaatttgaacgtagcaaaccgcacgtaaacgttggcaccatcggtcacgttgaccatggtaaaaccactctgactgctgctttgactactattttgtctaaaaaattcggtggcgctgcaaaagcttatgaccaaatcgacaacgctcctgaagaaaaagctcgtggtattaccattaatacctcacacgtagaatacgaaactgaaacccgtcactacgcacacgtagactgcccggggcacgccgactacgttaaaaacatgattaccggcgccgcacaaatggacggtgcaatcttggtatgttccgcagccgacggccctatgccgcaaacccgcgaacacatcctgctggcccgccaagtaggcgtaccttacatcatcgtgttcatgaacaaatgcgacatggtcgacgatgccgagctgttggaactggttgaaatggaaatccgcgacctgctgtccagctacgacttccccggcgatgactgcccgattgtacaaggttccgcactgaaagccttggaaggcgatgccgcttacgaagaaaaaatcttcgaactggctgccgcattggacagctacatcccgactcccgagcgagccgtggacaaaccgttcctgctgcctatcgaagacgtgttctccatttccggccgcggtacagtagtaaccggccgtgtagagcgcggtatcatccacgttggtgacgagattgaaatcgtcggtctgaaagaaacccaaaaaaccacttgtaccggtgttgaaatgttccgcaaactgctggacgaaggtcaggcgggcgacaacgtaggcgtattgctgcgcggtaccaaacgtgaagacgtggaacgcggtcaggtattggctaaaccgggtactatcactcctcacaccaaattcaaagcagaagtatacgtactgagcaaagaagagggtggtcgtcacactccgttcttcgccaactaccgtccgcaattctacttccgtaccaccgacgtaaccggcgcggttactttggaagaaggtgtggaaatggtaatgccgggtgaaaacgtaaccatcaccgtagaactgattgcgcctatcgctatggaagaaggcctgcgctttgcgattcgcgaaggcggccgtaccgtgggtgccggcgtggtttcttctgttatcgcttaa

SEQ ID NO: 52899 - DNA, 1659 bp, Neisseria meningitidis; identical to SEQ ID NO: 42207

SEQ ID NO: 52900 - DNA, 1296 bp, Neisseria meningitidis; identical to SEQ ID NO: 43153

SEQ ID NO: 52901 - DNA, 924 bp, Neisseria meningitidis; identical to SEQ ID NO: 43535

SEQ ID NO: 52902 - DNA, 933 bp, Neisseria meningitidis; identical to SEQ ID NO: 43547

SEQ ID NO: 52903 - DNA, 1110 bp, Neisseria meningitidis
atgaaatacaaaagaatcgtatttaaagtcggcacatcttcgattacccattcggacggcagtctctcgcgcggcaaaatccaaaccatcacctgccagcttgccgcattgcatcatgcgggacacgagctggtcttggtgtcttccggcgcggttgcggcagggttcggtgcgctgggtttcaaaaaacgtccggtcaaaatcgccgacaaacaggcttccgccgccgtcgggcaggggctgctgatggaagaatatacggcaaacctgtcttcagacggcatcgtgtccgcgcaaatcctgctcagccgcgccgactttgccgacaaacgccgctaccaaaatgccggcggcgcactttccgtgctgctgcaacgccgcgccgtccccatcatcaatgaaaacgatacggtttcggttgaggaattgaaaatcggcgacaacgacacattgagtgcgcaagtggcggcgatgatacaggcagacctcttggtgctgctgaccgacatagacggtctttacacgggcaacccgaacagcaatcccgatgccgtacggctggacaaaatcgaacacatcaaccatgaaatcatcgaaatggcgggcggctcgggttcggcaaacggcacgggcggtatgctgaccaaaatcaaagcggcaaccatcgccgccgaatccggcgtaccggtgtatatctgttcctcgctcaaacccgatgcacttgccgaagctgccgaacatcaggcggacggctcgtttttcgtcccccgtgccaaaggtttgcggacgcagaagcaatggctggcgttctattccgaaagccggggcagcgtttatgtggacgaaggtgcggaacacgctttgtccgaacaggggaaaagcctgctgatgtcgggcattgccggaatcgaagggcatttttcccgtatggacaccgtaaccgtgtacagcaaggcaaccaaacagcccctgggcaaagggcgcgtcctgttcggctctgccgccgccgaagacctgctcaaatcgcgtaaggcgaaaggcgtgttcatccatcgggacgactggatttccatcacgcccgaaatacgcctgcttctgaccgaattttag

SEQ ID NO: 52904 - DNA, 771 bp, Neisseria meningitidis
gtgtccgaaacacaaaacgaacaacccgtccaaccgcttgtcgagcatctcatcgagctgcgccgccgcctgatgtggacggttgtcggcatcttagtctgctttttcggcctaatgccgtttgcccaacaactctatacttttatcgccgacccgctgatggcaaacctgcccaaagacaccagcatgattgccaccgatgtcatcgcaccatttttcgtgccggtcaaagttaccctgatggcggcatttttaatttcgctgccgcatacgctctaccaaatctgggcatttgtcgcgcccgcactctaccaaaacgaaaaacgcctgattacgccgctcgtcctctccagcgtcagcctgtttttcatcggcatggcatttgcctactttttggttttccccgtcattttcaaattccttgccagcgttacccctgtcggtgtcaatatggcgacagacatcgacaaatacctctccttcatcttggggatgtttgttgcgttcggcacaacgtttgaagtccccattgtcgttatcctgttaaccaaaattggtgtggtaacaaccggacagctcaaacgcgcccgcccctatgtgattgtcggcgcgtttgtcattgccgccatcatcacgccgcccgatgtgatttcacaaaccctgcttgccattccgctgattctcttatacgaagcaggtatttggttcggacgctttttcacgccacgttcagaacaggatggcgacatacggccgcctgcaacaacctga

SEQ ID NO: 52905 - DNA, 1185 bp, Neisseria meningitidis
atggctaaggaaaaattcgaacgtagcaaaccgcacgtaaacgttggcaccatcggtcacgttgaccatggtaaaaccaccctgactgccgctttgactactattttggctaaaaaattcggcggtgctgcaaaagcttacgaccaaatcgacaacgcacccgaagaaaaagcacgcggtattaccattaacacctcgcacgtggaatacgaaaccgaaacccgccactacgcacacgtagactgcccggggcacgccgactacgttaaaaacatgattaccggcgccgcacaaatggacggtgcaatcctggtatgttccgcagccgacggccctatgccgcaaacccgcgaacacatcctgctggcccgccaagtaggcgtaccttacatcatcgtgttcatgaacaaatgcgacatggtcgacgatgccgagctgttggaactggttgaaatggaaatccgcgacctgctgtccagctacgacttccccggcgatgactgcccgattgtacaaggttccgcactgaaagccttggaaggcgatgccgcttacgaagaaaaaatcttcgaactggctgccgcattggacagctacatcccgactcccgagcgagccgtggacaaaccgttcctgctgcctatcgaagacgtgttctccatttccggccgcggtacagtagtaaccggccgtgtagagcgcggtatcatccacgttggtgacgagattgaaatcgtcggtctgaaagaaacccaaaaaaccacttgtaccggtgttgaaatgttccgcaaactgctggacgaaggtcaggcgggcgacaacgtaggcgtattgctgcgcggtaccaaacgtgaagacgtggaacgcggtcaggtattggctaaaccgggtactatcactcctcacaccaaattcaaagcagaagtatacgtactgagcaaagaagagggtggtcgtcacactccgttcttcgccaactaccgtccgcaattctacttccgtaccaccgacgtaaccggcgcggttactttggaagaaggtgtagaaatggtaatgccgggtgaaaacgtaaccatcaccgtagaactgattgcgcctatcgctatggaagaaggcctgcgctttgcgattcgcgaaggcggccgtaccgtgggtgccggcgtggtttcttctgttatcgcttaa

SEQ ID NO: 52906 - DNA, 810 bp, Neisseria meningitidis; identical to SEQ ID NO: 42133

SEQ ID NO: 52907 - DNA, 234 bp, Neisseria meningitidis; identical to SEQ ID NO: 39683

SEQ ID NO: 52908 - DNA, 1407 bp, Neisseria meningitidis
atgaaaaatcgagttaccaacatccattttgtcggtatcggcggcgtcggcatgagcggcatcgccgaagtcttgcacaatttgggctttaaagtttccggttcggatcaggcgcgaaatgccgctaccgagcatttgggcagcctgggcattcaagtttatcccggccataccgccgaacacgttaacggtgcggatgtcgtcgttacctctaccgccgtcaaaaaagaaaatcccgaagttgtcgctgcgttggagcagcaaattcccgttattccgcgcgccctgatgttggcggagttgatgcgcttccgtgacggcatcgccattgccggcacgcacggcaaaaccacgaccaccagcctgaccgcctccatcctcggcgcggcaggacttgacccgactttcgttatcggcggcaaactcaacgccgcaggcaccaacgcccgcttgggcaaaggcgaatacatcgttgccgaagccgacgagtcggatgcatcctttctgcacctgacaccgattatgtccgtcgttaccaatatcgacgaagaccatatggatacctacgggcacagcgtcgaaaaactgcatcaggcgtttatcgatttcatccaccgtatgcccttctacggcaaagcctttttgtgtattgacagcgaacacgtccgcgcgattttgcccaaagtgagcaaaccttatgctacttacggtttggacgataccgccgacatctacgccaccgacatcgaaaacgtcggcgcgcaaatgaaattcaccgtccatgttcaaatgaaaggacatgagcaggggtcgtttgaagtcgtgctgaatatgcccggcagacacaacgtgctgaacgcattggcagccatcggcgtggcgctggaagtcggcgcatcggttgaagcgatccaaaaaggcttgctcggctttgaaggcgtcggccgccgcttccaaaaatacggcgacatcaagttgccaaacggcgggaccgcgctcttggtggacgactacggacaccaccccgtcgaaatggcggcgacccttgccgccgcacgcggcgcgtatctggaaaaacgtttggtactcgccttccagccgcaccgctatacccgcacgcgcgatttgtttgaagactttaccaaagtcctcaataccgttgacgcgctggtgctgaccgaagtttatgccgccggtgaagagccgattgccgccgccgattcccgcgctcttgcccgcgccatccgcgtgttgggcaaactcgagccgatttactgcgaaaacgttgccgatctgcccgaaatgctgttgaacgttttgcaggacggcgacatcgtgttgaatatgggcgcgggaagcatcaaccgcgtccccgccgcgctgctggcattgtcgaaacagatttga

SEQ ID NO: 52909 - DNA, 1059 bp, Neisseria meningitidis; identical to SEQ ID NO: 40263

SEQ ID NO: 52910 - DNA, 1671 bp, Neisseria meningitidis; identical to SEQ ID NO: 42645

SEQ ID NO: 52911 - DNA, 960 bp, Neisseria meningitidis; identical to SEQ ID NO: 42649

SEQ ID NO: 52912 - DNA, 1395 bp, Neisseria meningitidis; identical to SEQ ID NO: 43955

SEQ ID NO: 52913 - DNA, 618 bp, Neisseria meningitidis; identical to SEQ ID NO: 42973

SEQ ID NO: 52914 - DNA, 639 bp, Neisseria meningitidis; identical to SEQ ID NO: 43365

SEQ ID NO: 52915 - DNA, 414 bp, Neisseria meningitidis; identical to SEQ ID NO: 43349

SEQ ID NO: 52916 - DNA, 792 bp, Neisseria meningitidis; identical to SEQ ID NO: 42297

SEQ ID NO: 52917 - DNA, 384 bp, Neisseria meningitidis; identical to SEQ ID NO: 38550

SEQ ID NO: 52918 - DNA, 1167 bp, Neisseria meningitidis; identical to SEQ ID NO: 43229

SEQ ID NO: 52919 - DNA, 579 bp, Neisseria meningitidis; identical to SEQ ID NO: 42998

SEQ ID NO: 52920 - DNA, 558 bp, Neisseria meningitidis
atgaacatcattgataccgccattcctgacgtaaaactgcttgagccccaagtcttcggcgacgcgcgcggcttttttatggaaaccttccgcgacgagtggtttaaaacccaagtctgcgaacgcaccttcgtgcaggaaaaccactccaaatccggcaaaggcgtattgcgcggcctgcactatcaaactgaaaacacacaaggcaaactcgtacgcgtggttgtcggcgaagtattcgacgtggccgtcgatatgcgtaaagactcccccactttcggcaaatgggtaggcgaaattctgtccgcagaaaacaaacgccaactgtgggtacccgaaggtttcgcacacggcttctatgtactgagcgatgaagccgagttcgtctataaatgcacagactattacaagcctgaagccgaacaggttttaatatggaacgacccgacagtcggcataggctggccgcttcaaaccgcgccgctgctgtcgcccaaagaccttgccggcaaaacgtgggcgcaagccgaaaagctccgccttccgctttaccgataa

SEQ ID NO: 52921 - DNA, 117 bp, Neisseria meningitidis; identical to SEQ ID NO: 42842

SEQ ID NO: 52922 - DNA, 924 bp, Neisseria meningitidis; identical to SEQ ID NO: 42695

SEQ ID NO: 52923 - DNA, 162 bp, Neisseria meningitidis; identical to SEQ ID NO: 43409

SEQ ID NO: 52924 - DNA, 2037 bp, Neisseria meningitidis
atgactgacaacgcactgctccatttgggcgaagaaccccgttttgatcaaatcaaaaccgaagacatcaaacccgccctgcaaaccgccatcgccgaagcgcgcgaacaaatcgccgccatcaaagcccaaacgcacaccggctgggcaaacactgtcgaacccctgaccggcatcaccgaacgcgtcggcaggatttggggcgtggtgtcgcacctcaactccgtcgccgacacgcccgaactgcgcgccgtctataacgaactgatgcccgaaatcaccgtcttcttcaccgaaatcggacaagacatcgagctgtacaaccgcttcaaaaccatcaaaaattcccccgaattcgacaccctctcccccgcacaaaaaaccaaactcaaccacgatctgcgcgatttcgtcctcagcggcgcggaactgccgcccgaacagcaggcagaactggcaaaactgcaaaccgaaggcgcgcaactttccgccaaattctcccaaaacgtcctagacgcgaccgacgcgttcggcatttactttgacgatgccgcaccgcttgccggcattcccgaagacgcgctcgccatgtttgccgccgccgcgcaaagcgaaagcaaaacaggctacaaaatcggcttgcagattccacactacctcgccgtcatccaatacgccgacaaccgcgaactgcgcgaacaaatctaccgcgcctacgttacccgcgccagcgaactttcagacgacggcaaattcgacaacaccgccaacatcgaccgcacgctcgcaaacgccctgcaaaccgccaaactgctcggcttcaaaaactacgccgaattgtcgctggcaaccaaaatggcggacacgcccgaacaagttttaaacttcctgcacgacctcgcccgccgcgccaaaccctacgccgaaaaagacctcgccgaagtcaaagccttcgcccgcgaaagcctgaacctcgccgatttgcaaccgtgggacttgggctacgccagcgaaaaactgcgcgaagccaaatacgcgttcagcgaaaccgaagtcaaaaaatacttccccgtcggcaaagtattaaacggactgttcgcccaaatcaaaaaactctacggcatcggatttaccgaaaaaaccgtccccgtctggcacaaagacgtgcgctattttgaattgcaacaaaacggcgaaaccataggcggcgtttatatggatttgtacgcacgcgaaggcaaacgcggcggcgcgtggatgaacgactacaaaggccgccgccgtttttcagacggcacgctgcaactgcccaccgcctacctcgtctgcaacttcgccccacccgtcggcggcagggaagcccgcctgagccacgacgaaatcctcatcctcttccacgaaaccggacacgggctgcaccacctgcttacccaagtggacgaactgggcgtatccggcatcaacggcgtagaatgggacgcggtcgaactgcccagccagtttatggaaaatttcgtttgggaatacaatgtcttggcacaaatgtcagcccacgaagaaaccggcgttcccctgccgaaagaactcttcgacaaaatgctcgccgccaaaaacttccaacgcggcatgttcctcgtccggcaaatggagttcgccctctttgatatgatgatttacagcgaagacgacgaaggccgtctgaaaaactggcaacaggttttagacagcgtgcgcaaaaaagtcgccgtcatccagccgcccgaatacaaccgcttcgccttgagcttcggccacatcttcgcaggcggctattccgcaggctattacagctacgcgtgggcggaagtattgagcgcggacgcatacgccgcctttgaagaaagcgacgatgtcgccgccacaggcaaacgcttttggcaggaaatcctcgccgtcggcggatcgcgcagcgcggcagaatccttcaaagccttccgcggccgcgaaccgagcatagacgcactcttgcgccacagcggtttcgacaacgcggtctga

SEQ ID NO: 52925 - DNA, 1266 bp, Neisseria meningitidis
atgagcaaaaaacaacccgcacaaccgaccaggcgcactctttttaaaaccgcgatcgcagccggagcagtcggcgcaatcggaggttatctcggcggcaaaaaacagggcgaaaccgccgaacgcaccgccgaaagccaacactcgccccaagcctatccctgctacggcgaacatcaggcaggcatcgttacgccgcagcaggcgttttcgattatgtgcgccttcgacgtaaccgcgcaaagtgccaagcagctggaaaacctgttccgcacgctgaccgcccgcatcgagtttctcacccaaggcggcgaataccaagacggcgacgacaaacttccgccagccggcagcggcattttgggcaaagccttcaaccccgacgggttgaccgttaccgtgggggtgggcagcagcctgtttgacggccggttcggactcaaagacaaaaaaccgattcatttgcaggaaatgcgcgacttctccaacgataagctgcaaaaaagctggtgcgacggcgatttgagcctgcaaatctgtgccttcacccccgaaacctgccaagccgccctgcgcgacatcatcaaacacaccgtccaaaccgccgttatccgttggagtatcgacgggtggcagcccaaatccgaacccggcgcgatggcggcgcgcaacctgttgggcttcagggacggcacgggcaaccccaaagtttccgatcccaaaactgccgacgaggttttgtggacgggggtggccgccaacagcctcgacgaaccggagtgggcgaaaaacggcagctatcaggcagtccgccttatccgccactttgtcgagttttgggacaggacgccgcttcaagagcaaaccgacattttcgggcggcgcaaatacagcggtgcgccgatggacggcaaaaaagaagccgaccaaccggattttgccaaagaccccgagggtgatatcacgcccaaagacagccatatacgcctggcgaatccgcgcgatcccgaattcctcaaaaaacaccgcctcttccgccgcgcctacagctattcgcgcggactcgcctcaagcggacagcttgatgtcgggctggtgttcgtctgctatcaggcaaaccttgccgacggattcatcttcgtgcaaaacctcctcaacggcgaaccgctggaagaatacatcagccccttcggcggcggctatttcttcgtcttgcccggcgtggaaaaaggcggctttttggggcaagggctgctgggcgtataa

SEQ ID NO: 52926 - DNA, 204 bp, Neisseria meningitidis; identical to SEQ ID NO: 38753

SEQ ID NO: 52927 - DNA, 1251 bp, Neisseria meningitidis; identical to SEQ ID NO: 43780

SEQ ID NO: 52928 - DNA, 1332 bp, Neisseria meningitidis; identical to SEQ ID NO: 42656

SEQ ID NO: 52929 - DNA, 273 bp, Neisseria meningitidis; identical to SEQ ID NO: 37320

SEQ ID NO: 52930 - DNA, 381 bp, Neisseria meningitidis; identical to SEQ ID NO: 42684

SEQ ID NO: 52931 - DNA, 795 bp, Neisseria meningitidis; identical to SEQ ID NO: 42340

SEQ ID NO: 52932 - DNA, 483 bp, Neisseria meningitidis; identical to SEQ ID NO: 38977

SEQ ID NO: 52933 - DNA, 1407 bp, Neisseria meningitidis; identical to SEQ ID NO: 43756

SEQ ID NO: 52934 - DNA, 267 bp, Neisseria meningitidis; identical to SEQ ID NO: 42326

SEQ ID NO: 52935 - DNA, 1197 bp, Neisseria meningitidis; identical to SEQ ID NO: 42563

SEQ ID NO: 52936 - DNA, 645 bp, Neisseria meningitidis; identical to SEQ ID NO: 42238

SEQ ID NO: 52937 - DNA, 276 bp, Neisseria meningitidis; identical to SEQ ID NO: 42734

SEQ ID NO: 52938 - DNA, 711 bp, Neisseria meningitidis; identical to SEQ ID NO: 42623

SEQ ID NO: 52939 - DNA, 837 bp, Neisseria meningitidis; identical to SEQ ID NO: 42239

SEQ ID NO: 52940 - DNA, 660 bp, Neisseria meningitidis; identical to SEQ ID NO: 43330

SEQ ID NO: 52941 - DNA, 693 bp, Neisseria meningitidis; identical to SEQ ID NO: 43114

SEQ ID NO: 52942 - DNA, 666 bp, Neisseria meningitidis
atgacgtttaccgcagtcctcttcgatctcgacggtgtcatcaccgacaccgccgaataccactaccgcgcatggaaaaagctcgccgaagaactgggcatcagcattgaccgcaagtttaacgagcagctcaaaggcgtgtcgcgcgacgattcgctcaaacgcatcctcgcgcacggcggcaaaaccgtcagcgaagccgagttcgccgaactgacccgccgtaaaaacgacaactacgtcgagatgattcaggcagtcaaacccgaagacgtgtatcccggcattttgcccctgctggaagcattgagggcaaacggcaaaaaaatcgcccttgcgtccgccagtaaaaacggcccgttcctgctggaacgcatggggctgacccacttcttcgacgccattgccgaccctgccgccgtcgcacattccaaacccgcccccgacatcttcctcgcagcagccgagggcgtagatgcggacatccgccaatgcatcggcattgaagacgccgccgccggcgtcgccgccatcaaagccgccggcgccttgcccatcggcgtgggcaaagccgaagacttgggcagcgacatcgcgctggtctccggcaccgccgagctgacctacgcctacctgcaaagcgtgtgggaacagtcgggcaggtaa

SEQ ID NO: 52943 - DNA, 2025 bp, Neisseria meningitidis; identical to SEQ ID NO: 43581

SEQ ID NO: 52944 - DNA, 678 bp, Neisseria meningitidis; identical to SEQ ID NO: 43753

SEQ ID NO: 52945 - DNA, 750 bp, Neisseria meningitidis; identical to SEQ ID NO: 42889

SEQ ID NO: 52946 - DNA, 1392 bp, Neisseria meningitidis
atgcttttggttatgcgtgcgaagcagggtaagaaaacaccgaagcgcaaatcccaaggtgtcggcaatacgcaggggcagacacccggaagcaatgattcggactgggtcgatcagattggacaatcggtttcagacggcacgcaacccgactggtcttggaacgaaagtgccgagaccgcatccgccgccgtatccgcgcaagaagtcgatccgcttacggagtatcaggtttataagcaattcggttatcagggcaaggctgccgaatctttggctgcctatctggacggcattccggatggtgaagcgaaacctgaaaaccttatccgcgagctgctcgatatcaatctcgaagtgggggatgtcgatgttttggcagacaatctgcaaaaatacggcaaactgattctttccgaacttttggcaaaatatatcgaacaggcattacagcgcgattcaaaccatttgcgtatccgcgtcttggcggaagaaggtttgggatggggtactcaggagattgaaaaacgtgcggaaggcggttctgcgacggcagcttccgcatcgcccccgccggatgccggcggtaaggcttatgaagccgaagaaatcaagcgcatcccgattgtgcggggcaaaaaagacgtgtccggaatcagtcaagaggaaatcggtgcgattgccggtttggtccgtgccgatcaaggtgcgaaaatccttaaagacaaagtcagctatgaaacggcatcgaaacaatacgaccgtgccatccaaacttccgaaaaacctgcaaacctgattatcgatgcgttgaaactcgattaccaacacgcggacatagaccgttttgccggacatttgtggaaactttaccaaacgttgggcaactacggcaggcaggttaaagagcggatgctggggtgggggtacagcttgggttaccatgaagttttcgatgatttggaaaaagggccgaacgaccggcaaatcaaagacatcggtatggggcacgggtatctgccgaaaaatatacagaaattcaaatcgcaacatcgggatttggtgcttcaagattcttcgttgattaacaccggttcgtctccggcagacgatgcggttaaggaagtagagtcgttgctgatgtatggtcagattgaagcggcaatggatgtgttggagcaggcggtattgaaatatcccgacgagtcccagctttatattacgttgatcgatatttatgaacgtactgaagattgggataggttggggcagtttttaagggtattgagggaacgtgcggacaggcttcctgaagaggtcgttatgctgatgagccggctgctgcagcgtatgaatcaaaatattaaaaaaataaaacggtacggaaaataa

SEQ ID NO: 52947 - DNA, 684 bp, Neisseria meningitidis; identical to SEQ ID NO: 42614

SEQ ID NO: 52948 - DNA, 1386 bp, Neisseria meningitidis
atgatcagcattttcgatattttcaaaatcggtatcgggccttccagttcgcatacggtcggcccgatgaaggcagccgccgcctttgcggcaggtttggatgcacaggctgttcgcatcgtcatcgacatttacggctcgctcgcactgaccggatacggacacggtacatttgacgcgctgatgctcggtttggaaggcagcctgccgcacgacatcccgcttgccggcattcccgaacgcctcgaacgcatccgcacgcagcacatcctccggctcaacgggcaagaaatccgcttcatccccgaccgcgacctgaacatactcggcaatcaagtgctgcccaaacaccccaacagcctgcgttttaccgcctatgcttcagacggcacggtattgaatgaacaggtttattattcggtcggcggcggctttgtcgttaccgaagaagattttgaccggcaggcggaaacggaaaaagccgttccctatccctataccagttgcgccgaactgcttgcccgatgccgtctgaaccggctcgacatctccgaagtcgtgttggcaaacgaagccgcgcttgccggatgcggcgaagccgaaatccgccgccgcgccgctgccgttgccgaggttatggaaggctgcatcaaacgcggcttgggtgcggacggcgaactgcccagcggattgaacgtccgccgccgcgccccgcagcttgccgccaagctcaaagtcctgcgcgaaaccgaaatcgtcaacacccagctctggccgatggtgtacgccatggcggtcaacgaagaaaacgccgccggcggacgcgtcgttaccgcaccgaccaacggcgcggcaggcatcattcccgccgtattgcactatttccgcaagttcaatccgcacgccacacaggaacgcgtcgaaaacttcctgctcaccgcaggcgcaatcggcatcctctacaagaccaacgcctccatttccggtgcggatgtcggctgtcagggcgaagtcggcgtagcgtgttcgatggcggcgggcgcatacgccgaagtcatcggcggcacgcccaaacaagtggaaaacgccgccgaaatggcgatggaacaccatttggggctgacttgcgaccccgtcggcggactggtgcaaatcccctgcatcgagcgcaacggcatcgccgccgaaaaagccctcaaactcggcacgctcgcgcttttggaagacggcacggacaaaaaagtctcgctcgacgaagtcatccgaaccatgctgcaaaccggccgggatatgaaggcgacctacaaagaaacctcgcttgccggactcgccgccacgctccggaaaaaagccgtccccgtatccgtgcgcgtggtcgagtgctga

SEQ ID NO: 52949 - DNA, 966 bp, Neisseria meningitidis; identical to SEQ ID NO: 42751

SEQ ID NO: 52950 - DNA, 858 bp, Neisseria meningitidis; identical to SEQ ID NO: 43095

SEQ ID NO: 52951 - DNA, 876 bp, Neisseria meningitidis; identical to SEQ ID NO: 42301

SEQ ID NO: 52952 - DNA, 1953 bp, Neisseria meningitidis
atgcgctttgcagtcgctttgctcagtctgctgggtattgcatcggttatcggtacggtgttgcagcaaaaccagccgcagacggattatttggtcaaattcggatcgttttgggcgcagatttttggttttctgggactgtatgacgtctatgcttcggcatggtttgtcgttatcatgatgtttttggtggtttctaccagtttgtgcctgattcgcaatgtgccgccgttctggcgcgaaatgaagtcttttcgggaaaaggttaaagaaaaatctctggcggcgatgcgccattcttcgctgttggatgtaaaaattgcgcccgaggttgccaaacgttatctggaagtacaaggttttcagggaaaaaccattaaccgtgaagacgggtcggttctgattgccgccaaaaaaggcacaatgaacaaatggggctatatctttgcccatgttgctttgattgtcatttgcctgggcgggttgatagacagtaacctgctgttgaaactgggtatgctgaccggtcggattgttccggacaatcaggcggtttatgccaaggatttcaagcccgaaagtattttgggtgcgtccaatctctcatttaggggcaacgtcaatatttccgaggggcagagtgcggatgtggttttcctgaatgccgacaacgggatattggttcaggacttgccttttgaagtcaaactgaaaaaattccatatcgatttttacaatacgggtatgccgcgtgatttcgccagcgatattgaagtgacggacaaggcaaccggtgagaaactcgagcgcaccatccgcgtgaaccatcctttgaccttgcacggcatcacgatttatcaggcgagttttgccgacggcggttcggatttgacattcaaggcgtggaatttgggtgatgcttcgcgcgagcctgtcgtgttgaaggcaacatccatacaccagtttccgttggaaattggcaaacacaaatatcgtcttgagttcgatcagttcacttctatgaatgtggaggacatgagcgagggcgcggaacgggaaaaaagcctgaaatccacgctgaacgatgtccgcgccgttactcaggaaggtaaaaaatacaccaatatcggcccttccattgtttaccgtatccgtgatgcggcagggcaggcggtcgaatataaaaactatatgctgccggttttgcaggaacaggattatttttggattaccggcacgcgcagcggcttgcagcagcaataccgctggctgcgtatccccttggacaagcagttgaaagcggacacctttatggcattgcgtgagtttttgaaagatggggaagggcgcaaacgtctggttgccgacgcaaccaaaggcgcacctgccgaaatccgcgaacaattcatgctggctgcggaaaacacgctgaacatctttgcacaaaaaggctatttgggattggacgaatttattacgtccaatatcccgaaagagcagcaggataagatgcagggctatttctacgaaatgctttacggcgtgatgaacgctgctttggatgaaaccatacgccggtacggcttgcccgaatggcagcaggatgaagcgcggaatcgtttcctgctgcacagtatggatgcgtacacgggtttgaccgaatatcccgcgcctatgctgctgcaacttgatgggttttccgaggtgcgttcgtcgggtttgcagatgacccgttccccgggtgcgcttttggtctatctcggctcggtgctgttggtattgggtacggtattgatgttttatgtgcgcgaaaaacgggcgtgggtattgttttcagacggcaaaatccgttttgccatgtcttcggcccgcagcgaacgggatttgcagaaggaatttccaaaacacgtcgagagtctgcaacggctcggcaaggacttgaatcatgactga

SEQ ID NO: 52953 - DNA, 2604 bp, Neisseria meningitidis; identical to SEQ ID NO: 43704

SEQ ID NO: 52954 - DNA, 219 bp, Neisseria meningitidis; identical to SEQ ID NO: 36470

SEQ ID NO: 52955 - DNA, 660 bp, Neisseria meningitidis; identical to SEQ ID NO: 43400

SEQ ID NO: 52956 - DNA, 1005 bp, Neisseria meningitidis; identical to SEQ ID NO: 42289

SEQ ID NO: 52957 - DNA, 903 bp, Neisseria meningitidis; identical to SEQ ID NO: 43573

SEQ ID NO: 52958 - DNA, 717 bp, Neisseria meningitidis; identical to SEQ ID NO: 43585

SEQ ID NO: 52959 - DNA, 933 bp, Neisseria meningitidis; identical to SEQ ID NO: 43784

SEQ ID NO: 52960 - DNA, 582 bp, Neisseria meningitidis; identical to SEQ ID NO: 43136

SEQ ID NO: 52961 - DNA, 3615 bp, Neisseria meningitidis; identical to SEQ ID NO: 43733

SEQ ID NO: 52962 - DNA, 1539 bp, Neisseria meningitidis
atgaatatgctgggagctttggcaaaagtcggcagcctgacgatggtgtcgcgcgttttgggatttgtgcgcgatacggtcattgcgcgggcattcggcgcgggtatggcgacggatgcgttttttgtcgcgttcaaactgcccaacctgcttcgccgcgtgtttgcggagggggcgtttgcccaagcgtttgtgccgattttggcggaatacaaggaaacgcgttcaaaagaggcggcggaggcttttatccgccatgtggcggggatgctgtcgtttgtactggttatcgttaccgcgctgggcatacttgccgcgccttgggtgatttatgtttccgcacccggttttgcccaagatgccgacaaatttcagctctccatcgatttgctgcggattacgtttccttatatattattgatttccctgtcttcatttgtcggctcggtactcaattcttatcataagttcggcattccggcgtttacgcccacgtttctgaacgtgtcgtttatcgtattcgcgctgtttttcgtgccgtatttcgatcctcccgttaccgcgctggcttgggcggtttttgtcggcggcattttacaactcggcttccaactgccctggctggcgaaactgggttttttgaaactgcccaaactgaatttcaaagatgcggcggtcaaccgcgtcatgaaacagatggcgcctgcgattttgggcgtgagcgtggcgcagatttctttggtgattaacacgattttcgcgtcttatctgcaatcgggcagcgtttcatggatgtattacgccgaccgcatgatggagctgcccggcggcgtgctgggggcggcactcggtacgattttgctgccgactttgtccaaacactcggcaaaccaagatacggaacagttttccgccctgctcgactggggtttgcgcctgtgcatgctgctgacgctgccggcggcggtcggactggcggtgttgtcgttcccgctggtggcgacgctgtttatgtaccgcgaatttacgctgtttgacgcgcagatgacgcaacacgcgctgattgcctattctttcggtttaatcggcttaatcatgattaaagtgttggcacccggcttctatgcgcggcaaaacatcaaaacgcccgtcaaaatcgccatcttcacgctcatctgcacgcagttgatgaaccttgcctttatcggcccactgaaacacgtcggactttcgcttgccatcggtctgggcgcgtgtatcaatgccggattgttgttttacctgttgcgcagacacggtatttaccaacctggcaagggttgggcagcgttcttggcaaaaatgctgctctcgctcgccgtgatgggaggcggcctgtatgccgcccaaatctggctgccgttcgactgggcacacgccggtggaatgcaaaaggccgcccggctcttcatcctgattgccgtcggcggcggactgtatttcgcatctctggcggctttgggcttccgtccgcgccatttcaaacgggtggaaagctga

SEQ ID NO: 52963 - DNA, 1134 bp, Neisseria meningitidis
atgagcacccccgccctcctcgtcctcgctgacggcagcgtatttcacggcacatcaatcggttacgaaggttcgacttccggcgaagtcgtgttcaatacttcgatgaccggctatcaggaaatcctgaccgacccgtcctactgcaaacaaatcgttaccctcacctacccacacatcggcaacaccggcaccaacgccgaagatgaagaaagccgcagcgtttatgccgccggcctgattatccgcgacctgccgctcttgcacagcaacttccgcgcctccgaaagcctgcacgactatctggtacgcaacaaaaccgtcgccatcgccgacatcgacacccgccgcctgaccacgctgttgcgcgaaaaaggcgcgcaaggcggtgcgattctgaccggtgcggatgccacaatcgaaaaagcgcaagaactcatcgccgcgttcggcagcatggtcggaaaagatttggcaaaagaagtttcctgcacggaaacttacgaatggacggaaggcgaatgggcattgggcaagggtttcgttacccctgacgaacagccttaccacgtcgtcgcctacgatttcggcgtgaaaaccaacatcctgcgtatgctcgcctcgcgcggctgccgcctgaccgtcgtccccgcccaaacgagcgcggaagacgtgttggcactcaaccctgacggcgtattcctatccaacggccccggcgaccccgagccttgcacctacgccatcaaagccgtacaaaaactgatagaaagcggcaaaccgatttttggcatttgcttgggacaccagctcatcagcctcgccatcggcgcgaaaaccctgaaaatgcgcttcagccaccacggtgcgaaccaccctgtgcaagatttggacagcggcaaagtcgtcatcaccagccaaaaccacggttttgccgttgatgccgacaccctgcccgctaacgcacgcattacccacaaatccttgtttgacaacactttgcaaggcatcgagctgaccgacaaacctgtgttctgcttccaaggccaccccgaagccagccccggtccgcaagatgtcggctatttgtttgacaaattcattggcaatatgaaagcggcaaaacgggcataa

SEQ ID NO: 52964 - DNA, 639 bp, Neisseria meningitidis; identical to SEQ ID NO: 43170

SEQ ID NO: 52965 - DNA, 1245 bp, Neisseria meningitidis
atggcatttttaaaactgaccgaacaaaacgtgcagggcaaaaccgtcctcatccgcgccgatatgaacgtaccgttcaaagacggcaaaatcagcgacgacacccgtatccgcgcctcgctcgcgtccattaaatactgcgtggacaacggtgcgtccgttatcgtgatgacccatctcggccgcccgaccgaaggcgagttccaccccgaagacgatgtcgcccccgttgccgcgcacttgggcagcctgttgggcaaagacgtgaaagtattgaacgactggcgtgaaaacaaacccgccctgaacgcgggcgatgtcgtcatgctgcaaaacgtgcgcatcaacaaaggcgagaagaaaaacgatttggaactgggtaaagcctacgcttctttgtgcgacgtgttcgtcaatgacgcgttcggaaccgcccaccgcgcccaagcctcgaccgaagccgtcgcccaagccgcgcccgttgcctgcgccggcgtattgatggcgggcgaactcgacgctttgggcaaagccttgaaacagcccgcgcgcccgatggttgccatcgttgccggcagcaaagtgtccaccaagctgaccatcctcgaatcgctggcggacaaagtcgaccaactcatcgtcggcggcggtatcgcaaacaccttcctgttggcggaaggcaaagccatcggcaaatctttggcggaacacgatttggtggaagaatccaaaaaaattatggcgaaaatggcggcaaaaggcggttctgtgccgctgccgaccgatgtcgtcgttgccaaagcctttgccgccgatgcggaagctgtggtgaaagacattgccgccgatgcggaagctgtggtgaaagacattgccgccgatgcggaagctgtggtgaaagacattgccgacgttgccgaagacgagatgattttggacatcggtccgaaatccgctgccgcgcttgccgatttgcttaaagccgccggtacggtcgtttggaacgggccggtcggcgtgttcgagtttgaccaattcgcaggcggtacgaaagcccttgccgaagccattgcccaaagcaaagcgttctcgattgcgggcggcggcgacacgctggcggcgattgccaaattcggcgttaccgaacaaatcggctacatctccaccggcggcggcgcgttccttgagttcttggaaggcaaagagctgcctgccgtagccgctttggaaaaacgcggcgcgtaa

SEQ ID NO: 52966 - DNA, 1305 bp, Neisseria meningitidis
atgaagccgtttgccgaaaatatcccccacagccttcgcggcaactgccgcgacgaagccctgccgccgcatacggtagattgcccggaatgcggctgccgcgcggatgtgccgcaattggacaggtgggaggcggcgttctgcccgcgctgcggctataagctcttcagggtgggcaggcatcctttttccgccccgcccgcttatgcggcggcttcgctgattttgatggcgtttgcttacggtatgacgtatatcgaggtcgggataccgggtgcggcatccgtcctttcgctgcccgagatgatgcgcctgatggtgtttcaggattatggttttttggccgaagtgatgtttgtgctgaccttcggcgcgccggttctgtttctgctgctgtgcctgtatgtctatgccgcgctgatacggaaacaggcgtatcctgcgctgcgtttggcaacgcgtgtgatggtgcgcttgagacaggcgatgatggtggatgtgttttttgtttccactttggtggcgtatatcaagctctcgtctgtggcagaggttcgcttcggatcggcgttttatctgatgttcgcgctgtcggttatgctgattcggacttcggtatcggttccccagcattgggtgtattttcaaatcgggcggctgacgggggataatgcggttcagacggcatcggaaggtaaaacctgttgcagccgctgcctgtatttccgcgacagtgccgaatccccctgcggcgtgtgcggtgcggaactgtaccgccgacggccgaaaagtctgagtatttcgtcggcgtttctgacggcggcggttattttgtatttccctgccaatatcctgccgattatgatttcgtccaatcctgccgccacggaggtcaataccatccttaacggcatcgcttatatgtgggacgagggcgacaggctgattgcggcggttattttcagcgcgagtattttggtgccggtactgaagattgcggcaatgtcggttttgattgcgtccgcccgcttcgctttgccaacgggtgcaaagaaattgtcgcacctctaccgcatcaccgaagcggtcggccgctggtcgatgattgatatttttgtgattattattttgatgtgttcgttccacacttatgccgcgcgcgtcattccgggcagtgcggcagtctatttctgcctggtcgtgattctgacgatgctgtccgcctattatttcgacccgcgcctgctttgggacaaacgcgcttcagacggcattgctttcaatgaaacggaaaaacatgactga

SEQ ID NO: 52967 - DNA, 1155 bp, Neisseria meningitidis; identical to SEQ ID NO: 43786

SEQ ID NO: 52968 - DNA, 378 bp, Neisseria meningitidis; identical to SEQ ID NO: 36526

SEQ ID NO: 52969 - DNA, 279 bp, Neisseria meningitidis; identical to SEQ ID NO: 43106

SEQ ID NO: 52970 - DNA, 1170 bp, Neisseria meningitidis; identical to SEQ ID NO: 43461

SEQ ID NO: 52971 - DNA, 297 bp, Neisseria meningitidis
atgaaaaaatccctgtttgccgctgctttgttgtctttggttctggcagcctgcggcggtgaaaaagccgctgaagctcccgctgctgaagcacctgccgccgaagctcccgctactgaagcacctgccgccgaagctcccgctgctgaagcacctgccgccgaagctcctgctgctgaagctgccgctaccgaagcacctgccgctgaagctgccgctaccgaagcacctgccgctgaagctgccgctaccgaagcacctgccgctgaagctcctgctgccgaagctgcaaaataa

SEQ ID NO: 52972 - DNA, 384 bp, Neisseria meningitidis; identical to SEQ ID NO: 43642

SEQ ID NO: 52973 - DNA, 777 bp, Neisseria meningitidis; identical to SEQ ID NO: 42565

SEQ ID NO: 52974 - DNA, 825 bp, Neisseria meningitidis; identical to SEQ ID NO: 43996

SEQ ID NO: 52975 - DNA, 549 bp, Neisseria meningitidis
atgaacctctccaaccactttctcatcgccatgcccgatatggaagacgcgtttttttcacaatcggtcgtctatatctgcaaacacgatgaagacggcgcactcggcatcgccatcaacaaaccctctccgattacgatggacatgattttttccgccaccggcaaaaacatccccatgcggatgcagcacgacagcgtgatgatgggcggtccggtgcaggtcgagcgcggttatgtcgtgcataccccgatcggcaactggcaaagcagtatcggcgtttcagacaatatcgcgctaacttcttcccgagacgtgattgaaaatatttcacgcgaaggtgcggttgacaaagccttgatcagcataggctattcaagctggagcaaagggcagctcgaacgcgaacttgccgacaatgcgtggctgactgttcccgccgacgaacacatcctgttcgacatcccctacgaacaccgttacgccgccgcattcgccaaactcggcatcgacccgctcgccctgttttcaggagccggccatgcataa

SEQ ID NO: 52976 - DNA, 522 bp, Neisseria meningitidis; identical to SEQ ID NO: 43029

SEQ ID NO: 52977 - DNA, 1479 bp, Neisseria meningitidis; identical to SEQ ID NO: 42271

SEQ ID NO: 52978 - DNA, 216 bp, Neisseria meningitidis; identical to SEQ ID NO: 42383

SEQ ID NO: 52979 - DNA, 597 bp, Neisseria meningitidis; identical to SEQ ID NO: 43118

SEQ ID NO: 52980 - DNA, 855 bp, Neisseria meningitidis; identical to SEQ ID NO: 43094

SEQ ID NO: 52981 - DNA, 132 bp, Neisseria meningitidis
atgcatatttatgatttttatttgccggaaggggaatatttatttgagatttctgataatagtgaatatattccactttacgatgaaataaataattctataagaatagtagttaatgcacgaattcagtaa

SEQ ID NO: 52982 - DNA, 1986 bp, Neisseria meningitidis; identical to SEQ ID NO: 42662

SEQ ID NO: 52983 - DNA, 1218 bp, Neisseria meningitidis; identical to SEQ ID NO: 43471

SEQ ID NO: 52984 - DNA, 2121 bp, Neisseria meningitidis; identical to SEQ ID NO: 42770

SEQ ID NO: 52985 - DNA, 123 bp, Neisseria meningitidis; identical to SEQ ID NO: 42543

SEQ ID NO: 52986 - DNA, 525 bp, Neisseria meningitidis
gtgttggacagggaaggctatcgccccaatgtcggtatcatcttaatcaacaaccgcaacgaagtcttttggggtaagcgcgtgcgcgaacattcttggcagtttccgcaaggcggcatcaagccgggcgaaagccccgaaaccgccatgtaccgcgagttgtacgaagaagtcgggcttttgccgcaacacgtcaaaattatcggccgcacgcgcgactggctgcgttatgacgtgccgaacaactgggtacgccgcgaatggcgcggctcttatcgcggacagaagcagatttggtatctcctgcgcctgaccggccgagattgcgatgtcaacctgcgcgccacccgccaccccgaatttgacggctggcgttggcatcaatattgggcacccgttgacgaagtgattgatttcaaacgcgacgtttatttgggggcgttgaaagaactctcttcccgcttcctgcgcggtatggaaagttatgaagactttgccgcccgccaatcttccgacaaccgctaa

SEQ ID NO: 52987 - DNA, 222 bp, Neisseria meningitidis; identical to SEQ ID NO: 50201

SEQ ID NO: 52988 - DNA, 1221 bp, Neisseria meningitidis; identical to SEQ ID NO: 50272

SEQ ID NO: 52989 - DNA, 171 bp, Neisseria meningitidis; identical to SEQ ID NO: 36504

SEQ ID NO: 52990 - DNA, 375 bp, Neisseria meningitidis
atgcagtatctgattgtcaaatacagccatcaaatcttcgttaccatcaccattttggtattcaacatccgttttttcctactttggaaaaatccagaaaagcccttggcgggcttttggaaagcactgccccaccttaacgacaccatgctgctgtttacgggattgtggctgatgaaaattacccatttctccccgttcaacgcgccttggctcggtacaaaaatcctgcttctgctcgcctatatcgcattgggtatgatgatgatgcgcgcccgtccgcgttcgaccaagttctacaccgtttacctgctcgccatgtgttgcgtcgcctgcatcgtttaccttgccaaaaccaaagtcctgcctttctga

SEQ ID NO: 52991 - DNA, 606 bp, Neisseria meningitidis; identical to SEQ ID NO: 43702

SEQ ID NO: 52992 - DNA, 561 bp, Neisseria meningitidis; identical to SEQ ID NO: 42993

SEQ ID NO: 52993 - DNA, 1035 bp, Neisseria meningitidis
ttggaagacgaagattttattcgcgccgcgtccatgctcgccgaagaagttttcggtttcggtatctacaaagaatccaaaggttcgggcggtcgtttctatgagcgctgttggttgatgggttcggaagacgccctatacggtcgcgtccattttggcggccaacaaaataccattcttttcgaactgaccggcaccggttgcggcgtcgcaaaagaaggctgggaatcacgacttttcgcattcctgactaatgcaatccgcccaaaaatcacacacgttgacatcgcaaaagactttttcaacggcgaatacagcccgaaccaagcccgtgaagaccgaaataaaggtatgtttacctgtcatcacgtcaaaccaaaaggcgaatgtttggggtcagattgggaagaagacgatgaagccaaaatgaccaaaggcaagacctatggtatcggctcccgtgaatcgtccaaatatgtccgcgtctatgaaaaaggcaagcagttgggcgataaaacaagcacatggacgcgatttgaaattgaattcaaagcaaaagacatcgttatccctttcgaagttttgcagaatccgggcgaatatttcggcggcgcatatccgatttgcgaacgattcgcccaaaaggcaacgcgcatacacgcggttaaggaagataaggtcatttcagccgaccgctaccttgaatgggtaaaaaaacagttcggacgtgcggcaaacggtctgaaattcatttttcccgaattggacaaagccaaactgtttgaactgattgagccgagtcatcacaagctgcccaagtctttggctcccgaagcctacgactgcgcctttttgaaagctcaagccattcatgaacagcccgcattcaaaccgtacaaagacccttactatatgtacgaatattacgagaatcttgaaaaacagcttgaacagcaaaaacacgtcaacaatgaagaaagctataacaacttcatttacgacaaattcgcaagactaccgatttcatgggcttaa

SEQ ID NO: 52994 - DNA, 756 bp, Neisseria meningitidis; identical to SEQ ID NO: 42573

SEQ ID NO: 52995 - DNA, 321 bp, Neisseria meningitidis; identical to SEQ ID NO: 43186

SEQ ID NO: 52996 - DNA, 822 bp, Neisseria meningitidis; identical to SEQ ID NO: 42663

SEQ ID NO: 52997 - DNA, 933 bp, Neisseria meningitidis
gtgcaggatggaaggcagcagacaatttcgctggggcggtatcctgatttttcgctggccgatgcgcgggaatggcgggaggaggtgcgccgaaaacgggcgcacggggaaaatgtcgtcaataagaaggtgcgggcggattttgcttttgagaaggtggcgcgtgattggtttgtgcgttggtcgaaggggcggtctgaaaagtatgccggacaggttatgcggaattttgagcggtgggtttttccggctatcggcaatcttgatattcgtcaaatcaggacggcggatgtggtcggctgtctgcgtgtgatggaggcgcgcggtatcgttgatacgttgcgcaaaacgaaaaacagtctgaagatggtgtttgcgtttgcggtcggttcgggaatgatggaaatcaaccctgtcgcgcaaatcggttcgggtgtgtttgaacgggcgaaaacggggaatatggcagcgttgagtccgtctgaattgccgcgcctgattgattttttggagcagcgcaatgaatttgcggtttatgcgggcagggtgcgtatccatcctgtaacgcggctttgtatctattggctgctgttgacaatgacgcggattcaggaggcggcgttgatggagtggtcggagttggacggggaggtttggcgtatccccgccgaacggaaaaaggagcggcgggggcatgatgtgccgctgtcgcgggcgatgcagtgggtgttggatcaggcgcgggcgttgaatgtgaacgggcggtttgtgtttgaaagtgtgaattttcaagggcatatcaataaggaaagtccgcgcgtggcgatgcagcgggcggggctggatacgacggcgcacggtttgcgctcgcttgcgcgtacttatttgcgcgaggttctgaaggtggatagtattatgcggaaacgcaaataa

SEQ ID NO: 52998 - DNA, 1086 bp, Neisseria meningitidis; identical to SEQ ID NO: 42631

SEQ ID NO: 52999 - DNA, 906 bp, Neisseria meningitidis; identical to SEQ ID NO: 42240

SEQ ID NO: 53000 - DNA, 198 bp, Neisseria meningitidis; identical to SEQ ID NO: 36305

SEQ ID NO: 53001 - DNA, 528 bp, Neisseria meningitidis
atgaaacagaaaatctggtacacctacgatgacatccaccgcgtcatcaaagcattggcagaaaaaatccggaacgccgacatcaaatacgatgccatgattgccatcggcggcggcggctttattccggcacgtatgctgcgctgttttctggaaattccgatttatgccgtaaccaccgcctattacgacagcgacaacgaaggacaggttaccgaagaagtcaaaaaagtccaatggctcgaccccgttcccgaagccctgcggggcaaaaacgtactcgtcgtcgatgaagtggacgacagccgcgtaaccatggagttctgcctgaaagaactgctcaaggaagacttcggtacgatcggagtcgccgtactgcacgaaaaaatcaaagccaaagcaggcaaaatccccgaaggcattccctatttcagcggcatcaccgtagaagactggtggatcaactatccgtgggacgcactcgacatcgacgaacacaaccgccttgccgaggccggccgaggctga

SEQ ID NO: 53002 - DNA, 867 bp, Neisseria meningitidis; identical to SEQ ID NO: 43925

SEQ ID NO: 53003 - DNA, 558 bp, Neisseria meningitidis; identical to SEQ ID NO: 43151

SEQ ID NO: 53004 - DNA, 1041 bp, Neisseria meningitidis
atgcaggcagttgttgtgaataaaaatgtagcgggcgatgtggaagtaatcgaacgcgaggttcgcccgttggaatacggcgaggcattggtcgaagtcgaatattgcggcgtgtgccacaccgacctgcacgttgcggcaggcgactacggcgaaaaaccgggccgcgtgttgggacacgaaggcatcggtttggttaaagaagttgccgacggtgtgaaaaatctgaaagtcggcgaccgcgtcagcatcgcttggctgttccaaagctgcggctcttgcgaatactgcaataccggccgcgaaaccctgtgccgttccgtattgaacgcgggctacaccgccgacggcggtatggcgacccactgtatcgtgagtgccgattacgcggtcaaagtccctgaaggtttggatcctgcgcaagcttccagcattacttgtgccggtgtaaccacttataaagccattaaagtttccggcgttcgtccgggacagtggattgccatctacggcgcgggcggtttgggcaacttgggggtccaatacgcgaaaaaagtattcggcgcgcacgttgtcgccatcgacatcaacgacgacaaactggcgtttgccaaagaaaccggcgcggatttggttgtcaacgccgccaaagaagacgctgccaaagtgattcaggaaaaaaccggcggcgcacacgctgcggtcgtaaccgccgtatctgctgccgcattcaactctgccgtgaattgcgtccgcgcgggcggacgtgtggttgccatcgggctgccgccggaatcgatggatttgtccatcccgcgtttggttttggacggcatcgaagtggtcggctctttggtcggcacgcgcaaagatttggaagaagccttccaattcggcgcggaaggtttggttgtgccgaaagtccaactgcgtgctttggatgaagcacccgccattttccaagaaatgcgcgaaggcaaaatcaccggccgtatggtgatcgatatgaaaaaagaatgcggctgcggccatcaccactga

SEQ ID NO: 53005 - DNA, 813 bp, Neisseria meningitidis; identical to SEQ ID NO: 43277

SEQ ID NO: 53006 - DNA, 309 bp, Neisseria meningitidis; identical to SEQ ID NO: 38004

SEQ ID NO: 53007 - DNA, 279 bp, Neisseria meningitidis; identical to SEQ ID NO: 36688

SEQ ID NO: 53008 - DNA, 672 bp, Neisseria meningitidis; identical to SEQ ID NO: 43608

SEQ ID NO: 53009 - DNA, 804 bp, Neisseria meningitidis
atgaaaaaaattcttttaacggtttcattaggtttggcactgagtgcctgtgccactcaaggtacggtagataaagatgcccagattacccaagactggagtgtggaaaaactctatgccgaagcccaggacgagctgaacagcagcaattatacgcgagctgtcaaattatacgaaatcttggaatcgcgcttccctaccagccgccatgcccagcaatcccaactggatacggcatacgcctactataaagatgatgagaaggataaggcgctggccgccattgaccgcttccgccgccttcaccctcaacacccgaatatggactacgcgctatacctgcgcggtttggtactgttcaacgaagatcaatctttcttgaacaagctggcctcgcaagactggtccgaccgcgacccgaaagccaaccgcgaagcgtatcaggcctttgcggaactcgtccaacgcttcccgaacagcaaatacgccgccgatgcgaccgcacgcatggtcaaactggtcgatgctttgggcggcaatgaaatgtcggtagcgcgttactacatgaaacgcggcgcatatatcgccgccgccaaccgcgcccaaaaaattatcggcagctatcaaaatacacgctatgtcgaagaatcgctcgccatattggaacttgcctacaagaagttggacaagccccggcttgccgccgatacgcgccgcgtgttggaaaccaacttcccgaaaagcccgttcttaaagcagccgtggcgatctgacgatatgccctggtggcgttactggcactga

SEQ ID NO: 53010 - DNA, 2751 bp, Neisseria meningitidis; identical to SEQ ID NO: 42104

SEQ ID NO: 53011 - DNA, 909 bp, Neisseria meningitidis; identical to SEQ ID NO: 42410

SEQ ID NO: 53012 - DNA, 2427 bp, Neisseria meningitidis
atgtcggcacaaaccgatccgggctacttcttcatgcccaaccacatcatcctgataggcgcgagcgaacaaccgtacagcctgggcgaacgtgtactcagcaacctgctgagtacgccctttcaaggaaaaatcacccccgtaaacccgcgccaccacaccatagccggactgcccgcctacaccagcctcaacaaaatccccggcaatgcagacctgattattgccgttaccctacccgacagttacgacaccctcttcaaaacctgccgcaaaaagcagctccgacacatcatcctcatacaggactgggacaacctgtctgccgcagaactgcacaccgccgaaactgccatccgcaaacaccacggcaacggactcaacatcaccgcctgcaccaccgcaggcatccaactgccctcactcggactcaacatcagtacccaagacggatacgccgcaggccataccgccatactgaccggcaatgccgccgtcagccgccaaatcgacaacatcctgaacaaactccgtcaaggcacatcccgccacatcagcctgcatcccggcatcagccccatcacatccgccgattggctcaaccgcttcggacacagcctgcacaccaaaaccgccgtcctacaccacaaccctgaagaggatcagcgcaaactgttcagcgcaatccgccaatttacccgccatacgccgctgattctccacatcacctgccgcacgacagaaaccgaccgtgccgtactgcactgcctcgcccgacactgcaacttcctcgtcagtttcaacgccgacgacctcgaagccgcactgcgcgcccaactgtccgaccttccacccctgtcccgactcgacatcctgtccgacacgcctgccgaatggctgcacgcgcacgcgccaaaaaacctcaccctccactttcccaaccttccccaccacatccgcaacggacacctgaccggcacacccacaccctcaatctgccacgacatcgcctcacgtcagcttgcccaccccgacacccaagccgtcctaaccatcctcagtccctccggacacgaggattacaaaaaaacagcacgcgcccttatccgcctgtccgaacagaccgccaaacccctgctcgtcagcagccccttttcagacggcataacccatttcgacacccccactcaggcaatccgcaccctttcctaccgcaacaccgccgccgccctgaaacaggcacagctcgacattgcaccgccgcagccatgccgtctgaaaacaccgcaaccccaaaacatcaaaaaagcccttgcagcggcaaacccctccctgctcgccgaagccctgcacctccccccctaccggcacaccacccataacgccgtacaattccaattcgacagccaccccctctatggcgacatcctgaccgcacgctgcaacggacaaaccactgccgtactcccgccgtttaccacgctcgacagccgccaccttgcccgctttgccgaactcgacggcacacaaaccctcgaccagttcctgcacacactgaccgtcattcccgaataccgccaacacattctcggcatcaccctcaacctcaacggcggacaatacagcagcgatttcctcttaaagacacccgaaacacacgacacgcccaaacgcaagaacacaggcaaagccgcccaaaccctcgaacatgccgccgcaaaaatgcagagtgccgccgcatacctgaaacacaaaaacccgacagccgccgaatttctccgccacacaagcgaagccgccgcagaactgctcggcagcaaaaccgaaaccggagcagccgtacccaacgtacttgccccctatcccgcagcataccccaaaacactgtccctaagaaacaacacgaccgttaccattacccccattttgcccgaagacgcagaagccaaacagcagttcgtccgcagcctcggtcccgaagcacggtacacacgcttcatgacccacaccaacgaactgcccgcagccacgttggcacgcctgtgcaaccccgattaccactgtgaagccgcatggacggcaaaggatgccgacagcaacatcgtcgccgtcgtccgccacagccgcctgaatcgcaacgaatgcgaattcggcatcacactggcggaacatatgcgcggcagcggactggcacagaaaatgatggaactcatcatccaaaccgccgcacagcaaggctaccggactatgagtgccgacattctcaaaaccaatacccccatgatcaaacttgctgaaaaatcaggatttaccctcaaggaatcggacaccgaaaaaaacctgtaccgcgcatatctgaaccttgcggcagacaaaacaacagaaaaaacaaataaaaacttgcgcaccgaccacaaaataacctaa

SEQ ID NO: 53013 - DNA, 504 bp, Neisseria meningitidis; identical to SEQ ID NO: 42472

SEQ ID NO: 53014 - DNA, 714 bp, Neisseria meningitidis; identical to SEQ ID NO: 42984

SEQ ID NO: 53015 - DNA, 417 bp, Neisseria meningitidis
atggcaaagctgacagaacaagatattttgaattggagcgggccggaagacgattatatgaatgacgaccatttggcttttttccgcgaattgctggtaaaaatgcaagacgaactcatcgaaaatgcttccgctacgacagggcatctccaagaacacgaatcagcccccgatcctgccgaccgtgccacacaggaagaagagtacgcattggaactccgtacccgcgatcgggaacgaaaacttctcagtaaaatacaggcgaccatccgcaatattgatgaaggggattatggattctgtgccgatacgggagagcctatcggtttgaagcggctgctggcacgcccgacagccactttatctgttgagtcccaagaacgccgagagaggatgaaaaaacagtttgccgactga

SEQ ID NO: 53016 - DNA, 1065 bp, Neisseria meningitidis; identical to SEQ ID NO: 43605

SEQ ID NO: 53017 - DNA, 774 bp, Neisseria meningitidis; identical to SEQ ID NO: 43132

SEQ ID NO: 53018 - DNA, 633 bp, Neisseria meningitidis; identical to SEQ ID NO: 43370

SEQ ID NO: 53019 - DNA, 966 bp, Neisseria meningitidis
atgagctacacgcaactgacccagggcgaacgataccacatccaatacctgtcccgccactgcaccgtcaccgaaatcgccaaacagctgaaccgccacaaaagcaccatcagccgcgaaatcagacggcaccgcacccaagggcagcaatacagcgccgaaaaagcccagcggcaaagccggactatcaaacagcgtaagcgacaaccctataagctcgattcgcagctgattcagcacatcgacccctttatccgccgcaaactcagtcccgaacaagtatgcgcctacctgtgcaaacaccaccagatcacgctccaccacagcaccatttaccgctaccttcgccaagacaaaagcaacggcagcacgttgtggcaacatctcagaatatgcagcaaaccctaccgcaaacgctacggcagcacatggaccagaggcaaagtacccaaccgtgtcggcatagaaaaccgacccgctatcgtcgaccagaaatcccgtatcggcgattgggaagccgacaccattgtcggcaaaggacagaaaagcgcattattgaccttggtcgaacgcgttacccgctacaccatcatctgcaaattggatagcctcaaagccgaagacactgcccgggcagctgttagggcattaaaggcacataaagacagggtgcacaccattaccatggataacggcaaagagttctaccaacacaccaaaataaccaaagcattgaaagcggagacttatttttgtcgtccttaccattcttgggagaaagggctgaatgagaacaccaacggactcatccggcaatacttccccaaacaaaccgatttccgtaacatcagtgatcgggagatacgcagggttcaagatgagttgaaccaccgaccaagaaaaacacttggctacgaaacgccaagtgttttattcttgaatctgttccaaccactaatacactag

SEQ ID NO: 53020 - DNA, 279 bp, Neisseria meningitidis; identical to SEQ ID NO: 36778

SEQ ID NO: 53021 - DNA, 615 bp, Neisseria meningitidis; identical to SEQ ID NO: 43434

SEQ ID NO: 53022 - DNA, 2115 bp, Neisseria meningitidis
atggcctatcaagttctcgcccgaaaatggcggcccaaaacctttgccgacttagtcggtcaggaacacgtcgtcaaagccctgcaaaacgccctggacgaaggcaggctgcaccacgcctacctgctgaccggcacgcgcggcgtaggtaaaaccaccatcgcccgcatccttgccaaaagcctcaactgcgaaaacgcgcaacacggcgaaccttgcggcgtatgtgaaagctgtacgcagatcgatgccggacgctacgtcgacctgctggaaatcgacgccgcctccaacacaggcatcgacaacatccgcgaagtcttggaaaacgcccaatatgcaccgaccgccggaaaatacaaagtctatatcatcgacgaagtgcatatgctttccaaaagcgcgttcaacgctatgctcaaaacgctggaagagccgcccgaacacgtcaaattcatcctcgccaccaccgatccgcacaaagttcccgttaccgtcttgagccgctgcctgcaattcgtcttacgcaatatgaccgcgcaacaggttgccgaccacctcgcccacgtcctcgacagcgaaaaaatcgcctacgaacccgccgccctgcaacttttgggacgtgccgccgccggatcgatgcgcgatgccttgagcctgctcgaccaagccatcgccctaggttcgggcaaagttgccgaaaacgatgtccgccaaatgatcggcgcggttgacaaacaatacctttacgaactgctgacaggcatcatcaaccaagacggcgcagccctgaccgccaaagcgcaggaaatggcggcgtgtgccgtcggctttgacaacgccttgggcgaacttgccatactgctgcaacacctcgccctgatacaggcagtgccgaatgccttggcgcacgacgaccccgattccgatattttgcaccgcctcgcccaaaccataagcggcgaacaaatccagctttactaccaaatcgccgtccacggcaaacgcgacctcagcctcgcccccgacgaatacgccggctttatgatgaccctgctgcgtatgctggcgtttgcgcccttggcggcagcatcgtgtgatgcaaatgccgtgattgaaaataccgaactaaaatccccatcggcacaaaccgccgaaaaggaaaccgccgcaaaaaagccccaaccgcgccctgaagcggaaaccgcccaaacacccgttcagacggcatccgcagcagcaatgccgtctgaaggcaaaactgccgaacccgttaccaatcaagaaaacaacgatattccgccttgggaagacgcgccggacgaaaccgcagccggcacggcgcaagcatcggcaaaaagcattcagacggcatccgaagccggaacgccgcccaaaaaccaagtttccaagaacgaagcagccgacaacgaaaccgatgcccccttgtccgaagtgccgtctgaaaaccccattcaggcaacaccgaataatgaagcccttgaaacagaagcatttgcacacgaagctcctgcaaaacctttcaacggttacagctttccgaatgatgactacctcgtagaagacggcgcagaaatcccaccgcccgattgggaacacgccgcccctgccgatgcggaagaagaaaacaacgccgacgaaagcagcaacaacgaagaccacacgccatacgccccgccgcccgaattttccaccgaaaactgggcagccatcgtccggcacttcgcccgcaaactcggcgcggcgcaaatgccggcgcaacactccgcgtggacggaataccatcccgacaccggtctgatggttttggcaatgaccgccgaagcacgcgccaccgccgacaaaaaacgcctcgacaaaatccgcgacacccttgcccaagcctacgggctgcaactcaccctgcaaacccaagactggcgtgacgaagccggccgggaaacccccgcgatgcaggacaagcgcgtccaagccgaagacaggcaaaaagcacaagcattgctcgaagccgaccccgccgcacaaaaaatcctccaagcattcggcgcgcaatggcagcccgaatcactggaattggcggcaaaccggccataa

SEQ ID NO: 53023 - DNA, 1470 bp, Neisseria meningitidis; identical to SEQ ID NO: 43805

SEQ ID NO: 53024 - DNA, 771 bp, Neisseria meningitidis; identical to SEQ ID NO: 42376

SEQ ID NO: 53025 - DNA, 783 bp, Neisseria meningitidis; identical to SEQ ID NO: 42512

SEQ ID NO: 53026 - DNA, 369 bp, Neisseria meningitidis; identical to SEQ ID NO: 42386

SEQ ID NO: 53027 - DNA, 879 bp, Neisseria meningitidis; identical to SEQ ID NO: 43320

SEQ ID NO: 53028 - DNA, 387 bp, Neisseria meningitidis; identical to SEQ ID NO: 42223

SEQ ID NO: 53029 - DNA, 720 bp, Neisseria meningitidis
atgacacagcaaatcaaatacaaacgcgtattactgaaactctccggcgaatccctgatgggttccgatccgttcggcatcaatcacgataccatcgttcaaactgtcggcgaaattgccgaagtcgttaaaatgggcgtgcaagtcggtattgttgtcggcggcggcaatattttccggggcgtatccgcccaagcaggcagcatggatcgcgccaccgccgactacatgggcatgatggcgaccgtgatgaacgcgttggcactcaaagacgcatttgaaactttaggcatcaaagcgcgcgtacaatccgcactgtctatgcagcaaatcgctgaaacctacgcccgccccaaagccatccaatatttggaagaaggcaaagtcgtgatttttgccgccggtaccggtaacccgttcttcacgaccgacactgccgccgcattgcgcggtgcggaaatgaactgcgacgtgatgctcaaagccaccaacgtcgacggtgtgtacaccgcagacccgaaaaaagacccgtccgccacgcgctacgaaaccattacttttgacgaagccttgttgaaaaacctcaaagtcatggacgcgaccgctttcgccctctgccgcgaacgcaagctcaatattgtcgtcttcggcatcgccaaagaaggctcgctcaaacgcgtcattaccggcgaagacgagggaacgctggttcactgctga

SEQ ID NO: 53030 - DNA, 375 bp, Neisseria meningitidis; identical to SEQ ID NO: 42536

SEQ ID NO: 53031 - DNA, 1785 bp, Neisseria meningitidis; identical to SEQ ID NO: 43796

SEQ ID NO: 53032 - DNA, 1104 bp, Neisseria meningitidis; identical to SEQ ID NO: 42777

SEQ ID NO: 53033 - DNA, 1236 bp, Neisseria meningitidis
atgcttgtctgtatttttacggggtttacctcggggctgccgctgtactttctgattaacctgattccggcgtggttgcgcagcgagcaggtggatttgaagagcatcgggctgatggcgttaatcggtctgccgtttacttggaaatttttgtggtcgccgctgatggacgcggtcaggctgcccgttttgggacggcggcgcgggtggatgctgctgacgcaggcagggttgctggcggctttggcggtctatgcctttttaaacccccgtaatcatctgccgctgattgccggcttgtcggtgcttgtcgcttttttttccgccagtcaggatattgtattggatgcgttcaggcgcgagattttgtcagacgaagaattgggtttgggcaactcggttcatgtgaacgcctaccggattgccgccctgattcccggttcattgagtttggtgttggcagacaggatgccgtggttagaagtatttgttatcacttcattatttatgctgcccggccttctgatgacgctgtttcttgcgcgcgaacccgtgttgcctcctgccgttcctaaaacgttgaagcagaccgtggtagagccgtttaaagaattttttacgcgcaagggcatcgcttcggcggtgtgcgtgctgctgtttatcttcctttacaaactcggcgacagtatggcaaccgcgttggcaacgccgttttatctggatatgggtttcagcaagaccgacatcggtttgattgcgaaaaatgcaggactgtggccggcagtggcggcaggtatcttgggcggtgtgtggatgctgaaaatcggcgtaaacaaagccttgtggctattcggcgcggtgcaggctgtaaccgttttggggtttgtatggctggcagggttcggacctttcgacacggtcggcacaggcgagaggctgatgctggcggcagttatcggcgcggaagcggtcggcgtggggttggggacggcggcgttcgtatcgtatatggcgcgtgaaaccaatcccgcatttaccgcaacgcagcttgcgctgtttaccagcctgtccgccgtcccgcgcacggtcatcaattcctttgccggttatctgattgaatggctcggttatgtaccgtttttccaactgtgtttcgcactcgccctaccgggtatgctgctgctgctgaaagttgcgccttggaacggggagaaaactcaggatgcaggcagatga

SEQ ID NO: 53034 - DNA, 312 bp, Neisseria meningitidis; identical to SEQ ID NO: 42941

SEQ ID NO: 53035 - DNA, 810 bp, Neisseria meningitidis; identical to SEQ ID NO: 43744

SEQ ID NO: 53036 - DNA, 207 bp, Neisseria meningitidis; identical to SEQ ID NO: 43480

SEQ ID NO: 53037 - DNA, 945 bp, Neisseria meningitidis; identical to SEQ ID NO: 43769

SEQ ID NO: 53038 - DNA, 1314 bp, Neisseria meningitidis; identical to SEQ ID NO: 43476

SEQ ID NO: 53039 - DNA, 357 bp, Neisseria meningitidis; identical to SEQ ID NO: 36545

SEQ ID NO: 53040 - DNA, 726 bp, Neisseria meningitidis; identical to SEQ ID NO: 43314

SEQ ID NO: 53041 - DNA, 3210 bp, Neisseria meningitidis; identical to SEQ ID NO: 42134

SEQ ID NO: 53042 - DNA, 303 bp, Neisseria meningitidis; identical to SEQ ID NO: 43912

SEQ ID NO: 53043 - DNA, 1371 bp, Neisseria meningitidis
atgccgcaaaacactttaaacatcgtcatcctcgccgccggcaaaggcacgcgcatgtattccaaaatgccaaaagtgctgcaccgcatcggcggcaagcccatggtcgggcgcgttatcgacaccgcagccgcactgaatccgcaaaacatctgcgtcgtcatcggccacggcaaagagcaagtcttggacaccgtcaaacgcgatgtcgtttgggttgaacaaaccgaacagctcggtaccggccacgccgtcaaaaccgccctgccccacctttccgccgaaggccgcacgctggtgttgtacggcgacgttcctttaattgacgttgaaaccctcgaaaccctgctcgaagccgcaggcaacgaagtcgggctgttgaccgacgttcccaacgacccgacaggcttggggcgtatcatccgcgacagcaacggcagcgtaaccgccatcgtcgaagaaaaagacgccgacgccgtccaaaaagccgtgaaagaaatcaataccggcatcctcgtcctgcccaacgccaaactcgaaaactggctgaacagcctttccagcaacaatgcacaaggcgaatactacctgaccgacctcatcgccaaagccgttgccgacggtattaaagttcatcccgtccaagtgcgcgcctcccacctcgccgccggcgtgaacaacaaactccagctcaccgaactcgaacgcatcttccaaaccgaacaggcgcaagaattgctcaaagcaggcgtaaccctgcgcgatccggcacgtttcgatttacgaggccgtctgaaacacgggcaagacgtcgtgattgatgtgaactgtatctttgaaggcgacatcgagctcggcgacaacgtcgaaatcggcgcaaactgcgtcatcaaaaacgccaaaatcggcgcaaacagcaaaatcgcccccttctcccacctcgaaagctgcgaagtcggcgaaaacaaccgaatcggcccgtacgcccgcctgcgtccgcaagcccgccttgcagacgacgtacacgtcggcaacttcgtcgaaatcaaaaacgccgccatcggcaaaggcaccaaagccaaccacctcacctacatcggcgacgccgaagtcggctgcaaaaccaacttcggcgccggtacgattattgccaactacgacggcgtgcacaaacacaaaaccgtcatcggcgacgaagtgcgcatcggttcaaactgcgtcctagtcgcccccgttaccctcggcaacaaagtaaccacaggcgcgggcagcacgattacccgcaatgtcgaagacaacaaactcgccctcgcccgcgcccgccaaaccgtcatcgaaggctgggtgcgtcctgaaaaagacaaacaataa

SEQ ID NO: 53044 - DNA, 987 bp, Neisseria meningitidis
atgcaataccgaatcagaagagaaaacgaagcacccgaagcaaaaaatgcgggggaaaccttatgggagcgcgacatcatgcgcgaagtgctgttgtccgcctatcaggacaggcgcagggagcggatgtggaaaaacatctggcgcgccgtcagcaccctgattctggttgccctgattgcaggcattttccgaaaagacgaagccgcattgcagttggcgggcaacacgccgcataccgcagtcgtcaatctgtacggcgaaatcggcaacggtgtagaagaccaggtcaaaaaactcaaagacggtatggaggccgcctacaaaaacccgcaggcaaaagccatcgtcatccgcgccaacagccccggcggttcgcccgtcgtgtccaacaccgcttttgaagaaatacgccgtctgaaggcgcagcaccccggcattcccgtttatctcgtggcggaagatatgtgcgcgtccggctgctactacatcgcggcggcggcggacaaaatctatgccgacccgtccagcatcgtcggcagcatcggcgttatcggcagcagtttcgacgcgaccggcctgatggaaaaaatcggcgtgaaacgcagggttaaaattgcaggcagcaacaaaggcatgggcgatccgttttcgcccgaaacgcccgaacagtcaaaaatctgggaagaaatgctgaccggcatacacggcgagttcatcaaagccgtcaaaaccggacgcggcggccgcctcaaattccgacaatatcccgacgtgttcagcggtcgcgtgtacacaggcgcggatgcgctgaaagtcgggctggtggacggactcggcaatatttacagcgtggcgcgagacgtggtcaaagcccccgatgtggtggattacactccgaaggacgatttcggcagaatcttgggcagacgcttcggcgcagaactcaaagcaagcgtgcgcgaagccctgcaggccgtccggtag

SEQ ID NO: 53045 - DNA, 1011 bp, Neisseria meningitidis; identical to SEQ ID NO: 43791

SEQ ID NO: 53046 - DNA, 1845 bp, Neisseria meningitidis; identical to SEQ ID NO: 50091

SEQ ID NO: 53047 - DNA, 273 bp, Neisseria meningitidis
atgattgccaaacacatcgaccgtttcccactattgaagttggaccaggtgattgattggcagccgatcgagcagtacctgaaccgtcaaaaaacccgttacctccgagaccaccgcggtcgtcccgcctgtcccctgttgtccatgttcaaagccgtcctgctcggacaatggcacagcctctccgatcccgaactcgaacacagcctcatcacccgcatcgatttcaacctgttttgccgtttcgacgaactgagcagtatagtggattaa

SEQ ID NO: 53048 - DNA, 864 bp, Neisseria meningitidis
atgagaatcctattgacaggctcgaaaagccaactggcacgctgcctgcgcgaccgtcttccggaagactgggaaaccattgcgacggattccgcatccctagacattaccgatgccgatgccgtctgcaacatggtcaaaagtttccaacccgacgctattgtcaacacggctgcctatactgccgtcgacaaagcggaaggcaatgcggcagcggcatttgccgtcaatgcttccgccgtttacaaccttgccttggcagcacatcgcgcccatgcccgattcatccacatctcaaccgactatatctttgacggtaaagggaaaaggccctatcaggaaagcgactttaccaatccttccaatgtatacggacaatccaaaaccgcaggcgagctgctcgcactgtctgccaatcccgacagccttatcctgcggacttcttggctgtttagcgaatacggggacaactttgtccgcaccatgctgaaccttgcgcgggaacgttccccgctgtccgccgtccacaaccaaatcggctgcccgacctatgccggcgatttagctgccgccatcatccgccttttgcagcaaacgtcgcccgtgcgcggcatttaccactacgccggcggcaaatccgtatcctggtacgaatttgcccaacatattttccaagcggcatcgcaacagcagacatccttccccgttcccgaattgactgccgtttcagacaaggaatatccgaccgccgcccccaggcccgcatacagcattttggactgccgcaaaatcgaaaacgacttcagcatcaaaccgtcagactggcaaaaagcccttgcacaggtcgtttccaagctgctctga

SEQ ID NO: 53049 - DNA, 618 bp, Neisseria meningitidis
atgtttacaggcattgttcaaggattgggaaaactgacggcaatccaccgcccgtcggaggcatttcagacttatgtcgtcgagcttccgcaagaggcggcggacaatctgcaacgcggcgcatcggtcgccaacaacggctgctgcctgacgattaccgaaatcgaaggaaaccgcgtcagtttcgatttaatggcggaaactttggcaaaaaccaatttagggctgctgaaggaaggcgattgcgtcaacatcgaacgggcggcgcgtttcggagacgaaatcggcggacacgtcatgagcggacacattatggcaaccgtgcctattgtcgaaatcgaacgggacgggtacaaccgcacggtttggttttcgctcccgcacgaactcaaaccctatatcctgaccaaagggttcgtcggcttggacggttgcagcctgaccataggcaaagtcgaagacagccgtttcaatgtccatttgattcccgaaactttggaacggacgctgttcggcagcagaaaggtcggcgacagaatcaacatcgaaatcgatccgaatacgcaggcaatcgtcgataccgtcgaacggctgatggcgcaaagatatgcaaagtga

SEQ ID NO: 53050 - DNA, 1287 bp, Neisseria meningitidis; identical to SEQ ID NO: 43331

SEQ ID NO: 53051 - DNA, 192 bp, Neisseria meningitidis; identical to SEQ ID NO: 43532

SEQ ID NO: 53052 - DNA, 3204 bp, Neisseria meningitidis; identical to SEQ ID NO: 42345

SEQ ID NO: 53053 - DNA, 1302 bp, Neisseria meningitidis
atgccgtctgaacatcaacacatatcatcattgctcgattttgaccgtacccatctgcttcatccctatacttccatgaccgatccgctgcccgtttatcctgtcaaacgtgcagaaggggtgtttatcgaattggcggacggcacgcggttgattgacgggatgtcgtcttggtggtgtgcgatacacggttacaatcatcctgttttgaatcaggtggttgagacgcagattaagcaaatggcgcacgtgatgttcggcggtttgacgcacgagccggcggtggaactgggcaagttgttggtcggaattctgccgcaggggctggaccgtattttttatgcggattcgggttcggtttcggtggaagttgcgttgaaaatggcggtgcaataccagcaggcgcgggggttgacggcgaagcagaatattgcgacggtgcggcgcgggtatcacggcgatacttggaacgcgatgtccgtctgcgatccggaaacggggatgcaccatattttcggcagcgcgttgccgcagcgttattttgtcgataatccgaaaagccgtttcgacgatgaatgggacggggcggatttgcagcctgtccgcgccttgtttgaagtgcatcatgcggatattgccgcctttattttagagccggtcgtgcagggcgcgggcggtatgtatttttatcatccgcagtatcttcgcggattgcgcgatttgtgcgacgagtttgatatcgttttgatttttgatgaaatcgccaccggattcgggcgcacgggcaagatgtttgcctgcgaacacgcggaggtcgtgccggatattatgtgcatcggcaagggtttgagcggcggctatatgacgctggcggcagcaatcacttcgcaaaaagttaccgaaacgatttcgcgcggagaagcgggcgtgttcatgcacggcccgacatttatggcgaacccgctggcgtgtgccgttgcctgcgcttcggtcaaactgcttttgtcccaagattggcaggcaaatatccgccgcatcgaaagcatcttaaaatgctgtctgaaaaccgcgtgggacattcgtggtgtgaaagacgtgcgcgttttgggcgccatcggcgtgatcgagttggaaaaaggcgtggatatggcgcgttttcaagcggattgcgtggcgcagggcatttgggtgcgcccgttcggcaggttggtgtatctgatgccgccttacatcatttcagacggcgttttgaccaaacttgccgacaaaaccgtgcaaatcttgaaggaacacagcaaatga

SEQ ID NO: 53054 - DNA, 2364 bp, Neisseria meningitidis
atgcaattctcctactcatggctgaaaacccaagccgataccgaactttcctccgataagctggaacatctgttaacgatgtccggcttggaagtggaagaggccgaaactgccgcgcctgcgtttgcgggcgtggtgattgccgaagtgaaatccgttgaaaaacatcctgatgcagaccgtttgaacgttacccaagttgatgccggtacgggcgagttggttcagattgtttgtggtgcgccgaatgtcaagccgggtattaaagtgccgtgttcgttgccgggtgccgttttgccgggtaactttaaaattaagccgactaaaatgcgcggcgtaccatcaaacggtatgttgtgttcgaccaatgaactgggtttgcctgatgatggtgtagacggtctgcacattctgcctgaagatgcgcctgtcggtactaacatccgcgaatacttggatttggacgatacgctgtttacgttgaaaattacgcctaaccgcgctgactgcttgagcgttaagggtattgcgcgcgaagtgtccgcattgacggggtgcgcgttcaggcagcccgaaatccataccgcgccgatcacaggcagtcgaaaacagcccgtgcagattaacgcgcctgccgattgcggccgttttatcagccgcgttattgaaaatgtcaatgcgaaagcggctactcccgattggatgaaacaacgtttggagcgcagcggcatccgcagtatttccgcgctggtggacatcggcaattatgtgatgctggaaatcggtcagccgatgcacgtttttgatgccgacaaactttccggcagcctgcacatccgccgcgcgcgcgaaggggaaacgctggaatgcctgaacgagaaaaccgtttccctgtctgaaaacacgctggtcgtggcggacgaaaaaggcgtgttgagtttggcgggcttaatgggcggcgcggcgagcgcggtttcagacggcacgcaaaatatcgtgctggaagcggcttggtttgcgcccgaaatcatcgccggcaaatcgcgccaatacggtttcggttcggattcgtcgttccgcttcgagcgcggcgtggattaccgtttgcaggcggatgccattgaacgtgctaccgaattggtgttgcagatttgcggtggtgcggcaggcgagatggtggaagcgcaaggcgaattgcctgaagcgaagcaggttggattgcgtttgggccgtctgaaaaccgtgttgggcgtggacattcctgccgaacaggtggaaaccattttgcaacacttgggcctgcagcccgagaaaacggcggaaggcttccgcgttaccgcgccgagcttccgttttgacatcgaaattgaggctgatttgattgaagaaatcggacgcgtttacggctatgaaaacatccccgacgattacacgtcaggccgtctgaaaatgctggaactgcccgaaacacgccgcccgcgttttgccgtttacaacgaaatggcggctcgcggttaccgcgaagtggtcagctatgccttcgttgacgagcagtgggaacaagattttgccgccaacgccgaccccatccgcctgcaaaacccgctggcggcgcagtatgccgtgatgcgttccacgctcatcggcggcttggtggaaattctgcaaaacaatctgaaccgcaaacaaaaccgcgtgtgcgtgtttgaaatcgcccgcgtgttcagcaaaggttcagacggccagtttgtccaaaacgaacgcatcggcggattgtggtacggcgcggtcatgccggaacaatggggcgggaaaacgcgcaatgcggatttttacgacatcaaggcagatgtggaaaatctgttgaaaaacaaagcagtcgagttcgttaaaaccggacatcctgccctgcatcccggacgcgccgccaatatcgtttcagacggcaaagtcatcggctttgtcggcgaactgcatccgaaatggctgcaaaaatacgacctgccgcaagcgccgctggtatttgaaatcgatatggcggccgtgttggaatgcgggaaaacgcgctatcgggccgtatcgaaattccagccggtgcgccgcgatttggcgtttgtgatgccggaagctatgagccatgatgatttgctgcttgtcttgaaaggcgcggcaaacaagttggtacaggaaatcagcgtgtttgacgtgtatcgcggcacgggactgcccgaagggatgaagagcgtggcggtcaaagtgattttgcaggatatggaaaacacgctgacggatgaggcagtcgagccgcttatcggaaaactgattggcgcggcaacggcggcaggggcgcggcttcgcagttaa

SEQ ID NO: 53055 - DNA, 510 bp, Neisseria meningitidis
atgaaaaagaaactgctttcgggcatcaaatttgccgttcagacggcattggtgtttttattggtgtcgctgtttttggattggatacgcaagcccgaagagccggccggtgcggcagggcggcctttgaccctgctgtcggggcagcggctgactttgggacagtttagccgagataaggcggttttggtgtatttttgggggagctggtgcggcgtgtgccgttatcagtcgccgataatcgatgatttggcggcggacggcgtgccggtcgtcggcgtggcggtacgttccggcagttcggcggaagtggcggcgtatatggcaaaacgcggcttgggctttccgactgtcaacgatgaggacgggggtttggcaaggtcttggcggattgtcgcaacgcctgccgtcgttttggtcaaaaatgggaaaatggttcactatacgacgggaatcagcagttattggggcttgcgcgcacgaatttttcaggcggatgttttcggttaa

SEQ ID NO: 53056 - DNA, 432 bp, Neisseria meningitidis; identical to SEQ ID NO: 42220

SEQ ID NO: 53057 - DNA, 999 bp, Neisseria meningitidis; identical to SEQ ID NO: 43774

SEQ ID NO: 53058 - DNA, 2262 bp, Neisseria meningitidis; identical to SEQ ID NO: 42901

SEQ ID NO: 53059 - DNA, 825 bp, Neisseria meningitidis; identical to SEQ ID NO: 43031

SEQ ID NO: 53060 - DNA, 1215 bp, Neisseria meningitidis; identical to SEQ ID NO: 43550

SEQ ID NO: 53061 - DNA, 204 bp, Neisseria meningitidis; identical to SEQ ID NO: 43078

SEQ ID NO: 53062 - DNA, 510 bp, Neisseria meningitidis; identical to SEQ ID NO: 42226

SEQ ID NO: 53063 - DNA, 282 bp, Neisseria meningitidis; identical to SEQ ID NO: 43821

SEQ ID NO: 53064 - DNA, 594 bp, Neisseria meningitidis
atgcgcaaacagaacactttgacgggaatcccgacttctgacggacagagggggtttgcactgtttatcgtgctgatggtgatgatcgtcgtggcttttttggttgtaactgccgcgcagtcttacaataccgagcagcggatcagtgccaacgaatcagacaggaaattggctttgtctttggccgaggcggctttgcgggaaggcgaacttcaggttttggatttggaatatgatacggacagtaaggttacatttagcgaaaactgtggaaaaggtctgtgtgccgcagtgaatgtgcggacaaataatgataatgaagaggcttttgacaatatcgtggtgcaaggcaagcccaccgttgaggcggtgaagcgttcttgccctgcaaattctaccgacctgtgcattgacaagaaagggatggaatataagaaaggcacgagaagcgtcagcaaaatgccacgttatattatcgaatatttgggcgtgaagaacggagaaaatgtttatcgggttactgccaaggcttggggtaagaatgccaataccgtggtcgtccttcaatcttatgtaagcaataatgatgagtaa

SEQ ID NO: 53065 - DNA, 2076 bp, Neisseria meningitidis
atgctgtgcgtgttggcgggcgcggcttacggcgtattcagaacggaagcggcactgtcttcgcaatggcgggcggaggcggtttcaggtgtgccgttgacggtggaagtggcggatatgccgaggtcggacgggcggcgcgtgcagtttgcggcaaaggctgtggacagcggtggtcggacgtttgatttgctgctgtcggactacaaacggcgcgaatgggcggtcgggagcagatggcggataacggcacgtgtgcaccccgtcgtcggcgaattgaacctgcgcggtttgaaccgtgaggcgtgggcattatccaacgggataggcggcgcggggacggtcggtgcggacagggttttgctgcatggcggaagcggttgggggattgcggtttggcgcagccgcatcagccgtaattggcagcaggcggatgcggacggcgggctttcagacggcatcgggctgatgcgcgcgttgagcgtgggcgaacagtcggcattgcgccccgaattgtggcaggcgttccgaccgttggggctgacgcatttggtcagtatttcgggtttgcacgttacgatggtggcggtgatgtttgcgtggctggcgaagcggctgcttgcctgttccccgcgccttcctgcccggccgcgcgtgtgggttttggcggcggggtgtgcaggcgcgctgttttacgcgctgcttgccggtttttccgtgccgacgcagcgcagcgttttgatgttggcggcgtttgcgtgggcttggcgcaggggaagattgtcggcgtgggcgacgtggtggcaggcgttggcggcagtgctgctgttcgaccctttggcggtcttgggtgtggggacttggctgtctttcggtttggtggcggccctgatatgggcgtgttcggggcgtttgcacgaagggaaacggcaaaccgccgtgcgcgggcagtgggcggcttcggtgttgtcgctggttttgctcggttatctgtttgcttcgctgcctttaatcagccctttggtcaatgcggtggcgattccgtggttttcttgggtattgacgccgctggcgttgctgggttcggtcgtgccgtttgcgcctttgcaacagttgggggcatttttggcggaatatactttgcggtttttggtgtggcttgccgatgtgtcgcccgagtttgccgttgccgccgcacctttgccgctgttggtgttggcggtgtgtgccgctttgctgttgctgctgccgcgcggcttgggtttgcgtccgtgggcggtgttgctgttggcagggtttgtgttttaccgttcacccggcgtgccggaaaatgaggttgcggttacggtttgggatgcggggcagggtttgtcggtgtcggttcagacggcaaatcatcatcttttgtttgacactggaactgcatcggcggcacagacggggattgtgccgagtttgaatgcggcgggtgtccgccgtttggacaagctggttctgtcgcatcacgacagcgaccacgacggcggttttcgggcggtgaggaatattcccgccggcgggatttatgccgggcagccggaattttatgagggggcgcggcattgtgcggaacagcgttggcaatgggacggcgtagatttcgagtttttgaggccgtctgaacgcaaaaacatcgatgataatgggaaaagttgtgttttgcgtgttgtggcgggcggtgcggcactgctggtaacgggcgatttggatacgaagggcgaggaaagcctggtcggcaagtatggaggcaacctgtacagccaggtgttggtgttggggcatcacggcagcaatacgtcctcgtcgggcgtgttcctcaatgccgtttcgcccgaatatgccgttgcttcaagcggttatgccaacgcctacaaacatccgaccgaagcggtgcagaaccgtgtccgcgcacacggcattaaactgctgcgtaccgatttgtcgggtgcgctgcaattcggcttgggacgcggcggcgtgaaggctcaacgtttgagagggtataaattctattggcagaaaaaaccgtttgagtga

SEQ ID NO: 53066 - DNA, 2790 bp, Neisseria meningitidis; identical to SEQ ID NO: 43090

SEQ ID NO: 53067 - DNA, 1680 bp, Neisseria meningitidis; identical to SEQ ID NO: 44913

SEQ ID NO: 53068 - DNA, 345 bp, Neisseria meningitidis; identical to SEQ ID NO: 43458

SEQ ID NO: 53069 - DNA, 174 bp, Neisseria meningitidis; identical to SEQ ID NO: 42248

SEQ ID NO: 53070 - DNA, 1860 bp, Neisseria meningitidis
atgcctgaataccgctccaaaacctccacccacggccgcaatatggcgggcgcacgtgcattgtggcgcgccaccggcgtgatggaaaccgacttcggcaagcccatcatcgccgttgccaactccttcacccaattcgtgcccggccatgtccacctgcacaatatgggccagctggttgcccgcgaaatcgaaaaagccggcgcaatcgccaaagaattcaacaccatcgccatcgacgacggcatcgctatgggacacagcggcatgctgtactccctgcccagccgcgatttgattgccgactctatcgaatatatggtcaacgcccactgcgccgacgcgctggtgtgcatttccaactgcgacaaaatcaccccgggcatgctgattgccgcgatgcgcctgaacatccccaccatcttcgtctccggcggcccgatggaagcgggcaaggttatcggcgtggcaaacatccagcccgaacgccgtttggacttgattgacgcgatgattgaatcggcggacgacaatgtcagcaaccggcaagtcgaggaagtcgaacaaaacgcctgcccgacctgcggctcgtgttcgggtatgtttacggcaaactcgatgaactgcctgaccgaagcactcggcctttccctgcccggcaacggttcgtatttggcgacccacgccggccgcaaagaattgttcctcgaagccggccgtatgattgtcgaaatcaccaaacgctattacgagcaaaacgatgaaaccgtgttaccgcgcagcattgccaccaaaaaagcgtttgaaaacgctatgacgatggatattgcgatgggcggcagcaccaataccattttgcacctgttggccgttgccaacgaagccggtgtcgatttcaaaatggcagacatcgaccgcttaagccgcgtcgtgccctgcatctgcaaaaccgcacccaacaaccacgactactatatggaagacgtgcatcgcgccggcggtatcttcgccatcctgaaagaactggacaaagcgggcaaactgcacaccgacgtgcacaccatccacgcgccgacgctgaaagacgcgattgaacaatgggacgtgaccaatcccgaaaacacccgtgccatcgaacgcttcaaagccgcgccgggcggcgtacgcaccacccaagcgttctcgcaaaaccgtatgtggaaaaccctcgacctcgaccgcgaaaaaggctgtatccgcgacgtggcacacgcctactcgcaagacggcggtttggcggtcttgttcggcaacatcgccgagcgcggctgcgtggtaaaaaccgcaggcgtggacgagagcatcctcaaattcaccggccgcgcccgcgtgtttgaaagccaagaagacgcagtagaaggcattttgggcaaccaaatcgtcgctggcgacatcgtcatcatccgctacgaaggcccgaaaggcggcccgggcatgcaggaaatgctgtatccgacttcctacctgaaatctaaaggcctcggcaaagcctgcgctctcttaaccgacggacgcttctccggcggcacatcaggtttgtccatcggacacgcctcgcccgaagcggcggaaggtggcgcgatcggtttggtacacgaaggcgataccgtcgaaatcgacatccccaaccgcagcatccaccttgccatttccgatgaagagcttgccgcacgccgtgccgaaatggaagcgcgcggcagcaaagcatggaagcctaaaaaccgcgaccgctacgtctccgccgcattaagagcttacggcgcgatggcgacttccgccgacaaaggcgcggtgcgcgacgtagcgcaaatcgaaagataa

SEQ ID NO: 53071 - DNA, 1413 bp, Neisseria meningitidis; identical to SEQ ID NO: 38542

SEQ ID NO: 53072 - DNA, 264 bp, Neisseria meningitidis
atggcaaacagcgcacaagcacgcaaacgtgcccgccagtccgtcaaacaacgcgcccacaatgctagcctgcgtaccgcattccgcaccgcagtgaaaaaagtattgaaagcagtcgaagcaggcgataaagctgccgcacaagcggtttaccaagagtccgtcaaagtcatcgaccgcatcgccgacaaaggcgtgttccacaaaaacaaagcggcgcgccacaaaagccgtctgtctgcaaaagtaaaagccttggcttga

SEQ ID NO: 53073 - DNA, 1218 bp, Neisseria meningitidis; identical to SEQ ID NO: 43195

SEQ ID NO: 53074 - DNA, 1140 bp, Neisseria meningitidis
atgaaaaaaacactggtggcggcggcaatcctgagcctcgccttgactgcgtgcggcggcggaagcgataccgccgcccaaaccccctccgccaagcccgaagccgaacaatcgggcaaactcaacatctacaactggtcggattatgtcgatcccgaaaccgttgccgcctttgaaaaagaaaccggcatcaagacgcgttccgattattacgacagcaacgaaacactggaggcaaaagtcctgaccggcaaatccggctacgacctgaccgcgccgtccatcgccaacgtcggccggcaaatcaaagcgggcgcgtatcagaaaatcgacaaggcgcaaatcccccattacggcaacatcgataaagatttgctgaaaatgatggaagccgtcgatccgggcaacgaatacgccgtcccctatttctggggcatcaataccttggcaatcaatacccagcaggtgaaaaaagcattgggtacggacaagctgcccgaaaacgaatgggatttggtgttcaaacccgaatacaccgccaaactcaaatcctgcggcatcagctatttcgacagcgcaatcgaacagattcccttggcgttgcactatttgggcaaagaccccaacagtgagaatcccgaagacatcaaagccgccgtcgatatgatgaaagccgtccggggcgacgtgaaacgcttcagctcttccggctatatcgacgatatggcggcgggcaacctgtgtgccgccatcggttacggcggcgatttgaacattgccaaaacccgtgccgaagaagccgcaaacggcgtggaaatcaaagtattgaccccgaaaaccggcgtgggcgtgtgggtggattcctttatgattccgcgcgacgcgcaaaacgttgccaatgcccaccgctatatcgactacacgctccggcccgaggtggcggcgaaaaacggcagcttcgttacctacgcgcccgccagccgtcccgcgcgcgagctgatggatgaaaaatacacctccgacgcatcgattttcccgaacaaagaactgatggaaaaaagtttcatcgtatcgcccaaatccgcagaatccgtcaaactgggcgtgaagctgtggcaagggctcaaagcgggcaaataa

SEQ ID NO: 53075 - DNA, 1245 bp, Neisseria meningitidis; identical to SEQ ID NO: 43719

SEQ ID NO: 53076 - DNA, 195 bp, Neisseria meningitidis; identical to SEQ ID NO: 42321

SEQ ID NO: 53077 - DNA, 1344 bp, Neisseria meningitidis; identical to SEQ ID NO: 43397

SEQ ID NO: 53078 - DNA, 1377 bp, Neisseria meningitidis; identical to SEQ ID NO: 43558

SEQ ID NO: 53079 - DNA, 1638 bp, Neisseria meningitidis; identical to SEQ ID NO: 45007

SEQ ID NO: 53080 - DNA, 1809 bp, Neisseria meningitidis; identical to SEQ ID NO: 42342

SEQ ID NO: 53081 - DNA, 1407 bp, Neisseria meningitidis
atggaaaaaaacaccctatccgcccgcgcaccatccccttggctgccgcttctgctggcaattgccatttttatgcagatgttggatgcgaccattttaaataccgcactgcctgaaattgccgccgacctgaatgagtcgcctctggatatgcaactggcagttatttcctacacgctgacggttgccctgctgattcctttgagcggttatttggcggacaggttcggaacgaaaaaagtctttttcggttcgattgccgtttttatgctcggatcggcattgtgcgccgcatcgggttcgctgtttgaattgacgctttcccgtgtcgttcagggcatcggcggttcgatgctggttccgataccgcgtctgaccatcttgcgtgtgtacgacaagtccaagctgctcaatgccatcaattatgcggttatgcccgcattaatcgggccggttttagggcctttggcgggcggttatttggtcgaatacgcttcgtggcactggattttcctgctcaacctgcccatcggtctgctgggtttcatattgggacgcaacatcatgcccgatattaaaggcagtaatatctctttagacttcaaaggttatctgattttttctgccgccgcgtgcctcttgttactttcggcagaaagcctgtcgcacgcgctgcctccgtattttgcactgttgccgctgtgcggcggactgctgtttgcacgccgttatttccgacatatgaaaaccgcgtccaaaccgatttattccgccgacctgtttctgatacgcactttccgtctgggactggcgggcaatctgttcagccgtctcggcatcagctcgattccttttctgatgcccctgatgtttcaaatcgctttcggcttcggcgcaagcctgtcgggttggctggtcgcacccgtcgccctgtcttcgctgctggtcaaaccgctgattgcaccgctcatgaaacgtttcggctaccgcacggtactgctttggaacaccaagctgcttgccgccttcatcatgctgctcgccctgcctgacggaaactcgccgctgtggatttgggttttcctctcgctggcgatcggcgcgtgcaactccctacagttttctgccatgaacacactgaccctcgccgatttgcgcccgcaacaaacaggcagcggcaacagcctgatggcggtcaaccaacagcttgccatcagcatgggcattgttgccggcgcattaatccttaaaaactggacatttctgataccggcttcttcaggtctgcattccgccttccgtatgaccctgctcagcatcggcggcatcacccttgcatcatcgctggttttcaaacggctgcacgtttcagacggcaccaacctgacacggaacacaccgtcctga

SEQ ID NO: 53082 - DNA, 885 bp, Neisseria meningitidis; identical to SEQ ID NO: 42216

SEQ ID NO: 53083 - DNA, 423 bp, Neisseria meningitidis; identical to SEQ ID NO: 38711

SEQ ID NO: 53084 - DNA, 213 bp, Neisseria meningitidis
ttgaaatggcgggggggcgattgcggcgatttttcgtgcctgtttcaaaaatccggtgcccgaagcttgggagaaaccgagaaaaaagccattatctcttggctggcagaccgcgaagatgttgccactttgtacgccaccccgctggttgacggtttttatggggatgacggctgggaaaattacagcgaaacctataaacaggcagattaa

SEQ ID NO: 53085 - DNA, 1116 bp, Neisseria meningitidis; identical to SEQ ID NO: 43402

SEQ ID NO: 53086 - DNA, 834 bp, Neisseria meningitidis; identical to SEQ ID NO: 42935

SEQ ID NO: 53087 - DNA, 987 bp, Neisseria meningitidis; identical to SEQ ID NO: 42422

SEQ ID NO: 53088 - DNA, 888 bp, Neisseria meningitidis; identical to SEQ ID NO: 42572

SEQ ID NO: 53089 - DNA, 1248 bp, Neisseria meningitidis; identical to SEQ ID NO: 43302

SEQ ID NO: 53090 - DNA, 2058 bp, Neisseria meningitidis; identical to SEQ ID NO: 43902

SEQ ID NO: 53091 - DNA, 285 bp, Neisseria meningitidis; identical to SEQ ID NO: 42100

SEQ ID NO: 53092 - DNA, 1302 bp, Neisseria meningitidis; identical to SEQ ID NO: 43574

SEQ ID NO: 53093 - DNA, 468 bp, Neisseria meningitidis; identical to SEQ ID NO: 42615

SEQ ID NO: 53094 - DNA, 282 bp, Neisseria meningitidis; identical to SEQ ID NO: 43562

SEQ ID NO: 53095 - DNA, 1380 bp, Neisseria meningitidis; identical to SEQ ID NO: 42641

SEQ ID NO: 53096 - DNA, 441 bp, Neisseria meningitidis
ttggacaaacaaatcgacgaccacacccacacgcattttgacggcaaagcccaagtggcggagcaaatcaaaggcatcggttcgataacgacggctacgctgatggcgatgctgcccgaattggggcggctgtcgcacaaacggatagcgagtttggccggcattgccccgcacccgagggagagcgaggaaaccaaattcaaaagccgctgctttggcggaaggtctgcggtgcgtaaggcactgtatatggctaccgtggcagcgacacgttttgaaccgcttattcgggatttctaccaacgcctgctgtccaagggtaagccgtataaggttgccgttacggcatgtatgcgcaaactgctgacgatatcgaatgcccggatgcgtgattattttgccgaaaacgataccgccgaaaacggtatccggacggcttga

SEQ ID NO: 53097 - DNA, 1146 bp, Neisseria meningitidis; identical to SEQ ID NO: 43216

SEQ ID NO: 53098 - DNA, 1371 bp, Neisseria meningitidis; identical to SEQ ID NO: 43797

SEQ ID NO: 53099 - DNA, 447 bp, Neisseria meningitidis; identical to SEQ ID NO: 41921

SEQ ID NO: 53100 - DNA, 480 bp, Neisseria meningitidis
atgaacaaactgtttcttactgccgcagtgctgatgctgggcgcgtgcggtttccacctgaaaggtgcagacggcatttctccgccgctgacctaccggagctggcacatcgaaggcggacaggcattgcggtttcctttggaaaccgcgctgtatcaggcttcgggcagggtggacgatgctgccggcgcgcagatgaccctgcgtatagacagcgtttcccaaaacaaggaaacctacaccgttacccgtgcggcagtcatcaacgaatatcttttgatattgacggttgaagcgcaggtattgaaacgcggcgagccggtcggtaaaccgatgaccgtgtccgtccgccgcgtccttgcttatgccgacaacgagatcttgggcaaacaggaagaggaagcggcattgtgggcggaaatgcggcaggatgccgccgaacagattgtccgccgcctgacctttctgaaggcggaatga

SEQ ID NO: 53101 - DNA, 438 bp, Neisseria meningitidis; identical to SEQ ID NO: 42566

SEQ ID NO: 53102 - DNA, 834 bp, Neisseria meningitidis; identical to SEQ ID NO: 43709

SEQ ID NO: 53103 - DNA, 1110 bp, Neisseria meningitidis; identical to SEQ ID NO: 43018

SEQ ID NO: 53104 - DNA, 330 bp, Neisseria meningitidis; identical to SEQ ID NO: 37077

SEQ ID NO: 53105 - DNA, 1554 bp, Neisseria meningitidis
atgaaccggacttatgccaatttctacgaaatgctcgccgccgcctgccgcaaaaacggaaacggcacggcagtgttcgacggcaaggaaaaaaccgcctaccgcgcgctcaagcaggaggccgaagccgtcgcggcgtatctgcaaaatatcggcgtgaagttcggcgacacggtcgcgctggcggtttccaattccacagaatttattaccgcctatttcgccatctccgccatcggcgcggtcgccgtaccgatgaacacatttttgaaaaacagcgaatacgcgtatatcctgaacgactgcaaggcgcgcttcctgttcgcctcggccggcctgtcaaaagaattggcgggcttgaaggcgcaaacgcccgtcgaaaaaatcatttggacggacaaaagccgtccgaccggcgaaacggcggaaggcgatgccttttttgaagacgtgcgccgcttccccgaaaaacccgacttgggccgccaaccccggataaatgatttggcacacatcatctacacctccggcacgacggggcatcccaaaggcgcgctaatcagttacgccaacctgttcgccaacctgaacggcatcgaacgcatctttaaaatttccaagcgcgaccgctttatcgttttcctgccgatgttccacagcttcacgctgacggctatggtgctgctgccgatttatatggcgtgttcgattattttggtcaaatccgtttttccgttttccaacgttttgaaacagacactgctcaaacgcgcgaccgtgtttttgggcgtacccgcgatttacaccgcgatgagcaaggcgaaaatcccttggtatttcagatggttcaaccgcattcgcctgtttatcagcggcggcgcgcctttggcggaacaaaccatcctcgatttcaaagccaagttcccccgcgccaaattgctggaaggctacggactgagcgaagcctctcccgtcgtcgccgtcaatacgcccgagaggcaaaaagcccgcagcgtcggcatccccctgcccggtttggaagccaaagccgtcgatgaagaattggtcgaagtgccgcgcggcgaagtgggcgaactgatcgtcaggggcggttcggtgatgcggggctacctcaatatgcctgccgccaccgatgaaaccatcgtcaacggctggttgaaaacgggcgatttcgttaccatagacgaagacggctttatctttatcgtcgaccgcaaaaaagatttgattatttccaaaggtcaaaatgtctatccgcgcgagattgaagaagaaatctacaaactcgatgccgtcgaagccgccgccgtcatcggcgtgaaagaccgttatgccgacgaggaaatcgtcgccttcgtccaattgaaggaaggtatggatttgggcgagaacgaaatccgccgccacctgcgtaccgtgctggcaaatttcaaaatccccaaacaaatccactttaaagacgggctgccgcgcaacgctacgggcaaggtattgaaacgggtgttgaaggagcagtttgacggaaacaaatga

SEQ ID NO: 53106 - DNA, 870 bp, Neisseria meningitidis; identical to SEQ ID NO: 43340

SEQ ID NO: 53107 - DNA, 438 bp, Neisseria meningitidis; identical to SEQ ID NO: 43498

SEQ ID NO: 53108 - DNA, 195 bp, Neisseria meningitidis; identical to SEQ ID NO: 42490

SEQ ID NO: 53109 - DNA, 183 bp, Neisseria meningitidis; identical to SEQ ID NO: 42350

SEQ ID NO: 53110 - DNA, 654 bp, Neisseria meningitidis; identical to SEQ ID NO: 44597

SEQ ID NO: 53111 - DNA, 1902 bp, Neisseria meningitidis
atgactacgccaaaaaaaaccgccaaaacttccggcaacgaagcgcgcgagcttgccgacttgagcgaagacatcggcatctgctttaaatatccgaactcggaacgcgtgtatctgcaaggcagccgcgacgacatccgcgtgcctttgcgcgaaatccgtcaggacgacacctacacggcgcaaggtacggaagccaatccgccgattcccgtctacgacaccagcggcgtgtacggcgacccggcggcgcatatcgacctgaaacaaggtctgccgcacatccgcaccgcgtggctggacgaacgcggcgataccgaaatcctgcccaagctctccagcgaatacggcatcgaacgcgcacacgatccgaaaaccgcccatctgcgtttcaaccaaatcacccgcccgcgccgcgcgaaaagcggcagcaacgtaacccagcttcactacgcgcgccaaggcattatcacgcccgaaatggagtttgtcgccatacgcgaacgtttaaaattagacgaattgtcccaaaaaccggaatacgccaaactcttggaacagcacgcggggcaaagtttcggtgcgaacatcccgacccatcccgaccaaatcacgcccgaattcgtgcgccaagaaatcgccgccggacgcgcgattattcccgccaacatcaaccaccccgaactcgaaccgatgattatcggccgcaactttcgtgtcaaaatcaacggcaacttgggcaactccgccgtcacctccagcctgaccgaagaagtcgaaaaaatggtgtggtcgctgcgttggggcgcggacacgattatggatttgtccaccggcgcgcacatccatgaaacgcgcgaatggattatccgcaacgcgcccgtccccatcggcaccgtgccgatttaccaagcgttggaaaaaaccggcggcatcgccgaagatttgacttgggatttgttccgcgacaccctcatcgaacaggcggagcaaggcgtggactatttcaccatacacgcgggcgtgttgctgcgttatgtgccgatgaccgccaaccgcctcaccggcatcgtctcgcgcggcggttcgattatggcgaaatggtgtttggcacatcatcgggaaaatttcctctacacgcatttcgacgaaatctgcgaaattatgaaagcgtatgacgtatcgttcagcctcggcgacggcctgcgccccggctgcattgccgatgccaacgacgaatcccaattcgccgaactgcacaccttgggcgaattgaccgataaagcgtggaaacatgacgtacaagtcatgatcgaaggccccggccatgtgccgctgcaacgcgtcaaagaaaacatgaccgaagagctgcaacactgctttgaagcacctttttacacgctcggcccgctcgttaccgacatcgcacccggctacgaccacatcacctcgggcataggcgcggccaatatcggctggtacggcacggcgatgctttgttacgttaccccgaaagagcatttggggctgcccgacaaagaagacgtgcgcaccggcatcatcacctacaaactcgccgcccacgccgccgatctcgccaaaggctggccgggcgcacaattacgtgacaacgccctgagcaaagcgcgtttcgagttccgctggcgcgaccaatttcgcttaagcctcgaccctgaacgtgccgagagcttccacgacgaaaccctgcctgccgaaggcgcgaaaatcgcccacttctgctcgatgtgcggccccaaattctgctcgatgaaaatcacgcaggaagtgcgcgactacgccgacaagcaaaaagcccaacggcagggcatggaggaaaaagcggtcgagttcgtcaaaaaaggcgcgaagatttacagttaa

SEQ ID NO: 53112 - DNA, 594 bp, Neisseria meningitidis; identical to SEQ ID NO: 42244

SEQ ID NO: 53113 - DNA, 1770 bp, Neisseria meningitidis; identical to SEQ ID NO: 42617

SEQ ID NO: 53114 - DNA, 636 bp, Neisseria meningitidis; identical to SEQ ID NO: 42737

SEQ ID NO: 53115 - DNA, 1269 bp, Neisseria meningitidis; identical to SEQ ID NO: 42513

SEQ ID NO: 53116 - DNA, 258 bp, Neisseria meningitidis; identical to SEQ ID NO: 42809

SEQ ID NO: 53117 - DNA, 306 bp, Neisseria meningitidis; identical to SEQ ID NO: 43025

SEQ ID NO: 53118 - DNA, 2208 bp, Neisseria meningitidis; identical to SEQ ID NO: 43263

SEQ ID NO: 53119 - DNA, 4293 bp, Neisseria meningitidis
atgcgcttcacacacaccaccccattttgttccgtattgtccaccctcggtctttttgccgtttcccctgcttactcatccattgtccgcaacgatgtcgattaccaatattttcgcgactttgccgaaaataaaggcgcgttcaccgtaggtgcaagcaatatttccatccaagacaagcaaggcaaaatattaggcagggttctcaacggcatccccatgcccgacttccgcgtcagcaaccgccaaaccgccatcgccaccctggttcacccccaatacgtcaacagtgtcaaacacaacgtcggctacggttccatacaattcggcaacgacacccaaaatccagaagaacaagcctatacctaccgcctcgtatcacgcaacccgcacccggactacgactaccaccttccccgcctcaacaaactggttaccgaaatctcacctaccgcactcagcagcgtacccttgcttggaaacggccagccaaaggccaatgcctacctcgataccgaccgcttcccctactttgtacgactcggctcaggcacgcaacaagtccgcaaagcagacggcacgcgtacacgaaccgccccggcataccaatacctgaccggcggcacgccgctgaaagtattggggttccaaaaccacggcttactcgtcggcggcagcctgaccgaccaaccccttaacacctacgcaatcgccggagacagcggttcccccctgtttgccttcgacaagcatgaaaaccgctgggtgcttgcgggcgtactcagcacctacgccggcttcgataatttcttcaacaaatacatcgtcacgcaacccgaattcatccgttccaccatccgccaatacgaaacccggctggatgtcgggctgaccaccaacgaactcatatggcgcgacaacggtaatggcaacagcaccctgcaagggctcaacgaacgcatcaccctgcccattgcaaacccttcgcttgccccacaaaacgacagcaggcacatgccgtctgaagatgccggcaaaacgctcatcctatccagcaggttcgacaacaaaacactgatgctggcagacaatatcaaccaaggcgcaggcgcattgcagttcgacagcaacttcaccgtcgtcggtaaaaaccacacatggcaaggtgcaggcgttatcgtagccgacggcaaacgcgtcttctggcaagtcagcaaccccaaaggcgaccggctctccaaactgggcgcaggcacgcttatcgccaacggacaaggcatcaaccagggcgacatcagcatcggggaaggcactgtcgtactcgcccaaaaagctgcttcagacggcagcaaacaagcattcaaccaagtcggcatcaccagcggcaggggcacggccgtcctcgccgacagccagcaaatcaaacccgaaaacctctatttcggcttcaggggcggacggctcgacctcaacggcaacaaccttgcctttacccatatccgccatgcggacggcggcgcgcaaatcgtcaatcacaaccctgaccaagccgcgacactgacgctgaccggcaaccccgtcctcagtcccgagcatgtcgagtgggtgcaatggggcaaccgtccgcaaggcaacgcggcggtttacgaatacatcaacccgcaccgcaaccgtcggaccgactacttcatactcaaacccggcggcaacccgcgcgaatttttcccgttaaatatgaaaaactcaacaagctggcaatttatcggcaacaacaggcaacaggccgccgaacaagtcgcccaagccgaaaatgcccgccccgacctgattaccttcggcggatacttgggtgaaaacgcgcaaacgggcaaagccgcgccgagttacagcaaaaccaatgaagcagccatagaaaaaacccgccatatcgcaaatgccgccgtatacggccggcccgaataccgttacaacggcgcactcaacctgcactatcgtcccaaacgcaccgacagcacgctgttgctcaacggcggcatgaaccttaacggggaagtcttgattgagggcggcaatatgattgtgtcaggcaggcccgtaccccatgcctacgaccaccaggccaaacgcgaacccgttcttgaaaacgaatggaccgacggcagcttcaaggctgcacggttcaccctgcgaaaccatgcccgactgacggcagggcgcaataccgcgcatctggacggcgacataaccgcatacgatctgtccggcatcgacctcggctttacccaaggcaaaacaccggaatgctaccgctcctaccatagcggcagcacccactgcacacccaacgccgttttaaaagccgaaaactatcgtgcactacctgcaacgcaagtacgcggcgacattacccttaacgaccgttcagagctccgcctgggcaaagcacacctgtacggcagcatccgtgccggcaaagacaccgcagtccgcatggaagcagacagcaactggacactttcccagtccagccacaccggcgcactgacgcttgacggcgcacaaattaccctgaaccccgatttcgccaataatacacacaacaaccgcttcaacacactgaccgtcaacggcacacttgacgggttcggcacattccgattcctgaccggcatcgtccgaaaacaaaatgcccccctcaaactggaaggggacagccgcggcgcattccaaatccacgtcaaaaacaccggacaagaacctcaaacaaccgaatcgcttgcacttgtgagcctcaatccgaaacacagccaccaagcccgattcaccctccaaaacggctatgccgatttgggtgcctaccgctacatcctccgcaaaaacaacaacggatacagcctgtacaacccgctcaaagaggccgaacttcaaattgaagccacgcgtgcggaacatgagcgcaaccaacaggcatacaaccaattacaggcaaccgacatcagcagacaggttcaacatgactctgacgcgaccaggcaggcactacaggcctggcagaacagtcaaaccgaacttgcccgcatcgacagccaagtccaatatctgtccgcccaattgaaacagacagacccgctgaccggcattctgacgcgtgcccaaaacctgtgtgccgcacaaggatacagtgtcgatatctgccgtcaggttgccaaagccgccgacacgaacgacctgacactcttcgaaaccgaactggatacgtatatagaacgtgtagaaatggccgaatccgaacttgacaaagcacggcaaggcggcgatgcgcaagccgtcgaaacagcccggcacgcctacctgaacgcactcaaccgtctgtcccgacaaatccacagtttgaaaaccggcgttgccggcatccgtatgccgaacctggccgaactgatcagccggtcggccaacaccgccgtttccgaacaggccgcctacaataccggccggcaacaggcgggacgccgcatcgaccgccaccttaccgatccgcagcagcaaaacatctggctggaaaccggtacgcaacaaaccgactaccatagcggcacacaccgtccctaccaacaaactaccaactatgcacatatcggcatccaaaccggcatcaccgaccgtctcagtgtcggtacgattttaaccgatgagcgcacaaacaaccgttttgatgaaggcgtatccgcccgaaaccgcagcaacggcgcacatctgttcgtcaaaggggaaaacggcgcactctttgccgcggcagatttaggctacagcaacagccgtacccgatttaccgattatgacggggctgccgtccgccgccacgcatgggatgcaggcatcaacaccggcatcaaaatcgataccggcatcaacctcagaccctatgccggcatccgtataaaccgcagcaacggcaaccggtacgtactcgacggcgcagagataaacagcccggcgcaaatccaaaccacatggcatgccggcatccgtctcgataaaaccgtcgaactgggtcaagccaagctgacccccgccttcagcagcgattactaccatacccgccaaaacagcggttccgccctcagcgtcaacgaccgtaccttactgcagcaagccgcccacggcacactgcataccctgcaaatcgacgccggatacaaaggctggaacgccaaacttcatgccgcttacggcaaagacagcaacaccgcccgccacaaacaggcaggaatcaaaataggctacaactggtaa

SEQ ID NO: 53120 - DNA, 1527 bp, Neisseria meningitidis; identical to SEQ ID NO: 43811

SEQ ID NO: 53121 - DNA, 603 bp, Neisseria meningitidis; identical to SEQ ID NO: 43408

SEQ ID NO: 53122 - DNA, 585 bp, Neisseria meningitidis; identical to SEQ ID NO: 42801

SEQ ID NO: 53123 - DNA, 1527 bp, Neisseria meningitidis; identical to SEQ ID NO: 42996

SEQ ID NO: 53124 - DNA, 642 bp, Neisseria meningitidis
atgccgtctgaaaaaccaatgaacagaagaaccttcctcctcggcgcaggcgcgttgctccttaccgcctgcggcagaaaatccgcccgaacccacgccaaaattcccgaaggaagcaccgtacttgccttgggcgattcgcttaccttcggctacggcgcaaaccccggcgaatcctaccccgcgcaactgcaaaaactgacgggttggaatattgtcaacggcggcgtatcgggcgatacatccgcccaagccctgtcgcgcctgcccgcgctgttggcacgcaaacccaagcttgtgattgtcggcataggcggcaacgactttctgcgcaaagttcccgaggagcagacccgcgccaatatcgcgaaaatcatcgaaaccgtgcagaaggaaaacatccccgccgtcctcgtcggcgtgccgcacattaccttgggcgcgttgttcgggcatttgagcgatcatccgctgtatgaggatttgtccgaggaatacggcattccgctgttcggcggcgcgtgggcggaaattttgggcgataataatctgaaatccgaccaaatccacgccaacggcaaaggctatcggaaatttgccgaagatttgaatcaatttttgagaaaacaggggtttagataa

SEQ ID NO: 53125 - DNA, 1689 bp, Neisseria meningitidis
atgctcaataaagaccaatttgcggacaaccattttatccgcaccttcatcgaagaagacctcaaaagcggcaaacacgaagccgtccaaacccgttttccgccggagcccaacggctacctgcacatcggacacgccaaatccatctgcctgaacttcggtttggcgtatatttacgacggcttgtgcaacctgcgttttgacgataccaaccccgaaaaagaaaacgacgaatacgtcaacgccatcaaagaagacgttgagtggctcggtttccattgggcgggcgagccgcgtttcgcttccaactatttcgaccagctttatgactacgccgtcggtttggttaaagacggcaaagcgtatgtcgatgatttgacgccagaagaaatgcgcgaataccgcggtacgctgaccgaagcaggcaaaaacagcccttatcgcgaccgcagtatcgaagaaaacctcgacctgttcacgcgcatgaaaaacggtgagttccccgacggcagcaaaaccctgcgcctgaaaatcgacatggcatccggcaacatcaatatgcgcgatccggtcatctaccgcatccgccgcgcccatcaccacaacaccggcgacaaatggtgcatctatccgatgtacgactacacgcattgtatttccgatgccatcgaaggcatcacgcattccttgtgtacgctcgaatttgaagcccatcgtccgctgtatgactgggtgttggacaacatccccgcgccgcacgccacacgtccgcgccaatacgagttttcacgcttggagcttttgtacaccattacctccaaacggaaattgaatcagttggttgtggaaaaacacgtttccggctgggacgatccgcgtatgccgaccatttccggtatgcgccgacgcggctacacgcccgaagggctgcgcctgtttgccaaacgcgccggtatttccaaatctgaaaacatcgtcgatatgagcgtgttggaaggcgcgattcgcgaagagttggaaaattccgccccacgcctgatggcggtgttgaacccgctcaaagtaaccctgaccaactttgaaaccggcagaacccaaagccgccgtgccgcgttccatccgaaccacgaagaaatgggcgatcgcgaagtacctgtttcacaaaccatttacatcgaagccgacgactttgccgaaaatccgcccaaaggcttcaaacgcctgattcccggcggcgaagtacgcttgcgccacggctatgtcatcaagtgcgatgaagtcgtcaaagacgaagcaggcaatgtggttgaactcaaatgcagcatcgaccacgacaccttgggcaaaaatccagaaggccgtaaagttaaaggcgtgattcattgggtttccgccgaacacgccgccgaaatcaaagtccgtctgtacgaccgcctctttaccgtcgagcgtcccgatgccgtgcgcggcgaagacggcgaatacctgccgttcaccgatttcctcaatccggaatccgtcaaggaaatcaccgcctacgccgaacctgccgccaaagatttgccggcagaaagccgttggcagttcgagcgtatcggctacttcgtaaccgaccgtaaagaccacggcaaagacacgccggtgtttaaccgcacggtaacgctgaaagactcttggcagcctaagtaa

SEQ ID NO: 53126 - DNA, 345 bp, Neisseria meningitidis; identical to SEQ ID NO: 36743

SEQ ID NO: 53127 - DNA, 780 bp, Neisseria meningitidis
atgaaaaccatcacagaaaccctaaatctcgccccgaaaggcaaaaacttcctgaccgccgattggcccgcgcccgccaatgtgaaaaccctgattaccacgcgcaacggcggcgtgagccaaggtgcgtatcagagtttgaacctcggtacgcacgtcggcgacaatcccgaagccgtgcgccgcaaccgcgaaatcgtgcaacagcaggtcggactgcccgttgcctacctcaatcaaatccacagcaccgtcgtcgtcaatgctgccgaagcgttgggaggcacacccgatgcggacgcttccgtagacgacacgggcaaggttgcctgtgccgtgatgaccgcagactgcctgcccgttctattttgcgacagggcgggtacggcggttgccgccgcacacgcgggctggcgcggtttggcgggcggcgtactgcaaaacaccatagccgcaatgaaggttccgcccgtcgaaatgatggcgtatctcggccccgccatcagtgcggatgcgtttgaagtcggacaggatgtgtttgatgcgttctgcacgcccatgcccgaagccgccaccgcatttgaaggcataggcagcggcaaattccttgccgacctttacgcgctcgcccgcctgattctgaagcgcgaaggcgtgggcggcgtatatggcggcacgcattgtacggttttggaacgggatactttcttttcctaccgccgcgacggagcgacagggcgtatggcgagcctgatttggctggacggcaatgccgtctga

SEQ ID NO: 53128 - DNA, 276 bp, Neisseria meningitidis
atgttgcaagatcccttcctgaacgccctgcgtaaagagcacgttccggtttcgatttacctggtcaacggcatcaaactgcaaggtcaggttgaatctttcgaccaatacgtcgttcttctgagaaacacttccgtcacccaaatggtttacaaacacgccatttccaccatcgtaccggcacgctccgtcaacctacaacatgaaaacagaccccaagccgcaccggcttcgaccctcgtccaagtggaaaccgtccagcagcctgccgaataa

SEQ ID NO: 53129 - DNA, 828 bp, Neisseria meningitidis; identical to SEQ ID NO: 42431

SEQ ID NO: 53130 - DNA, 1839 bp, Neisseria meningitidis; identical to SEQ ID NO: 43405

SEQ ID NO: 53131 - DNA, 648 bp, Neisseria meningitidis; identical to SEQ ID NO: 43653

SEQ ID NO: 53132 - DNA, 2751 bp, Neisseria meningitidis
atggggcaaaacctgaccgcccccgacggcgcgccgacgggtgcgctgtatggtgtattgaatatgttgcgccgtttgcggtcggaatatccgcacgattattgcgcggtggtttttgatgcgaaaggcaaaaatttccgccatcaaatgtttgaagaatacaaggcgacgcgcccgccgatgcccgacgatttgcgcccgcaggcggaagcactgccggatttagtgcgcctgacaggctggccggtattggtgattgggcaggtggaggcggacgatgtgatcggcacgctggcgaaacagggggcggaacatggtttgcgagtcattgtttcgaccggcgataaggacatggcgcagttggtggatgagcgcgttacgctggtgaacacgatgagcagcgaaacgctggacattgaaggcgtgaaggcaaaattcggcgtgcgccccgaccaaatccgcgattatctcgcgctgatgggcgacaaggtggacaacgtgccgggcgtggaaaaatgcggcccgaaaacggcggtgaaatggctggaagcctacggttcgctggctggtgtgatggaacacgcttcggaaatcaagggcaaagtgggcgaaaacctgcaagccgcgctgccccaactgccgctgtcgtatgatttggtcacgattaaaaccgatgtggacttgcacgccgagctttcagacggcatcgaaagcctgcgccgtactacgccgaaatgggcgcagctggttgtcgatttcaaacgctggggcttccgcacctggctgaaagaagcggaatcaaacatgaataccggctcgaccgatgatttgttcggcagcgacagcatcggcgagcaggcggctttgaatgcggaaatgccgtttgaaaaacaagccgaaaaagccaccgcccccgaaaaactggattatcaagccgttaccaccgaagcgcagtttgccgctttgttggacaaactgtcgcgggcggacacaatcggcatcgatacggaaaccacgtcattagacgcgatgaacgcctcgctggtcggcatcagcatcgctttccaagcaggcgaagcggtttacatccccgtaggacacagcctgaccgccgcgcctgaacagcttgatttacaagacgtattaggccgtctgaaaccgcatttgggaaaccccgccctaaaaaaaatcgggcaaaacctcaaatacgaccaacacgttttcgccaactacggcatcgccctgaacggcattgccggcgacgccatgctcgcttcctacatcatcgagagccatctcggacacggcttggacgaattgtccgaacgctggctcggcttggaaaccattacctacgaatcgctgtgcggcaaaggcgcgaagcaaatcggttttgccgatgtcgccatcgggcaggcgaccgaatacgccgcccaagacgccgatttcgccctgcgcctcgaagcgcacctgcgcgcgcaaatggacgaaaaacagcttgaaatgtatgaaaaaatggagctgcccgtcgcgcaggtattgtttgaaatggaacgcaacggcgtgcaaatcgaccgcgccgaactcgcccgccaaagcgcggaactcggcgccgagctgatgaagctcgaacaggaagcctatgccgccgcaggccagccgttcaacctcaattcgcccaaacagctgcaagaaatcctgttcgacaaaatgggcatccccaccaaaggcctgaaaaaaaccgccaaaggcggcatttccaccaacgaagccgtgctcgaacagctcgcgcccgactaccccctgcctaaaatcatcctgcaaaaccgcagcctggcgaagctcaaatccacctacaccgacaaactacccgaaatgatttcccccaaggacggccgcgtgcataccacctacgcccaagccgtcgccattaccggccgcctcgccagcaacaaccccaacctgcaaaatatccccatccgtaccgaagaagggcgtaaagtccgccgcgcctttaccgcaccgcaaggcagcgtcatcgtttccgccgactattcccaaatcgagctgcgcattatggcgcacctctccggcgacaaaaccctgattgccgcgttccaaaacggcgaagacgtacaccgccgcaccgccgccgaagtgttcggcactgcgcccgaaaacgtctcgtccgagcaacgccgctatgccaaaaccatcaacttcggcttaatttacggtatggggcaatacggtttggcaaaatcattgggcatcgacaacctttccgccaaaaactttatcgaccgctacttcgcccgctaccccggcgtcgccgaatacatgcagcgcaccaaagaacaagccgccgcccaaggctacgtcgaaaccctgttcggcagaaggctctacctgcccgacatccgcaacaaaaacgccaacgcccgcgccggagccgaacgcgctgccatcaacgcccccatgcagggcaccgcctccgacctcatcaaacgcgccatgatagacgtgtcccgctggctttcagagtgcgaagcctccccgtgggacgaactcttacaaagcaaactgattatgcaggtgcatgacgaactggtgctggaagtcgttgaaaccgaactggattttgtcaaagaaaaactgccgcagattatggcgaaagtggacggcggattattggatgtaccgctggtggctgaggttggcgtaggggagaattgggaagaggcacattga

SEQ ID NO: 53133 - DNA, 903 bp, Neisseria meningitidis; identical to SEQ ID NO: 42316

SEQ ID NO: 53134 - DNA, 948 bp, Neisseria meningitidis; identical to SEQ ID NO: 37678

SEQ ID NO: 53135 - DNA, 462 bp, Neisseria meningitidis; identical to SEQ ID NO: 42953

SEQ ID NO: 53136 - DNA, 531 bp, Neisseria meningitidis; identical to SEQ ID NO: 39309

SEQ ID NO: 53137 - DNA, 870 bp, Neisseria meningitidis; identical to SEQ ID NO: 36835

SEQ ID NO: 53138 - DNA, 672 bp, Neisseria meningitidis; identical to SEQ ID NO: 42137

SEQ ID NO: 53139 - DNA, 420 bp, Neisseria meningitidis; identical to SEQ ID NO: 43695

SEQ ID NO: 53140 - DNA, 360 bp, Neisseria meningitidis; identical to SEQ ID NO: 42498

SEQ ID NO: 53141 - DNA, 1368 bp, Neisseria meningitidis; identical to SEQ ID NO: 43567

SEQ ID NO: 53142 - DNA, 1386 bp, Neisseria meningitidis; identical to SEQ ID NO: 42586

SEQ ID NO: 53143 - DNA, 1014 bp, Neisseria meningitidis
atgcaagtctattacgataaagatgccgatctgtccctaatcaaaggcaaaaccgttgccatcatcggttacggttcgcaaggtcatgcccatgccgccaacctgaaagattcgggtgtaaacgtggtgattggtctgcgccaaggttcttcttggaaaaaagccgaagcagccggtcatgtcgtcaaaaccgttgctgaagcgaccaaagaagccgatgtcgttatgctgctgctgcctgacgaaaccatgcctgccgtctatcacgccgaagttacagccaatttgaaagaaggcgcaacgctggcatttgcacacggcttcaacgtgcactacaaccaaatcgttccgcgtgccgacttggacgtgattatggttgcccccaaaggtccgggccataccgtacgcagtgaatacaaacgcggcggcggcgtgccttctctgattgccgtttaccaagacaattccggcaaagccaaagacatcgccctgtcttatgcggctgccaacggcggcaccaaaggcggtgtgattgaaaccactttccgcgaagaaaccgaaaccgatctgttcggcgaacaagccgtattgtgcggcggcgtggtcgagttgatcaaggcgggttttgaaaccctgaccgaagccggttacgcgcctgaaatggcttacttcgaatgtctgcacgaaatgaaactgatcgttgacctgattttcgaaggcggtattgccaatatgaactactccatttccaacaatgcggagtacggcgaatacgttaccggccctgaagtggtcaatgcttccagcaaagaagccatgcgcaatgccctgaaacgcattcaaaccggcgaatacgcaaaaatgtttatccaagagggtaatgtcaactatgcgtctatgactgcccgccgccgtctgaatgccgaccaccaagttgaaaaagtcggcgcacaactgcgtgccatgatgccttggattactgccaacaaattggttgaccaagacaaaaactga

SEQ ID NO: 53144 - DNA, 1311 bp, Neisseria meningitidis; identical to SEQ ID NO: 43413

SEQ ID NO: 53145 - DNA, 1422 bp, Neisseria meningitidis; identical to SEQ ID NO: 43954

SEQ ID NO: 53146 - DNA, 291 bp, Neisseria meningitidis; identical to SEQ ID NO: 42317

SEQ ID NO: 53147 - DNA, 300 bp, Neisseria meningitidis
atgaagaaaatgttcgtgctgttctgtatgctgttctcctgcgccttctcccttgcggcggtaaacatcaatgcggcttcgcagcaggagttggaggcgctgccgggcataggcccggcgaaggcgaaggccattgcggaataccgtgcgcaaaacggtgcgttcaagtctgtagacgatttgaccaaggtaaagggcatcggccctgcggtgctggcgaagctgaaggaccaggcttcggtcggcgcgcccgcaccaaaaggcccagccaaaccggctataccggccgctaaaaaatag

SEQ ID NO: 53148 - DNA, 1629 bp, Neisseria meningitidis
atgatttctaccaacggcatcaccatgcagttcggcgcaaagccgctgtttgaaaacgtatccgtcaaattcggcgaaggcaaccgttacggcttgatcggcgccaacggctcaggcaaatccaccttcatgaaaatcctcggcggcgatttggaacagacggccggcgaagtggcgattgaaaacggcgtgcgtttgggtaaattgcgccaagaccagtttgcctacgaagacatgcgcgtgctggacgtggtgatgatggggcataccgaaatgtgggcggcgatgaccgaacgtgatgcgatttacgccaatcccgaagccaccgaagacgactacatgaaagccgccgaactggaagccaagttcgccgaatacgacggctacaccgccgaagcgcgtgccgccgaactgttgagcggcgtgggcatttccgaagatttgcacaatgcgaaaatggcggaagtcgccccgggcttcaaactgcgcgtattgctggcgcaggcgctgttctccaagccggatgtattgctcttggacgaaccgaccaataacttggacattaataccatccgctggttggaaggcgtgttgaaccaatacgactccacgatgattatcatcagccacgaccgccactttttgaacgaagtctgcacgcatatggcggatttggactacaacaccatcaccatctatccgggcaactacgacgactacatgctcgcctccgcccaatcgcgcgaacgcgccctgaaagacaatgccaaagccaaagagaaactgcaagagctgcaagagttcgtcgcccgcttctctgccaacaaatccaaagcccgtcaggcaaccagccgtctgaaacaggccgacaaaatcaaatcggagatggtcgaagtcaaaccttccacccgtcaaaacccgtatatccgttttgaagccgatgaaaaagccaagctgcaccgtcaggctgtggaagttgaaaaactggcgaaacgctttgaaacccagttgtttaaaaacctgaacttcatccttgaagcgggacaacgcctcgccatcatcggcccgaacggcgcgggcaaatccaccctgctgaaactcttggccggcgcgtacaaccccgaatattcagacggcctgttgccggacgaaggcaccatcaaatgggcggaaaaagccagtgtcggctactatccgcaagaccatgaaaacgacttcgacgtcgatatggacctgagcgaatggatgcgccaatgggggcaggaaggcgacgacgaacaagtcatccgcggcactttggggcgtttgctcttcggcagtaacgatgtcgtgaaaaaagtgaaggttctctccggtggtgaaaaaggccgtatgctttacggcaaactgttgctgttgaaacccaatgtcttagtcatggacgaaccgaccaaccatatggacatggaaagcatcgaatccttgaacatggcactggaaaaatacaacggcacgctgatttttgtctcccacgaccgtcagttcgtttcctccttggcaacccaaatcatcgaactggacggcaaaggcggatatgaacactacttgggcgattacgaaagttacttggagaaaaaaggcgtagcataa

SEQ ID NO: 53149 - DNA, 714 bp, Neisseria meningitidis; identical to SEQ ID NO: 42448

SEQ ID NO: 53150 - DNA, 216 bp, Neisseria meningitidis
atgaaagaatacaaagtcatcatttatcaggaaagcctgttgtccagcctgtttttcggcgcggcaaaggtcaaccccatcaaattcagcgagttcctcaataaacaaacccccgaaggctggcgggttgtaacgatggaaaaagatttgcgccgtatgctgctgtttttcaaacgcgaggcctacgtcgtcattttggagcgggatcgtgtttaa

SEQ ID NO: 53151 - DNA, 612 bp, Neisseria meningitidis; identical to SEQ ID NO: 40567

SEQ ID NO: 53152 - DNA, 1914 bp, Neisseria meningitidis; identical to SEQ ID NO: 42547

SEQ ID NO: 53153 - DNA, 1179 bp, Neisseria meningitidis
atgcgaaaaaaacttaccgccctcgtattgtccgcactgccgcttgcggccgttgccgatgtcagcctatacggcgaaatcaaagccggcgtggaaggcaggaactaccagctgcaattgactgaagcacaagccgctaacggtggagcgagcggtcaggtaaaagttactaaagttactaaggccaaaagccgcatcaggacgaaaatcagtgatttcggctcgtttatcggctttaaggggagtgaggatttgggcgacgggctgaaggctgtttggcagcttgagcaagacgtatccgttgccggcggcggcgcgacccagtggggcaacagggaatcctttatcggcttggcaggcgaattcggtacgctgcgcgccggtcgcgttgcgaatcagtttgacgatgccagccaagccattgatccttgggacagcaataatgatgtggcttcgcaattgggtattttcaaacgccacgacgacatgccggtttccgtacgctacgattcccccgaattttccggtttcagcggcagcgttcaattcgttccgatccaaaacagcaagtccgcctatacgccggcttattatactaaggatacaaacaataatcttactctcgttccggctgttgtcggcaagcccggatcggatgtgtattatgccggtctgaattacaaaaatggcggttttgccgggaactatgcctttaaatatgcgagacacgccaatgtcggacgtaatgcttttgagttgttcttgatcggcagcgggagtgatcaagccaaaggtaccgatcccttgaaaaaccatcaggtacaccgtctgacgggcggctatgaggaaggcggcttgaatctcgccttggcggctcagttggatttgtctgaaaatggcgacaaaaccaaaaacagtacgaccgaaattgccgccactgcttcctaccgcttcggtaatgcagttccacgcatcagctatgcccatggtttcgactttatcgaacgcggtaaaaaaggcgaaaataccagctacgatcaaatcatcgccggcgttgattatgatttttccaaacgcacttccgccatcgtgtctggcgcttggctgaaacgcaataccggcatcggcaactacactcaaattaatgccgcctccgtcggtttgcgccacaaattctaa

SEQ ID NO: 53154 - DNA, 957 bp, Neisseria meningitidis; identical to SEQ ID NO: 42418

SEQ ID NO: 53155 - DNA, 1782 bp, Neisseria meningitidis; identical to SEQ ID NO: 42177

SEQ ID NO: 53156 - DNA, 930 bp, Neisseria meningitidis; identical to SEQ ID NO: 42836

SEQ ID NO: 53157 - DNA, 1125 bp, Neisseria meningitidis
atgaccgcaaccactgcgtcttcagccaaaccttatctcaaaatccaaggtttggtgaaaaagtttggtgacaattacgctgtcgataacatcgacttggacatttatcaacacgaaatcttcgcccttttgggcagttccggcagcggaaaatctacactgctgcgtatgctggcgggtatggaaagtcccaatcagggaaaaattatccttgatggtcaggatattaccaaacttgcaccctatgatcgccccatcaatatgatgttccaaagttacgcgctttttccgcatatgaccgtagaacaaaacattgccttcggtctgaaacaggacaaaatgcctaaaggcgaaatcgccgcgcgcgtcgaagaaatgctccgcctggttcagatgaccaaatttgctaaacgcaaaccgcaccaattgtccggcggtcagcagcagcgcattgctttggcacgcagtctggcaaaacgtccgaaaattctactgctggatgagcccctcggtgcattggacaaaaaactgcgccaacaaacccagcttgagttggtcaatacgctggaacaagtcggcgtaacctgtattatggttacgcacgaccaagaagaggcgatgacgatggcgacccgcatcgccattatgtctgacggtcagttgcagcaagtcggcacacccagcgacgtgtacgactatcccaacagccgcttcactgccgagtttatcggcgaaaccaacatctttgacggtgtggtgattgaagatcatgccgactatgccgttatcgaatgcgaaggtttggaaaaccacgtccgcatcgatcacggtttgggtggtccgagcgagcaggacctttgggttagtattcgaccagaggatattgatttatataaagaaaaacccgaatatttgggcgactacaactgggcgaaaggcacggtaaaagaaatcgcctatttgggcagcttcgccatttaccatatcaagctcggcaacgggcgcgtcgtcaaaagccaagtccccgccccttactggtatgtgcgcaacattacaccgccgacttgggacgaaaccgtctatatcagctggccggaaaaccaaccgactccgttgttccgttga

SEQ ID NO: 53158 - DNA, 786 bp, Neisseria meningitidis
atgagcagaatccggcaggcttttgccgctttggatggcggaaaggcattgattccctatattacggtgggcgaccccgatattcggacaactttggcattgatgcacggcatggttgcaaacggtgcggatattttggagttgggtgtgccgttttccgatccgatggcggatgggccggttattcagcgtgcggcggagcgggcgttggcaaacgggatttcgctgcgcgatgtcttggatgtcgtcagaaaattccgtgaaaccgacacgcaaacgccggttgttttgatgggatatttgaaccctgtacataagatgggttatcgggagtttgctcaggaagccgcaaaggcgggtgtggacggcgtgttgacggtggattcccctgtcgaaaccatcgatccgctctatcgcgagctgaaggataacggggtcgactgtattttcctgattgcgccgacgacgacggaagaccgtattaaaaccattgccgagctggcaggcggatttgtctattatgtttcgctcaagggcgtaacgggcgcggcaagtttggatacggatgaggtttcgcgtaaaatagagtatttgcatcagtatatcgatattcccatcggtgtcggtttcggcatcagcaatgcggaaagcgcgcgcaaaatcggccgggttgccgacgcggtcattgtcggcagctggattgtgaaagagattgaaaacaatgcgggcaacgaggctgcggccgtcggtgctttggtcaaagagttgaaggatgccgtgcgctga

SEQ ID NO: 53159 - DNA, 201 bp, Neisseria meningitidis; identical to SEQ ID NO: 46518

SEQ ID NO: 53160 - DNA, 390 bp, Neisseria meningitidis; identical to SEQ ID NO: 39501

SEQ ID NO: 53161 - DNA, 675 bp, Neisseria meningitidis
gtgcaggcggatttagcttatgccgccgaacgcattacccacgattatccgcaagcaaccggtgcaaacaacacaagcacggtaagcgattatttcagaaacatccgtgcgcattccatccacccccgggtgtcggtcggctatgatttcggcggctggagaatagcggcagattatgccagttacagaaaatggaaagaaagtaattcttctactaaaaaagttactgaagagataaacaacaactacaaagaaacccaaacaaaacatcagggaaacggcagcttccacgcctcttcttctctcggcttatccgccatttacgatttcaaactcaacgataaattcaaaccctatatcggcgcgcgcgtcgcctacggacacgttaaacatcaagttcattcggtggaaaccaaaaccacgattgttacctctaaaccaacgcaaggcgctgcacagggaggtcctattatacaaactgatcccagcaaacctccctatcacgaaagccacagcatcagcagcgtgggtcttggtgtcatcgccggtgtcggtttcgacatcacgcccaagctgaccttggacaccggataccgttaccacaactggggacgcttggaaaacacccgattcaaaacccacgaagtctcattgggcatgcgctaccgcttctga

SEQ ID NO: 53162 - DNA, 2559 bp, Neisseria meningitidis; identical to SEQ ID NO: 43237

SEQ ID NO: 53163 - DNA, 1596 bp, Neisseria meningitidis; identical to SEQ ID NO: 42222

SEQ ID NO: 53164 - DNA, 276 bp, Neisseria meningitidis
atgaacgcgtcaaactggagcgtttacctgatattgtgtgaaaacagcgcgttctattgcggcatcagcccgaatccgcaacagcggcttgccgcccacacaaccggtaaaggcgcgaaatatacccgcgtattcaaaccggtggcgatgcgtatcgttgcaggcgggatggataaaggaacggcactcaggcaggaaatcgccgtcaaaaaactgaccgccgcacaaaaacggcaattgtgggagcaggcagaaaaaatgccgtctgaaacctga

SEQ ID NO: 53165 - DNA, 1545 bp, Neisseria meningitidis; identical to SEQ ID NO: 42179

SEQ ID NO: 53166 - DNA, 468 bp, Neisseria meningitidis; identical to SEQ ID NO: 40006

SEQ ID NO: 53167 - DNA, 207 bp, Neisseria meningitidis; identical to SEQ ID NO: 40222

SEQ ID NO: 53168 - DNA, 591 bp, Neisseria meningitidis; identical to SEQ ID NO: 42305

SEQ ID NO: 53169 - DNA, 951 bp, Neisseria meningitidis; identical to SEQ ID NO: 43319

SEQ ID NO: 53170 - DNA, 870 bp, Neisseria meningitidis
atgaaatttatattttttgtactgtatgttttgcagtttctgccgtttgcgctgctgcacaagattgccgacctgacgggtttgcttgcctaccttctggtcaaaccgcgccgccgtatcggcgaaatcaatttggcaaaatgtttttccgaatggagtgaggaaaagcgtaaaaccgtgttgaaacagcatttcaaacacatggcgaaactgatgttggaatacggtttatattggtacgcgcctgccggacgtttgaaatcgctggtgcgctaccgcaataagcattatttggacgacgcgctggcggcgggggaaaaagtcatcatcctgtatccgcacttcaccgcgttcgagatggcggtgtacgcgcttaatcaggatatcccgctgatcagtatgtattcccatcaaaaaaacaagatattggacgaacagattttgaaaggccgcaaccgctatcacaacgtcttccttatcgggcgcaccgaagggctgcgcgccctcgtcaaacagttccgcaaaagcagcgcgccgtttctgtatctgcccgatcaggatttcggacgcaacgattcggtttttgtggattttttcggtattcagacggcaacgattaccggattgagccgcattgccgcgcttgcaaatgcaaaagtgatacccgccattcccgtccgcgaggcagacaatacggttacattgcatttctaccctgcttggaaatcctttccgggtgaagacgcgaaagccgacgcgcagcgcatgaaccgttttatcgaagacagggtgcgcgaacatccggaacaatatttttggctgcacaagcgttttaaaacccgtccggaaggcagccccgatttttactga

SEQ ID NO: 53171 - DNA, 867 bp, Neisseria meningitidis; identical to SEQ ID NO: 43541

SEQ ID NO: 53172 - DNA, 321 bp, Neisseria meningitidis
atgcagagtaaatataatataaataataaagcacgagtagcagaaatatctttgttaaggcaaatgcaaagccaattttctcgaaaatatgtaaacaaaaatcttggtaacagcaacactttggctcaacaaggcagctacaccaaaaaagacggcacaaccgcgcaagcaggcgatttgctgttggctgctgacaacctgcacagccgcctcacggacaaaatgctatccattagccatgttcgggaaaacacgatttccccgtttgttttaggctgtctaaaacaaataaccataaatgcatatcattatttaaaataa

SEQ ID NO: 53173 - DNA, 1200 bp, Neisseria meningitidis; identical to SEQ ID NO: 43373

SEQ ID NO: 53174 - DNA, 156 bp, Neisseria meningitidis; identical to SEQ ID NO: 39708

SEQ ID NO: 53175 - DNA, 2151 bp, Neisseria meningitidis; identical to SEQ ID NO: 43870

SEQ ID NO: 53176 - DNA, 219 bp, Neisseria meningitidis; identical to SEQ ID NO: 43520

SEQ ID NO: 53177 - DNA, 1389 bp, Neisseria meningitidis; identical to SEQ ID NO: 42559

SEQ ID NO: 53178 - DNA, 2220 bp, Neisseria meningitidis
atgtgtaaaccgaattatggcggcattgtcttgttgcccttacttttggcatcttgtattggcggcaatttcggcgtgcagcctgttgtcgaatcaacgccgaccgcgtaccccgtcactttcaagtctaaggacgttcccactccgccccctgccaaaccttctatagaaaccacgccggtcaaccggcctgccgtcggtgcggcaatgcggctgttgaggcggaatatcgcaacttctgataaggatggcaatgattttccaaatagcaaacaagcagaagaaaagctgtcgtttaaagaaggtgatgttctgtttttatacggttcaaaaaaagataaacttcagtggcttaaggataaaattcatcaacgcaatcctaatgtagaaattaggacatcagaaaatgaaaataaaaaatatggttatgaatttgtggatgccggttatgtatatactaaaaacggaacagatgaaattgagtggacttcaaatcgcaagcagttttctaatcgttttggctacgacggttttgtatattattccggagaacatccttcccaatctttaccgagcgcgggaacggtgcaatattccggtaactggcaatatatgaccgatgccatacgtcatcgaacaggaaaagcaggagatcctagcgaagatttgggttatctcgtttattacggtcaaaatgtcggagcaacttcttatgctgcgactgccgacgaccgggagggaaaacatcctgccgaatatacggttgatttcgataagaaaactttgacgggtcaattaattaaaaatcagtatgtgcaaaagaaaaccgatgaaaagaaaccactgaccatttacgacattaccgcaacattggacggcaaccgctttaccggcagtgccaaagttaacaccgagttgaagacgagccacgctgataaagagcatttgtttttccataccgatgccgatcagcggcttgagggcggttttttcggcgataagggggaagagcttgccggacggtttatcagcaacgacaacagcgtattcggcgtattcgcaggcaaaaaaacaaacgcatcaaacgcagcagatacaaatcctgctatgccgtctgaaaaacacaccaaaatcttggattctctgaaaatttccgttgacgaggcgacggataaaaatgcccgcccgtttgccatttcccctctgcccgattttggccatcccgacaaactccttgtcgaagggcgtgaaattcctttggttagccaagagaaaaccatcgagcttgccgacggcaggaaaatgaccgtccgtgcttgttgcgattttctgacctatgtgaaactcggacggataaaaactgaccgcccagcaagtaaaccaaaggcggaagataaagggaaggatgaagaggatacaggcgttggtaacgacgaagaaggcacggaagatgaagccgcagaaggcagcgaaggaggcgaagacgaaatcggcgatgaaggaggaggtgcggaagacgaagccgcagaaaacgaaggcggcgaagaagacgaagctgaagaacctgaagaacccgaagaagaatcgccggcagaaggcggcggtggtggttcagacggcatcctgcccgctccggaagctcctaaaggcagggatatcgaccttttcctgaaaggtatccgcacggcggaagccgacattccgcaaactggaaaagcacgctataccggcacttgggaagcgcgtatcagcaaacccattcaatgggacaatcatgcggataaaaaagcggcaaaagcagaatttgacgttgatttcggcgagaaatcgatttccggaacgctgacggagaaaaacggtgtacaacctgctttccatattgaaaacggcgtgattgagggcaatggtttccacgcgacagcgcgcactcgggataacggcatcaatctttcgggaaatgattcgactaatcctcaaagtttcaaagccaataatcttcttgtaacaggcggcttttacggcccgcaggcggaggaattgggcggtactattttcaataatgatgggaaatctcttggtataactgaagatactgaaaatgaagctgaagctgaagttgaaaatgaagctggtgttggcgaacagttaaaacctgaagctaaaccccaattcggcgtggtattcggtgcgaagaaagataataaagaggtggaaaaatga

SEQ ID NO: 53179 - DNA, 384 bp, Neisseria meningitidis; identical to SEQ ID NO: 43844

SEQ ID NO: 53180 - DNA, 408 bp, Neisseria meningitidis
atggaaattcgggcaataaaatatacggcaatggctgcgttgcttgcatttacggttgcaggctgccggctggcggggtggtatgagtgttcgtccctcaccggctggtgtaagccgagaaaaccggctgccatcgatttttgggatattggcggcgagagtccgccgtctttaggggactacgagataccgctttcagacggcaatcgttccgtcagggcaaacgaatatgaatccgcacaacaatcttacttttacaggaaaatagggaagtttgaagcctgcgggctggattggcgtacgcgtgacggcaaacctttgattgagacgttcaaacagggaggatttgactgcttggaaaagcaggggttgcggcgcaacggtctgtccgagcgcgtccgatggtaa

SEQ ID NO: 53181 - DNA, 1398 bp, Neisseria meningitidis; identical to SEQ ID NO: 42145

SEQ ID NO: 53182 - DNA, 1404 bp, Neisseria meningitidis
atgaaaaaaattcaagcggatgtcgtcgtaatcggcggcggtactgccggtatgggtgcgtttcgcaatgcccgtttacattcggataatgtttacctgattgaaaacaatgtgttcggcacgacctgcgcgcgggtgggttgtatgccttccaaactcttgattgccgccgcagaagcgcgccaccacgcactgcataccgacccgttcggcgtgcatttggacaaagacagcatcgtcgtcaacggtgaagaagtaatgcggcgtgttaaatccgagcgcgaccgttttgtcggctttgtcgttgctgatgtggaagagtggcctgccgacaagcgcatcatgggctcggctaagtttatcgacgagcataccgtccaaatcgacgaccatacccaaattacggcaaaaagtttcgtgattgctaccggttcgcgtcccgtcatcctgccgcaatggcagtctttgggcaatcgtttgattatcaacgatgacgttttctcatgggatacgctgcctaagcgcgttgccgtgttcggaccgggtgttatcggtttggaactgggtcaggcattgcaccgtttgggcgtgaaagttgaaattttcggtttgggtggcatcatcggcggcatttccgaccccgtcgtttcagacgaggcgaaagccgtgttcggtgaagaattgaaactgcatttggatgctaaaaccgaggccaaactcgacgcagacggcaatgtagaagtccattgggagcaggatggcgaaaaaggcgtatttgttgccgaatatatgctggcagccgtaggccgccgtccgaacgttgacaatatcggtttggaaaacatcaatatcgaaaaagatgcgcgcggcgtacccgttgccgatccgctgactatgcagaccagtattccgcatatctttattgcgggcgacgcgtccaaccaactgcccctgctgcatgaagccgccgaccaaggcaagattgccggcgataacgcaggccgctacccgaatatcggcggcggtttgcgccgcagcaccatcggcgtagtgttcaccagtccgcaaatcggctttgtcggtttgaaatacgcgcaggttgccgcgcaataccaagccgacgaatttgtcatcggcgaagtatcgttcaaaaaccaaggccgcagccgcgtgatgctggtaaacaaaggccatatgcgcctgtatgccgaaaaagccaccggccgcttcatcggcgcagaaatcgtaggtccggccgccgaacatttggcgcacctgttggcttgggcacatcaaatgaagatgaccgttccgcaaatgctggatatgccgttctaccatcccgttatcgaggaaggtttgcgtaccgcgttgcgcgatgccgatgcgaaattgaaagcctga

SEQ ID NO: 53183 - DNA, 1041 bp, Neisseria meningitidis
atggatatttcagattttgattttaccctgcccgaaaagctgattgcccagcatccgcccgaagtgcgcggcagcagccgccttttggttgcgttgcccgatatgccgctgcaagaccgggtgttcggcgatttgccggattatgtcgaggcgggcgacgttttggtgttcaacaacaccaaagtcatgaaggcgcggctgtttgggcagaaagacagcggcggcaggatcgaagccctgattgagcgcgtgttggacaaccataccgcactggcgcacatccgttcgtccaaatcgcccaagcccggtatggggctggtgtttgaaggcggcatccgcgccgtgacggtcgggcgtgagggcgaactgttctgcctgcgttttgaaggcggagagaccgtttacgaacttttggaacagaacggacacctgcccctgccgccttatatcgaacgcgccgccgatgcggatgacgacagccgttatcaaaccgtttatgccaaatatcagggcgcggtcgccgcgccgacggcgggcctgcattttacggaagaacttttgcaccgtctgaaagacaaaggcgcggtaaccgcagaagtaaccctgcacgtcggtgccggaacgttccaacccgtgcgtgtggacaaaatcgaagagcacaaaatgcacagcgaatggtttgaagtgccgtctgaaaccgccgccgccgttgaggcggcaaaagcccgggggaacaaagtctgggcggtcggcacgacttccatgcgcgccctcgaatctgccgcgcgtgcgacggctcgtctgaaagcggggcagggcgacaccgatattttcatcacgccgggctaccgttttaatgttgtcgacagactggttaccaattttcatttgccgaaatcgacgctgctgatgttggtcagcgcgttttcgggtatgggtcatatccgcgccgcgtatcgtcatgcggtcgaacgcgaataccgtttcttcagctacggcgatgcgatggttttggggcggaacgaaggggtggtacgttag

SEQ ID NO: 53184 - DNA, 660 bp, Neisseria meningitidis; identical to SEQ ID NO: 43147

SEQ ID NO: 53185 - DNA, 1056 bp, Neisseria meningitidis; identical to SEQ ID NO: 42482

SEQ ID NO: 53186 - DNA, 1296 bp, Neisseria meningitidis; identical to SEQ ID NO: 42555

SEQ ID NO: 53187 - DNA, 492 bp, Neisseria meningitidis; identical to SEQ ID NO: 45654

SEQ ID NO: 53188 - DNA, 198 bp, Neisseria meningitidis; identical to SEQ ID NO: 36305

SEQ ID NO: 53189 - DNA, 843 bp, Neisseria meningitidis; identical to SEQ ID NO: 42241

SEQ ID NO: 53190 - DNA, 738 bp, Neisseria meningitidis; identical to SEQ ID NO: 41173

SEQ ID NO: 53191 - DNA, 1464 bp, Neisseria meningitidis; identical to SEQ ID NO: 42291

SEQ ID NO: 53192 - DNA, 729 bp, Neisseria meningitidis; identical to SEQ ID NO: 43775

SEQ ID NO: 53193 - DNA, 366 bp, Neisseria meningitidis
ttggactaccgcttcggaaggcagtaccgcttgttgaaaacggatgatttttcatccgtttttgcattcagaaaccgccgcagccgcgacctgctgcaagtttcgcgctcaaacggcaacgggctgggccatccccgcatcggtctggtggtcggcaaaaaaaccgccaaacgcgccaacgaacgaaattatatgaagcgcgttatccgcgactggtttagattgaacaaaaaccggctgccgccgcaggatttcgtcgtgcgcgtccaccgtaaattcgacagggctaccgcaaaacaggcaagggcggaactggcacaactcatgttcggcaaccccgcaaccggatgcaggaaacaggcatga

SEQ ID NO: 53194 - DNA, 771 bp, Neisseria meningitidis; identical to SEQ ID NO: 42798

SEQ ID NO: 53195 - DNA, 1404 bp, Neisseria meningitidis; identical to SEQ ID NO: 42467

SEQ ID NO: 53196 - DNA, 210 bp, Neisseria meningitidis; identical to SEQ ID NO: 37799

SEQ ID NO: 53197 - DNA, 564 bp, Neisseria meningitidis
atgaaactcatcattctcgaccgcgacggcgtcatcaatcaggaccgcgacgacttcgtcaaatccgttgacgagtggatacctgtcgaaggcagcatggatgcggtggcatttctgacgcaggcaggctacaccgtcgccgttgccaccaaccaatccggcatcgggcgcaaatattttaccgttcaaaaccttaccgaaatgcacgccaaaatgcaccgcctcgtccgtcaggcaggcggcgaaatcaacggcatctggttctgcccgcacaccgatgccgacaactgcaactgccgcaagcccaaaccgggtatgattgaagacatcatcggacgcttcaacgcccaagcctcggaaacctggctggtcggcgacagcctgcgcgatttgcaggcaatcgatgccgtcggcggcaaacccgcgctggttctgaccggaaaaggcaaaaaaacgctctcccaacacggacacgaattgcccgaacacacacaggttttcgataccctgctcgatttctcacaatacatcatgcaggaaaacaccgcaccgcaagccgactga

SEQ ID NO: 53198 - DNA, 492 bp, Neisseria meningitidis; identical to SEQ ID NO: 42249

SEQ ID NO: 53199 - DNA, 2397 bp, Neisseria meningitidis; identical to SEQ ID NO: 42356

SEQ ID NO: 53200 - DNA, 822 bp, Neisseria meningitidis; identical to SEQ ID NO: 42532

SEQ ID NO: 53201 - DNA, 1326 bp, Neisseria meningitidis; identical to SEQ ID NO: 43956

SEQ ID NO: 53202 - DNA, 423 bp, Neisseria meningitidis; identical to SEQ ID NO: 40671

SEQ ID NO: 53203 - DNA, 1230 bp, Neisseria meningitidis; identical to SEQ ID NO: 42787

SEQ ID NO: 53204 - DNA, 786 bp, Neisseria meningitidis; identical to SEQ ID NO: 42976

SEQ ID NO: 53205 - DNA, 1134 bp, Neisseria meningitidis; identical to SEQ ID NO: 43834

SEQ ID NO: 53206 - DNA, 168 bp, Neisseria meningitidis; identical to SEQ ID NO: 37435

SEQ ID NO: 53207 - DNA, 1101 bp, Neisseria meningitidis; identical to SEQ ID NO: 43213

SEQ ID NO: 53208 - DNA, 8112 bp, Neisseria meningitidis; identical to SEQ ID NO: 43467

SEQ ID NO: 53209 - DNA, 1053 bp, Neisseria meningitidis; identical to SEQ ID NO: 42944

SEQ ID NO: 53210 - DNA, 798 bp, Neisseria meningitidis; identical to SEQ ID NO: 44377

SEQ ID NO: 53211 - DNA, 228 bp, Neisseria meningitidis
atgaatgtttgggatatatggggcaggatggtggaaatctatcataagtataagaagccgtgcctggttttggcggtggattttgtgatgggtatggtattcatagagccgaatgaggagccgtgcatcggcagatgctatgcgccaatgtcggagtcccctgattttgccaacgctgttgcgatggctgttgctatgatctgtatcgtatggattgccgttttatag

SEQ ID NO: 53212 - DNA, 1128 bp, Neisseria meningitidis; identical to SEQ ID NO: 42416

SEQ ID NO: 53213 - DNA, 207 bp, Neisseria meningitidis; identical to SEQ ID NO: 43312

SEQ ID NO: 53214 - DNA, 1077 bp, Neisseria meningitidis
atgaagccgtctatcttagaaaaactacaacaactcagcgaccgactggaagaagttacccaccttctcggacagcccgaagccacgtccgacatggacaactaccgcaagctcacgcgcgaacacgccgaactgacccccgtcgtcgaagtgttccaaaactatcggcttgcccaaagcgacttggcggatgccgaagaaatgttgtccgaccccgaaatgaaagactttgccgccgaagaaatcgaagcggccaaagccaaaatcggcgaactcgataccgaactgcaaaaactgctgctgcccaaagatgccgacgacgacaaaaacatcttcatcgaaatacgcgccggaacgggcggcgacgaagccgcgctgtttgccggcgatttgctgcgtatgtacagccgctacgccgagcgcaaccgttggcaggttgaaatcgtgtccgccaacgaaagcgaattgggcggctataaagaagtcatcgcccgtattgtcggactcggggcgtacagccgtttgaaatttgaatcgggcggacaccgcgtgcagcgcgtccccgccaccgaaagccaaggccgcatccacacctccgcctgcaccgttgccgtcatgcccgaagcggacgaactggaagacatcgaactgaacccagccgacctgcgcatcgacaccttccgcgcatccggcgcgggcggtcagcacatcaacaaaaccgactccgccgtccgcatcacccacctgcccaccggcatggtggtcgaatgccaagacggccgcagccaacatgccaacaaagcgcaggcaatgaaagtcctcgccgcccgcctgaacgacgcgcaaaaacgcgaagcccaagccaaagaagccgccgagcgcaaatccctcatcggcagcggcgaccgcagcgaacgcatccgcacctacaactatccccaaggccgcgtaaccgaccaccgcatcaaccttaccctgcacaagctggattttgtgatggacggcgacttggaagaaatcaccaatgccctgattgccgagcatcaggccgagcttctggcggcaatgggcgattga

SEQ ID NO: 53215 - DNA, 867 bp, Neisseria meningitidis; identical to SEQ ID NO: 43925

SEQ ID NO: 53216 - DNA, 552 bp, Neisseria meningitidis
gtgaactattgcgaatttgccgcctcacttcccgaaaacaccgacaacccgaacaaacattaccacgacacgcaatacggttttccgattgaggacgacaatgaattgtttgaacggctggtgttggaaatcaatcaggcaggattgagctggacgctgatgctgaagaagcggcaggcgtttcagacagcatttgaagggttcgacatcgatacggtcgccgcatttgacgaagccgatattgatcggttacttgccgatgcgggcattgtccgcaaccgcctgaaaatcgatgccgccattttcaatgcacggcaaatccaagcgttgcaacaagaatacggctcgttcaagaactggctcgacacgcaccatccgcgaagcaaagacgaatgggtcaaactctttaaaaaacatttcaaatttgtcggcggcgaaatcgtcggcgaatttctgatgagtaccggctacctcaaaggcgcgcacgccgaaagctgtccggtttaccgtaaaaccctgaaataccacccgaaatggctcgatgccgtctga

SEQ ID NO: 53217 - DNA, 702 bp, Neisseria meningitidis; identical to SEQ ID NO: 43219

SEQ ID NO: 53218 - DNA, 324 bp, Neisseria meningitidis; identical to SEQ ID NO: 43895

SEQ ID NO: 53219 - DNA, 318 bp, Neisseria meningitidis; identical to SEQ ID NO: 42400

SEQ ID NO: 53220 - DNA, 1635 bp, Neisseria meningitidis
atggcagcaaaagacgtacagttcggcaatgaagtccgtcaaaaaatggtaaacggcgtgaacattctggcaaacgccgtccgcgtaaccttgggccccaaaggtcgcaacgtagtcgttgaccgcgcattcggcggcccgcacatcaccaaagacggcgtaaccgtcgccaaagaaatcgaactgaaagacaagtttgaaaatatgggcgcgcaaatggtgaaagaagttgcgtccaaaaccaacgacgtggcaggcgacggtacgactaccgccaccgtactggcgcaatccatcgttgccgaaggtatgaaatatgttaccgcaggtatgaatccgaccgacctgaaacgcggtatcgataaagccgtcgccgctttggttgacgaactgaaaaacatcgccaaaccttgcgacacttctaaagaaatcgcccaagtcggctctatttccgccaactccgacgaacaagtcggcgcgattatcgccgaagcgatggaaaaagtcggcaaagaaggcgtgattaccgttgaagacggcaagtctttggaaaacgagctggacgtagttgaaggtatgcagttcgaccgcggctacctgtctccttacttcatcaacgatgcggaaaaacaaatcgctgctttggacaatccgtttgtattgttgttcgacaaaaaaatcagcaacatccgcgacctgctgcctgttttggaacaagtggcaaaagccagccgtccgctgttgattatcgctgaagacgtagaaggcgaagccttggcgactttggtcgtgaacaacatccgaggcatcctgaaaaccgttgccgtcaaagcccctggcttcggcgaccgccgcaaagcgatgttgcaagacatcgccatcctgaccggcggcgtggtgatttccgaagaagtcggtctgtctttggaaaaagcgactttggacgacttgggtcaagccaaacgcatcgaaatcggtaaagaaaacaccaccatcatcgacggctttggcgacgcagcccaaatcgaagcgcgtgttgccgaaatccgccaacaaatcgaaaccgcaaccagcgattacgacaaagaaaaactgcaagagcgcgtggctaaattggcaggcggcgtggcagtcatcaaagtcggtgccgcgaccgaagtcgaaatgaaagagaaaaaagaccgcgtggaagacgcgctgcacgctacccgcgcagccgttgaagaaggcgtggttgcaggcggcggcgtagccctgttgcgtgcccgtgctgctttggaaaacctgcacaccggcaatgccgaccaagacgcaggcgtacaaatcgtcttgcgcgccgttgagtctccgctgcgccaaatcgttgccaacgcaggcggcgaacccagcgtggttgtgaacaaagtattggaaggcaaaggcaactacggttacaacgctggcagcggcgaatacggcgatatgatcgaaatgggcgtactcgaccccgccaaagtaacccgttctgcgctgcaacacgccgcatctatcgccggcttgatgctgaccactgattgcatgatcgctgaaatccccgaagacaaaccggctgtgcctgatatgggcggcatgggtggtatgggcggcatgatgtaa

SEQ ID NO: 53221 - DNA, 1011 bp, Neisseria meningitidis; identical to SEQ ID NO: 43278

SEQ ID NO: 53222 - DNA, 2385 bp, Neisseria meningitidis; identical to SEQ ID NO: 42846

SEQ ID NO: 53223 - DNA, 1680 bp, Neisseria meningitidis
atggaaattattaacgatgcagaacttatccgttccatgcagcgtcagcagcacatagatgctgaattgttaactgatgcaaatgtccgtttcgagcaaccattggagaagaacaattatgtcctgagtgaagatgaaacaccgtgtactcgggtaaattacattagtttagatgataagacggtgcgcaaattttcttttcttccttctgtgctcatgaaagaaacagcttttaaaactgggatgtgtttaggttccaataatttgagcaggctacaaaaagccgcgcaacagatactgatcgtgcgtggctacctcacttcccaagctattatccaaccacagaatatggattcgggaattctgaaattacgggtatcagcaggcgaaataggggatatccgctatgaagaaaaacgggatgggaagtctgccgagggcagtattagtgcattcaataacaaatttcccttatataggaacaaaattctcaatcttcgcgatgtagagcagggcttggaaaacctgcgtcgtttgccgagtgttaaaacagatattcagattataccgtccgaagaagaaggcaaaagcgatttacagatcaaatggcagcagaataaacccatacggttcagtatcggtatagatgatgcgggcggcaaaacgaccggcaaatatcaaggaaatgtcgctttatcgttcgataaccctttgggcttaagcgatttgttttatgtttcatatggacgcggtttggcgcacaaaacggacttgactgatgccaccggtacggaaactgaaagcggatccagaagttacagcgtgcattattcggtgcccgtaaaaaaatggctgttttcttttaatcacaatggacatcgttaccacgaagcaaccgaaggctattccgtcaattacgattacaacggcaaacaatatcagagcagcctggccgccgagcgcatgctttggcgtaacagacttcataaaacttcagtcggaatgaaattatggacacgccaaacctataaatacatcgacgatgccgaaatcgaagtacaacgccgccgctctgcaggctgggaagccgaattgcgccaccgtgcttacctcaaccgttggcagcttgacggcaagttgtcttacaaacgcgggaccggcatgcgccaaagtatgcctgcaccggaagaaaacggcggcgatattcttccaggtacatctcgtatgaaaatcattactgccggtttggacgcagccgccccatttattttaggcaaacagcagtttttctacgcaaccgccattcaagctcaatggaacaaaacgccgttggttgcccaagataaattgtcaatcggcagccgctacaccgttcgcggatttgatggggagcagagtcttttcggagagcgaggtttctactggcagaatactttaacttggtattttcatccgaaccatcagttctatctcggtgcggactatggccgcgtatctggcgaaagtgcacaatatgtatcgggcaagcagctgatgggtgcagtggtcggcttcagaggagggcataaagtaggcggtatgtttgcttatgatctgtttgccggcaagccgcttcataaacccaaaggctttcagacgaccaacaccgtttacggcttcaacttgaattacagtttctaa

SEQ ID NO: 53224 - DNA, 1005 bp, Neisseria meningitidis; identical to SEQ ID NO: 43832

SEQ ID NO: 53225 - DNA, 273 bp, Neisseria meningitidis; identical to SEQ ID NO: 52306

SEQ ID NO: 53226 - DNA, 471 bp, Neisseria meningitidis; identical to SEQ ID NO: 43223

SEQ ID NO: 53227 - DNA, 2853 bp, Neisseria meningitidis
atgaaactgtccgaactgttcaaccccaacgaatttgccgcgcggcatttgagtttcggcgacgaagcggcgttgcttgccgctgtcggcgagaaaagtatggacgattttgtcggcaataccgtgccgcaaagcatccgtatgccgtccgaactcgatttgcccgatgccctgaccgaagcggacgcgttggcaaaattgaaaggcattgcgtcgaaaaacgtgatcaacaagtcctatatcggtttaggctattacccgacccgcgtgccgaatgtgattttgcgcaacgtattggaaaatccgggctggtataccgcctacacgccgtatcaggcggaaattgcccagggtcgtttggaagctttgttgaacttccaacaagtgtgtatcgatttgaccggtttccctgtggcgggcgcgtctttgctggacgaagcgaccgccgccgccgaagcgatggcgatggcgcaccgcgtgggcaaggtgaaatccgggcgtttctttgtggacgagcgcgtgtatccgcaaactttggacgtgatgaaaacccgcgccaaatatttcggctttgaactggtggtcggcgattttgtcaaagcggatgaaggcgaatacttcggcgcgctgttccaatacgtcggcaaagacggcgacgtacaagatttgcaggatgttatcagccgtctgaaagcaaaaggcacgatcgtggtcgttgccaccgacatcatgagtttggttttgctgaagtctccggctgaattgggcgcggacattgcgttgggcaacacccaacgcttcggcgtaccgatgggcttcggcgggccgcatgccgcttatttcgcgtttaaagacgcgttcaaacgttccgccccgggccgtattatcggtgtatccaaagacgcatcgggcaaacctgccttgcgcatggcgttgtccacccgcgagcaacacatccgccgcgaaaaagcgacatccaatatttgtaccgcgcaggcattgctggcgaacttggccggtatgtatgccgtttaccacggtcctgaaggtgtgaaacgcattgccaaccgcattcacgcgctggcttctgcctttgccgatgcactggtttcagacggcatcaaagtggttcacgaagtcttcttcgataccgttaccgtcgatttcggcaacaaagagaaagcagaccaagtgtttgccgctgctttagagtcgggttacaacctgcgccgcgtcaacgatactcaagttgcggctgcattccatgaaacatcggcatacgaagatttggttgatttgtaccgcgcgtttaccggcaaggatgcgttcgcatttgccgatgatgtcaaaggccgtctgaacgccgaattgctgcgtcaagatgacattctgcaacatcctgtgttcaaccgttaccacaccgaacacgaaatgttgcgctatctgaaaaaactcgaagaccgcgatttggcgatgaaccgcagcatgatttcattgggcagctgcaccatgaaactcaacgcgactgcggaaatgttgccgattacttgggcggagttctccgacatccatccttacgctcctgaagcgcaaaccgccggctaccgcgaattgctcgccgatatggaaaacagcctgaaatccatcaccggttttgatgcaatttccttccagcccaactccggcgcgcagggcgaatacagcggtatgcttgccatccgccgctatcaggaagcccaaggcgaagcgcaccgcaacatctgcctgattcccaaatccgcccacggtaccaaccctgcgactgcggccatgctgggcttgaaagtcgtcgtcgtcgataccgacgaacacggcaacgtcaacatcgacgatttgaaagccaaagccgagcaataccgcgacgctttgtccgccatcatgattacctatccgtccacccacggcgtgtatgaagaaggcatccgcgacatctgccgcatcatccatgaaaacggcggacaggtttatatggacggcgccaacctcaacgctcaaatcggcatcatgcagcctgccgaagtcggcgcggacgtgttgcacatgaacctgcacaaaaccttctgtatccctcacggcggcggcggcccgggcatgggtccgattggcttgaaagcccaccttgccccgtttgcaccgggacacgctttgaccgacacgcacagcacaagtgccgggcaaaccgccgtggctgccgcagcatatggttctgcatccatcctgccgattacttggatgtacctgaccatgatgggcaaacaaggcatggaacaggcaacgcgctgggcattgctcaacgccaactacgtcgccaaagccttgggcgaggattatccgattctctacaccggcaaaaacggccgcgtcgcgcacgaatgtatcgtcgacttgcgtccgctcaaagccgaaagcggcattaccgaaaccgacatcgccaaacgcctgatggactacggcttccacgccccgacggtttccttccccgttgccggtacgctgatgatcgagccgaccgagagcgaaagcaaagccgaactcgaccgcttcatcgccgccctgaaacaaatcaaacaggaagtgctgaaagtcgggcgcggcgaatggccgaaagacgacaacccactggtcaacgcgccgcacaccgccgcagatataaccggcaactgggcgcatccgtattcccgcgaagaagccgtcttcccattgccgttcgtccgcgaacacaaattctggccgagcgtcaaccgtgtggacgacgtgtacggcgaccgcaatctcgtgtgcagctgcccaccgatggaaaattatgaagactga

SEQ ID NO: 53228 - DNA, 744 bp, Neisseria meningitidis; identical to SEQ ID NO: 42841

SEQ ID NO: 53229 - DNA, 435 bp, Neisseria meningitidis; identical to SEQ ID NO: 43451

SEQ ID NO: 53230 - DNA, 696 bp, Neisseria meningitidis; identical to SEQ ID NO: 42831

SEQ ID NO: 53231 - DNA, 495 bp, Neisseria meningitidis; identical to SEQ ID NO: 42916

SEQ ID NO: 53232 - DNA, 153 bp, Neisseria meningitidis; identical to SEQ ID NO: 43283

SEQ ID NO: 53233 - DNA, 624 bp, Neisseria meningitidis; identical to SEQ ID NO: 36421

SEQ ID NO: 53234 - DNA, 1098 bp, Neisseria meningitidis; identical to SEQ ID NO: 42648

SEQ ID NO: 53235 - DNA, 453 bp, Neisseria meningitidis; identical to SEQ ID NO: 42252

SEQ ID NO: 53236 - DNA, 621 bp, Neisseria meningitidis; identical to SEQ ID NO: 39249

SEQ ID NO: 53237 - DNA, 585 bp, Neisseria meningitidis
atgcacatactgaccgccggcgtggacgaggcaggacgcggacctttagtcggcagcgtgtttgccgccgccgtcatccttccggaaacattcgacctgcccggactgaccgactccaaaaaactcagcgagaaaaaacgcgacgcgcttgccgaaatgataaaaaatcaggcggttgagtggcacgttgccgccgcctcgcccgaagaaatcgccagcctcaacatcctgcacgccaccatgctcgcgatgaaacgcgccgttgacggcttggctgtgcgtcccgaaaaaatattcatcgacggcaaccgcattcctgaacatttgaacatccctgccgaagccgtcgtcaaaggcgacagcaaaatcatcgaaatctccgccgcatccgttttggcaaagaccgcacgcgatgcggaaatgtacgcactggcgcaacgccatccccaatacggtttcgacaaacacaaaggttacggcacgaagcagcatttggaagccctcgaaaaatacggcgtgctgcccgaacaccgccgcgacttcgcccccgtcagaaacctgctcgcgcagcaggccttgttttaa

SEQ ID NO: 53238 - DNA, 198 bp, Neisseria meningitidis; identical to SEQ ID NO: 43350

SEQ ID NO: 53239 - DNA, 1911 bp, Neisseria meningitidis; identical to SEQ ID NO: 51665

SEQ ID NO: 53240 - DNA, 2334 bp, Neisseria meningitidis
atgaataccaaactgacaaaaatcatttccggtctctttgtcgcaaccgccgcctttcagacagcatcggcaggaaacattacagacatcaaagtttcctccctgcccaacaaacagaaaatcgtcaaagtcagctttgacaaagagattgtcaacccgaccggcttcgtaacctcctcaccggcccgcatcgccttggactttgaacaaaccggcatttccatggatcaacaggtactcgaatatgccgatcctctgttgagcaaaatcagtgccgcacaaaacagcagccgtgcgcgtctggttctgaatctgaacaaaccgggccaatacaataccgaagtacgcgggaacaaagtttggatattcattaacgaatcggacgataccgtgtccgcccccgcacgccccgccgtaaaagccgcgcctgccgcaccggcaaaacaacaggctgccgcaccgtctaccaagtccgcagtatccgtatccgaaccctttaccccggcaaaacaacaggctgccgcaccgtttaccgagtccgtagtatccgtatccgcaccgttcagcccggcaaaacaacaggcggcggcatcagcaaaacaacaggcggcagcaccagcaaaacaacaggcggcagcaccagcaaaacaacaggcggcagcaccagcaaaacaacaggcggcagcaccagcaaaacaaaccaatatcgatttccgcaaagacggcaaaaatgccggcattatcgaattggctgcattgggctttgccgggcagcccgacatcagccaacagcacgaccacatcatcgttacgctgaaaaaccataccctgccgaccacgctccaacgcagtttggatgtggcagactttaaaacaccggttcaaaaggttacgctgaaacgcctcaataacgacacccagctgattatcacaacagccggcaactgggaactcgtcaacaaatccgccgcgcccggatactttaccttccaagtcctgccgaaaaaacaaaacctcgagtcaggcggcgtgaacaatgcgcccaaaaccttcacaggccggaaaatctcccttgacttccaagatgtcgaaatccgcaccatcctgcagattttggcaaaagaatccggaatgaacattgttgccagcgactccgtcaacggcaaaatgaccctctccctcaaggatgtgccttgggatcaggctttggatttggttatgcaggcgcgcaacctcgatatgcgccagcaagggaatatcgtcaacatcgcgccccgcgacgagctgcttgccaaagacaaagccctcttacaggcagaaaaagacattgccgatttgggtgcgctgtattcccaaaacttccagttgaaatacaaaaatgtggaagaattccgcagcatcctgcgtttggacaatgccgacacgaccggaaaccgcaacacgcttatcagcggcaggggcagcgtgctgatcgatcccgccaccaacaccctgattgttaccgacacccgcagcgtcatcgaaaaattccgcaaactgattgacgaattggacgtacccgcgcaacaagtgatgattgaggcgcgtatcgtcgaagcggcagacggcttctcgcgcgatttgggcgttaaattcggcgcgacaggcaagaaaaagctgaaaaatgatacaagcgcattcggctggggggtaaactccggcttcggcggcgacgataaatggggggccgaaaccaaaatcaacctgccgattaccgctgccgcaaacagcatttcgctggtgcgcgcgatttcctccggtgccttgaatttggaattgtccgcatccgaatcgctttcaaaaaccaaaacgcttgccaatccgcgcgtgctgacccaaaaccgcaaagaggccaaaatcgaatccggttacgaaattcctttcaccgtaacctcaatcgcgaacggcggcagcagcacgaacacggaactcaaaaaagccgtcttggggctgaccgttacgccgaacatcacgcccgacggccaaatcattatgaccgtcaaaatcaacaaggactcgcctgcgcaatgtgcctccggtaatcagacgatcctgtgtatttcgaccaaaaacctgaatacgcaggctatggttgaaaacggcggcacattgattgtcggcggtatttatgaagaagacaacggcaatacgctgaccaaagtccccctgttgggcgacatccccgttatcggcaacctctttaaaacacgcgggaaaaaaaccgaccgccgcgaactgctgattttcattaccccgaggattatgggtacggccggcaacagcctgcgctattga

SEQ ID NO: 53241 - DNA, 342 bp, Neisseria meningitidis; identical to SEQ ID NO: 39758

SEQ ID NO: 53242 - DNA, 474 bp, Neisseria meningitidis; identical to SEQ ID NO: 42304

SEQ ID NO: 53243 - DNA, 891 bp, Neisseria meningitidis; identical to SEQ ID NO: 43240

SEQ ID NO: 53244 - DNA, 273 bp, Neisseria meningitidis; identical to SEQ ID NO: 41774

SEQ ID NO: 53245 - DNA, 954 bp, Neisseria meningitidis; identical to SEQ ID NO: 42175

SEQ ID NO: 53246 - DNA, 537 bp, Neisseria meningitidis; identical to SEQ ID NO: 42768

SEQ ID NO: 53247 - DNA, 588 bp, Neisseria meningitidis; identical to SEQ ID NO: 43205

SEQ ID NO: 53248 - DNA, 1152 bp, Neisseria meningitidis; identical to SEQ ID NO: 42616

SEQ ID NO: 53249 - DNA, 330 bp, Neisseria meningitidis; identical to SEQ ID NO: 42865

SEQ ID NO: 53250 - DNA, 966 bp, Neisseria meningitidis
atgagccacacgcaactgacccaaggcgaacgataccacatccaatacctgtcccgccactgcaccgtcaccgaaatcgccaaacagcttaaccgccacaaaagcaccatcagccgcgaaatcagacggcaccgcacccaagggcagcaatacagcgccgaaaaagcccagcggcaaagccagactatcaaacagcgtaagcgacaaccctataagctcgattcgcagctgattcagcacatcgacccccttatccgccgcaaactcagtcccgaacaagtatgcgcctacctgcgcaaacaccaccagatcacgctccaccacagcaccatttaccgctaccttcgccaagacaaaagcaacggcagcacgttgtggcaacatctcagaatatgcagcaaaccctaccgcaaacgctacggcagcacatggaccagaggcaaagtacccaaccgtgtcggcatagaaaaccgacccgctatcgtcgaccagaaatcccgtatcggcgattgggaagccgacaccattgtcggcaaaggacagaaaagcgcattattgaccttggtcgaacgcgttacccgctacaccatcatctgcaaattggatagcctcaaagccgaagacactgcccgggcagctgttaggacattaaaggcacataaagacagggtgcacaccatcaccatggataacggcaaagagttctaccaacacaccaaaataaccaaagcattgaaagcggagacttatttttgtcgcccttaccattcttgggagaaagggctgaatgagaacaccaacggactcatccggcaatacttccccaaacaaaccgatttccgtaacatcagtgatcgggagatacgcagggttcaagatgagttgaaccaccgaccaagaaaaacacttggctacgaaacgccaagtgttttattcttgaatctgttccaaccactaatacactag

SEQ ID NO: 53251 - DNA, 186 bp, Neisseria meningitidis; identical to SEQ ID NO: 37303

SEQ ID NO: 53252 - DNA, 1002 bp, Neisseria meningitidis; identical to SEQ ID NO: 42154

SEQ ID NO: 53253 - DNA, 1215 bp, Neisseria meningitidis; identical to SEQ ID NO: 43295

SEQ ID NO: 53254 - DNA, 918 bp, Neisseria meningitidis; identical to SEQ ID NO: 50851

SEQ ID NO: 53255 - DNA, 1086 bp, Neisseria meningitidis; identical to SEQ ID NO: 43799

SEQ ID NO: 53256 - DNA, 411 bp, Neisseria meningitidis
ttggctgaaggtcaaaaatcagccgtcacagagtattacctgaatcacggcgaatggcccggcaacaacagttctgccggcgtggcaacctccgccgacatcaaaggcaaatatgttaaaagcgttgaagtcaaaaacggcgtcgttaccgcccaaatggcttcaagcaacgtaaacaacgaaatcaaaggcaaaaaactctccctgtgggccaagcgtcaagccggttcggtaaaatggttctgcggactgccggttacgcgcgccgacaacgccaaagacgacgccgttaccgccgccgccaccggcaccgacaaaatcgacaccaagcacctgccgtcaacctgccgcgatgattcatctgtcgtttgcatagaaacaccacctacggctttctataaaaatacctaa

SEQ ID NO: 53257 - DNA, 1428 bp, Neisseria meningitidis
atgaacgagaactttaccgaatggctgcacggctgggtcggcgccatcaacgatccgatgtggtcatacttggtttatatgcttttgggtacggggcttttcttcaccgtaaccacgggctttgtccaattccgcctgttcgggcgcagcatcaaagaaatgctcggcggccgcaaacagggggacgaccctcacggcatcacgccgtttcaggcatttgtaaccggccttgccagccgcgtgggcgtgggcaatatcgcgggcgtggccatcgccatcaaagtcggcggaccgggcgcggtgttttggatgtgggtaaccgccttaatcggtatgagttcggcgtttgtcgaatcttcgctggcgcagctctttaaagtccgcgactacgacaaccaccatttccggggcggccctgcctactacatcactcaagggctggggcagaaatggctgggcgtgttgttcgccctgagcctgattttctgtttcggctttgtgtttgaagcggttcagaccaataccatcgccgataccgtcaaagcggcatggggttgggagcctcattatgtcggcgtcgccctggtgattttaaccgcgccgattatcttcggcggcatcaggcgcatatctaaagcggcggaaatcgtcgtccccctgatggcggttttgtacctctttatcgcgcttttcatcattttgaccaatattccgatgattccggacgtgttcggtcagattttttcgggcgcgttcaaattcgacgcggcagcaggcggcttactcggcggtctgatttcgcaaacgatgatgatgggcatcaaacgcggcctgtattccaacgaggcgggtatgggttccgcgccgaacgccgccgccgccgccgaagtgaaacaccctgtttcgcaaggtatgattcaaatgctgggcgtgtttgtcgataccatcatcgtttgttcttgcaccgccttcatcatcttgatttaccaacagccttacggcgatttgagcggtgcggcgctgacgcaggcggcgattgtcagccaagtggggcaatggggcgcgggcttcctcgccgtcatcctgtttatgtttgccttttccaccgttatcggcaactatgcctatgccgagtccaacgtccaattcatcaaaagccattggctgattaccgccgttttccgtatgctggttttggcgtgggtctatttcggcgcggttgccaatgtgcctttggtctgggatatggcggatatggcgatgggcattatggcgtggatcaaccttgtcgccatcctgctgctctcgcccttggcgtttatgctgctgcgcgattacaccgccaagctgaaaatgggcaaagaccccgagttcaaactttccgaacatccgggcctgaaacgccgtatcaaatccgacgtttggtaa

SEQ ID NO: 53258 - DNA, 225 bp, Neisseria meningitidis; identical to SEQ ID NO: 42454

SEQ ID NO: 53259 - DNA, 1128 bp, Neisseria meningitidis
atgaatacacggaatatgcgctatattcttttgacaggactgttgccgatggcatccgcttttggagagaccgcgctgcaatgcgccgctttgacggacaatgttacgcgtttggcgtgttacgacaggatttttgcggcacagcttccgtcttcggcagggcaggaagggcaggagtcgaaagccgtactcaatctgacggaaaccgtccgcagcagcctggataagggcgaggcggtcattgttgttgaaaaaggcggggatgcgcttcctgccgacagtgcgggcgaaaccgccgacatctatacgcctttgagcctgatgtacgacttggacaaaaacgatttgcgcgggctgttgggcgtacgcgaacacaatccgatgtaccttatgccgctctggtacaacaattcgcccaactatgccccgggttcgccgacgcgcggtacgactgtacaggaaaaattcggacagcagaaacgtgcggaaaccaaattgcaggtttcgttcaaaagcaaaattgccgaagatttgtttaaaacccgcgcggatctgtggttcggctacacccaaagatccgattggcagatttacaaccaaggcaggaaatccgcgccgttccgcaatacggattacaaacctgaaattttcctgacccagcctgtgaaggcggatttgccgttcggcggcaggctgcgtatgctcggtgcgggttttgtccaccagtccaacggacagagccgtcccgaatcgcgttcgtggaacaggatttacgccatggcaggcatggaatggggcaaattgacggtgattccgcgcgtgtgggtgcgtgcgttcgatcagagcggcgataaaaacgacaatcccgatattgccgactatatggggtatggcgacgtgaagctgcagtaccgcctgaacgacaggcagaatgtgtattccgtattgcgctacaaccccaaaacgggctacggcgcgattgaagccgcctacacgtttccgattaagggcaaactcaaaggcgtggtacgcggattccacggttacggcgagagcctgatcgactacaaccacaagcagaacggtatcggtatcgggttgatgttcaacgacttggacggcatctga

SEQ ID NO: 53260 - DNA, 1422 bp, Neisseria meningitidis; identical to SEQ ID NO: 43087

SEQ ID NO: 53261 - DNA, 1017 bp, Neisseria meningitidis; identical to SEQ ID NO: 42603

SEQ ID NO: 53262 - DNA, 483 bp, Neisseria meningitidis; identical to SEQ ID NO: 42294

SEQ ID NO: 53263 - DNA, 618 bp, Neisseria meningitidis; identical to SEQ ID NO: 38819

SEQ ID NO: 53264 - DNA, 942 bp, Neisseria meningitidis
atggcaatccaatggtttcccggccatatgaacaaggcgaaaaaagccatcgccgagcgtgcaaaaagcgttgatatggtgattgaaatgctggacgcgcgtatgcccgcctccagcgaaaaccccctgcttgcccagctttccaaaggcaaacccaaacttaaaatcctaaataaacaagatcttgccgaccccgaacgcacaaaggtctggcttggccactacaacagccgccccgacacgcgcgccattgccctcgattcctccgaaaccggcgcacacggcaaaatcacccaagcctgccgcgcgatgattccccaccggcaaggcatagataaacccctgcgcgtcctcatctgcggcatccccaacgttggcaagtccaccctcatcaacggcatgataggcaaaaaatccgccaaaaccggcaacgaacccggcatcaccaaagccgaacaacgcctcttcctcgccgatgacttctggctctacgacacccccggaatgctgtggccgaaaatcatcgtcgaagaaggcggctacaaccttgccgccggcggcgcagtcggacgcaacgcgttggacgaagaagaagtcgccctcgaacttttagactacctccgccgccactacctccctatgttgcaagaacgctaccaagccgacaaagaccccagcagccactgggacgaaaacgtttggctcgaatggatagccaaaaaacgcggcgcagtcctcagcggcggacggatcaactaccaaaaagccgccgaaaacatccttaccgacttccgtgaaggcaaaatcggcagaatcaccctcgaaacgccgaaccaatgggaaacttggctcaaaaaagcccgtcagaaagaagccgaactcaaagccatacgcgaagccagaaaagcagagcgtaaagggcagaagccttcggaagcataa

SEQ ID NO: 53265 - DNA, 138 bp, Neisseria meningitidis; identical to SEQ ID NO: 43740

SEQ ID NO: 53266 - DNA, 1260 bp, Neisseria meningitidis; identical to SEQ ID NO: 42288

SEQ ID NO: 53267 - DNA, 1338 bp, Neisseria meningitidis; identical to SEQ ID NO: 43745

SEQ ID NO: 53268 - DNA, 678 bp, Neisseria meningitidis; identical to SEQ ID NO: 42526

SEQ ID NO: 53269 - DNA, 1113 bp, Neisseria meningitidis; identical to SEQ ID NO: 43790

SEQ ID NO: 53270 - DNA, 7497 bp, Neisseria meningitidis
gtggtagccgttgctgaaactaccaagcgcgaaggtaaaagctgtgccgatagtgattcaggcagcgctcatgtgaaatctgttccttttggtactactcatgcacctgtttgtcgttcaaatatcttttctttttctttattgggcttttctttatgtttggctgtaggtacggccaatattgcttttgctgatggcattattgctgataaagctgctcctaaaactcaacaagccacgattctgcaaacaggtaacggcataccgcaagtcaatattcaaacccctacttcggcaggggtttctgttaatcaatacgcccagtttgatgtgggtaatcgcggggcgattttaaacaacagccgcagcaacacccaaacacagctaggcggttggattcaaggtaatccttggttggcaaggggcgaagcacgtgtggttgtaaaccaaatcaacagcagccattcttcacaaatgaatggctatattgaagtgggcggacgacgtgcagaagtcgttattgccaatccggcagggattgcagtcaatggtggtggttttatcaatgcttcccgtgccactttgacgacaggccaaccgcaatatcaagcaggagaccttagcggctttaagataaggcaaggcaatgttgtaatcgccggacacggtttggatgcccgtgataccgatttcacacgtattctcagttatcattccaaaattgatgcacccgtatggggacaagatgttcgtgtcgtcgcgggacaaaacgatgtggtcgcaacaggtaatgcacattcgcctattctcaataatgctgctgccaatacgtcaaacaatacagccaacaacggcacacatatccctttatttgcgattgatacaggcaaattaggaggtatgtatgccaacaaaatcaccttgatcagtacggccgagcaagcaggcattcgtaatcaagggcagttgtttgcttcttccggtaatgtggcgattgatgcaaatggccgtttagtcaatagtggcacgatggctgccgccaatgcgaaagatacggataatacagcggaacacaaagtcaatatccgcagtcagggcgttgaaaacagcggtacggcggtatcgcaacaaggcactcaaattcacagtcagtcgattcaaaacactggcacattattgtcctcaggcgaaatattgattcacaattcgggcagcctgaaaaatgaaacatcaggcaccattgaagccgctcgtttggctattgataccgacacacttaataatcaaggcaaactctctcaaacaggttcacaaaaactccatattgatgcacaaggcaaaatggataaccgtggccgcatgggtttacaagataccgcaccaaccgcgtcaaatggttcaagcaatcaaaccggcaatagttacaatgcatctttccattcatccactaccacaccaacaacggcaacaggtacgggtactgcaaccgtttctatatcaaacataactgcgcctacctttgctgatgggacaattcgcactcatggtgcactggataattcaggcagtattattgccaatggtcaaacagatgttagtgcgcaacaaggtttaaataatgcaggacaaatagacattcatcagttaaatgcaaaaggttcggcgtttgacaatcacaatggaacaattatcagtgatgcggtccacattcaagccggcagcctgaataatcaaaatggcaacatcacaacacgccaacagttagagattgaaaccgatcaactggataacgctcatggcaagttattatcagcagaaatagcggatttagccgtttcaggcagcctgaacaatcaaaatggcgaaatagcgaccaatcaacaactgattattcacgatggtcagcaatctaccgctgtcattgataatacgaatggcacgatacaatcaggccgtgatgttgctattcaggcaaaatcgttatccaacaacggcacacttgccgctgataataaactggatattgcgttacaagatgatttttatgtagaacgcaatatcgtggcgggcaatgaattgtcgctcagtacacgaggcagcctgaaaaattcacatactttgcaagcaggaaaacgcattcggattaaagcaaataaccttgataatgcagcacaaggcaacattcaatccggcggtacgacagacattggcacgcagcacaatttaaccaatagaggcttgattgacggacaacaaaccaaaatccaagccgggcaaatgaataatatcggtacaggtcggatttatggcgacaatatcgctattgcggctacccgcttagacaatcaagatgaaaacggtacaggtgccgccattgcggcacgtgaaaacctgaatttaggcatcggacaattaaacaaccgtgaaaacagtctgatttacagcggtaacgatatggcggttggcggcgcattagataccaatggccaagccacaggcaaagcccaaaggatacacaatgccggcgcaaccattgaagctgcaggcaaaatgcgtttaggtgtagaaaagctgcacaataccaatgagcatttgaaaacgcagttggtagaaacagggcgcgagcatattgttgattacgaagcatttggacgacacgaattattgcgagaaggcacgcaacatgaattaggctggtctgtctataacgatgaatcagaccacttacgcacccctgatggagcggcgcatgaaaattggcataaatacgattatgaaaaagtcacccaaaaaacccaagttacccaaactgcgccagccaaaatcatttcaggtaatgatttaaccattgatggtaaagaagtatttaataccgatagccaaatcattgctggtggcaatctcattgtacaaacagaaaaagacggtttgcataacgagcaaacctttggcgaaaagaaagtattcagtgaaaatggcaaattacacagctattggcgtgagaaacataaaggacgagactcaacgggacatagcgaacaaaattacactttgccggaggaaatcacacgcaacatttcactgggttcatttgcctatgaatcgcatcgcaaagcattaagccatcatgcgcccagccaaggcactgagttgccgcaaagcaacggtatttcgctaccctatacgtccaattcttttaccccattacccagcagcagcttatacattatcaatcctgtcaataaaggctatcttgttgaaaccgatccacgctttgccaactaccgtcaatggttgggtagtgactatatgctggacagcctcaaactagacccaaacaatttacataaacgtttgggtgatggttattacgagcaacgtttaatcaatgaacaaatcgcagagctgacagggcatcgtcgtttagacggttatcaaaacgacgaagaacaatttaaagccttaatggataatggcgcgactgcggcacgttcgatgaatctcagcgttggcattgcattaagtgccgagcaagtagcgcaactgaccagcgatattgtttggttggtacaaaaagaagttaagcttcctgatggcggcacacaaaccgtattggtgccacaggtttatgtacgcgttaaaaatggcgacatagacggtaaaggtgcattgttgtcaggcagcaatacacaaatcaatgtttcaggcagcctgaaaaactcaggcacgattgcagggcgcaatgcgcttattatcaataccgatacgctagacaatatcggtgggcgtattcatgcgcaaaaatcagcggttacggccacacaagacatcaataatattggcggcatgctttctgccgaacagacattattgctcaacgcaggcaacaacatcaacagccaaagcaccaccgccagcagtcaaaatacacaaggcagcagcacctacctagaccgaatggcaggtatttatatcacaggcaaagaaaaaggtgttttagcagcgcaggcaggaaaagacatcaacatcattgccggtcaaatcagcaatcaatcagagcaagggcaaacccggctgcaagcagggcgcgacattaacctagatacggtacaaaccagcaaacatcaagcaacccattttgatgccgataaccatgttattcgcggttcaacgaacgaagtcggcagcagcattcaaacaaaaggcgatgttaccctattgtcagggaataacctcaatgccaaagctgccgaagtcagcagcgcaaacggtacactcgctgtgtctgccaaaaatgacatcaacatcagcgcaggcatcaacacgacccatgttgatgatgcgtccaaacacacaggcagaagcggtggtggcaataaattagtcattaccgataaagcccaaagtcatcacgaaaccgcccaaagcagcacctttgaaggcaagcaagttgtattgcaggcaggaaacgatgccaacatccttggcagcaatgttatttccgataatggcacccagattcaagcaggcaatcatgttcgcattggtacaacccaaactcaaagccaaagcgaaacctatcatcaaacccagaaatcaggattgatgagtgcaggtatcggcttcactattggcagcaagacaaacacacaagaaaaccaatcccaaagcaacgaacatacaggcagtaccgtaggcagcttgaaaggcgataccaccattgttgcaggcaaacactacgaacaaatcggcagtaccgtttccagcccggaaggcaacaataccatctatgcccaaagcatagacattcaagcggcacacaacaaattaaacagtaataccacccaaacctatgaacaaaaaggcctaacggtggcattcagttcgcccgttaccgatttggcacaacaagcgattgccgtagcacaaagcagcaaacaagtcggacaaagcaaaaacgaccgcgttaatgccatggcggctgccaatgcaggctggcaagcctatcaaacaggtaagagtgcacaaaacttagccaatggtacaaccaatgccaaacaagtcagcatctccataacctacggcgaacagcaaaaccgacaaaccacccaagttcaagccaatcaagcccaagcgagtcaaattcaagcaggtggtaaaaccacattaatcgccacaggcgcagcagaacaatccaatatcaacatcgcaggctcagatgttgccggcaaagcaggcacaatcctgattgccgataacgacatcacactccaatcagccgagcaaagcaataccgaacgcggccaaaacaaatcggcaggctggaacgcaggtgctgccgtatcattcggacaaggaggctggtcattaggcgttaccgcaggcggcaatgtcggcaaaggctacggcaatggcgacagcatcacccaccgccatagccatatcggcgacaaaggcagccaaacccttatccaaagcggtggcgacactaccatcaaaggcgcgcaagtacgcggcaaaggcgtacaagtcaatgccaaaaacctaagtattcaaagcgtacaagatagagaaacctatcaaagcaaacaacaaaacgccagtgcacaagttaccgtaggttatggcttcagtgccggtggcgattacagccaaagcaaaatccgagccgaccatgtttcagtaaccgagcaaagcggtatttatgccggagaagacggctatcaaatcaaggtcggaaaccatacagacctcaaaggcggcatcatcaccagtacccaaagcgcagaagacaagggtaaaaaccgctttcagacggccaccctcacccatagcgacatcaaaaaccacagccaatacaaaggcgaaagttttggattgggcgcaagtgcgtccataagcggcaaaacactgggacagggcgcacaaaataaacctcaaaacaaacacctgacaagcgtagccgataaaaacagcgcaagttcatcagtgggttatggcagcgacagcgacagtcaaagcagcatcacaaaaagcggcatcaacacccgcaacattcaaatcaccgacgaagccgcacaaatccggctgacaggcaaaacagcggcacaaaccaaagccgatattgatacaaacgtaaccacagacaccgccgaacgacattcgggcagcttgaagaacaccttcaacaaagaagcggtgcaaagtgaactggatttacaaagaaccgtcagccaagattttagtaaaaatgttcaacaagccaataccgagattaaccaacatttagacaaactcaaagcagacaaagaagcagccgaaacagcagcagccgaggcattagccaatggcgatatggaaactgccaaacgcaaagcccatgaagctcaagatgcggcagcaaaagcagataattggcaacaaggcaaagtcattctcaacatgttagcctcaggtttagctgcgccgacccaaagcggagcgggcatcgctgcggctaccgcatcgccagccgtatcgtatgcgattggacagcactttaaagatttagccggtcaaaacgcgaatggtaaactaaccgccagtcaagaaaccgcacacgttcttgcccacgcggtattaggagcagcggttgccgcagtaggagacaacaatgctctagcaggagcattgagtgcgggcgggtcggaagcggctgcgccttacatcagcaaatggttatacggcaaagaaaaaggaagcgacttaacggcggaagagaaagagactgtaacagcgattacaaatgtattgggtacggctacgggtgcggcagtcggcaacagcgcaacagatgcagcgcaaggcagcctgaatgcgcaaagtgcggtggagaataatgatactgtagagcaagtgaaatttgctcttaggcaccctagaattgctattgcaattggatctgtacataaagatcctggctctacattagagcctaatatttcaacaattgcttcaacttttcaattaaatttatttcctaatagtgaatttggtggtgaaggtggagttggcaatgcattcaggcacgttttatggcaagcaaccatcacacgagaatttggcaaagatattgctgttaaagtaggaaatagtcatgaaagtggggaaaaaattaattattctataagacgtaatctttcattagataaagcagatgaaatgattgatcaactaaataacgaaataggaagagaaatagcattaaataccaataggttaaacacaaaagagttagttggattaattctggaaacttataaaaataatggtttttatcaagcagaaagaaacagtaatggaaattatgatgttgtaagaaaaagattatctgaaaaagattaccagaatacaagcaatatattgattcacttagataatactggtgccggatttaaaattcagcagaggagaaaacaaatcagagcacaaatttcagccagacaatggagaagataa

SEQ ID NO: 53271 - DNA, 369 bp, Neisseria meningitidis; identical to SEQ ID NO: 42854

SEQ ID NO: 53272 - DNA, 1635 bp, Neisseria meningitidis; identical to SEQ ID NO: 42863

SEQ ID NO: 53273 - DNA, 1017 bp, Neisseria meningitidis; identical to SEQ ID NO: 42597

SEQ ID NO: 53274 - DNA, 639 bp, Neisseria meningitidis; identical to SEQ ID NO: 43316

SEQ ID NO: 53275 - DNA, 249 bp, Neisseria meningitidis; identical to SEQ ID NO: 38918

SEQ ID NO: 53276 - DNA, 1113 bp, Neisseria meningitidis; identical to SEQ ID NO: 43907

SEQ ID NO: 53277 - DNA, 1569 bp, Neisseria meningitidis
atgaaacaccgtactttcttttccctttgcgccaagttcggctgcctgcttgcgctgggtgcttgttcgcccaaaatcgtcgatgccggagccgcgaccgtgccgcacactttatccactttgaaaactgcggacaaccgccccgccagtgtttacttgaaaaaagacaaaccgacgctgattaaattttgggcgagctggtgtcctttgtgtctgtccgaattgggacagaccgaaaaatgggcgcaagatgcaaaattcagctccgccaacctgattaccgtcgcctccccgggctttttgcacgagaaaaaagacggcgacttccaaaaatggtatgccggtttgaattatcccaagctgcccgtcgtaaccgacaacggcggcacgatcgcccaaagcctgaatatcagcgtttacccctcgtgggcgttaatcggtaaagacggcgacgtgcagcgcatcgtcaaaggcagcatcaacgaagcgcaggcgttggcgttaatccgcgacccgaatgccgatttgggcagcttgaaacattcgttctacaaacccgacactcagaaaaaggattcaaaaatcatgaacacgcgcaccatttacctcgccggcggctgcttctggggcttggaagcctatttccaacgcatcgacggcgtggttgacgcggtatccggctacgccaacggcaacacgaaaaatccgagctatgaagacgtgtcctaccgccatacgggccacgccgaaaccgtcaaagtgacctacgatgccgacaaactcagcctagacgacatcctgcaatatttcttccgcgtcgttgatccgaccagcctcaacaaacagggcaacgacaccggtacgcaataccgcagcggcgtgtactacaccgaccccgccgaaaaagccgtcatcgccgccgccctcaaacgcgagcagcaaaaataccaactgcccctcgttgttgaaaacgagccgctgaaaaacttctacgatgccgaggaataccatcaggactacttgattaaaaaccccaacggctactgccacatcgacatccgcaaagctgacgaaccgctgccgggcaaaaccaagaccgccccgcaaggcaaaggcttcgacgcggcaacgtataaaaaaccgagtgacgccgaactcaaacgcaccctgaccgaagagcaataccaagttacccaaaacagcgcgaccgaatatgccttcagccacgaatacgaccatttgttcaaacccggcatttatgtggacgttgtcagcggcgaacctttgttcagctccgccgacaaatatgattccggctgcggctggccgagcttcacgcgcccgattgatgcaaaatccgttaccgaacacgatgatttcagctacaacatgcgccgcaccgaagtgcgcagccacgccgccgactcgcatttgggacacgtcttccccgacggcccgcgcgacaaaggcggactgcgctactgcatcaacggcgcgagcttgaaattcatcccgctggaacaaatggacgcggcaggctatggcgcgttgaaaggtaaagtgaaataa

SEQ ID NO: 53278 - DNA, 657 bp, Neisseria meningitidis; identical to SEQ ID NO: 43231

SEQ ID NO: 53279 - DNA, 261 bp, Neisseria meningitidis; identical to SEQ ID NO: 42390

SEQ ID NO: 53280 - DNA, 612 bp, Neisseria meningitidis; identical to SEQ ID NO: 42570

SEQ ID NO: 53281 - DNA, 1641 bp, Neisseria meningitidis
atgactgacaacagccctcctccaaacggacacgcccaagcacgcgtccgcaaaaacaacaccttcctctctgccgtctggctggttccgctgatcgcgctgattgccggcggctggctttgggttaaggaaatccgcaacagggggcctgtggttacgctcttgatggacagcgcggaaggcattgaggtcaacaatacggtcatcaaagtattgagcatcgatgtcggacgcgttacccgaatcaaactgcgcgacgaccaaaaaggcgtggaagtaaccgcccaactcaatgcggacgtatccggcctcatccgcagcgacacacagttttgggtggtcaagccgcgtatcgaccaaagcggcgtaaccggtttgggtacgctgctttcgggttcgtacatcgcctttacacccggcaaaagcgacgaggcaaaagacgtgttccaggtgcaggacattccgcccgttaccgccatcgggcaaagcgggctgcgcttgaatttgattggtaaaaacgaccgcatcctcaacgtcaacagccctgttttgtatgaaaactttatggtcgggcaagtcgaaagcgcgcatttcgacccgtccgaccaaagcgtgcattacaccatcttcatccaaagccccaacgacaaactgattcattccgccagccgtttttggctggaaagcggcatcaatatcgaaaccacaggcagcggcatcaaactcaattccgcccctctgcctgccctgctgtcgggcgcgatttcatttgattcgccgaaaaccaaaaacagtaaaaacgtcaaaagcgaagacagcttcacgctttacgacagccgcagcgaagtcgccaacctgcctgacgaccgctcgctgtactacaccgcgtttttcaaacaatccgtgcgcggcctgaccgtcggttcgcccgtcgagtacaaagggctgaatgtcggcgtggtttccgatgtcccttatttcgaccgcaacgacagcctgcatttatttgaaaacggctggatacccgtacgcatccgcatcgagccttcccgtttggaaatcaatgccgacgaacaaagcaaagagcattggaaacaacaatttcagacggctttaaacaaaggcctgaccgccaccatctccagcaacaacctgctgaccggcagcaaaatgattgagttgaacgatcagccttcgtcttcgcccaagctgcgaccgcataccgtttatgcaggcgataccgttatcgcgacccagggcggcggtttggacgacttacaggtcaaattggcggatttgctggacaaattcggcaaactgcctttagacaaaaccgtttcaggtttaaacgcttcgctcgccgaactcaaatccacgctgaaatccattaacacgctaagcaataatccgcaaacgcaaaacattccgaacgagctgaaccaaaccctgaaagagttgcgcacaaccctgcaaggcgtatcgccgcaatcgcctatctacggcgacgtacaaaatacgctgcaaagtttggacaaaactttaaaagacgttcaacccgtcattaacactttgaaagaaaaacccaacgcgctgattttcaacagcagcagcaaagaccctatcccgaaaggaagccgataa

SEQ ID NO: 53282 - DNA, 132 bp, Neisseria meningitidis; identical to SEQ ID NO: 43232

SEQ ID NO: 53283 - DNA, 432 bp, Neisseria meningitidis; identical to SEQ ID NO: 43184

SEQ ID NO: 53284 - DNA, 549 bp, Neisseria meningitidis; identical to SEQ ID NO: 43188

SEQ ID NO: 53285 - DNA, 795 bp, Neisseria meningitidis; identical to SEQ ID NO: 42647

SEQ ID NO: 53286 - DNA, 594 bp, Neisseria meningitidis; identical to SEQ ID NO: 43511

SEQ ID NO: 53287 - DNA, 918 bp, Neisseria meningitidis; identical to SEQ ID NO: 43148

SEQ ID NO: 53288 - DNA, 1101 bp, Neisseria meningitidis; identical to SEQ ID NO: 43122

SEQ ID NO: 53289 - DNA, 717 bp, Neisseria meningitidis; identical to SEQ ID NO: 42786

SEQ ID NO: 53290 - DNA, 567 bp, Neisseria meningitidis; identical to SEQ ID NO: 42729

SEQ ID NO: 53291 - DNA, 435 bp, Neisseria meningitidis; identical to SEQ ID NO: 43640

SEQ ID NO: 53292 - DNA, 1074 bp, Neisseria meningitidis
atgcggccgtttttcgtcggcgcggcggtgcttgccatactcggtgcgctggtgtttttcatcaaccccggtgccatcgtcctgcaccgccaaattttcttggaacttatgctgccggcggcatacggcggttttttgactgcggctttgttggactggacgggtttttcgggtaacctgaaacctgtcgcgactttgatggcggcattattgctcgccgcatccgctatactgcccttttcgccgcaaactgcctcgtttttcgtcgccgcctattggctggtgttgctgctgttctgcgcccggctgatttggctagaccgaaacaccgacaacttcgccctgctaatgttacttgccgcgttcactgtttttcagacggcatatgccgtcagcggcgatttgaacctgttgcgcgcgcaagtgcatctaaatatggcggcggtgatgttcgtatccgtgcgcgtcagtattcttttgggcgcggaagccctgaaagaatgccgtctgaaagaccctgtttttattccaaatatcgtttataaaaacatcgccattactttcctgctcttgcacgccgccgccgaactttggctgcccgcgcaaaccgccggttttaccgcgctcgccgtcggcttcatcctgctcgccaagctgcgtgagcttcaccatcacgaactcttacgtaaacactacgtccgcacttattacctgctccaactctttgccgccgcaggctatttgtggacaggcgcggcgaaattacaaaacctgcccgcctccgcgcccctgcacctgattaccctcggcggcatgatgggcggcgtgatgatggtgtggctgaccgccggactgtggcacagcggctttaccaaactcgactaccccaaactctgccgcattgccgtccccatccttttcgccgccgccgtctcgcgcgctttcttgatgaacgtgaacccgatatttttcattaccgttcctgcgattctgaccgccgccgtattcgtactgtatcttttcacgtttataccgatatttcgggcgaatgcgtttacagacgatccggaataa

SEQ ID NO: 53293 - DNA, 282 bp, Neisseria meningitidis
atggacgaagggcggatgttttgtttgttggacgtgcgtacggatgaagaaacggcggtttgttcgctgccaaatgcgctgcatatcccgatgaatctgattccgctgcggcagaacgagctgccggatgatgtgccgcttgtggtgtattgccaccacggtatccgcagcctgcatacggcgatgtatttggcggacgcgggttttgaaaacctgtacaaccttcagggcggcatcgatgcatgggcggccgagattgacggcaacatgatgcgttattga

SEQ ID NO: 53294 - DNA, 792 bp, Neisseria meningitidis; identical to SEQ ID NO: 42176

SEQ ID NO: 53295 - DNA, 642 bp, Neisseria meningitidis; identical to SEQ ID NO: 41835

SEQ ID NO: 53296 - DNA, 1746 bp, Neisseria meningitidis; identical to SEQ ID NO: 42577

SEQ ID NO: 53297 - DNA, 807 bp, Neisseria meningitidis; identical to SEQ ID NO: 42086

SEQ ID NO: 53298 - DNA, 498 bp, Neisseria meningitidis; identical to SEQ ID NO: 43662

SEQ ID NO: 53299 - DNA, 186 bp, Neisseria meningitidis; identical to SEQ ID NO: 42933

SEQ ID NO: 53300 - DNA, 621 bp, Neisseria meningitidis; identical to SEQ ID NO: 43664

SEQ ID NO: 53301 - DNA, 432 bp, Neisseria meningitidis; identical to SEQ ID NO: 42886

SEQ ID NO: 53302 - DNA, 1071 bp, Neisseria meningitidis
atgaccaaacatatcgccatcctccgaggtgacggcatcggcccagaaatcgtcgccgaaaccgtccgcgtactcgacaaactcatcgcccaaggcttggacgccagctacgaatacgccccattaggcggcgaagcctacgacgaatacggccatccctatccccaattcacgcaaaacctttgccgtaaagccgatgccgtcctgcttggtgcagtcggttctcctcaatacgacaatctcgaccgtccattgcgtcctgagcgcggcttgttggccatacgtaaagacttgaatctgtttgccaatttgcgccctgctatcctctatcccgagctagccaacgcctccacgctcaagcctgaaatcgtcgccggtttggatattttgattgtgcgcgaactcaccggcgatatttatttcggcgaaccgcgcggcatccgtgttttagaaaacggcgaacgcgaaggctacaacaccatgaaatacagcgaaagcgaaatccgccgtattgcccacgttgccttccaatccgcccaaaaacgcagcaaaaaagtctgctccgtcggcaaagccaacgttttggaaaccaccgaattgtggcgcgaaatctttgaggaaatcggcaaagaataccccgatgtcgagctttcccatatgtacgttgataacgcagccatgcagctcgtgcgcgcgcccaaacaatttgacgtgattgccaccggcaacatcttcggcgatattttatcggacgaagcctctatgctgaccggctccatcggtatgctgccttccgcttctttggacgaaaacggcaaaggcctgtacgaaccgtcccacggctccgcccccgacatcgccggacaaaacaaagccaacccgcttgccaccatcctctcgctcgcaatgttgctgcgttacagcctgaacgacgaagcgcgcgcgcaacaagttgaaaacgccgtacaaaaagtgctgcaacaaggcttgcgcaccggcgatatttacgaagaaggcacgaaactcgtttcctgctccgaaatgggtgatgcggtactcgccgccttgtaa

SEQ ID NO: 53303 - DNA, 1407 bp, Neisseria meningitidis; identical to SEQ ID NO: 42874

SEQ ID NO: 53304 - DNA, 1077 bp, Neisseria meningitidis; identical to SEQ ID NO: 42861

SEQ ID NO: 53305 - DNA, 225 bp, Neisseria meningitidis; identical to SEQ ID NO: 43364

SEQ ID NO: 53306 - DNA, 975 bp, Neisseria meningitidis
atgccgtctgaaaaaaatatcggttttatggcaggaagcagccgtccgttgtgggtcgcctttgcgctgttgctggtttcctgcgtcctgtttatgacgctcaacgtcaaaggcgattgggattttgttttgcaactgcggctgaccaaacttgccgcgctgctgatggtcgcctatgcggtcggcgtttcgacccagctttttcaaacgctgaccaacaatccgattctcacgccctcgattttgggtttcgattcgctgtatgtgtttttgcagaccttgctggtgtttacgttcggcggcgtgggctatgcttccctgccgttgacgggcaaattcggctttgaacttgccgttatgatgggcggctcgctgctgctgttttacacgctcatccgtcagggcggacgcgatttgccgcgtatgattttaatcggcgtgattttcgggattttgttccgcagcctgtcgtcgctgctttcgcgcatgatcgaccccgaagaatttacggcggcgcaggcgaatatgtttgccggattcaataccgtccacagcgagcttttgggcataggcgcgctgattctgctcgtcagcgcggcggtcgtttggcgcgaacgctaccgcttggacgtacaccttttggggcgcgaccaagccgtcaatttgggcatcagctacacgcgcaacaccttgtggatactgctttggattgccgcattggtggcgacggcgaccgccgtggtcggcccggtaagctttttcgggcttctcgccgcctcgcttgccaaccacttttccccgtccgtgcgccattccgtccgcctgccgatgacggtttgtgtcggcggcatcctcctggtcggcggacagaccgtattcgaacacttcttgggcatgaaggcggtattaagcgtggtggtcgaatttgcgggcggactcgttttcctctatctcgttttaaaacacaaaaaatga

SEQ ID NO: 53307 - DNA, 1263 bp, Neisseria meningitidis
atgtcaaacacacaaaaacagcttgcccttgccaaagcggcaaaaaaatccgtcaacacggcggatacggaagaaaaaaaccgcgcgctgcttgcgatggcggacagcttggaagcggcgacggcagatattttggcggcaaaccgtcaagacttggaagccgcggcaggcaacattcccgaaagcatgaccgaccgccttttgttggacggcaaacgcatttgcgcgatggcggacggcatcagggcggttgccgcgctgcccaaccccgtgggcgaaatactggaaacctcgactttgcccaacggcttggaaatcgtcaaaaagcgcgtggcgatgggcgttatcggcattatttacgaaagccgcccgaacgttacttccgatgcggcggctttggcactgaaaagcggcagcgcggtcgtactccgcagcggcaaagatgcattccaatccgcacgcgccatcgttgccgccctgaaaacggggttggcgcaaacccgcatcgaccccgacgcgctccaactgattgaagacaccgggcgcgaaagcagttacgaaatgatgagggcgaaagattatctagacctgctgattccgcgcggcggggcggggctgatacgggcggtggttgaaaatgccgtcgtgccggtcattgaaacgggaacgggcattgtccacatttatatcgacaaggacgcggattgggacaaggcgctccgtatcgtgtacaacgccaaaaccagccgtccgtccgtgtgcaactcgatggaagtgctgctggtacatgaagacattgctgccgacttcctgcccaagctcgaacggctgttggttcgcgaccgcatagaagccggactgccgcccatccgcttccgtttggatccgcaggcggcgcggcatatcggcggcgaagcggcgggtgcagacgatttcgataccgagtttttagactacatcctcgctgtgaaaaccgtcgcttcggtcgaagaggcggtctggcacatcgaaacccacagcacacaccattcagacggcatcgttaccgaaaaccgccacgctgcggactatttcacgactcatatcgattctgccgccgtgtatgtcaacgcgtccacgcgctttaccgacggcggcgaattcggcttgggttgcgaaatgggcatctccacgcaaaaactccacgcccggggcccgatgggtttgaaagagctgacgagttacaaatacatcgtacaaggcacgggacaggtcagggaataa

SEQ ID NO: 53308 - DNA, 657 bp, Neisseria meningitidis
gtggcttcagtatttttagaaggagaggcagtcgaggtcggcaatattttctgtatcggcaggaactatgccgcacatatcgaagagttaaaaaacgaaataccttccgaacctgtggtgtttatgaagccgtcaggcagcattttgaacagcggcggtacaatcttgctgcccgagtttagtagggatgtgcagtttgagtgcgaactcgtgctgctggtcggtaaggattcagacggcacgggcgagggtaaagatattttgggatgtgtcgcaggatatggtgtagggctggaccttacggcacgggatatccaatgccgtctgaaggaaaaagggctgccctggctgaaggcaaaagggttcaggcattccgcgtgcgtgtcggattttgcggcggcaggcagaatcggcaatcccgagaaggtgttgttttcattaaaacaaaacggcgtattgaaacagcgcggggataccggtttgatgatttacccgattcgggaaattttacacaaactggcggcagattacggtttggggaaaggggatttggtgtttaccggaacgccctccggcgtgggcgcaatcggtgcgggggacaatttggcattggagctggacggcttggtgcgcgcctctttcacggtagggtgttaa

SEQ ID NO: 53309 - DNA, 852 bp, Neisseria meningitidis
atgattacccatccccaattcgatcccgtccttatcagtatcggcccgcttgccgtccgctggtatgccctaagctacatcctcggatttattctttttacctttctcggcagaaggcgcatcgcgcaaggcttgtccgtttttaccaaagaatcgctcgacgacttcctgacatggggcattttgggcgtaattttgggcgggcgtttgggttacgtcctgttttacaagttttccgactacctcgcccatccgcttgatattttcaaggtatgggaaggcggaatgtcgttccacggcggctttttgggtgtagttattgccatacggttgttcggccgcaaacacggcatcggcttcctcaaactgatggatacggtcgcaccgctcgttccgctgggtctcgcttcgggacgtatcggcaacttcatcaacggcgaactttggggacgcgttaccgacatcaacgcattttgggcaatgggcttcccgcaggcgcgttacgaagatgccgaagccgccgcgcacaatccgctttgggcagaatggctgcaacaatacggtatgctgccgcgtcatccctcgcagctttatcagtttgcacttgaaggcatctgcctgttcaccgtcatttggctgttctctaaaaaacagcggtcgaccggacaagtcgcctcgctcttcctcggcggctacggcatattccgcttcattgccgaattcgcacgccaacccgacgactatctcgggctgctgaccttggggctgtcgatggggcaatggttgagcgtcccgatgattgttttgggtatcgtcggctttgtccggttcggcatgaaaaaacagcactga

SEQ ID NO: 53310 - DNA, 183 bp, Neisseria meningitidis; identical to SEQ ID NO: 38993

SEQ ID NO: 53311 - DNA, 201 bp, Neisseria meningitidis; identical to SEQ ID NO: 38240

SEQ ID NO: 53312 - DNA, 864 bp, Neisseria meningitidis
atgagtgagattggtttggtaaagatctattttggaaaagtgcgcgatttatatgaaatcgacgataaacgtatgctgatggtcgcttccgaccgcctgtctgcattcgatgtgattttggacgacccgattccgagcaaaggggagattctgacgcagatttccaatttttggtttaaaaaactggtgcatattatgcccaaccactttaccggtcaaacggtttacgatgttttgcctgaaaacgaagccaaagctttagagaaacgcgccgtcgtggctaaaaagctcactccggtgaaagtagaggcgattgtgcgtggttatctggcaggcagcggttggaaagattatcaaaaaaccggctcggtttgcggtattcaactgcctgaaggtatgcaggaagcgcaacaactgcctgaagtgatttttacgccctcaaccaaagccgcagtcggcgatcacgatgaaaacatcagctttgaagaatgcgaacgcattatcggaaaagaattggcggcggaagtgcgcgccaaagcgattcagctttatacagaagcggcggaatatgccaaatcgcgcggcatcatcatttgcgataccaaatttgaattcggtttggatacaaacggtacgctgacgctgatggatgaggtattgactcccgattcgagccgtttttggcctgccgaccaatacaaagtcggcaccaatccgccgtcttttgacaaacaattcgtccgcgactggctggaacaaagcggttggaacaaaaaagcccctgcgccgaaagtgcctgccgatgtgattcagaaaactgtcgagaagtatcgggaagcattgactttgctgactcaggattga

SEQ ID NO: 53313 - DNA, 180 bp, Neisseria meningitidis; identical to SEQ ID NO: 39090

SEQ ID NO: 53314 - DNA, 1056 bp, Neisseria meningitidis; identical to SEQ ID NO: 42613

SEQ ID NO: 53315 - DNA, 1455 bp, Neisseria meningitidis; identical to SEQ ID NO: 43543

SEQ ID NO: 53316 - DNA, 573 bp, Neisseria meningitidis
gtggcatcctgccgcctgccgaccgaatggggcgtatttacgatgcacggctttgaagaggcaaacgggcaggaacacgtcgcgctgaccgtcggtaatttttcagacggcaatccggttctgacgcgcatccactccgaatgcctgacgggcgatgcgctgttctcgagaaaatgcgactgcggacctcaacttgaagcggccatgagggcggtacagacagaggggcgcggcatcatcgtctatctgcgtcaggaaggacgcggcatcgggctgattaacaaaatccgcgcctatcatctgcaagaccaaggtatggatacggttgaagccaatttggcactcgggctgcccgtcgatgcccgcgatttccgtttggcgcaatctatctacgaatatctgggcatccgctcggtcaaactgctgaccaacaaccccgaaaaaatccaaaccctgaaagatgcggggattaacgtggtcgaacgcatccccctgcacgtcggggaaaaccttgaaaacaaacgctacctccaaaccaaagcagacaagctgggacatctgatgtcggaataa

SEQ ID NO: 53317 - DNA, 324 bp, Neisseria meningitidis; identical to SEQ ID NO: 43824

SEQ ID NO: 53318 - DNA, 1929 bp, Neisseria meningitidis
ttgggtatcggcctgatggctgcgttcaacgctttagacggtaaaaaagaagacaacgggcaaatcgaatactctcagttcatccaacaggtcaacaacggcgaagtatccggcgtcaacatcgaaggatccgtcgtcagcggctacctgattaagggcgagcgcaccgacaaaagcactttcttcaccaacgcgcctttggacgacaacctaattaaaacactgctcgacaaaaacgtccgcgtaaaagtaacgccggaagaaaaaccgagcgcgctggctgccctgttttacagcctgctgcccgtcctgctgctgattggcgcatggttctacttcatgcgtatgcagacgggcggcggcggaaaaggcggcgcattctcattcggtaaaagccgcgcccgcctgctggacaaagatgccaacaaagtgacctttgccgatgtcgccggctgcgacgaagccaaagaagaagtacaggaaatcgtcgattacctcaaagcgccgaaccgctatcaaagcctgggcgggcgcgtgccgcgcggcatcctgctggcgggcagcccgggtacgggtaagacgcttttggcgaaagcgattgcaggcgaagccggcgtgccgttcttcagcatttcaggttccgactttgtcgaaatgttcgtcggtgtcggtgcgagccgcgtccgcgatatgttcgagcaggcgaagaaaaacgccccctgcatcatctttatcgacgagattgacgcagtcggccgccaacgcggcgcaggtttgggcggcggcaatgatgagcgcgagcaaacattaaaccaattgttggttgaaatggacggttttgagagcaatcagactgtaattgtgattgcggcaaccaaccgccccgacgtactcgatcctgcgctgcaacgccccggccgtttcgaccgccaagtggttgtccccctgccggacatccgagggcgcgaacagattttgaacgtccattctaaaaaagtgcctttggacgaatctgtggatttattgtccctcgcgcgcggcacgccgggtttttccggcgcggatttggcgaacttggtcaacgaagccgccctgtttgccggccgccgcaataaagtcaaagtcgatcagagcgattttgaagacgccaaagacaaaatctatatgggtccggaacgccgcagtatggtgatgcacgaagacgaaaaacgtgcgacggcgtatcacgaatccggacacgcgattgttgccgaaagcctgccctttaccgaccccgtccacaaagtaaccattatgccgcgcggacgtgcgctgggtctgacttggcagcttccggagcgcgaccgcatcagtatgtataaagatcagatgttgagccagctctccatcctgttcggcggacggattgccgaagacatcttcgtcggacgcatctccaccggcgcatcaaacgactttgaacgcgcaacccaaatggcgcgcgaaatggtaacgcgctacggcatgagcgacaaaatgggcgtgatggtttatgcggaaaacgaaggcgaagtcttcttgggacgcagcgtaacccgttcgcaaaacatttccgagaaaacccagcaggacatcgacgcggaaatccgccggattttggacgagcaatatcaggttgcctacaaaatcctcgatgaaaaccgcgacaagatggaaacgatgtgcaaagccctgatggaatgggaaaccatcgaccgcgatcaggtactggaaatcatggcgggcaaacaacccagcccgcccaaagattacagccacaacctgcgcgagaatgcggacgcggcggaagataacgcgccgcacgctccgactcgggaagaaaccgaagcacctgccccggcagacaccgcttcgacagagtccgagcagcagcctgaaaacaaggcttaa

SEQ ID NO: 53319 - DNA, 669 bp, Neisseria meningitidis; identical to SEQ ID NO: 42855

SEQ ID NO: 53320 - DNA, 711 bp, Neisseria meningitidis; identical to SEQ ID NO: 44788

SEQ ID NO: 53321 - DNA, 2829 bp, Neisseria meningitidis; identical to SEQ ID NO: 43478

SEQ ID NO: 53322 - DNA, 780 bp, Neisseria meningitidis; identical to SEQ ID NO: 42452

SEQ ID NO: 53323 - DNA, 900 bp, Neisseria meningitidis; identical to SEQ ID NO: 43204

SEQ ID NO: 53324 - DNA, 291 bp, Neisseria meningitidis
atgaccatccgtcctttacacgaccgcgttgtcgtcaaacgcttggaagctgaagaaaaaaccgcatcgggcatcgttttgccgggtgcggccgccgaaaaacccgatatgggcgaagtcatcgccgtgggcgcgggcaaaatcggtaaagacggcagccgccgtccgctggatgtcaaagtcggcgacaaaatcatcttcggcaaatacagcggccaaaccgtaaaagccgacggcgaagagctgttggtaatgcgcgaagaagatattttcggcatcgttgaaaaataa

SEQ ID NO: 53325 - DNA, 1143 bp, Neisseria meningitidis
atgaaaaaatccgtattagccgttttggccgcgctgtctctggcagcctgcggcggcagcgaaaaaaacgccgtgcaacctcaagcagacgctgcgtctgctgccaatgccgaagccgctgccaccgatactctgaacatctacaactggtcgaactatgttgacgagagtacggtcgaagactttaaaaaagccaacaatctgaagctgacttacgacttgtacgaaaacaatgaaacgctggaagccaaaatgctgaccggcaaatccggttacgatttggttgtgccgggcatcgccttcctgccgcgccaaatcgaggcgggcgcgtatcaaaaagtcaacaaagacttgattcccaactataaaaacatcgatcccgaactcttgaaaatgctggaaaccgccgacccgggcaaccagtatgccgtcccctatttctccggcgtgaacacgattgcgattacggcgaagggtaaagagcttttgggcggcaagctgcccgaaaacggctgggatttgctgttcaaacccgaatacacccacaagctgaaatcctgcggcatcgccctgtgggacaccccgagcgaaatgttcccgattttgctgaactacttgggcaaagaccccaaaggctcgaatcctgaagatttgaaggcggcggcggaagtgttgaagtctatccgtccggatgtcaaacgtttcagcccgtccatcatcgacgagctggcgcgcggcgacatctgcctggcggcaggcaacggcggcgatttgaacttggcgaaagcacgttccgaagaagtgaaaaacaacgtcggcatcgaagtgctgacaccgaaaggtatgggcttctggattgagtcttggctgattcccgccgatgcgaaaaacgtcgccaatgcccacaaatacatcaactacacgctcgaccccgaaatcgcggcgaaaaacggcatcgccgtaaccttcgcccccgccagcaagccggcgcgcgaaaaaatgcctgccgagctggtgaacacccgttccatcttcccgaacgagcaggatatgaaagacggttttgtgatgccgcaaatgagtacggatgcgaaaaaactgtctgtcagcctgtggcagaaaatcaaagtcggcaccaactga

SEQ ID NO: 53326 - DNA, 1185 bp, Neisseria meningitidis; identical to SEQ ID NO: 42219

SEQ ID NO: 53327 - DNA, 1542 bp, Neisseria meningitidis; identical to SEQ ID NO: 42704

SEQ ID NO: 53328 - DNA, 246 bp, Neisseria meningitidis; identical to SEQ ID NO: 43892

SEQ ID NO: 53329 - DNA, 786 bp, Neisseria meningitidis; identical to SEQ ID NO: 42094

SEQ ID NO: 53330 - DNA, 564 bp, Neisseria meningitidis; identical to SEQ ID NO: 42677

SEQ ID NO: 53331 - DNA, 1701 bp, Neisseria meningitidis; identical to SEQ ID NO: 42709

SEQ ID NO: 53332 - DNA, 1413 bp, Neisseria meningitidis
ttgaaagtcgaaggaacggaaacgctgccgcaccgcttggaattgacgggtattccgtccgaatggcgtattgccacaacgctgccggaaacagggaggtttgtctttcaggcggcatcttatgccgaattgattgaccgacctgtcgagatgggcttgattgaatttttagattttgaggcggcaggcattccgcacacaattgccttaagcggcatatatcccgatttcgaccgcaacaggctggtttcggatatcaaaaaaatctgcgaaacagaactggcggtgttttcctcccctgccccgtttcaaaaatatttgttcctgctccacgtcggcgaccatatttacggcggtttggaacacaccgacagcaccgccctgctcgccgaccgccacagccttccgccgtacggtatgaccgatgccgacgatacctacaccacattgctcggacttttctcccacgaatattttcacgcgtggaacgtcaaatccatcaaacctgccgcgttcgtcccttatgacctcgacaaagaaaactataccgaacaactatgggcattcgaaggtattacatcctattacgacgatttgtttttggcacgcagccgcaccatctcgcccgaatcttatttaaacctgctggcacaaggcattacgcgcgtacaacaaacccgcggccgtttgaggcagaccttggcggaatcgagttttaccgcgtggaacaaattttacaaaccggatgaaaacagccccaacgccatcgtcagctactaccagaaaggcgcgcttgccgcattgtgccttgatctgataatacgcaaccgaagcaacggcagacattctctcgatacgttaatggacaaactctatcgggagtggagggacacacactcgggtattccggaaaaacactggcaaatccgctgtcaggaaattaccggcttggatttggaagattttttccaaaaagcgttatacagtaccgaagatttgccgcttgccgaatgcctggcaaccgcaggcgtgggactgaccttcctgccgcttccccgacaacacggcggcggatacgcagaacacatctgccccgtcccgtcggcaggcgattttggcgcacgtttcaaacaaaacaccgaccacatcgtcctgacccatgtcttcaacggcggcagcgcggaatctgcggcactgtgcccgcaagacaaaatcattgctttagacggttatgcctgcaccgactttaccgcacaatgggcccgataccacgtcaatgcaaaaatcaatatccacttcttccgtgccggcatattgcgtcaaaccgtcttgacggttcaggcagcggcagcggatactgccatcctacatatcacagaccggaacctgttggacaactggttgttcggttaa

SEQ ID NO: 53333 - DNA, 546 bp, Neisseria meningitidis; identical to SEQ ID NO: 42945

SEQ ID NO: 53334 - DNA, 339 bp, Neisseria meningitidis
atgaaaaaaatcgaagctgttatcaaaccgttcaaactcgacgacgtgcgcgaggcgttgacggaaatcggcattacgggcatgaccgtcagcgaggtcaaagggttcggcaggcagaaggggcatacggaaatctatcgcggtgcggaatacgccgtcgatttcctgcccaaggtcaaaatcgagcttgtgttggcggatgatgctgtggaacgcgcgattgacgtgattgtcgaggtggcgcgttcgggaaaaatcggcgacggcaagatttttgtgctgccggtcgaggaggcaatccgtatccgcacgggcgaacgtgcggacgcggcggtttga

SEQ ID NO: 53335 - DNA, 1311 bp, Neisseria meningitidis; identical to SEQ ID NO: 43019

SEQ ID NO: 53336 - DNA, 723 bp, Neisseria meningitidis; identical to SEQ ID NO: 42576

SEQ ID NO: 53337 - DNA, 1032 bp, Neisseria meningitidis
atgctgcaaaccgacaacctgactgccgctcaaccgcaacgcattgttgccgcccaaaccgcctccgcacaggaagaactgctcgaacgcgccctccgccccaaaacgctggacgactatatcgggcagcataaagccaaagaacagctcgccattttcatccaagccgccaaaaagcgcggcgaagcactcgaccacgtcttgcttttcggtccgcccgggctgggtaaaaccacactggcgcacatcatcgccaaagaattgggcgtaaatttgcgccaaaccagcggccccgtcctcgaacgcgccggcgacctcgccgcccttttgaccaaccttgatccgcacgacgtattgtttatcgacgaaatccaccgcctcagccctgttgtcgaagaaatcctctaccccgcgcttgaagactaccggctcgacattatgataggcgaagggcccgccgcccgttccgttaaaatcgacctgccgcccttcacgcttgtcggcgcgaccacccgcgccggtatgctgaccaatccgttgcgcgaccgcttcggcatcgtctcccgcctcgagttttacgaaaaccgcgaccttgccaccatcgtcagccgttcggcacaactcctgcaactcgatatgtccgaagaaggcgcggaagaaatcgccaaacgcagccgcggtacgccgcgcatcgccaaccgcctgttgcgccgcgtgcgcgatttcgccgacgtgaaaaacaacggcacaatcgacggcggcatcgccgatgccgctttaagtatgctggacgtggacgtgcaggggctggacgtgatggacaggaaattcctcgaagccgttttgcacaaattcggcggcggcccggtcggtttggacaatgttgccgctgccatcggcgaatcaacagacaccatcgaagacgttatcgaaccctatctcatccaacaaggcttcctgcaacgcaccccgcgcggcaggatggcgaccgaacgcgcctacctgcatttcgggctgcccgtcgaaaaataa

SEQ ID NO: 53338 - DNA, 288 bp, Neisseria meningitidis; identical to SEQ ID NO: 43049

SEQ ID NO: 53339 - DNA, 285 bp, Neisseria meningitidis; identical to SEQ ID NO: 42876

SEQ ID NO: 53340 - DNA, 633 bp, Neisseria meningitidis
atggataaaatggatcaattcgaattgtgccaaaaagaacatgtcaatccatttgccttgtcaaagcaatatctattggttgtaacattcgtcaaatccagcagtaaaaattttcaggcagcattactttgggcaagaagtgccaaattatttgagaatcttgagattggaaaagaaaccatctattgctgcgctttcgataaaacagcagaacaggctgggatggccggggtatttttgaattatattgaaaattggaatggcaaacagatttacatcaatggccgaatccatagtggcagtatttatgatttgttaggggttttagactgctatcaaaaatcacagtcctgtcccaaccctaaaagccactgttgctttgtttcagacgacatttttctatggcatggatcaagaccaacgtttgaaatcagtcttgatctaactggaaagaaaaaagaaacatcctctgcaaagaaatttgtgatgccttgtattaatttccgtcaccataggattgaaaaagaaacctacttaggaaattggaatgaacaaattgccgcattggcagtaaaacaaaatatagattggtgtccaagttttgatattgagaattttagacagtatgaataa

SEQ ID NO: 53341 - DNA, 591 bp, Neisseria meningitidis
atgaactggttaaatagaggtattcaggaaaaaatcttacgagttttaagtgataattacccgaactgcctaaaagcaaccaaggtgtataactctcttttccctagtaattctttacctattacttctaacatccctgttgataaacaaggattgggcttggctttgactcttggttgtgaaattcaaagtcaacacctagcaactttacaatcagatgaattccaatattttttaaaaaatatttattacttagaagaatctggtttaattgaaattacttcgatagattcacttcataaaaattttgactgcaaaattaatcataagggcatagacttccttaccgatgatggcggcctatccgccattcttggtgttgtcacagtcaaactacacagcgacactattcaggctttaattgcggcaaaaatagaccaagcagagatttctgattcagaaaaaagctggttgaaaaaagaattagggaaaatcaaggacactgcattaagtacgcttacggaaaatgcaattaatgctatccctgccgccaccctcattactcttttaaaaaaatttgttggcctctaa

SEQ ID NO: 53342 - DNA, 372 bp, Neisseria meningitidis; identical to SEQ ID NO: 42883

SEQ ID NO: 53343 - DNA, 321 bp, Neisseria meningitidis; identical to SEQ ID NO: 43250

SEQ ID NO: 53344 - DNA, 2838 bp, Neisseria meningitidis; identical to SEQ ID NO: 42879

SEQ ID NO: 53345 - DNA, 558 bp, Neisseria meningitidis; identical to SEQ ID NO: 43551

SEQ ID NO: 53346 - DNA, 729 bp, Neisseria meningitidis; identical to SEQ ID NO: 42217

SEQ ID NO: 53347 - DNA, 1974 bp, Neisseria meningitidis; identical to SEQ ID NO: 42119

SEQ ID NO: 53348 - DNA, 483 bp, Neisseria meningitidis; identical to SEQ ID NO: 43395

SEQ ID NO: 53349 - DNA, 1785 bp, Neisseria meningitidis; identical to SEQ ID NO: 43201

SEQ ID NO: 53350 - DNA, 309 bp, Neisseria meningitidis; identical to SEQ ID NO: 43011

SEQ ID NO: 53351 - DNA, 1068 bp, Neisseria meningitidis; identical to SEQ ID NO: 42366

SEQ ID NO: 53352 - DNA, 933 bp, Neisseria meningitidis; identical to SEQ ID NO: 42195

SEQ ID NO: 53353 - DNA, 603 bp, Neisseria meningitidis; identical to SEQ ID NO: 42830

SEQ ID NO: 53354 - DNA, 765 bp, Neisseria meningitidis
atgtgttcctgccttgttgtcaaaaataccgttatcggaagcggacgcaccaaaatcgccgtgccgcttgtcgcccgcgatgccgccgaactttccgccgtacttgagcaaatcaaaaatatgcccttcgatattgcggagttccgcgccgactttttggaatgcgcgggcagtatcggcgaaatattgcaccacacgcagaccgtccgcgacgcgctgcccgacaagccgctgctgtttacgttcagacggcatggcgaaggcggctcgttcccgtgttcggacgattattattttgaactgctcgacgcgctgatcgaaagccgcctgcccgacatcatcgacatcgagctgttttccggcgaaaccgccgtccggtgcgccgtggcaaatgctcaaaaaaacggcatcgccgccctgctctgcaatcatgagtttcaccgcacgccgccgcaagaagaaatcgtatgccgtctgaaacagatggaggactgcggcgcggacatctgcaaaattgcggtgatgccgcaaagcgcggaagatgtgctgactttgctttccgccacgctcaaagcgaaagagcttgccgccaaaccgattgttacgatgtcgatggggcagacgggggcggtcagccggcttgccggacaggtgttcggctcaagcatcacgttcggttcgggaacgcaaaactccgcgccggggcaaatcggcgtatccgccctccgtgcgacactcgactgcctcgaaaacggcgcagactga

SEQ ID NO: 53355 - DNA, 234 bp, Neisseria meningitidis; identical to SEQ ID NO: 41393

SEQ ID NO: 53356 - DNA, 3252 bp, Neisseria meningitidis
atgcgaacgaccccaaccttccctacaaaaactttcaaaccgactgccatggcgttagctgttgcaacaacactttctgcctgcttaggcggcggcggaggcggcacttctgcgcccgacttcaatgcaggcggtaccggtatcggcagcaacagcagagcaacaacagcgaaatcagcagcagtatcttacgccggtatcaagaacgaaatgtgcaaagacagaagcatgctctgtgccggtcgggatgacgttgcggttacagacagggatgccaaaatcaatgcccccccccccccgaatctgcataccggagactttccaaacccaaatgacgcatacaagaatttgatcaacctcaaacctgcaattgaagcaggctatacaggacgcggggtagaggtaggtatcgtcgacacaggcgaatccgtcggcagcatatcctttcccgaactgtatggcagaaaagaacacggctataacgaaaattacaaaaactatacggcgtatatgcggaaggaagcgcctgaagacggaggcggtaaagacattgaagcttctttcgacgatgaggccgttatagagactgaagcaaagccgacggatatccgccacgtaaaagaaatcggacacatcgatttggtctcccatattattggcgggcgttccgtggacggcagacctgcaggcggtattgcgcccgatgcgacgctacacataatgaatacgaatgatggaaccaagaacgaaatgatggttgcagccatccgcaatgcatgggtcaagctgggcgaacgtggcgtgcgcatcgtcaataacagttttggaacaacatcgagggcaggcactgccgaccttttccaaatagccaattcggaggagcagtaccgccaagcgttgctcgactattccggcggtgataaaacagacgagggtatccgcctgatgcaacagagcgattacggcaacctgtcctaccacatccgtaataaaaacatgcttttcatcttttcgacaggcaatgacgcacaagctcagcccaacacatatgccctattgccattttatgaaaaagacgctcaaaaaggcattatcacagtcgcaggcgtagaccgcagtggagaaaagttcaaacgggaaatgtatggagaaccgggtacagaaccgcttgagtatggctccaaccattgcggaattactgccatgtggtgcctgtcggcaccctatgaagcaagcgtccgtttcacccgtacaaacccgattcaaattgccggaacatccttttccgcacccatcgtaaccggcacggcggctctgctgctgcagaaatacccgtggatgagcaacgacaacctgcgtaccacgttgctgacgacggctcaggacatcggtgcagtcggcgtggacagcaagttcggctggggactgctggatgcgggtaaggccatgaacggacccgcgtcctttccgttcggcgactttaccgccgatacgaaaggtacatccgatattgcctactccttccgtaacgacatttcaggcacgggcggcctgatcaaaaaaggcggcagccaactgcaactgcacggcaacaacacctatacgggcaaaaccattatcgaaggcggttcgctggtgttgtacggcaacaacaaatcggatatgcgcgtcgaaaccaaaggtgcgctgatttataacggggcggcatccggcggcagcctgaacagcgacggcattgtctatctggcagataccgaccaatccggcgcaaacgaaaccgtacacatcaaaggcagtctgcagctggacggcaaaggtacgctgtacacacgtttgggcaaactgctgaaagtggacggtacggcgattatcggcggcaagctgtacatgtcggcacgcggcaagggggcaggctatctcaacagtaccggacgacgtgttcccttcctgagtgccgccaaaatcgggcaggattattctttcttcacaaacatcgaaaccgacggcggcctgctggcttccctcgacagcgtcgaaaaaacagcgggcagtgaaggcgacacgctgtcctattatgtccgtcgcggcaatgcggcacggactgcttcggcagcggcacattccgcgcccgccggtctgaaacacgccgtagaacagggcggcagcaatctggaaaacctgatggtcgaactggatgcctccgaatcatccgcaacacccgagacggttgaaactgcggcagccgaccgcacagatatgccgggcatccgcccctacggcgcaactttccgcgcagcggcagccgtacagcatgcgaatgccgccgacggtgtacgcatcttcaacagtctcgccgctaccgtctatgccgacagtaccgccgcccatgccgatatgcagggacgccgcctgaaagccgtatcggacgggttggaccacaacggcacgggtctgcgcgtcatcgcgcaaacccaacaggacggtggaacgtgggaacagggcggtgttgaaggcaaaatgcgcggcagtacccaaaccgtcggcattgccgcgaaaaccggcgaaaatacgacagcagccgccacactgggcatgggacgcagcacatggagcgaaaacagtgcaaatgcaaaaaccgacagcattagtctgtttgcaggcatacggcacgatgcgggcgatatcggctatctcaaaggcctgttctcctacggacgctacaaaaacagcatcagccgcagcaccggtgcggacgaacatgcggaaggcagcgtcaacggcacgctgatgcagctgggcgcactgggcggtgtcaacgttccgtttgccgcaacgggagatttgacggtcgaaggcggtctgcgctacgacctgctcaaacaggatgcattcgccgaaaaaggcagtgctttgggctggagcggcaacagcctcactgaaggcacgctggtcggactcgcgggtctgaagctgtcgcaacccttgagcgataaagccgtcctgtttgcaacggcgggcgtggaacgcgacctgaacggacgcgactacacggtaacgggcggctttaccggcgcgactgcagcaaccggcaagacgggggcacgcaatatgccgcacacccgtctggttgccggcctgggcgcggatgtcgaattcggcaacggctggaacggcttggcacgttacagctacgccggttccaaacagtacggcaaccacagcggacgagtcggcgtaggctaccggttctga

SEQ ID NO: 53357 - DNA, 828 bp, Neisseria meningitidis; identical to SEQ ID NO: 42268

SEQ ID NO: 53358 - DNA, 204 bp, Neisseria meningitidis; identical to SEQ ID NO: 43658

SEQ ID NO: 53359 - DNA, 780 bp, Neisseria meningitidis; identical to SEQ ID NO: 43377

SEQ ID NO: 53360 - DNA, 855 bp, Neisseria meningitidis
atgaaaatcgtcctgattagcgggttgtccggttcgggcaaatccgtcgcactgcgccaaatggaagattcgggttatttctgcgtggacaatttgcctttggaaatgttgcccgcgctggtgtcgtatcatatcgagcgtgcggacgaaaccgaattggcggtcagcgtcgatgtgcgttccggcatagacatcggacaggcgcgggaacagattgcctctctgcgcggactggggcacagggttgaagttttgtttgtcgaggcggaagaaagcgtgttggtccgccggttttccgaaaccaggcgaggccaccctctgagtaatcaggatatgaccttgttggaaagcttaaagaaagaacgggaatggctgttcccgcttaaagaaatcgcctattgtatcgacacttccaagatgaatgcccaacagctccgccatgcagtccggcagtggctgaaggtcgaacgtaccgggctgctggtgattttggagtccttcgggttcaaatacggtgtgccgaacaacgcggattttatgttcgatatgcgcagcctgcccaacccgtattacgatcccgagttgaggccttacaccggtatggacaagcccgtttgggattatttggacggacagccgcttgtgcaggaaatggttgacgacatcgaaaggtttgttacgcattggttaccgcgtttggaggatgaaagcaggagctacgttaccgtcgccatcggttgcacgggaggacagcaccgttcggtctatattgtcgaaaaactcgcccgaaggttgaaagggcgttatgaattgctgatacggcacagacaggcgcaaaacctgtcagaccgctaa

SEQ ID NO: 53361 - DNA, 405 bp, Neisseria meningitidis; identical to SEQ ID NO: 43681

SEQ ID NO: 53362 - DNA, 3606 bp, Neisseria meningitidis; identical to SEQ ID NO: 43150

SEQ ID NO: 53363 - DNA, 1047 bp, Neisseria meningitidis
atggaggcacgcccgccccgggcaaatgaagcccaagccccccgcgcggatgaaatgaaaaaagaaagccgccccgcgtttgacgcggcagccgtatttgacgcggcagccgtaccggtatccgacagcgggtttgccgccaatgcaaatgtccgccgttttgtggacgatgaagtcgggaaaggggatttttcccgggcggaatggcaggatttttttgacaaagcggcttacaaggcggacatcgtcaagattatgcaccgcccctccacatcgcgtccgtggtatgtgttccgcacgggaaattcgggcaaggcgaaatttcgcggcgcgcgccggttttatgcggaaaaccgcgcgcttatcgatgatgtggcgcaaaaatacggcgtgcctgccgaacttatcgtggcggttatcgggattgaaacgaattacggcaaaaatacgggcagtttccgtgtggcggacgcattggcgaccttaggctttgattacccccgccgcgccgggtttttccaaaaagaattggtcgagcttttaaagctggcaaaagaagaaggcggcgatgttttcgcctttaaaggcagctatgcgggcgcaatggggatgccgcaatttatgccttcgagctaccggaaatgggcggtggattatgacggggacggacatcgggacatatggggcaatgttggcgatgtcgcggcatcgattgccaattatatgaagcagcacggttggcgcacgggcgggaaaatactggtgtctgcaacattggcgccgggtgcggatgttcaggcaatcattggcgaaaaaaccgccctgacgcggacggtggcggatttgaaggcgtacggcatcatccccggcgaagagcttgccgatgatgaaaaggcggttttgttcaaactggaaaccgcacccggcgtgtttgaatattatttgggcttgaacaatttttatacggtatggcagtacaatcacagtcggatgtatgtaacggcggtcagggacattgccaattcgcttggcggcccgggattgtaa

SEQ ID NO: 53364 - DNA, 663 bp, Neisseria meningitidis
atgatacaagccgtattgttcgacctcgatggcacgctcgccgacaccgccctagacctcggcggcgcactcaacaccctgctcgcccgccacggactacctgcaaaaagcatggacgaaatccgcacccaagccagccacggcgcggcaggactgatcaagctcggcgcaggcatcacccccgaccatcccgactatgcccgatggcgcaccgaataccttgacgaatacgacagccgctacgcccaagacaccaccctcttcgacggcgtaaacgaactcatcgccgaactcggaaaacgcggcatcaaatggggcatcatcaccaacaaacccatgcgcttcaccgacaaactcgtccccaaactcggcttcatcatcccacccgccgtcgtcgtcagcggcgacacctgcggcgagcccaagcccagcgtcaaacccatgctgtatgcgtgcggacaaatccacgccgacccgcaacacacactctacgtcggcgacgcggaacgcgatatacaggcggggcgcaacgccggtatgacgaccgtcctcgccgaatggggctacatcgctcccgaagacgataccggctcatggcaggcggatttccacatccgcacgccactcgatctgctcgaatgtctggacaaaatacagccctga

SEQ ID NO: 53365 - DNA, 969 bp, Neisseria meningitidis; identical to SEQ ID NO: 42633

SEQ ID NO: 53366 - DNA, 726 bp, Neisseria meningitidis; identical to SEQ ID NO: 39737

SEQ ID NO: 53367 - DNA, 567 bp, Neisseria meningitidis; identical to SEQ ID NO: 43526

SEQ ID NO: 53368 - DNA, 735 bp, Neisseria meningitidis
atgagtgcaaacgtcagccgccttgttgttcaaaacctgcaaaaaagtttcaaaaaacgccaagtcgttaaaagcttctccctcgaaatcgaaagcggcgaagtcatcggactgctcgggcccaacggtgcgggtaaaaccaccagcttctacatgattgtcggactcatcgccgccgacgcaggcagcgtaaccctagacggacaagaattgcgccacctgcccatacacgaacgcgcccgcctcggtgtcggctacctgccgcaggaagcctcgatattccgcaaaatgaccgtcgaacaaaacatccgcgccatcttggaaatcagaaccaaagataaaaatcaaatcgacagggaaatcgaaaaactgctcgccgacctcaatatcggacacttacgccgcagccccgcgccgtcgctgtccggcggcgaacggcggcgcgtcgaaatcgcccgcgtactcgccatgaaaccgcattttattttgttggacgaaccttttgccggcgtcgatccgattgccgtcatcgacatccagaaaatcatcggtttcctcaaatcgcgcggtatcggcgtactgattaccgaccacaacgtacgcgaaaccctcagcatctgcgatcgggcctacattatttcagacggcacggtgttggcatcgggaaaacctgatgatttggtcggaaacgaacaggttcgttctgtttatctgggtaagaacttcaaatattga

SEQ ID NO: 53369 - DNA, 144 bp, Neisseria meningitidis; identical to SEQ ID NO: 43742

SEQ ID NO: 53370 - DNA, 759 bp, Neisseria meningitidis; identical to SEQ ID NO: 43583

SEQ ID NO: 53371 - DNA, 1092 bp, Neisseria meningitidis; identical to SEQ ID NO: 42766

SEQ ID NO: 53372 - DNA, 474 bp, Neisseria meningitidis; identical to SEQ ID NO: 42708

SEQ ID NO: 53373 - DNA, 1503 bp, Neisseria meningitidis; identical to SEQ ID NO: 43169

SEQ ID NO: 53374 - DNA, 2076 bp, Neisseria meningitidis
atgaacaatccattggtgaatcaggctgctatggtgctgcctgtgtttttgttgagtgcttgtttgggcggaggcggcagtttcgatcttgattctgtcgataccgaagccccgcgtcccgcgccaaagtatcaagatgtttcttccgaaaaaccgcaagcccaaaaagaccaaggcggatacggttttgcaatgcgcttcaagcggcggaattggtatcagagggcgaatcctaaagaagatgagataaaactctctgaagatgattgggaacaaacggatgatggtgatatcaaaaacccttccaaacaaaaaaatattattaatgccttacctggaaataatgaaggagcattattgcaagattccagtcaagaaaatcagggtatatctaaggttaaggactatcacaatttccaatacgtatggtcgggttttttttataaacagattaaaaatacaattgaaaaaaacggctcatctataaccgcagccagaaatggtcctgacggttatattttttataaaggcaaagatccctcgagaaaacttcctgtttcaggggaggttatgtacaaaggtacttgggattttttaactgatgtgaaagcaaatcagaaatttacagatttagggaatgcttctacgaaacccggcgaccgatatagtgctttttccggggagttggattatatagtcaaacaagagaatgataaaaaagacgggcacgtaggtttgggattaacaacggaaataacggttgattttgagaaaaaaaccctcagcggaaaattaattaaaaacaacagtgtaatcactactaataacgataaacacaccacgcaatattacagccttgaggcgacgcttaagggaaaccgcttcaacggcaaggcaacggcaaccgacaaaccaaaagagaatgaaaccaaacaacatccctttgtttccgactcgtcttctttgagcggcggctttttcggcccgcagggtgaggaattgggtttccgctttttgagcgacgataaaaaagttgccgttgtcggcagcgcgaaaaccaaagacaaaccgggaaatggcgcagcggctccaggcggcacagatgcggcagcatcaaacggtgcggcaggcacgtcgtctgaaaacagtaagctgaccacggttttggatgcggttgagctgaaatctggcggtaaggaagtcaaaaatctcgacaacttcagcaacgccgcccaactggttgtcgacggcattatgattccgctcctgcccaaggattccgaaagcgggaacactcaggcagataaaggtaaaaacggcggaacagaatttacccgcaaatttgaacacacgccggaaagtgataaaaaagacgcccaagcaggtacggcggagaatggcaatccagccgcttcaaatacggcaggtgataccaatggcaaaacaaaaacctatgcagtcgaagtctgctgttccaacctcaattatctgaaatacgggttgctgacacgcaaaaccgccggcaacacgggggaaggcggcaacggggccgcccaaacggacgcgcagagtatgttcttacaaggcgagcgcaccgatgaaaaagagattccaaacgaccaaaacatcgtttatcgggggtcttggtacggacatattgccaacggcacaagctggagcggcaatgcttcagataaagagggcggcaacagggcggaatttactgtgaattttgccgataaaaaactcaacggaacgctgacggctggggagcgtacatctcccacatttaccattaccgccacgattcagggcaacggatttgaaggtacggcgaaaaccggtgatgacggctttgcgttagatacgaaaaataccgttgatacacataaggcgcacatcacagatgccaatgtgcagggcggtttttacgggcctaaagccgaagagttgggcggatggtttgcctatccgggcgacaggcaggcgcagccgtccgcttcggggtcaggtacgtcagccgccaacagcgcgaccgtggtattcggtgcgaaacgccaacagcttgtgcaataa

SEQ ID NO: 53375 - DNA, 843 bp, Neisseria meningitidis; identical to SEQ ID NO: 43722

SEQ ID NO: 53376 - DNA, 369 bp, Neisseria meningitidis; identical to SEQ ID NO: 43089

SEQ ID NO: 53377 - DNA, 3909 bp, Neisseria meningitidis
atgaatgagggtgaagttgttttaacaccagaacaaatccaaaccttgcgtggttatgctttccgtggcgatacctatggcggttggcgttatttggctaatttgggtgaccgttatgcggatgatgctgctgcaattgtcggtaaggatgcaaacttaaatggtttgaatttatggatgaaaaaaggtgtggaaaacctatgggatgatacggtcggtaaaaagacccgtttagagaaatttgatcgggttgcattgcaacatttcagccaatatgtagatctaattaatgaaaataatggtagattacctaacactagtgaaattgagagaagttactataaagccgttaccgaaaatggtgtttcttctagtgcagctattgatttagttattaatcgctcacttccggatatggcagatggttattgggcattaggtttggggatagaagccgaacgtatccacaatgagcaagcagtaaataatccgaacggtagcgaaagggataatagaaagcagttaatatctgctttagataaaggatttgatggatcttttaaagagaagcattttacttttttacaatctgtgataatggatgtaacaaagttaggtgttgaatatacaatagatggttggcaaaaaattggaggttggggtaatgggataatcaatgatttatataaaagtgttgtaaaaagagagtggactggaatatttgagatcgttaataataacatcaagcaatttagagatctgttcccaaatccggaaggctggatcgatgatggtcaccaatgtttcgctccttgggttaaagaaactaaaaaacgcaatggcaaatatcatgtctacgacccccttgccctagatttggacggagacggcatagaaactgtcgctgccaaaggcttttcaggcagcttatttgatcacaccaacaacggtatccgcaccgccaccggttgggtttctgccgatgacggtctgcttgtgcgcgatttgaacggcaacggcatcatcgacaacggtgcggaactcttcggcgacaataccaaactggcagacggttcttttgccaaacacggctacgcggctttggccgaattggattcaaacggcgacaacatcatcaacgcggcagacgccgcattccaatccctgcgtgtatggcaggatctcaatcaggacggcatttcccaagctaatgaattgcgtacccttgaagaattgggtattcaatctttggatctcgcctataaagatgtaaataaaaatctcggtaacggtaacactttggctcagcaaggcagctataccaaaacagacggtacaaccgcaaaaatgggggatttacttttagcagccgacaatctgcacagccgttttaaagataaagtggaactcactgccgaacaggcaaaagccgccaatcttgcgggcatcggccgtctgcgcgatttgcgcgaagctgccgcattgtccggcgatttggccaatatgctgaaagcttattctgccgccgaaactaaagaagcacagttggcattgttagataatttgattcacaaatgggcggaaaccgattcgaactggggcaaaaaatcgccaatgcgactttcaaccgattggacgcaaacggctaatgaaggtattgcactgacaccatcccaagtagcacaactaaaaaagaacgctttagtttccctttctgataaagctaaagcagctattgacgccgcccgcgaccgcattgccgtgcttgatgcctacacggggcaggattccaacacactctattacatgagcgaggaagatgcgcttaatatcgtcaaagtaaccaacgatacatacgaccatctcgccaaaaacatctaccaaaacctgttgttccaaacccgtttgcagccatatttgaatcaaatcagtttcaaaatggaaaatgatacgttcactttggattttagtggtcttgttcaagcatttaaccatgtcaaagaaactaatccgcaaaaagcttttgtggatttggccgagatgcttgcatatggcgaacttcgttcttggtatgaaggccgaagactaatgaccgattatgtggaggaggcaaaaaaagcaggtaaatttgaagattaccagaaagtgttgggtcaggagaccgttgcattattagctaaaacatcgggtacgcaagcagatgatatcctgcaaaatgtaggctttggtcataataaaaatgtttctttatatggtaatgacggcaacgacactctaatcggcggcgccggtaatgactatttggagggcggcagcggttcggatacttatgtcttcggcgaaggcttcggtcaggatacggtctataattacgactacgctaccggacgcaaagacatcatccgctttaccgacggtattacagccgatatgctgacttttacccgagagggcaaccatcttcttatcaaggcaaaagacggcagtggacaagtgactgttcagtcctatttccagaacgatggctcaggtgcttaccgtatcgatgagattcatttcgataacggcaaagtactggatgttgccactgtcaaagaactggtacagcaatccaccgacggttcggacagattgtatgcctaccaatccggaaataccttaaatggcggattgggcgatgactatctgtacggtgccgacggggatgacctgctgaatggtgatgcaggcaacgacagtatctacagtggcaatggcaatgatacgctcgatggaggagaaggcaacgacgccctgtacggctataatggtaacgatgcactgaatggtggcgaaggcaatgatcatttgaacggcgaagacggtaacgacactctaatcggcggtgcaggcaatgattacttggagggcggcagcggttcggatacttatgtcttcggcaaaggcttcggtcaggatgcggtctataattacgactacgctaccggacgcaaagacatcatccgctttaccgacggtattacagccgatatgctgacttttacccgagagggcaaccatcttcttatcaaggcaaaagacggcagtggacaagtgactgttcagtcctatttccagaacgatggctcaggtgcttaccgtatcgatgagattcatttcgataacggcaaagtactggatgttgccactgtcaaagaactggtacagcaatccaccgacggttcggacagattgtatgcctaccaatccggaaataccttaaatggcggattgggcgatgactatctgtacggtgccgacggggatgacctgctgaatggtgatgcaggcaacgacagtatctacagtggcaatggcaatgatacgctcgatggaggagaaggcaacgacgccctgtacggctataatggtaacgatgcactgaatggtggcgaaggcaatgatcatttgaacggcgaagacggtaacgacactctgatcggcggtgcaggcaatgattacttggagggcggcagcggttcggatacttatgtcttcggcgaaggcttcggtcaggatacggtctataattaccatgtggataaaaactctgacactatgcactttaaaggatttaaagcagcagatgttcattttatccgttccggaagtgatttggtgcttagcgcttctgaacaagacaacgtacgtatttccggatttttctatggtgaaaaccatcgtgtagatacatttgtctttgatgatgcagctatcagtaatccagattttgccaagtatattaatgctggcaataatttggtacagtctatgtctgtgttcggttctaatactgctgcgacaggaggaaatgtggatgccaatatacaatccgtacagcagccgttattggtaacgccatctgcataa

SEQ ID NO: 53378 - DNA, 291 bp, Neisseria meningitidis; identical to SEQ ID NO: 42259

SEQ ID NO: 53379 - DNA, 942 bp, Neisseria meningitidis; identical to SEQ ID NO: 42159

SEQ ID NO: 53380 - DNA, 378 bp, Neisseria meningitidis; identical to SEQ ID NO: 42651

SEQ ID NO: 53381 - DNA, 1056 bp, Neisseria meningitidis; identical to SEQ ID NO: 42767

SEQ ID NO: 53382 - DNA, 303 bp, Neisseria meningitidis; identical to SEQ ID NO: 43666

SEQ ID NO: 53383 - DNA, 228 bp, Neisseria meningitidis; identical to SEQ ID NO: 37977

SEQ ID NO: 53384 - DNA, 435 bp, Neisseria meningitidis; identical to SEQ ID NO: 43084

SEQ ID NO: 53385 - DNA, 717 bp, Neisseria meningitidis; identical to SEQ ID NO: 42480

SEQ ID NO: 53386 - DNA, 2748 bp, Neisseria meningitidis
atgcaacagcaacatttgttccgattaaatattttatgcctgtcgctgatgaccgcgctgcccgtttatgcagaaaatgtgcaagccggacaagcacaggaaaaacagttggataccatacaggtaaaagccaaaaaacagaaaacccgccgcgataacgaagtaaccggtttgggcaaattggtcaaaaccgccgacaccctcagcaaggaacaggtactcgatatccgcgacctgacgcgttacgaccccggcatcgccgtggtcgaacaggggcgtggcgcaagctcgggttattcgatacgcggtatggacaaaaaccgcgtttccttgacggtggacggcttggcgcaaatacagtcctacaccgcgcaggcggcattgggcgggacgaggacggcgggcagcagcggcgcaatcaatgaaatcgagtatgaaaacgtcaaagctgtcgaaatcagcaaaggctcaaactcggtcgaacaaggcagcggcgcattggcgggctcggtcgcatttcaaaccaaaaccgccgacgatgttatcggggaaggcaggcagtgggggattcagagtaaaaccgcctattccggcaaaaaccgggggcttacccaatccatcgcgctggcggggcgcatcggcggtgcggaggctttgctgatccacaccggccggcgcgcgggggaaatccgcgcccacgaagccgccggacgcggcgttcagagcttcaacaggctggtgccggttgaggataccaatcagtacgcaaatttcatcgttgaagaagaatgcgaaagcgggaattacgaaacgtgtaaagcgaatccgaaaaaagatgttgtcggcaaagacgaacgtcaaacggtttctacccgagactacacgggtcccaaccgctttctctccgatccgctttcatatgaaagccggtcgtggctgttccgcccgggttttcgttttgaaaacaaacggcactacatcggcggtatcctcgaacgcacgcaacaaactttcgacacgcgcgatatgacggttccggcattcctgaccaaggcggtttttgatgaaaataaaaaacaggcgggttctttgtccggcaacggcaaatatgcgggcaaccacaaatacggcggactgtttaccaacggcgaaaacggtgcgctggtgggcgcggaatacggtacgggcgtgttttacgacgagacgcacaccaaaagccgctacggtttggaatatgtctataccaatgccgataaagacacttgggcggattatgcccgcctctcttacgaccggcagggtatcggtttggataatcattttcagcagacgcactgttctgccgacggttcggacaaatattgccgtccgagtgccgacaagccgttttcctactacaaatccgatcgcgtgatttacggggaaagccacaggctcttgcaggcggcattcaaaaaatccttcgataccgccaaaatccgccacaacctgagcgtcaacctcggttttgaccgctttggctctaatctccgccatcaggattattattatcaaaatgccaaccgcgcctattcgtcgaatctgcccactcaaaacggcaatcaaaacatcagccccaacggcagccaagacaaaccctattgggtcagcataggcgggggaaatgtggttacggggcaaatttgccgcttgggcaataatacttatacggactgcacgccgcgcagcatcaacggcaaaagctattatgcggcagttcgggacaatgtccgtttgggcaggtgggcggatgtcggcgcggggttgcgctacgactaccgcagcacgcattcggacgacggcagcgtttccaccggcacgcaccgcaccctgtcttggaacgcgggtgtagtcctcaaacctttcacttggatggatttgacttaccgcacttcaaccggcttccgcctgccctcgttttcggaaatgtacggctggcggtcgggcgataaaataaaagccgtcaaaatcgatccggaaaaatcgttcaacaaagaagccggcatcgtgtttaaaggcgatttcggcaacttggaggcaagttggttcaacaatgcctaccgcgatttgattgtccggggttatgaagcgcaaattaaaaacggcaaagaagaagccaaaggcgacccggcttacctcaatgcccaaagcgcgcggattaccggcatcaatattttgggcaaaatcgattggaacggcgtatgggataaattgcccgaaggatggtattccacatttgcctataatcgtgtccgtgtccgagatattaaaaaacgcgcagaccgcaccgatattcaatcacacctgtttgatgccatccaaccctcgcgctatgtcgtcggcttgggctatgaccaaccggaaggcaaatggggggtgaacggtatgctgacttattccaaagccaaggaaatcacagagttgttgggcagccgggctttgctcaacggcaacagccgcaatacaaaagccaccgcgcgccgtacccgcccttggtatattgtggatgtgtccggttattacacgattaaaaaacacttcaccctccgtgcgggcgtgtacaacctcctcaaccaccgctatgttacttgggaaaatgtgcgacaaactgccggcggcgcagtcaaccaacacaaaaatgtcggcgtttacaaccgatatgccgcccccggccgcaactacacatttagcttggaaatgaagttttaa

SEQ ID NO: 53387 - DNA, 126 bp, Neisseria meningitidis; identical to SEQ ID NO: 42246

SEQ ID NO: 53388 - DNA, 2262 bp, Neisseria meningitidis
ttgaaagtaaccaaacgagacggaagattagaagccattgatttggataagattcaccgtgtcgtcacttgggcggcggacggattggaaaatgtttccgtgtcgcaggtcgagttgaaatcgcacatccagttctacaacggcatccgcaccgacgacatccacgaaaccatcatcaaagccgctgccgatttaatttcggaagataccccggactaccaataccttgccgcgcgtttggcgattttccatcttcgtaaaatagcctacggcgagtacgagccgccgcacctttacgaccacgttaaaaaacttaccgatgccggaaaatacgacaggcatatccttgaggattacagccgcgaagaatttgacgaactgaacgcctatatcgaccacgaacgcgatatgtccttttcctatgccgctgtcaaacagctcgaaggcaaatatctggtacagaaccgcgttacccgccaaatttacgaaacgccgcagtttttatatgttttggtggcgatgtgccttttcagcaaatacccgaaagaggcgcgcttgggttacgtcaaacggttttacgatgccgtttctacatttaaagtatcgctgccgactccgattatgagcggcgtgcgtacgcctacgcgccagttctcaagctgtgtgctgattgaatgcgacgatagtttggattccatcaatgccactaccagcgcgattgtgaaatacgtttcccagcgtgcgggcatcggcatcaatgccggacgtatccgcggtttggacagcgaaatccggggcggcgaagcgcggcataccggctgcattcccttctttaaaatgtttcaggcggcggtcaaatcctgttcgcaaggcggcgtgcgcggcggcgcggcaaccttgttctaccccttgtggcatatcgaagccgaaagcctgctggtgttgaaaaacaaccgcggtgtggaagacaaccgtatccgtcagcttgattacggcgtgcaaatcaaccgcctgctgtacacccgcctgattaagggcggcaacattacgctgttttcgcccaacgaggttccgggattgtacgaagcgttttttgccgaccaagacgaatttgagcggctctatacgaaatacgagcaagaccctgatatccgcaagcgcatcattccggctgccgacctgttttccacgctgatgcaggagcgtgccggaaccgggcgcatctacattcaaaacgtcgatcactgcaatacgcacagcccgttcgatccgcgcgtcgcgcctgttcatcagtccaacttgtgtatggaaatcgccctgccgaccaaaccgctggacaatatcaacgatccgaacggcgaaatcgccctgtgtacactgtctgcctttaacttgggcgcattaaacagcttggacgaattggaagggcttgccgacttgaccgttcgtgcgctcgatgcacttttagattatcagggatatccggtagaagccgcgcgtacctctactatgggccgccgttcgctcggcatcggcgtgattaactatgcttattatctggcgaaaaacggtgtccgctacagcgacggttccgcgctcggtctgacccaccgtacctttgaagccatacagtattacctgctcaaagcatcggcaaaccttgccaaagaatacggtgcgtgcacgctctttaaccaaaccgtttattcgcaaggcaaactgcccatcgacacttacaaaaaagatttggatgccgtctgcggcgagcctttgcattacgactgggaaagcctgcgtgccgaaatcgtcaaatacggcctgcgcaactctactctgaccgcgctcatgccgtctgaaaccagctctcaaatcgccaacgccaccaacggcatcgagccgccgcgcggattggtaacggtcaaagcatcgaaagacggcattttgaaacaagtcgtgccggagtttgaaaccctgaaaaatgcctatgaaaccctgtggcagcttcccggcaacgaaggctacctgaaacttgtcggcgtgatgcaaaaattcgtcgatcaatcgatttccgccaataccgcctacgacccgggcaaattcgaaggcggcaaagtttctatgaaacaaatgctcaaagacctgctgaccgcctacaaatacggcgtcaaaaccctgtactaccataacacccgcgacggtgcggacgatacgcagaccgatattcaggatgacggctgcgcgggcggggcttgtaagatttga

SEQ ID NO: 53389 - DNA, 1167 bp, Neisseria meningitidis
atgaaatgggcggctgttgcggcagtcgcggcggcagcggtttggggcggatggtcttatctgaagcccgagccgcaggctgcttatattacggaaacggtcaggcgcggcgacatcagccggacggtttctgcaacaggggagatttcgccgtccaacctggtatcggtcggcgcgcaggcatcggggcagattaagaaactttatgtcaaactcgggcaacaggttaaaaagggcgatttgattgcggaaatcaattcgacctcgcagaccaatacgctcaatacggaaaaatccaagttggaaacgtatcaggcgaagctggtgtcggcacagattgcattgggcagcgcggagaagaaatataagcgtcaggcggcgttatggaaggaaaacgcgacttccaaagaggatttggaaagcgcgcaggatgcgtttgccgccgccaaagccaatgttgccgagctgaaggctttaatcagacagagcaaaatttccatcaataccgccgagtcggaattgggctacacgcgcattaccgcaacgatggacggcacggtggtggcgattctcgtggaagaggggcagactgtgaacgcggcgcagtctacgccgacgattgtccaattggcgaatctggatatgatgttgaacaaaatgcagattgccgagggcgatattaccaaggtgaaggcggggcaggatatttcgtttacgattttgtccgaaccggatacgccgattaaggcgaagctcgacagcgtcgaccccgggctgaccacgatgtcgtcgggcggctacaacagcagtacggatacggcttccaatgcggtctactattatgcccgttcgtttgtgccgaatccggacggcaaactctccacggggatgacgacgcagaatacggttgaaatcgacggcgtgaaaaatgtgctgattattccgtcgctgaccgtgaaaaatcgcggcggcaaggcgtttgtgcgcgtgttgggtgcggacggcaaggcggcggaacgcgaaatccggaccggtatgagagacagtatgaataccgaagtaaaaagcgggttgaaagagggggacaaagtggtcatctccgaaataaccgccgccgagcaacaggaaagcggcgaacgcgccctaggcggcccgccgcgccgataa

SEQ ID NO: 53390 - DNA, 1113 bp, Neisseria meningitidis
atgaccgcaaaggaagaactgttcgcatggctgcgccatatgaaccaaaacaaaggttccgacctgttcgtgacaacccatttcccgcccgcaatgaagctggacggcaaaatcacccgcatcacggacgaaccgctgacggcggaaaaatgtatggaaatcgccttttcgattatgagtgcgaagcaggcggaagaattttcatcgaccaacgagtgcaacttcgccatcagcctgccggacaccagccgcttccgcgtcaatgcgatgatacagcgcggcgcgacggcgttggtattccgtacgattaccagcaagattcccaagtttgaaagcctgaacctgccgccagtcttgaaggatgtcgcgctgaaaaaacgcgggctggttatttttgtcggcggcaccggctcgggtaaatcgacttcgcttgcctcgcttatcgactaccgcaatgaaaattcgttcggacacatcatcaccatcgaagacccgatcgagtttgtccacgaacacaaaaactgcatcatcacccagcgcgaggtcggcgtggatacggaaaactggatggcggcgttgaaaaacacgctgcgtcaggcgcctgatgtcatccttatcggcgaaatccgtgaccgcgaaacaatggactacgccattgcctttgccgaaacggggcatttgtgtatggcgacgctgcacgccaacagcaccaatcaggcactcgaccgcatcatcaactttttccccgaggagcggcgcgaacaattgctgacggatttgtcgctcaaccttcaggcgtttatttcgcaacgcctcgttccgcgagacggcggcaagggcagggtggcggcagtcgaggtgctgctcaattcgcccctgatttcggagttgattcacaacggcaacatccatgaaatcaaagaagtgatgaaaaaatccactaccctgggtatgcagaccttcgatcaacacctttaccaattgtatgaaaaaggcgatatttccctgcaagaagcattgaaaaatgccgattccgcacacgatttgcgtttggcggtacagttgcgcagccgccgcgcgcaaagttccagccccgatttggaactgctctga

SEQ ID NO: 53391 - DNA, 174 bp, Neisseria meningitidis; identical to SEQ ID NO: 50939

SEQ ID NO: 53392 - DNA, 1044 bp, Neisseria meningitidis
atgcagattaccgacttactcgccttcggcgctaaaaacaaagcatccgaccttcacctgagttcgggcatatcccctatgattcgggttcacggcgatatgcggcgcatcaaccttcccgaaatgagcgcggaagaggtcggtaatatggtaacttcggtgatgaacgaccaccagcggaaaatctaccagcaaaacttggaagtcgacttctcgttcgaactgcccaacgtcgcccgattccgcgtcaacgccttcaacatcggccgcggtcccgccgccgtattccgcaccattcccagcaccgtcttatcgctggaagaattgaaagccccgagcattttccaaaaaatcgcagaatcgccgcgcggcatggttttggttaccggccctaccggttcgggcaaatcgaccacgcttgccgcgatgatcaactacatcaacgaaacccagccggcacacatcctgaccatcgaagacccgattgaattcgtccaccaaagcaaaaaatccctgattaaccagcgcgagctgcaccagcacaccctcagcttcgccaacgcgctgcgttccgcattgcgcgaagaccccgacgttatccttgtcggcgagatgcgcgacccagaaaccatcggcttggcactgaccgccgccgaaaccggacacttggttttcggcacgctgcacacgaccggcgcagcaaaaaccgtcgaccgtattgtggacgtattcccggcgggagaaaaagaaatggtgcgctctatgctgtccgaatcgctgaccgccgtcatctcccaaaacctgctgaaaacgcacgacggcaacggccgtgtcgcctcgcacgaaatcctgattgccaaccccgccgtccgcaacctcatccgcgaaaacaaaatcacgcagattaactccgtcctgcaaaccgggcaggcgagcggtatgcagacaatggaccaatcgctgcaatcgctggtgcgccaagggctgatcgcaccggaagtcgcacgcagacgcgcgcaaaacagcgaaagtatgagtttctga

SEQ ID NO: 53393 - DNA, 1422 bp, Neisseria meningitidis; identical to SEQ ID NO: 42152

SEQ ID NO: 53394 - DNA, 1314 bp, Neisseria meningitidis; identical to SEQ ID NO: 42733

SEQ ID NO: 53395 - DNA, 1350 bp, Neisseria meningitidis; identical to SEQ ID NO: 42880

SEQ ID NO: 53396 - DNA, 1002 bp, Neisseria meningitidis
atgcagtttccttaccgcaatgttccggcttcgcgtatgcgccgtatgcgcagggacgatttttcacgccgcctgatgcgcgaacacacgctgaccgccgatgatttgatttatccggtgttcgtattggaggggtcggcgcgcgaggaggatgtgccttctatgccgggtgtgaagcgtcaaagtttggacaggctgctgtttacggcggaagaggcggtaaagctcggtattccgatgttggcactgttccccgtggttacggcaaacaaaaccgagcgtgcgcaggaggcgtacaatcccgaaggactcgtgccgtcaactgtccgcgccttgcgcgagaggtttcccgaactgggcattatgacggatgtcgcgctcgatccttatacggttcacggtcaggacgggctgacggacgaaaacggttatgtgatgaacgatgaaaccgtagaggttttggtcaagcaggctttgtgccacgctgaagcgggcgcgcaggtggttgccccttccgatatgatggacgggcgtatcggtgcgattcgcgaggcgttggaggatgccgggcatatccatacgcggattatggcgtattctgccaaatatgcttcggcgttttacgggccgttccgcgatgcggtgggcagttcgggcaatttgggcaaggcggacaagaaaacctaccagatggatccggcaaataccgatgaggcgctgaatgaagtggcgctcgatattcgggaaggtgcggatatggtgatggtgaagcccggtttaccgtatttggacgttgtccgccgcgtgaaggacgagttcggcgtaccgacttatgcctatcaggtttcgggagaatacgcgatgttgcaggcagcgattgccaacggctggctggacggcggcaaagtggttttggaaagcctgctggcattcaaacgtgcgggtgcggacgggattttgacctattacgctattgaggcggcaaagatgttgaagcgttga

SEQ ID NO: 53397 - DNA, 294 bp, Neisseria meningitidis; identical to SEQ ID NO: 42632

SEQ ID NO: 53398 - DNA, 1386 bp, Neisseria meningitidis; identical to SEQ ID NO: 43882

SEQ ID NO: 53399 - DNA, 966 bp, Neisseria meningitidis
atgagctacacgcaactgacccaaggcgaacgataccacatccaatacctgtcccgccactgcaccgtcaccgaaatcgccaaacagctgaaccgccacaaaagcaccatcagccgcgaaatcagacggcaccgcacccaagggcagcaatacagcgccgaaaaagcccagcggcaaagccagactatcaaacagcgtaagcgacaaccctataagctcgattcgcagctgattcagcacatcgacacccttatccgccgcaaactcagtcccgaacaagtatgcgcctacctgtgcaaacaccaccagatcacgctccaccacagcaccatttaccgctaccttcgccaagacaaaagcaacggcagcacgttgtggcaacatctcagaatatgcagcaaaccctaccgcaaacgctacggcagcacatggaccagaggcaaagtacccaaccgtgtcggcatagaaaaccgacccgctatcgtcgaccagaaatcccgtatcggcgattgggaagccgacaccattgtcggcaaaggacagaaaagcgcattattgaccttggtcgaacgcgttacccgctacaccatcatctgcaaattggatagcctcaaagccgaagacactgcccgggcagctgttagggcattaaaggcacataaagacagggtgcacaccatcaccatggataacggcaaagagttctaccaacacaccaaaataaccaaagcattgaaagcggagacttatttttgtcgcccttaccattcttgggagaaagggctgaatgagaacaccaacggactcatccggcaatacttccccaaacaaaccgatttccgtaacatcagtgatcgggagatacgcagggttcaagatgagttgaaccaccgaccaagaaaaacacttggctacgaaacgccaagtgttttattcttgaatctgttccaaccactaatacactag

SEQ ID NO: 53400 - DNA, 855 bp, Neisseria meningitidis
atggcagaaattactgcaaaaatggttgccgacctgcgcgccgctaccggcctgggcatgatggaatgcaaaaaagccttggttgaagccgaaggcaacttcgacaaagccgaagaaatcctgcgtatcaaatccggtgcgaaagccggtaaactggccggccgtaccgctgccgaaggcgtattggcttacgcgatcaacggcaatgtcggcgcattggtcgaagtaaactgcgaaaccgacttcgttgctaaagacgcgggcttcgtagaatttgccaacttcgttgcgaaaactgctgccgagaaaaaaccggcttctgttgaagaactgagcgaactggttgaagcagaacgcaaagccatcatcgccaaattgggcgagaatatgtctgtccgtcgcttccaagtgatcgacactgccaaccaactggttgcctacatccacggcgcattggcgaccgaaggcgtattggttgagtacaaaggctctgaagacgtagcacgcaaaatcggtatgcatattgttgccgctaaaccacaatgcgtaagcgaagccgaagtagatgccgaaaccgttgaaaaagaacgccacatctacaccgagcaagccatcgcttccggcaaacctgccgacatcgccgctaaaatggttgaaggccgcatccgtaaattcttggctgaaatcactctgaacggccaagcattcgtgatgaaccccgatcaaactgttgcccaattctctaaagaaaacggcactgaagtgatcagcttcgtacgctacaaagtaggcgatggtattgagaaaaaagccgtcgattacgcagccgaagttgctgccgctgctaaagtgtaa

SEQ ID NO: 53401 - DNA, 495 bp, Neisseria meningitidis
atgaaaaagaacatattggaattttgggtcggactgttcgtcctgattggcgcggcggcggttgcctttctcgctttccgcgtggccggcggtgcggcgttcggcggttcggacaaaacttacgccgtttatgccgatttcggcgacatcggcggtttgaaggtcaatgcccccgtcaaatccgcaggcgtattggtcgggcgcgtcggcgctatcggacttgacccgaaatcctatcaggcgagggtgcgcctcgatttggacggcaagtatcagttcagcagcgacgtttccgcgcaaatcctgacttcgggacttttgggcgagcagtacatcgggctgcagcagggcggcgacacggaaaaccttgctgccggcgacaccatctccgtaaccagttctgcaatggttctggaaaaccttatcggcaaattcatgacgagttttgccgagaaaaatgccgacggcggcaatgcggaaaaagccgccgaataa

SEQ ID NO: 53402 - DNA, 1224 bp, Neisseria meningitidis; identical to SEQ ID NO: 42717

SEQ ID NO: 53403 - DNA, 693 bp, Neisseria meningitidis; identical to SEQ ID NO: 40219

SEQ ID NO: 53404 - DNA, 1185 bp, Neisseria meningitidis
atgacaccacaagtcctgaccatattaggcagtaccggcagcataggcgaaagcacgctggacgttgtctcccgccaccccgaaaaattccgcgtattcgcgctggcagggcataagcaggtcgagaaattggcggctcaatgtcaaacgttccaccccgaatatgccgtcgttgccgatgcggaacacgccgcccggcttgaagccctgttgaaacgcgacggcacggcgactcaggttttacacggcgcgcaggcattggttgacgttgcctctgccgacgaagtcagcggtgtcatgtgcgccatcgtcggggcggtggggctgccttccgcgctcgcagcggcgcaaaaaggcaaaaccatttatctggcaaacaaagaaacgctggtggtttccggcgcgttgtttatggaaaccgcccgtgcaaacggcgcggcagtgctgcccgtcgacagcgaacacaacgccgttttccaagttttgccgcgcgattacgccggccgtctgaacgaacacggcatcgcttcgattatcctgaccgcttccggcggcccgtttctgaccgccgatttaaacacgttcgaccgcattacgcccgcccaagcggtcaaacaccccaattggcgtatgggacgcaaaatctccgtcgattccgccaccatgatgaacaaaggtttggagctgattgaagcgcattggctgttcaactgtccgcccgacaaactcgaagtcgtcatccatccgcaatccgtgatacacagcatggtgcgctaccgcgacggctccgtgctggcgcaactgggcaatcccgatatgcgaacgcccatcgcttattgtttgggtttgcccgagcgcatcgattcgggtgtcggcgacctggatttcgacgcattgtccgcgctgaccttccaaaagcccgactttgaccgcttcccctgcctgaggctcgcctatgaagccatgaacgcaggcggagccgcgccctgcgtattgaacgccgccaacgaagccgccgtcgccgcctttttggacggacagattaagtttaccgacattgccaaaaccgtcgcccactgtcttgcacaagacttttcagacggcataggcgatataggggggctcttggcgcaagatgcccggacacgcgcacaagcgcgagcatttatcggcacactgcgctga

SEQ ID NO: 53405 - DNA, 768 bp, Neisseria meningitidis
atgagaccatatgctactaccatttatcaactttttattttgtttattgggagtgtttttactatgacctcatgtgaacctgttaatgaacaaaccagtttcaacaatcccgagccaatgacaggatttgaacatacggttacatttgattttcagggcaccaaaatggttatcccctatggctatcttgcacggtatacgcaagacaatgccacaaaatggctttctgacacgcccgggcaggatgcttactccattaatttgatagagattagcgtctattacaaaaaaaccgaccaaggctgggttcttgagccatacaaccagcaaaacaaagcacactttatccaatttctacgcgacggtttggatagcgtggacgatattgttatccgaaaagatgcgtgtagtttaagcacgactatgggagaaagattgcttacttacggggttaaaaaaatgccatctgcctatcctgaatacgaggcttatgaagataaaagacatattcctgaaaatccatattttcatgaattttactatattaaaaaaggagaaaatccggcgattattactcatcggaactatcataggtatggagagaacgattacagcactagcgtaggttcctgtattaacggtttcacggtacggtattacccgtttattcgggaaaagcagcagctcacacagcaggagttggtaggttatcaccaacaagtagagcaattggtacagagttttgtaaacaatccaagtaaaaaataa

SEQ ID NO: 53406 - DNA, 405 bp, Neisseria meningitidis; identical to SEQ ID NO: 40476

SEQ ID NO: 53407 - DNA, 831 bp, Neisseria meningitidis; identical to SEQ ID NO: 39589

SEQ ID NO: 53408 - DNA, 864 bp, Neisseria meningitidis
atgttcgagccgctttggaacaataaatacatcgaaagcgtgcagctgaccatcgccgagcagttgggcgtggaagaacgcggcgagttttacgacattaccggcgcgttgcgcgatatggtgcaaaaccacttgatgcaaatgctgtgcatgactgcgatggaagcccccgccagcttggatgccgacgcggtgcgcgatgaaaaagtcaaagtcatcaagtcattgaagccgctgaccgtcgaatctgtcaatgaaaatgtcgtgcgcggacaatataccgccgccaaaggcatgaacggctatcttgaagaaatcaacgttccgcaagacagctttaccgaaacctacgtcgccattaaagccgaaatcgaaaacgaacgctggaagggcgttcccttctacctgcgtaccggcaagcgcatggcgggcaaagtggcggaaatcgttttgaacttcaaagatttgaacagccatatttttgaaggcagtcgcaccgcgcccaaccggctcgttatcgagttgcaaccatatgaatccgtgcgcctctatacgcagatgaaaaccccgggggcaggaaataaggtcgaaaccgtgccgctggcaaccgatttgggcaaagcattggaaagccgccgcgcggaagcttacgagcgcctgctgctggatgtgattaacggcaaactcgctttgtttaaccgccgcgacgaacttgaagccgcgtgggaatatgtgatgccgattttggaaaactggacaaataacaccacgccgccgcacggctatggcgcacactcgtgggggcctgaagccgcgcgcgaactattggcgcgcgacggacacaagtggcacgaagagcagtaa

SEQ ID NO: 53409 - DNA, 564 bp, Neisseria meningitidis
atgcgccatttggaaaacaacggttatgcgaacgttgccggattggaacgcatcctcgccgtcaaaaccgacaattacaaagaaaaagaaaacctgctccatgaaattttcagcaaaagcaggataggcgataccgaattgttcgccgtggacgaaaaccttgtgaaacgtttgtttttatcgcttcgcggcgaaatcgtgttcccgaaaaacgaaacggcggaatcggaatttgaaaaaagcgtccacgaacgcaggcaggaagggaatgccgggtcaggccgcaaacaactgcttgatttggtacggcgcggacaccgggaatacccttacgcgctgccccggcttttggcgggcgcggcatcctacaagccgaaaaaatcgaaaatccgcctttttaaagaagcatatttcggcaaaagcggcacgaggctgaccgacgaaattgcagacggcatccatatttacacctgtttttcgcgggcggatttggaaaaagcctattccgaatatttggaacttttcaaatccgaatcggatgccgaaggcagaaagccgcagtaa

SEQ ID NO: 53410 - DNA, 408 bp, Neisseria meningitidis
ttggccgaaggtcaaaaatcagccgtcacagagtattacctgaatcacggcgaatggcccggcaacaacacttctgccggcgtggcatcttcttcaacaatcaaaggcaaatatgttaaggaagttacagtcgcaaacggcgtcattaccgccacaatgctttcaagcggcgtaaacaaagaaatccaaggcaaaaaactctccctgtgggccaagcgtcaagacggttcggtaaaatggttctgcggacagccggttacgcgcaccgacgccaaagccgacaccgtcgccgccgccgccaagaccgccgacaacatcaacaccaagcacctgccgtcaacctgccgcgacgcttcatctgtcgtttgcatagaaacaccacctacggctttctataaaaatacctaa

SEQ ID NO: 53411 - DNA, 330 bp, Neisseria meningitidis; identical to SEQ ID NO: 43453

SEQ ID NO: 53412 - DNA, 312 bp, Neisseria meningitidis; identical to SEQ ID NO: 43099

SEQ ID NO: 53413 - DNA, 465 bp, Neisseria meningitidis; identical to SEQ ID NO: 38444

SEQ ID NO: 53414 - DNA, 1140 bp, Neisseria meningitidis; identical to SEQ ID NO: 43070

SEQ ID NO: 53415 - DNA, 546 bp, Neisseria meningitidis; identical to SEQ ID NO: 43217
